United States Patent Application Publication US 2018/0126003 A1 - sequence listing, part 117

SEQ ID NO: 205645 - DNA, 14103 bp, Artificial Sequence
  derived and/or modified sequence
atggccaacgtgcaggtggccgtgcgggtgcggcccctgagcaagcgggagaccaaggagggcggccgcatcatcgtggaggtggatggcaaggtggccaagatccggaacctgaaggtggacaacagaccagatggctttggagacagccgggagaaggtgatggcctttggatttgactactgctactggagcgtgaaccctgaggacccccagtatgccagccaggatgtggtgttccaggacctgggcatggaggtgctgtctggagtggccaagggctacaacatctgcctgtttgcctacggccagacaggcagcggcaagacctacaccatgctgggcaccccagcctctgtgggcctgaccccccgcatctgtgagggcctgtttgtgcgggagaaggactgtgccagcctgcccagcagctgccgcatcaaggtgtccttcctggagatctacaatgaaagagtgcgggacctgctgaagcagagcggccagaagaagagctacaccctgcgggtgcgggagcaccctgagatgggcccctacgtgcagggcctgagccagcacgtggtgaccaactacaagcaggtgatccagctgctggaggagggcatcgccaaccgcatcacagctgccacccacgtgcatgaggccagcagccgcagccacgccatcttcaccatccactacacccaggccatcctggagaacaacctgcccagcgagatggccagcaagatcaacctggtggacctggccggcagcgagagagctgaccccagctactgcaaggacagaattgctgagggcgccaacatcaacaagagcctggtgaccctgggcatcgtcatcagcaccctggcccagaacagccaggtgttcagcagctgccagagcctgaacagctctgtgtccaatggaggagacagcggcatcctgagcagccccagcggcaccagcagtggaggagcccccagccggcggcagagctacatcccctacagagattctgtgctgacctggctgctgaaggacagcctgggcggcaacagcaagaccatcatggtggccaccgtgtccccagcccacaccagctacagcgagaccatgagcaccctgcgctatgccagcagcgccaagaacatcatcaacaagccccgggtgaatgaagatgccaacctgaagctgatccgggagctgcgggaggagattgaaaggctgaaggccctgctgctgagctttgagctgaggaacttcagcagcctgagtgatgagaacctgaaggagctggtgctgcagaatgagctgaagattgaccagctgaccaaggactggacccagaagtggaatgactggcaggccctgatggagcactacagcgtggacatcaacagaagaagagctggggtggtgattgacagcagcctgccccacctgatggccctggaggatgatgtgctgagcactggagtggtgctgtaccacctgaaggagggcaccaccaagattggaagaattgacagcgaccaggagcaggacatcgtgctgcagggccagtggattgagcgggaccactgcaccatcaccagcgcctgtggggtggtggtgctgcggcctgcccggggggcccgctgcaccgtgaatggccgggaggtgacagccagctgccgcctgacccagggcgccgtcatcaccctgggcaaggcccagaagttccgcttcaaccaccctgctgaggccgctgtgctgcggcagaggcggcaggtgggggaggccgccgccggccggggcagcctggagtggctggacctggatggagacctggccgccagccggctgggcctgagccccctgctgtggaaggagcggcgggccctggaggagcagtgtgatgaggaccaccagaccccaagagatggagagaccagccaccgggcccagatccagcagcagcagagctatgtggaggacctgcggcaccagatcctggccgaggagatccgggccgccaaggagctggagtttgaccaggcctggatcagccagcagatcaaggagaaccagcagtgcctgctgcgggaggagacctggctggccagcctgcagcagcagcagcaggaggaccaggtggccgagaaggagctggaggcctctgtggccctggatgcctggctgcagacagatcctgagatccagcccagcccctttgtgcagagccagaagagggtggtgcacctgcagctgctgcggcggcacaccctgcgggctgctgagagaaatgtgcggaggaagaaggtgtccttccagctggagcgcatcatcaagaagcagaggctgctggaggcccagaagaggctggagaagctgaccaccctgtgctggctgcaggatgacagcacccaggagcccccctaccaggtgctgagcccagatgccaccgtgcccaggcctccctgccgcagcaagctgaccagctgcagcagcctgagcccccagaggctgtgcagcaagcacatgccccagctgcacagcatcttcctgtcctgggaccccagcaccaccctgccccccaggccagaccccacccaccagaccagcgagaagaccagcagcgaggagcacctgccccaggccgccagctacccagccaggacaggctgcctgaggaagaatggcctgcacagcagcggccacggccagccctgcacagcccgggccgccctggccaggaaaggagccagcgccccagatgcctgcctgaccatgagccccaacagcgtgggcatccaggagatggagatgggcgtgaagcagccccaccagatggtgtcccagggcctggccagcctgaggaagagcgccaacaagctgaagcccaggcatgagcccaagatcttcaccagcaccacccagaccaggggggccaagggcctggccgaccccagccacacccaggccggctggaggaaggagggcaacctgggcacccacaaggccgccaagggggccagctgcaacagcctgtacccccacggcccccggcagacagctggccacggcaaggctgtgaagaccttctggacagagtacaagccacccagccccagccgggccagcaagaggcaccagagggtgctggccaccagggtgaggaacatcaccaagaagagcagccacctgcccctgggcagccccctgaagaggcagcagaacacccgggaccctgacaccatggtgcccctgacagacttcagccctgtgatggaccacagccgggagaaggacaatgacctgagtgacacagacagcaactacagcctggacagcctgagctgtgtgtatgccaaggccctgattgagcccctgaagccagaggagaggaagtgggacttccctgagccagaaaattctgagagtgatgacagccagctgtctgaggacagcctggccgagaagcgctaccagagccccaagaaccggctgggcggcaaccggcccaccaacaacagaggccagcccaggaccaggacccgggcctctgtgcggggcttcaccgctgccagtgacagcgacctgctggcccagacccaccgctccttcagcctggacagcctgattgatgctgaggaggagctgggggaggaccagcaggaggagcccttccctggcagcgcagatgagatccccacagagaccttctggcacctggaggacagcagcctgcctgtgatggaccaggaggccatctgccgcctgggccccatcaactacagaacagctgcccggctggatgctgtgctgcccatgagcagcagcttctacctggacccccagttccagccccactgtgagctgcagccccactgtgagctgcagccccactgtgagctgcagccccactgtgagcaggccgagagccaggtggagcccagctacagcgagcaggccgacagcctgcagggcatgcagctgagccgggagagccccctgatgtccatggacagctggttcagctgtgacagcaagatcaaccccagcagccccccaggcatcgtgggcagcctgtgccccagcccagacatgcaggagttccacagctgcaagggggagcggcccggctactggcccaacacagaggagctgaagcccagtgatgctgagaccgtgctgccctacagcagcaagctgcaccagggcagcacagagctgctgtgcagcgccagagatgagcacacagccagcgctgctgacaccagccggctgagcctgtggggcatccagaggctcatccagcccggggctgatggcaccttccagggccgctgcatcccagacatgacccagcagggcagcagcgaggccagccacaacagctctgtgtccaatgtgctggccgccagcgccaccaccctgacccacgtgggcagcacccatgagcgggactggagcgccctgcagcagaagtacctgctggagctgagctgccctgtgctggaggccatcggggcccccaagccagcctacccctacctggaggaggacagcggcagcctggcccaggccagcagcaagggcggggacaccctgctgcctgtgggcccccgggtgagcagcaacctgaacctgaacaacttccctgtgcacctgagccgcatccggcggctgcgggcagagaaggagcaggacagcctgaatgccaagctggagggcgtgtctgacttcttcagcaccagcgagaaggaggccagctatgatgagacctacagcgctgacctggagagcctgagcgccagccgcagcaccaatgcccaggtgtttgccacagaaaatgccatcccagacagcatgacagaggcctgtgaggtgaagcagaacaacctggaggagtgcctgcagagctgcaggaagccaggcctgatgaccagcagtgatgaggacttcttccagaagaatgcctgccacagcaatgtgaccacagccaccaaggctgaccactggagccagggctgggcccccctgaggaagaacagcgctgtgcagcccggccagctgagcccagacagccactaccccctggaggaggagaagacagactgccaggagagcagcaaggaggccgtgcggcggcacatcaacgtgtcctttgccctgcccagcggccctgagctgtacctgcacagcgccccctggaaccccctgagcagcagcctgcagccccccctgctggagaccttctacgtgaccaagagcagagatgccctgacagaaacagccctggagatcccagcctgccgggaggtgcgggtgcccagccccccaccccgggaggcctggggcttcggccacaaccaccaggccctgcagggcgcctacctgaagaacaacctgcctgtgctgctgcagaaccagaacagcaagatcgccagcagccagcaggtgacagctgagatccctgtggacctgaacacccgggaggtgatccgggagagcggcaagtgccccggcaacatcacagaggagagccatgacagcgtgtacagctctgtgacccagaacagacacttcctgcccagcaccagcaccaaggtgtgtgaatttgagaaccaggtggtgatcctgaacaagaagcacagcttccctgccctggagggcggggaggtgacagcccagagctgctgcggggccagcagtgacagcacagagagcggcaagagcctgctcttccgggagagcgaggcccgggaggaggaggagctggaccagaacacagtgctgcggcagaccatcaacgtgtccctggagaaggacatgcctggagagagcgctgtgtccctgaagagccgctctgtggaccggcgggtgagcagccctgtgatggtggcccagggcggcggccccacccccaagtgggagggcaagaatgagaccggcctgctggagaagggcctgcggcccaaggacagcagcgaggagttcaagctgcccggcaccaagccagcctatgagcgcttccagctggtggcctgcccccaggagaggaaccccagcgagtgcaagagccaggagatgctgaaccccaaccgggagcccagcggcaagaagcagaacaagagggtgaacaacacagatgagatggcccggctcatccgctctgtgatgcagctggagaatggcatcctggagattgagagcaagcagaacaagcaggtgcacgccagccacaccccaggcacagacaaggagctggtgttccaggaccagaaggagcaggagaagacagaccacgccttccggccagacagcagcggcaaccccctgcccagcaaggaccagcccagcagcccccggcagacagatgacacagtgttccgggacagcgaggccggggccatggaggtgaacagcatcggcaaccacccccaggtgcagaagatcacccccaaccccttccgcagccgggagggcgtgcgggagagcgagcctgtgcgggagcacacccaccctgctggcagtgacaggcctgcccgggacatctgtgacagcctgggcaagcacaccacctgccgggagttcaccaacaccagcctgcacccccagaggatgaaggccctggcccgggccctgcccctgcagccccggctggagaggagcagcaagaacaacggccagtttgtgaaggccagcgccagcctgaagggccagccctggggcctgggcagcctggaggagctggagaccgtgaagggcttccaggagagccaggtggccgagcacgtgagcagcagcaaccaggaggagcccaaggcccagggcaaggtggaggagatgcccatgcagagaggaggcagcctgcaggaggagaacaaggtgacccagaagttccccagcctgagccagctgtgccgggacaccttcttccggcaggagaccgtgagccccctgctgagcaggacagagttctgcacagcccccctgcaccaggacctgagcaacaccctgcccctgaacagcccccgctggccccggcgctgcctgcacgtgcctgtggccctgggcatcagcagcctggactgtgtgctggacctgaccatgctgaagatccacaacagccccctggtgactggagtggagcaccaggaccagagcacagagaccaggagccacagccctgagggcaatgtgcggggccgcagcagcgaggcccacacagcctggtgtggctctgtgcgctccatggccatgggcagccacagccagagcggcgtgcctgagagcatccccctgggcacagaagatcgcatcagcgccagcaccagcccccaggaccacggcaaggacctgcgcatcaccctgctgggcttcagcaccagcgaggactttgccagcgaggccgaggtggccgtgcagaaggagatccgggtgagcagcctgaacaaggtgagcagccagcctgagaagagggtgtccttcagcctggaggaggacagcgaccaggccagcaagccccggcagaaggccgagaaggagacagaagatgtgggcctgaccagcggcgtgtccctggcccctgtgtccctgccccgggtgcccagccctgagccccggctgctggagcccagcgaccacgcctccatgtgcctggccatcctggaggagatccggcaggccaaggcccagaggaagcagctgcatgactttgtggcccggggcaccgtgctgagctactgtgagaccctgctggagccagaatgtagcagccgggtggccggccggccccagtgcaagcagattgaccagagcagcagtgaccagaccagaaatgaaggagaggcccctggcttccacgtggccagcctgtctgctgaggccggccagattgacctgctgcctgatgagaggaaggtgcaggccaccagcctgtctgctgacagctttgagagcctgcccaacacagaaacagaccgggagccctgggaccctgtgcaggccttcagccatgctgccccagcccaggacaggaagagaagaactggagagctgcggcagtttgctggggccagcgagcccttcatctgccacagcagcagcagcgagatcatcgagaagaagaaggatgccaccaggacccccagcagcgctgaccccctggccccagacagccccaggagcagcgcccctgtggaggaggtgagaagagtggtgtccaagaaggtggtggccgccctgcccagccaggccccctatgatgacccccgggtgaccctgcacgagctgagccagagcgtgccccaggagacagctgagggcatccccccaggcagccaggacagcagccctgagcaccaggagcccaggaccctggacaccacctatggagaggtgtctgacaacctgctggtgacagcccagggcgagaagacagcccactttgagagccagagcgtgacctgtgatgtgcagaacagcaccagcgccagcggccccaagcaggaccacgtgcagtgcccagaggccagcacaggctttgaggagggccgggccagccccaagcaggacaccatcctgcccggggccctgaccagggtggccctggaggcccccacccagcagtgtgtgcagtgcaaggagagcgtgggcagcggcctgacagaggtgtgccgggccggcagcaagcacagccggcccatccccctgcctgaccagaggcccagcgccaaccctgggggcatcggggaggaggccccctgccgccacccccgggaggccctggatggccctgtgttcagcaggaaccctgagggcagcaggaccctgagccccagccggggcaaggagagcaggaccctgccctgccggcagccctgcagcagccagcctgtggccacccacgcctacagcagccacagcagcaccctgctgtgcttcagagatggagacctgggcaaggagcccttcaaggccgccccccacaccatccaccccccctgtgtggtgcccagccgggcctatgagatggatgagaccggggagatcagccggggcccagatgtgcacctgacccacggcctggagcccaaggatgtgaaccgggagttccggctgacagagagcagcacctgtgagcccagcacagtggccgctgtgctgagccgggcccagggctgccgcagccccagcgccccagatgtgaggacaggcagcttcagccacagcgccacagatggctctgtgggcctcatcggcgtgcctgagaagaaggtggccgagaagcaggccagcacagagctggaggccgccagcttccctgctggcatgtacagcgagcccctgcggcagttccgggacagctctgtgggggaccagaatgcccaggtgtgccagaccaaccctgagcccccagccaccacccagggcccccacaccctggacctgtctgagggcagcgctgagagcaagctggtggtggagccccagcacgagtgcctggagaacaccacccgctgcttcctggagaagccccagttcagcacagagctgcgggaccacaaccggctggacagccaggccaagtttgtggcccggctgaagcacacctgcagcccccaggaggacagcccctggcaggaggaggagcagcaccgggaccaggccagcggcggcggggagggctttgcccagggcgtgaaccccctgcctgatgaagatggcctggatggctgccagatcctggatgctggccgggaggaggtggccgtggccaagccccctgtgtccaagatcctgagccagggcttcaaggaccctgccaccgtgtccctgcggcagaatgagaccccccagcctgctgcccagaggagcggccacctgtacacaggccgggagcagcctgcccccaaccaccggggcagcctgcctgtgaccaccatcttcagcggccccaagcacagccgcagcagccccaccccccagttctctgtggtgggcagcagccgcagcctgcaggagctgaacctgtctgtggagccccccagccccacagatgaggacacccagggccccaaccggctgtggaacccccacctgcggggctacagcagcggcaagtctgtggcccggaccagcctgcaggccgaggacagcaaccagaaggccagcagccggctggatgatggcaccacagaccaccgccacctgaagccagccaccccaccctaccccatgcccagcaccctgagccacatgcccaccccagacttcaccacctcctggatgagcggcaccctggagcaggcccagcagggcaagcgggagaagctgggcgtgcaggtgcggcctgagaactggtgcagccagatggacaagggcatgctgcacttcggcagcagtgacatcagcccctatgccctgccctggaggcctgaggagcccgcccgcatctcctggaagcagtacatgagcggcagcgctgtggatgtgtcctgcagccagaagccccagggcctgaccctgagcaatgtggcccgctgcagctccatggacaatggcctggaggaccagaacagccccttccacagccacctgagcacctacgccaacatctgtgacctgagcaccacccacagcagcacagaaaatgcccagggcagcaatgaggcctgggaggtgttccggggcagcagcagcatcgccctgggggacccccacatccccaccagccctgagggcgtggcccccaccagcggccatgaccggcggccccagttccggggccccagcggggaggccgactgcctgcggagcaagccacccctggccaagggcagcgctgctggccctgtggatgagatcatgctgctgtaccccagcgaggccggctgccctgtgggccagaccaggaccaacacctttgagcagggcacccagaccctgggcagccgccgccactggagcagcacagacatcagctttgcccagcctgaggccagcgctgtgtctgcctttgacctggcctcctggacctccatgcacaacctgagcctgcacctgagccagctgctgcacagcaccagcgagctgctgggcagcctgagccagccagatgtggcccggcgggagcagaacaccaagagggacatcccagacaaggccccccaggccctgatgatggatggcagcacccagaccaccgtggatgagggcagccagacagacctgaccctgcccaccctgtgcctgcagaccagcgaggccgagccccagggcgccaacgtcatcctggagggcctgggcagtgacaccagcacagtgtcccaggaggagggagatgtgcctggggtgccccagaagcgggaggccgaggagacagcccagaagatggcccagctgctgtacctgcaggaggagagcaccccctacaagccccagagccccagcatccccagcagccacctgcgcttccagaaggcccctgtgggccagcacctgcccagcgtgagccccagcgtgtctgatgccttcctgccccccagcagccagcctgaggagagctactgcctggtggtgagcagccccagccccagcagcccccacagccctggcctcttccccagcaccagcgagtacccaggggacagccgggtgcagaagaagctgggccccaccagcgccctgtttgtggaccgggccagcagccccatcctgaccctgagcgccagcacccaggagcccggcctgagccctggcagcctgaccctgagcgcccccagcacccaccctgtggagggccaccagaagctggacagcagcccagaccctgtggatgcccccaggacccccatggacaactacagccagaccacagatgagctgggcggcagccagaggggccgcagcagcctgcagaggagcaatggccgctccttcctggagctgcacagcccccacagcccccagcagagccccaagctgcagttctccttcctgggccagcacccccagcagctgcagcccaggaccaccatcggcgtgcagagccggctgctgcccccacccctgcggcacaggagccagaggctgggcaacagctttgtgcctgagaaggtggccagccctgagcactgccccctgagcggccgggagcccagccagtggcagagcaggacagaaaatggaggagagagcagcgccagccctggagagccccagaggaccctggaccggcccagctcctggggcggcctgcagcacctgagcccctgccctgtgtctgagctgacagacacagctggcctgcggggcagcgccctgggcctgccccaggcctgccagcctgaggagctgctgtgcttcagctgccagatgtgcatggcccctgagcaccagcaccacagcctgcgggacctgcctgtgcacaacaagttcagcaactggtgtggggtgcagaagggcagccctgggggcctggacatgacagaggaggagctgggcgccagcggggacctgagcagcgagaagcaggagcagagccccccccagcccccaaatgaccacagccaggacagcgagtggagcaagcgggagcagatccccctgcaggtgggcgcccagaacctgagcctgtctgtggagctgacagaggccaagctgcaccacggctttggagaggctgatgccctgctgcaggtgctgcagagcggcactggagaggccctggccgcagatgagcctgtgaccagcacctggaaggagctgtatgcccggcagaagaaggccatcgagaccctgcggcgggagcgggcagagcggctgggcaacttctgcaggaccaggagcctgagcccccagaagcagctgagcctgctgcccaacaaggacctcttcatctgggacctggacctgcccagcagaagaagagagtacctgcagcagctgaggaaggatgtggtggagaccaccaggagccctgagagcgtgagccgcagcgcccacacccccagcgacatcgagctgatgctgcaggactaccagcaggcccacgaggaggccaaggtggagatcgcccgggcccgggaccagctgcgggagaggacagagcaggagaagctgcgcatccaccagaagatcatcagccagctgctgaaggaggaggacaagctgcacaccctggccaacagcagcagcctgtgcaccagcagcaatggcagcctgagcagcggcatgaccagcggctacaacagcagccctgccctgagcggccagctgcagtttcctgagaacatgggccacaccaacctgcctgacagcagagatgtgtggattggagatgagcggggcggccacagcgctgtgaggaagaacagcgcctacagccaccgggccagcctgggcagctgctgctgcagccccagcagcctgagcagcctgggcacctgcttcagcagcagctaccaggacctggccaagcacgtggtggacacctccatggctgatgtgatggccgcctgcagcgacaacctgcacaacctcttcagctgccaggccacagctggctggaactaccagggcgaggagcaggccgtgcagctgtactacaaggtgttcagccccaccaggcatggcttcctgggcgccggcgtggtgtcccagcccctgagccgggtgtgggccgctgtgtctgaccccaccgtgtggcccctgtactacaagcccatccagacagcccggctgcaccagagggtgaccaacagcatcagcctggtgtacctggtgtgcaacaccaccctgtgtgccctgaagcagccccgggacttctgctgcgtgtgtgtggaggccaaggagggccacctgtctgtgatggccgcccagagcgtgtatgacacctccatgccccggcccagcaggaagatggtgcggggggagatcctgcccagcgcctggatcctgcagcccatcaccgtggagggcaaggaggtgaccagggtcatctacctggcccaggtggagctgggcgcccctggcttccccccccagctgctgagcagcttcatcaagaggcagcccctggtgattgcccggctggccagcttcctgggccgctag

SEQ ID NO: 205646 - DNA, 14103 bp, Artificial Sequence
  derived and/or modified sequence
atggccaacgtgcaggtggccgtgcgggtgcggcccctgagcaagagagagaccaaagaagggggacgtatcatcgtggaagttgatggcaaggttgctaagatcaggaacctgaaagtagacaataggccagatggcttcggggattcaagggagaaggtgatggcttttggattcgattactgttattggtccgtcaatcctgaggatccacagtatgcttcccaggacgtcgtttttcaggatttgggtatggaggtcctctccggcgttgccaagggctacaacatctgcttatttgcctatgggcagacagggtctggaaagacctacaccatgttggggacccccgcaagcgtcggcctgaccccgaggatctgtgaaggactcttcgtaagagagaaagattgtgcttccttgcccagttcatgccggattaaagtttcctttctggaaatctacaacgagcgagttagggatctcttgaagcagagcggacagaaaaagagttatacactgagagtgcgggagcaccccgagatggggccctatgtccaggggttaagccagcacgtggtgacaaattataagcaggtcattcagttgctagaggaaggcatcgcaaatcgcatcactgcggccactcacgtccacgaggcctcaagcagatctcacgccattttcaccatccattatacacaagctattctggaaaacaatttgcccagcgagatggcatcaaagataaatctggtcgacctggccggatccgaacgggccgatccctcctattgcaaggatcggattgccgagggggcaaacatcaacaaatctctggtgacgctgggcatcgtgattagcacactggcccagaactctcaagttttcagctcatgccagagcctcaactcatccgttagcaacggtggggattccggaatcctaagctcacctagcggtacttccagcgggggggcaccttcgcggaggcagtcttacatcccgtacagagacagcgttctgacttggttgctgaaggatagtctgggcgggaactctaaaacaatcatggtggctactgtgtctcccgcgcatacatcttactcggaaaccatgtccacactcaggtacgccagctcagctaaaaatattatcaacaagccgcgtgtcaacgaagatgcgaacctaaagcttatcagagaactgcgggaagaaattgaacgattaaaggctctcctgttgagctttgagctgcgcaacttcagctctctctctgatgagaacctcaaagaactcgtactgcaaaacgaactaaaaatcgaccagttgacaaaggactggacacaaaaatggaacgattggcaggctctaatggagcattacagcgttgatatcaaccgacggagagctggagttgtgatcgactcttccttgccccatcttatggcactggaagacgatgtgttatctacaggcgtagtgttataccaccttaaggagggaacaactaagatcggcagaatagacagcgaccaggaacaggacatcgtcctgcaggggcagtggatcgagagagaccactgtacaatcacatcagcatgtggtgtggtagtgttaaggcccgccaggggagctcggtgtaccgtcaatggcagagaagttaccgcctcttgccgcctgacccaaggcgccgtgatcaccctgggcaaagcacagaaattcagattcaatcatccagccgaggcggctgtgctccggcagcgcagacaagtcggtgaagctgctgccggcagaggctcattagaatggctcgatctggacggcgacctggcagccagtagactcggtctgtctccactcttgtggaaagagcgcagggcactggaagagcaatgcgatgaggaccaccagacccctcgcgatggcgagacctcacacagagcccagatccagcaacagcagtcatacgtggaagacttacggcatcagatcctggcggaggagatccgcgccgccaaggaactggaattcgatcaggcttggatttcccagcaaatcaaggagaaccagcagtgtctcctgagagaggagacatggctggcaagcctacagcagcagcagcaggaagatcaggtcgcagagaaagagttggaagcttcagttgcactggatgcctggctgcagactgatccagagatacagccttctccattcgtgcaatctcaaaagagagttgtccatcttcagctcctgcgccgccataccctgagggccgctgagcggaacgtacgcagaaaaaaggtgtcttttcagttggaaagaattatcaaaaaacagaggctgctggaagctcagaagaggttagaaaaattgaccaccctctgttggcttcaagatgactctacacaagaaccaccgtatcaggtcctctcccctgacgccacagtgcctcgacccccctgtaggagtaaactgaccagctgcagcagcctgagtccccagaggctgtgtagcaaacacatgccccaactgcattcgattttcctgagttgggaccctagtaccaccctacccccgcgcccagaccccacccatcaaacgtccgagaaaactagttccgaagaacacctcccgcaggcagcctcataccctgcgcggacgggttgtcttcggaaaaatggactgcactctagcggacatggtcaaccatgcacggcacgggcagcccttgcaagaaagggagctagtgctccagatgcttgtttaaccatgagccccaacagcgtcggcatccaggagatggaaatgggcgtgaaacagccgcaccagatggtttcccaaggtctcgcgtctctcaggaagtctgctaataagttaaagccacgccatgagccaaagattttcacatccacaacacaaacacggggggctaagggtctcgctgatccgtcccacacccaggcaggttggaggaaagaaggcaatctcgggactcacaaggcagcaaagggggcgagctgtaacagcctgtatccacatggcccccgtcaaacagctggacatggtaaggcagtcaaaaccttctggacagagtacaaacctccctccccgagtcgggccagcaagaggcatcagagagtgctggcaacacgggtccggaacatcacgaaaaagtccagtcacttacctctgggttcacctctgaagcggcagcagaatacacgggacccagatacgatggtaccattgactgacttctcaccagtcatggaccacagcagagaaaaagataatgatctgagcgatacagactcaaactactcgctggacagtctctcgtgtgtctacgcaaaggccttgatcgagccactgaagccagaagagagaaagtgggactttcctgagcctgagaattccgagtctgacgactcccagctttcggaagacagtctcgccgaaaagagataccagtcaccaaagaaccggctaggaggaaacaggcctaccaacaatcgtggtcagccacgaacgcgaacacgggcctctgttagaggatttactgcagcctccgactctgatttgttagcccagacccaccgctcctttagtctggattccctcattgatgctgaggaggagctcggggaagaccagcaggaggagccctttcccggatcagcggacgaaatacctactgaaacattctggcacctggaagactcatccctgccggtgatggaccaggaggcaatctgccggttggggccgataaattatcgcactgccgccaggctggatgccgtgctccccatgtcctcgtcgttttatttagacccccaattccagcctcattgtgaactgcaaccacactgtgagctgcaaccacattgcgagctccaaccccactgcgagcaggcagagtcccaagtggagccttcctactcggagcaggcagacagtttgcagggaatgcaactcagcagagagtccccattaatgagcatggactcctggttcagctgcgatagtaagattaatccttcttctccaccggggatagtcgggtccctatgcccctcacccgatatgcaagaatttcattcatgcaagggcgagcgccctggatattggcccaacaccgaggaactgaagccctcggatgctgaaacagtgctgccctattccagcaaactgcaccagggtagcaccgagctgctgtgctcagcccgcgacgaacataccgcatcagccgcagatactagcaggctgtccttgtgggggatccagcgtttgattcaaccgggcgctgacggtaccttccagggtcgctgtattccagacatgactcagcaaggatcttccgaggcatcccacaattctagcgtatctaatgtacttgctgcaagcgccaccaccctgactcatgtgggatctacccatgagagggattggagtgccctgcagcaaaagtatctgttggagctctcttgtcccgtgctggaggcgattggcgcacccaaaccagcgtatccatacttggaggaggacagcgggtctctagcccaagctagtagtaaaggtggagataccctgcttcctgtggggccccgcgtcagctccaacctcaacctcaataacttccctgtgcatctttctcgcatcaggagacttagagctgagaaagaacaggactcactgaacgcgaagttggagggcgtttctgactttttcagtacatccgaaaaggaagcctcttacgatgaaacctactccgctgaccttgaatcacttagcgcgagtagaagcaccaatgcccaggtctttgctactgagaacgcaatccctgactccatgactgaagcatgtgaggtcaaacaaaacaatctggaggaatgcctgcagtcttgcaggaagcctggcctgatgactagctctgacgaagatttcttccagaaaaatgcctgtcacagtaacgttacaactgcaaccaaggcagaccactggtctcaagggtgggcacccttgaggaaaaatagcgctgttcaacctggccagttatcccccgactcccattaccctttggaagaggagaaaacagattgtcaggagtcctcaaaggaagccgtccgacgacatattaacgtgtcctttgcactgcccagcgggccagagctgtacctccatagtgccccctggaaccctctttctagctcgctccaaccacctttacttgaaactttctacgtgacaaagtccagagatgccctcactgagacagcactcgagatccctgcctgccgagaggtgcgtgtgccatcccctccccctcgagaagcctggggcttcggccacaatcaccaggccctgcaaggggcttacctgaagaataacctgcccgtactgctgcagaaccagaatagcaagatcgccagcagccagcaagtgacagctgagataccagtggatctgaatacccgggaggtcattcgggagtctggaaaatgccctgggaatattaccgaagaatcgcacgacagtgtgtattcaagtgtgacccaaaatcgccacttcctccctagcactagcaccaaggtgtgtgagttcgagaaccaggttgtgatactgaacaaaaaacattcattcccagcactggaagggggggaagtgaccgcacaaagctgttgcggcgctagtagcgactcgacagagagcggcaaatctctgctgtttagagagtccgaggcccgtgaagaggaagagctggaccagaacacagtcctgaggcagacgattaatgtttcgcttgagaaggatatgcctggggagtctgctgtgtctctgaagtccagaagcgtggacagacgcgtcagttcacccgtgatggttgcccagggaggcggccccactcctaagtgggaggggaagaacgagacagggctactggagaaaggactgcgccccaaagattcatcagaggagttcaagttgcccggcacaaagcctgcctacgagcggttccaactggtagcctgccctcaagaacgcaatcccagtgaatgcaagtcccaggaaatgttaaaccccaatagggaaccttccggcaaaaaacagaacaaaagagtgaataacactgacgagatggcaaggctcattaggagtgtcatgcagctggaaaacggtattctggagatcgagagcaagcagaacaagcaagtgcatgcctcccacacaccaggaacagataaagagctggtttttcaggaccagaaagaacaggagaagacggatcacgcattcagaccagattctagtggaaatcccttaccttctaaggaccagccatcgagcccccgtcaaactgatgacaccgtcttccgggacagcgaagctggtgctatggaggtaaatagcatcggaaatcaccctcaggttcagaagatcactcctaatccctttaggtcaagggaaggtgtgcgcgaatcagagcccgttcgggaacacacgcatcctgccggctccgacagacccgctcgtgatatctgtgatagtctgggcaagcatacaacatgtagggagttcaccaacacttcactccatccgcaacgcatgaaggcactagcccgggcacttccattgcaacctcggctggaaaggagctctaagaacaacggtcagtttgtgaaagctagtgcttctctgaagggccaaccgtgggggctgggcagtcttgaggaactcgagacagtgaagggcttccaggaaagccaggtggctgagcatgtttccagcagtaatcaagaggagccaaaggcacagggcaaggtagaggagatgccaatgcagcgaggcgggtcgctgcaagaagagaacaaggtgactcagaagttcccttctctctcccagctctgcagagataccttttttcggcaggagacagtgtctcctcttctgagcagaacggaattctgtaccgctccccttcatcaagacctcagtaacacactgccccttaactcccctcgatggcctaggaggtgcttgcacgtgccggtggcactcggcatatcaagcctggactgtgtgctggacctgaccatgctgaaaattcataattcccctctcgtgaccggagtcgagcatcaggatcagtcgaccgagacgagaagtcactcccctgaagggaatgtgcgggggcgatcctcagaagcccacacagcatggtgtgggtcggtgaggtccatggccatgggtagccatagccagtctggcgtccccgagagcatccccctcggcactgaagatcgaatttccgccagcacctctccccaggatcacggcaaagatttacgcattacattactgggcttttctacttccgaggatttcgcaagcgaagctgaggtcgcagtccagaaggagatcagagtttctagccttaataaagtaagttcgcagcccgagaaaagggtgtccttttccttggaggaggactctgatcaggcctctaaaccaaggcaaaaggctgaaaaggagactgaagatgttgggctgaccagcggcgtgagtctcgctcctgtgagtctgcctcgagtgccatctcctgagcctcggctgctggagccctccgaccacgcttctatgtgcctagccatccttgaagaaatccgccaggcaaaggctcagagaaaacagctgcacgacttcgtggctaggggtaccgtgctttcatattgtgaaaccttgcttgagcctgagtgcagcagtcgtgtggcaggtaggccccaatgcaaacagatcgaccagagttcatctgatcagacaaggaacgaaggcgaagccccaggctttcatgttgcgagtctctccgcagaggcaggccagatagacctgcttcccgacgaaaggaaggtacaggctacatccctgtcagctgacagcttcgagagcctgccaaacacagagaccgacagggagccatgggaccccgtgcaggctttttctcacgccgctcctgctcaggacaggaagcggcgcacaggagagttgagacagttcgctggagctagcgagccttttatttgtcacagttcgtcttcagagataattgaaaagaaaaaggatgctactcgaactccatcaagcgctgaccctctggcgcccgatagcccgagaagctccgcgccggtcgaggaagtcaggagagtcgtttcgaaaaaggttgttgccgccctgccatcccaggccccctacgacgatccacgagtgaccctgcacgagcttagccagtcggtacctcaagaaacagccgaaggaataccccctggcagtcaggattcctctcccgaacaccaggagccaagaactctggacactacttacggcgaggtgtccgataacctgctggttacggctcagggcgagaaaaccgctcacttcgagtctcagtcggtcacatgtgatgtgcagaactccaccagtgctagtggcccaaaacaagaccacgttcaatgccctgaagcctccactggctttgaggagggcagagcttcacctaaacaggacactattctgcccggggcactgactcgcgtagcactggaggcaccaactcagcaatgcgttcagtgcaaagagtcagttggttctggtctcacagaggtctgtcgtgcgggttccaaacactcacgacctatccctctgcccgatcagagacctagtgcaaaccccgggggtataggagaggaggccccttgccgacacccccgagaggccctggatggaccagtgttttccaggaacccggagggctcccgtacattgtccccatcacgcggaaaagagtctaggaccctcccttgccgacagccatgttcttctcagcctgtggccacccacgcctacagtagccactcttcaactcttctctgttttcgagacggtgacctgggtaaggagccattcaaagctgcaccccataccatacaccccccctgtgttgtcccttcccgtgcctacgagatggatgagaccggggaaatcagtcggggccccgatgtacatctcactcatggactcgagcctaaggacgttaatagggaattccgactgacggaaagctcaacctgcgagccatccacagtagctgctgttctgtctagggctcaggggtgtcgaagtcctagtgcacccgatgtgcgcaccggaagcttctctcattcagcgacagacggtagcgttggactgatcggggttcctgagaagaaagtcgccgaaaagcaagcatccactgagttggaggcggcttcttttcccgccggaatgtactctgagccacttcggcaattcagagatagtagtgtcggcgatcagaacgctcaggtgtgtcagactaatccagaaccccccgccactacccagggccctcatacgctcgacctctctgagggcagcgcagaatcaaagctggttgtagagccacaacacgagtgtctcgagaatactactcgctgcttcctggagaagccacaattttcaactgagcttagagatcacaaccgtcttgactcgcaagccaaattcgtggccagactaaaacatacctgctcccctcaagaagattctccctggcaggaggaagagcagcaccgtgaccaagctagcggaggaggagaagggttcgcccagggagtgaatcccttgccggatgaggacggcttggacgggtgtcaaatcctggatgccggcagggaagaagtcgccgtcgctaagcccccagtatccaagattctgagtcaaggatttaaggatcctgcgacggtgtcgctaagacagaacgaaactcctcagccagccgcccagcgatccgggcacctctacaccggcagagaacaacccgctccaaatcacaggggctccttacctgtcacgacgatattttcggggcccaaacacagcaggtcctcccctacacctcagttttccgtcgtgggctcttcccggagtctacaggagttgaaccttagcgtggagccaccttcccctaccgacgaggatacccagggacccaatcggctgtggaacccacatcttcgcggatactctagtggcaagagcgtagcccgaacatccctgcaggccgaggactctaaccagaaggcaagtagccgccttgacgacggaaccaccgaccacaggcatctgaagcccgccacaccaccctatcctatgccttcaacactctcccatatgcctacgcccgactttaccaccagctggatgtcaggcaccctggagcaggctcagcagggcaaaagggagaagttgggggtgcaggtgcgcccggaaaactggtgtagtcagatggataagggtatgctgcatttcggttccagtgatatttcaccatacgctctaccttggcgccctgaggaaccggccagaatctcttggaagcagtatatgtcgggatctgccgttgacgtcagctgcagccagaagccacagggactgacattgagcaatgtcgcccgatgctcttccatggataatggcctggaggaccagaattctccctttcacagccacctgtcaacctatgccaacatttgcgatctgtcgactactcattccagtaccgaaaacgcgcaggggtctaatgaggcgtgggaagtgtttaggggaagctcatccatagctctcggggatccccatatccctacatctccagagggggtagctccaactagcggacatgacagacgcccccagtttcgcggcccctccggagaggccgactgtctcaggtcaaaaccccctctagccaaagggtcagccgccggacctgttgatgagatcatgctcctgtatcctagtgaggctggttgccctgtcggacaaacccggaccaataccttcgaacagggaactcaaaccctgggatcgagacgacattggagtagtactgatatctccttcgcccaaccggaggcttccgccgtcagcgccttcgaccttgcatcgtggacatcaatgcataatctgagtctgcacctgtcccagcttctccactcgaccagtgaactgctaggctctctgagccagccggatgtagccagaagagagcaaaataccaagcgtgatataccggataaagcaccacaagcgctcatgatggacggttcaacgcaaactactgtagacgaaggctcgcagaccgatctgactctgccaacactgtgtctgcagacttcagaggccgaacctcaaggggctaatgtgatcctcgaaggactcgggtcagacacctccacggtttcacaagaagaaggcgacgtcccaggggtgccccaaaaaagagaggctgaagaaacagcacagaaaatggctcagctgctttacctccaagaagaaagcaccccctacaagccgcagtcaccatcgatcccctccagtcatctccgtttccagaaggctcccgtgggccagcatctaccttccgtgtcaccttctgtatctgacgcctttctgcccccaagctcccagcctgaggaatcttattgccttgttgtttcctcacccagtcccagctcaccgcattccccaggcctattccccagcacctccgagtatccgggggactcgagagtccagaagaaactgggccccacaagtgctttgtttgtcgaccgcgcatccagcccaatcctgactctctctgcttccacccaggagcctggtttgtctccgggatccctgaccttgtctgcccccagcacccaccctgtggaggggcaccagaaactcgattcctcaccagaccccgtggacgctccgagaaccccaatggacaattactcccagaccaccgatgagctggggggaagccagaggggccggagctcgctccagcggtctaacgggcgatccttcctagagctacactccccgcactccccccagcagagtcctaagctgcagttttcatttttgggccagcatccacagcagctgcagccccgcaccacaatcggggtgcagagcagattgctccccccaccactccggcatcgttcccagagactcggaaactcattcgtccccgagaaagtggcctcacccgaacactgccctctgtccggtcgggagcccagtcagtggcagtcgaggactgaaaacggaggtgagagctctgcttctcctggtgaacctcagcgcacactggatcgtccgtcctcttggggaggcttgcaacatctatccccttgccctgtatccgagttaactgacacagcaggtcttaggggctccgcgctcgggctgccccaggcctgccagccggaggagctgctctgtttttcatgccagatgtgcatggcccctgaacatcaacaccattcactgagagatttgcccgtgcataataagtttagtaactggtgcggcgtgcagaaagggagcccaggcgggctggatatgacagaagaggaactcggcgcgtctggtgacctatcaagcgaaaagcaggagcagtcgcctcctcagccacccaacgaccactcccaggacagtgagtggagcaaaagggaacagattcccttacaagtgggggcccagaatctgtctctcagtgttgagctgacagaggccaaactacaccatgggttcggagaagctgatgccctgttgcaagtgctccaatcaggcacaggggaagcacttgctgccgatgaacccgtgactagcacctggaaagaattgtatgcaagacagaaaaaagctatagagacccttaggagagaaagagcagaaaggcttggcaatttctgccgcacacgatcactgtcaccacagaaacagcttagcctcctgccaaacaaagacctgttcatttgggaccttgacctgccgtctagacgacgggaatacctgcaacaactaaggaaagacgtggtcgaaaccaccagatccccagagtctgttagtcggtctgcccacaccccatcagacatcgagctaatgctgcaggactatcagcaggcccatgaggaagctaaggtggaaatcgccagggcccgagatcaactgagagaaagaaccgaacaggaaaagctcagaattcaccagaagatcataagccagctgctgaaagaggaagataagctccatactctagctaatagttcctctttatgcacatcatcgaacgggtccctgtcctcgggcatgacctcgggctataatagctccccggccctctctggacagttgcagtttccagaaaacatgggtcacactaatctgccggattctcgagacgtatggattggggatgaacgaggcggacattccgccgtacgcaaaaacagtgcctactcccacagagcctccctagggtcatgctgttgttcgccatcttctctgtcctccctgggcacctgcttctcttctagttaccaggatctggctaagcacgtcgtagatacaagcatggctgacgtcatggctgcctgttcagacaatctgcataatctgttcagctgtcaggctaccgcagggtggaactatcagggggaggaacaggctgtgcagctgtattataaggttttcagccctacccgacatggttttttaggggccggggtggtcagtcagccactgtctagagtatgggcagccgtatcagatccaacagtgtggccactctactacaaacctatccagaccgcaagacttcaccagcgcgtaactaattctatctcattggtatatcttgtgtgcaacactacactgtgcgctctcaaacagcccagggatttctgctgtgtgtgcgtcgaagctaaggaggggcacctttccgttatggccgctcagagtgtttacgacactagcatgccccggccctcaagaaagatggtcaggggagaaatcttgccaagcgcatggattctccaaccaatcaccgtggagggcaaagaagtgactcgagtgatatacctcgcgcaggtggaactgggtgccccaggctttcctccccagctgctgagctctttcattaaacggcagccactggtcattgcccgacttgctagtttccttggacgatag

SEQ ID NO: 205647 - DNA, 14103 bp, Artificial Sequence
  derived and/or modified sequence
atggcgaacgttcaggtggctgtccgcgttcggcctctgtcaaagcgtgagacgaaggaaggagggcgaattatcgtcgaggttgacgggaaggtagcaaagataaggaacctgaaagtagataaccgcccagacggctttggagactcacgcgagaaagtcatggctttcggctttgattattgctattggagcgtgaacccagaagaccctcagtatgcctcccaagacgtagtgttccaggatctgggtatggaagtgctgagtggtgtcgcgaagggctacaatatttgcctctttgcctatggccaaactggtagcggcaaaacatataccatgctggggactcctgcgtcagtcggtctcactccccgtatctgcgagggcctcttcgtgcgcgaaaaagactgcgcgtcactgccttcatcttgtcgtatcaaagtgtctttcttggaaatatataacgagcgagttcgcgatctacttaagcagagtggccagaaaaagtcgtatactcttcgcgtgagggagcacccggaaatggggccttacgtgcaggggctgagccaacatgtggtgaccaactataagcaggtgattcaattactagaagagggaattgccaacaggatcacagccgctactcacgtgcacgaggcatctagccgtagtcatgcaatctttacgattcactacacccaggccattcttgaaaacaacctgccctctgagatggcatccaaaatcaatcttgttgacttggccggatccgaacgggcagacccatcctattgtaaagatcggattgccgagggtgcaaatatcaacaaatcattggtaacactgggcatcgtgatcagcacgctcgcacagaactcccaggtcttttcaagctgccagagtctgaacagttctgttagcaatgggggtgactcagggatcctgagctcaccaagcggcacatcgtcaggaggtgctccatctaggcgccagagttacataccctaccgagacagcgtgctgacttggctgctgaaagattcgctgggcggaaactcaaagaccataatggtagctaccgtcagccccgctcatacaagctactcagaaacaatgtctactctcagatacgccagtagtgccaagaacataataaacaagccgcgagttaatgaagatgctaatttgaaacttataagggagcttcgcgaggagatcgagcggcttaaggccctgctgctgtcttttgaattgcgaaacttctcctctttaagtgacgaaaatttgaaggagctggttcttcaaaatgagctgaagatcgatcagctgacaaaggactggactcaaaagtggaacgattggcaggctttgatggaacactatagcgtcgacattaataggcgcagggccggagttgttattgatagtagcctcccccatttgatggccctggaagatgatgtcttgagtaccggcgtggtcttatatcatctaaaagaaggcactacaaaaattgggcgaatcgattcagaccaggagcaggatatagtcctccagggccagtggatcgagagggaccactgtacaatcacaagcgcctgcggcgtagtcgtcctaagaccagcaagaggggcacgttgtacagtcaatggcagggaggtgaccgcttcctgcagactgactcaaggggcagtgattaccttagggaaggcgcagaaattcagattcaaccatcccgcagaagccgcagtgcttcggcagaggaggcaggtgggagaagccgcagctgggaggggatcccttgaatggctggaccttgatggtgacctcgccgcttcacggctcgggctgtccccgcttctgtggaaggagcggagagctctggaggagcagtgtgatgaagatcaccaaacccctcgggatggcgaaacgtcccatcgtgcacagatacagcagcagcagtcctacgtcgaagatttacgccatcaaatcctggctgaagaaataagggcagcaaaggagctcgagttcgaccaagcctggatctcccagcagataaaggaaaatcagcaatgcctgctacgagaagaaacctggctagcttcacttcagcagcaacagcaggaggatcaagtggccgaaaaagaactcgaggcaagtgtggccctcgacgcctggttgcagaccgaccctgaaatccagcccagcccgtttgtccagagccaaaaacgtgtggtgcacctgcagctcctgcggagacacaccttacgcgcagctgagcggaacgtgcggaggaagaaagtaagctttcaattggaacgtataattaagaaacagcgcctgcttgaagcgcaaaagcgccttgaaaaactgacaacactgtgttggctgcaggatgactccacccaggagccaccctaccaggtgctgtcccccgatgccaccgtcccgagacctccgtgccgctccaagttgacctcttgtagctcactttccccccagcgtctgtgctcaaaacacatgcctcaacttcacagcatctttctgtcatgggacccatctactacactgccccctaggccggatcctacacatcagaccagcgagaagacgagttctgaagaacacctcccccaggcagcttcgtaccccgctagaactggctgcttacgcaagaacggcctgcattcctcgggccacggccaaccctgcacagccagagccgctctggcgagaaaaggggcatctgcgcctgacgcttgtctgacaatgagtcccaactcagtgggaattcaagagatggagatgggagtgaaacaaccccatcagatggtgagccaaggcttggcctctctgcgaaagagtgcgaacaaattgaagcctcggcacgagcccaaaatcttcacttctacaacccagacgaggggcgcaaagggcctggcggaccctagccacacccaggccggatggcgtaaagaggggaaccttggaacccataaggcagccaagggtgcctcctgcaactctctgtaccctcacggtcctcgacagaccgcgggacacggcaaggcagtcaagactttctggactgagtataagccaccttctccaagcagagcttcaaaacgacatcaacgcgtgctagcaacccgggttaggaatataaccaaaaaaagctcccacctgcctctcggaagtcctcttaaacggcagcagaatacacgcgatccagatactatggtaccgcttactgactttagccctgtcatggaccacagtagggaaaaagacaatgatctcagcgacaccgattctaactactccctcgattctctgagctgcgtgtatgccaaagccctgattgaacccctgaagcccgaggagcggaaatgggattttcctgagccggagaattccgaaagcgacgacagccagctatctgaggacagtcttgcagagaaaagataccagagtcctaagaatcgcctgggaggcaacaggcccactaataacagaggacagcctcgtacccgcactcgcgctagcgtccgcggtttcacagctgcatctgactctgatctccttgctcagacccatcggtcctttagccttgactccctgatcgatgcagaggaagaacttggagaagaccagcaggaggaaccatttccgggatctgccgacgagatcccaaccgaaacattttggcatctcgaggattcctctttaccggtgatggatcaggaggcgatctgccggctgggccctatcaactatagaacagctgctagattagatgcggtgctgccaatgagctccagtttttaccttgacccacaatttcagccccactgtgagctgcagcctcactgtgagcttcagccccactgtgagctgcagcctcattgcgagcaagccgaatctcaggtggagccatcgtactctgagcaggccgatagcctgcaagggatgcagctctctagagagtcccccctcatgagcatggattcctggttttcatgtgactcaaaaatcaacccttcgtccccaccaggaatcgtaggaagcctgtgcccaagtccagacatgcaagagttccactcgtgtaagggggagcgccctgggtactggcctaacaccgaggaactcaagcctagtgatgccgaaacagttttgccttatagcagcaagctgcatcaaggttcgaccgaactcctctgcagcgcacgcgacgaacacacagcaagcgcagcagatacctccaggctgagcctctggggaattcagaggttgattcagccaggcgcagatgggacctttcaggggaggtgtattccagacatgacccaacagggatcgtcagaagcctcccacaacagtagcgtgtcgaacgtgttggcagccagcgccacaacgttaacccacgtgggcagcacccacgaacgcgattggagcgccttacaacagaaatatcttttggaactgtcctgccctgtcttggaagctatcggagctcccaagccagcctatccctatctcgaagaagacagcgggagcctggcccaggccagctctaagggcggagataccctgcttcccgtggggcctcgcgtcagcagcaatttgaatcttaacaatttccctgtacacttgtccaggatccgacgcctgcgagctgaaaaggagcaggacagtcttaacgccaagctggagggggtgtccgatttcttctctaccagcgagaaggaagcaagctacgacgaaacttacagcgcagacctggagagccttagtgccagcagatcaaccaatgcccaggtgttcgccactgaaaatgcaatccctgacagcatgacggaagcttgcgaggtaaagcaaaataatctggaagaatgcctccagtcgtgtcgtaagcctggcctgatgacctcaagcgacgaagacttctttcagaagaacgcatgccacagtaacgtgactacggccacaaaggctgatcactggagtcagggctgggcgcctcttcggaagaatagtgccgtgcaacccggacagctttcacccgacagccactaccctctggaggaagaaaagactgactgccaagagagctctaaggaagctgtccgcaggcacattaatgtctcctttgccctgccgtccggacctgagctttatttacactctgccccatggaatccgttgagctcctctttacaacccccattgctggagaccttctacgtgacaaagagtagggacgccctcactgagaccgccctagaaatccctgcatgtcgggaggtgcgggtccccagcccaccccctcgcgaagcctggggtttcggtcataatcaccaagcactgcaaggagcctatttgaagaataatctgccagtgttactgcagaaccagaatagtaagattgcatcaagtcagcaggtgaccgccgaaatcccagtagatctgaacacgagagaagtcattagagagtcagggaagtgccctgggaatatcactgaagaatcgcatgattctgtgtacagcagcgtgacccagaataggcacttccttccgtctacttccaccaaggtttgcgagtttgagaatcaagtggtcattctgaataaaaaacactcttttcccgcactggagggcggtgaagtgaccgcccaatcgtgttgcggtgcgagttccgattcaacagagtcagggaaaagcctgctgtttcgggagtccgaggccagggaagaggaagagttagaccagaacaccgtgttgcgacagacaattaacgtaagtctggaaaaagatatgcctggagaaagtgctgtctctctgaagagtagatcagtcgaccggagagtgtctagccctgtgatggtcgcccaggggggtggcccaacaccaaaatgggaggggaagaacgaaacggggctgctggaaaaaggtcttcgtcccaaggatagctccgaagagtttaagctgcccggaaccaaaccagcctatgaacgcttccagctcgtggcatgccctcaggagaggaatccctcagaatgcaagagccaggagatgctgaatccaaacagagaaccatccggcaaaaagcagaataagagggtaaataatacagatgaaatggcccgattaattcggtcagtgatgcaactggagaatggaatcctagagatcgagtctaagcaaaacaaacaggtgcatgctagtcatacccccggaacagataaagagctggtgtttcaggaccagaaagagcaggagaaaacggatcatgcattccgcccagactcctcgggcaatcctctgccgtccaaagatcagccatcgtccccaaggcagaccgatgacacagtcttccgcgattcagaggccggtgccatggaggtaaattctataggtaaccacccccaggttcaaaagatcacccctaatccctttcgctcaagggaaggggtgcgggagtcggaaccagtgcgcgaacacacccatccggcaggcagcgacaggccggcaagagatatatgtgacagtctcggtaaacacaccacatgtcgggaattcaccaatacgagcctgcacccgcaacgaatgaaggccttagcacgagccttacctctgcagccgcgtctcgagaggagttccaagaataatggacagtttgtgaaagcctcggcaagccttaagggacagccttggggcctggggtccttagaagagctcgagaccgtgaagggtttccaggagtcccaggtggccgaacacgtgtctagcagtaaccaagaagaaccgaaggcccaaggcaaagtcgaagaaatgccaatgcagcggggagggagcctccaagaggagaacaaagtgacccaaaagtttccctccctcagccagctgtgcagggacactttcttccgccaagaaaccgtgagccccctcctctcacgcacagaattttgcactgcacccttacatcaggatcttagcaacactctgcccttgaattcccccaggtggcccagaaggtgcctgcatgtgcccgtagccttgggaatcagtagcctggattgcgtcttggacctgaccatgttgaagatccacaactccccactggttaccggggtcgaacatcaggaccagtcaaccgaaacaaggtcccactctcctgaggggaatgtccggggtaggagttctgaggcccacacagcctggtgtggatccgtgagaagtatggccatgggctctcattcgcagtcaggcgtgccagagtccatcccgttgggcaccgaggaccgtatcagtgcctccacatccccacaggaccacggcaaagacctcagaataaccctgctgggtttctccactagcgaggactttgcctcagaggccgaagttgcagtgcaaaaagagattcgcgtctccagcctgaacaaggtaagctctcagcccgagaaacgggtgtccttcagtttggaggaggattctgatcaggcctccaagcccagacagaaggctgagaaggagacagaggatgtgggcctgacatccggcgtttccctcgcccctgtctctctgcctagagtaccatcacccgagccacgccttttggaacctagcgaccatgcttcaatgtgcctcgcaatcctggaagaaattcgtcaagctaaggcccagcgaaagcagctgcatgattttgtggccaggggtacagtgctaagttattgtgaaaccctgctggaacctgaatgtagctccagagttgccggaagacctcagtgcaaacaaatcgaccagagctcttccgaccagacaagaaatgagggagaggcaccagggttccacgtggcatctctgtccgcggaggcgggacagattgacctattgcccgacgagagaaaagtgcaggctacgagcctttctgctgactcttttgaaagcctgcccaacacagaaaccgatagggaaccctgggacccagtgcaggcattctctcacgccgcacccgctcaggatagaaagagacgcactggtgaattgcgacagtttgccggtgcatctgaaccctttatctgccactcctctagctcagagattattgagaaaaagaaggatgcaacgcggaccccaagctctgctgacccactggcgcctgattcgcctcgctccagcgcccctgtggaggaagtcaggcgcgtcgtgagcaagaaagtggtcgccgcacttccctctcaggccccttacgacgatccacgcgtaaccttacacgaactcagtcaatccgtcccccaagaaacagctgagggcattccccctggttcccaggattcttctcccgagcaccaagagcctaggactctggataccacatacggggaggtgtcagacaatctgttggtgaccgcccagggggaaaaaactgcccactttgaatcccaatctgtgacttgtgacgttcagaattccacaagtgcatcaggaccgaagcaggaccatgtacagtgccccgaggcctccacaggcttcgaggagggacgcgcatccccaaaacaagataccattttaccaggggctctcactcgcgtcgcacttgaagcacccacccagcagtgtgtgcagtgtaaggaaagcgtcggatccggtttgacagaagtttgtagggccggttctaagcattctcggcctataccactgccagatcaacggccatctgcgaacccgggaggcatcggcgaagaagctccttgtcggcatcctcgtgaggctttggacggaccggtcttttcaagaaatcctgagggctcacggactctcagcccatctaggggcaaagaatcacgaaccttgccgtgcaggcagccatgctcttcgcaaccggtggccactcacgcctattctagccacagtagcactctgctctgctttcgagacggagaccttggcaaagagcctttcaaggccgcacctcacaccattcaccctccttgtgttgtaccctcacgggcttatgaaatggatgaaaccggtgagatttcgcgagggcctgatgtccacctcacccatggtctggagcctaaggacgttaacagagagttcagattgactgagtccagcacgtgcgaaccctccacagtggccgctgtgttatcaagagcacaggggtgtaggtccccctccgccccagatgtacgaacgggctcattcagccatagcgccacagacgggtccgtggggctcattggcgttcccgagaaaaaggtggcggagaagcaggccagcactgaactggaagcggcatccttccctgctggtatgtactccgagcccttgcgacagtttcgagacagcagtgtaggggatcagaacgcacaggtgtgccagaccaatcccgaacctcctgctaccactcaagggccacatactctggatctgagcgaaggtagcgccgaatccaagctcgtagtagaaccccagcatgaatgtttggaaaacaccacaaggtgcttcctggagaagccacaattctccactgaactgagggatcataatcgtctggatagccaggccaagttcgtagcgagactcaaacatacgtgctctccccaagaagatagtccttggcaggaagaggagcaacatagggaccaggcttctgggggaggtgagggatttgctcaaggcgtgaacccactcccagatgaggatggcctggatggttgccaaattctggatgccggacgagaagaggtcgccgtggctaagcccccagtgtccaaaatcctgagtcagggcttcaaagacccggcaactgtgtcactcagacagaatgaaaccccccagcccgctgctcaacggagcgggcacctctataccggaagggaacaacccgcacccaatcatcgcggtagcttgcccgtgaccacaattttcagcgggccaaagcacagtcgctcctctcccacacctcagttttctgtggtgggctctagcagatccctgcaggagctcaacctgagtgtagagcctccgtcccccacagacgaggatactcaaggccctaatcgactgtggaatcctcaccttagggggtatagctcagggaaatcagtcgctaggaccagtcttcaagctgaagactcgaatcaaaaagcttccagccgactggacgatggaacaaccgaccaccgtcatctcaagccagccacaccaccttacccaatgccttcaacactaagccatatgcccacccctgatttcacgacctcttggatgagcgggactctagaacaagcacagcagggtaagagggaaaaactgggagtccaggtgcgcccagaaaactggtgtagtcaaatggacaaaggcatgctgcatttcggcagcagcgacatctcaccttatgccctcccctggaggcccgaagaaccagcgagaataagttggaaacaatacatgtccggctccgccgtagacgtgagttgctctcagaaaccacaggggcttactctcagcaacgtggctcgctgcagttctatggacaatggtctggaagaccagaacagtccttttcacagccacctgtcaacatacgccaatatttgcgatctgtcaacgacccatagttctaccgagaatgctcaaggatccaatgaagcatgggaagtgttcaggggaagcagctcaatagcgttaggcgacccccatattcccacgtctcctgaaggtgttgctccaacaagtggacacgacaggcggcctcagttccgaggacctagcggtgaggcggattgcctgagatccaagcctcctctcgctaaaggtagcgcagccggaccagtcgatgagatcatgctgttgtacccatcagaggcgggatgtccggtgggacaaacacgcaccaatacttttgagcagggcactcagactttaggttcgcggaggcactggagctcaacagacatctcattcgcccagcccgaggcatccgccgtctcagcgtttgatctcgcatcatggacgtctatgcacaacctctccctccacctgagtcagctgctacactcaacttccgaactgctgggctctttgagtcagcctgatgtggcccgacgcgagcagaatactaaaagagacatccctgacaaggctccccaagcgttaatgatggatggatccacgcagaccaccgtagacgagggcagtcagactgacttgactctgcccacgctgtgcctgcaaaccagcgaggccgaaccccagggggcaaacgtgatactggagggactgggttccgatacaagcacagtgagccaggaagaaggagacgtccccggagtaccacagaaaagagaggccgaggagacagcccaaaaaatggcccagttgctgtacctccaggaagagtccacaccatataaaccccaaagtccatccatcccttctagccatctccgctttcagaaagccccagttggtcagcacttgccaagcgtgagtccttccgtgtcagacgcttttttacccccatcttctcagcctgaagaatcctactgcctagtcgtatcttctccatctcctagcagtcctcactcccctgggctgttcccatctacctccgagtaccccggtgacagcagggttcagaagaagctcggacctacctctgcactgttcgttgatagagccagtagccccattctgacactgtctgctagtacccaggaaccaggtctgtcccccggtagtcttaccctgagtgctccatctacccatccagtggagggtcatcagaaactagacagttccccagatcccgtggacgccccaagaacacctatggacaattactcccagacaactgacgaattgggaggcagccagcggggacgatcgtccctacagaggtcgaatggccgatctttccttgaacttcatagccctcactcgccccagcagtctcctaagttacagtttagctttctcggacagcatccccaacagttgcagcccagaacaactattggggttcagtctcgccttctcccaccgcctttgagacatcgtagtcagagactggggaattctttcgttcctgaaaaggtcgcaagcccggagcattgccctttgagcggaagggagccctcgcagtggcagagcagaaccgagaatggaggagaaagtagcgcctcccccggagagcctcagagaactctcgatcgcccaagctcctggggtggtctacaacacctgtcaccatgccctgtgtccgaattaactgatacggccggactccgaggctctgctctgggattgccgcaggcctgtcagcctgaagagctgctgtgcttttcatgccagatgtgtatggctcccgagcatcagcaccattccctgcgagatctaccggtgcacaacaaattctctaattggtgtggtgttcagaagggcagccctggaggtttagacatgacagaggaagagttaggggcttcaggcgacctttcctcagaaaagcaggagcagtccccgcctcagccacccaacgaccactcccaggactcagagtggtcaaagagagaacaaatcccactgcaggtgggtgctcaaaatctttcactttccgtggagttgacagaagctaaactgcaccacgggtttggcgaagctgatgctcttctgcaagtgctgcagtcaggtaccggcgaagctttggccgctgacgaacctgtcactagcacgtggaaggaactctatgcacgacaaaaaaaagctattgaaacattgcgaagggaaagggccgagagactgggcaatttctgcaggacgcgcagtctgtccccccagaaacagctgtctctcctgcctaataaagatctgttcatttgggacctggacttgccttcaagaaggcgcgaatatctccagcaattgcgcaaagacgtggtggagactacccggagcccagagagcgtatcccgctcggcccacacaccgagtgatattgagttaatgctccaggattaccagcaggcccatgaagaggcaaaggtggagatagccagagcacgagaccagctacgggaaagaaccgagcaggaaaaactgcgaatccaccagaaaatcattagccagctgcttaaagaagaagataaactgcacacacttgccaactccagcagtctctgtacgagcagcaacggctccctgtcatccgggatgacaagcgggtataacagctcccctgcattaagcggccagctacagtttccagagaacatgggacacaccaacctgccggatagtagagacgtgtggatcggagatgaaagggggggtcacagcgcagtccggaaaaactccgcatacagtcaccgagcaagtcttgggtcttgttgttgcagtccttcatcactcagctccctgggcacgtgcttctctagctcttaccaagatcttgccaagcacgttgtggatacgtcaatggcagacgtcatggctgcatgttcagataacctccataacttattcagctgccaagcaaccgctggctggaattaccagggggaggaacaggccgtgcagttatactataaagtcttcagtccgaccaggcatgggtttctgggagcgggagtggtttcccagcctctgtctcgcgtctgggctgctgtgagtgaccctactgtctggccactctactacaagcccattcaaaccgccagactccaccagagagtcacgaattccataagccttgtgtatctggtctgtaacaccactctgtgtgcactgaaacagcccagagacttctgctgtgtttgcgtggaggccaaagaaggccacttaagtgtcatggccgcacagagtgtctacgacacttctatgcctcgcccatcaaggaagatggtgaggggagaaattctaccgtccgcgtggattctccagccgattaccgtggaggggaaggaggtgacgcgcgtcatttacctcgctcaggtggagttgggagcgccaggatttccacctcagctgctgagcagctttatcaaacgacagcctctggttattgcacgcttagcttcattcctgggcaggtaa

SEQ ID NO: 205648 - DNA, 15584 bp, Artificial Sequence
  derived and/or modified sequence
gggggcctgggatgctgccgctgagctgacccgctggacttgggttgtggcagacggatggcgaacgtgcaggtcgccgtgcgggtccggccgctcagcaagagggagaccaaagaagggggaagaattattgtggaagttgatggcaaagtggcaaaaatcaggaatttaaaggtggacaatcgaccagatggctttggggactcccgggagaaggttatggcatttggctttgattactgctactggtcagtcaacccagaggatccccagtatgcatctcaagatgtggttttccaggatttagggatggaagtactgtctggagttgccaaaggctataacatatgcctttttgcttatggacagacaggctctgggaagacatataccatgctggggaccccagcctctgttgggttgacaccacggatatgtgagggtctcttcgtcagggagaaagactgtgcctcactgccttcctcctgtaggataaaagtaagttttctagaaatctataatgaacgggtgcgggatctgttgaagcaatctggtcaaaaaaagtcctataccctgcgggtcagggagcatccagagatggggccctatgtacaaggtttatctcaacatgtagttaccaattataagcaagtaatccaactcttggaggagggaattgcaaacagaatcacagcagccacccatgttcatgaggccagcagcagatcccacgccattttcacgatccactacacgcaggcaatcctggagaacaacctcccttctgaaatggctagcaagatcaaccttgtggacctagcaggcagcgaaagagcagatcccagttactgtaaggaccgcattgctgaaggagccaatatcaacaagtcccttgtgactctaggaattgtcatctccaccttagcccagaactcccaagttttcagcagctgccagagcctcaacagctcagtcagcaatggtggtgacagtgggatccttagctctccttctgggaccagcagtggaggggcaccctcccgaaggcagtcttatatcccataccgagactctgtgttgacctggctgctgaaggacagccttggaggcaactctaaaaccatcatggttgccacggtgtctcctgcacacactagctacagtgagaccatgagcacactgagatatgcatccagtgccaaaaacattatcaacaagccacgagtaaatgaggatgcaaacttaaaactgattagagaactcagagaagagattgaaagactgaaagccctgctgctgagctttgaactgagaaacttcagttcattgagtgatgaaaacctgaaggagctggttctccaaaatgaattgaagatagaccagctgactaaagactggacccagaagtggaatgattggcaggccctcatggagcattacagtgtggacatcaacaggaggagggctggggtggtcatcgactccagcctgccacacttgatggccttggaggatgatgtgctcagcacaggtgttgtgctctatcatctcaaggaagggacaacaaaaataggaaggattgactcagaccaggaacaggacattgtcctgcagggtcagtggattgagagagaccactgcactatcaccagtgcctgtggtgtagttgttctacgacctgcccgtggggcccgctgtacagtcaatggccgggaggtcactgcctcctgccgtctgactcaaggagctgtcataaccctggggaaggcacagaagttccgattcaaccacccagcagaggctgctgtcctgcggcagcgaaggcaggttggagaggctgctgctggtcgtggctcgttggagtggctggatttggatggagatctcgctgcctcccggctgggtctctcccctttgctttggaaggaaaggagagcgcttgaagagcaatgtgacgaggaccatcagacaccgagggatggagagacatcccacagggcccagattcagcagcagcagagctacgtagaggatttgaggcatcaaatcctagcagaagagattcgagctgcgaaggaactggaatttgaccaagcttggattagccagcagattaaagaaaaccagcagtgtctgctcagagaagagacctggctggccagcttgcaacagcagcagcaagaagaccaggtagcagagaaagaacttgaggcatctgtggcacttgatgcttggcttcagacagatcctgagattcagccatccccatttgtccaaagtcagaaaagggtggtgcacctgcagctcctgcggagacacactcttcgggcagcagagcggaatgtccggcggaaaaaggtctcattccagctagagagaatcatcaaaaagcagaggctgctggaggcccagaagagactggagaagctcacgacattgtgctggctccaggatgacagcacccaggagcccccataccaggtcctcagccctgatgccacagtcccacggcctccatgtagaagcaaattgacgagttgcagttctttgagcccccaaagactctgcagcaagcacatgccccagctacacagcattttcctaagttgggatccctctaccacattgccacctaggcctgaccctacacaccaaacatcagagaaaacatcatcagaagagcatttgccacaggctgcttcctaccctgcaaggacagggtgcctccgcaagaacggcctgcattcctcaggtcatgggcagccctgcacagccagagcagccttggccaggaagggagcctcagctccagacgcttgcctcaccatgagtcccaactctgttggcatccaggaaatggagatgggggttaagcagccccatcagatggtgagccagggcttagcatctctgaggaaatcagctaacaaactaaagccaaggcatgagccaaagatcttcacctctactacccagaccagaggggcgaagggactagcagaccctagccacacacaagctgggtggcgaaaagaagggaaccttgggacccacaaggctgctaagggagccagttgcaattccttgtatcctcatggacccaggcagactgctgggcacggaaaggcagtcaagactttttggacagaatacaaaccaccttctccaagcagggcatcaaaaaggcatcagagggttctggcaactagggtcagaaatattaccaaaaagtcctctcacttgcctcttggcagtcctttgaagagacaacaaaatacaagggacccagacaccatggtcccactcacagatttcagcccagtaatggatcattcaagagaaaaagacaatgatttatctgacacagatagcaactactcattggattctctctcatgtgtctatgccaaagccctgatagagccactgaagccagaggagaggaaatgggatttcccagagccagagaactctgaaagtgatgacagccaactatctgaggactcactggctgagaagaggtaccaaagccccaaaaacaggctagggggcaatcgtcccaccaacaaccgtggccaacccaggaccagaactagagcttctgtgaggggcttcactgcagcctcagacagtgacctacttgctcaaactcataggagcttctccttggatagcctgattgatgcagaggaagaactgggggaagatcagcaagaagaacctttccctggttcagctgacgagatacccacagagactttttggcacctggaggactctagtctgcctgtaatggaccaagaggcaatatgcaggcttggtcccatcaactacagaacagcagctaggctggatgccgtcctgccaatgagcagttcgttttaccttgatcctcagttccaaccccattgtgagctccaaccccattgtgagctccaaccccattgtgagctccagccccattgtgagcaggctgaatcacaggtagagccaagctactctgaacaagccgactctctccaaggcatgcagctttcaagagagagcccactgatgtccatggattcctggttttcctgtgactctaagatcaaccccagcagccccccaggaatagtgggttctttatgtccaagtcctgatatgcaggaatttcactcctgtaagggggagaggcctggatactggccaaatactgaggaactaaagccatcagatgcagaaacggttctgccatatagctccaaactgcaccaaggcagtactgagctcctctgcagtgcaagagatgagcacacagcctctgctgctgatacgtctaggctgtctctctggggaattcaaaggcttattcaaccaggagctgatggcacctttcagggcagatgtatccctgacatgacccagcagggcagctctgaagcatcccacaattctagcgtatcaaacgtgctggctgcctctgccaccaccttgactcatgtaggcagcacccatgaaagggattggtctgcccttcagcagaagtacctccttgaactctcttgtcctgttttggaggccataggagcacccaagccagcttacccctaccttgaggaagactctggttccctggcccaagcttctagcaaaggaggagatactctattgccagttggccctagggtatctagcaatctgaatctcaacaactttccagtccatctgtccagaatcaggcgtttgagggcagagaaagaacaggacagtttaaatgccaaattagaaggtgtttcagatttctttagcactagtgagaaagaggcgagttatgacgaaacttattcggcagacttagaatcattgtctgcttctcgatctacaaatgcacaggtctttgcaacagagaacgcgataccagattccatgacagaagcatgtgaagtcaagcagaacaacttggaagaatgccttcagagttgcaggaaacctggactgatgacttcctctgatgaggattttttccagaagaacgcttgtcacagtaatgtcactacagccaccaaagcagaccattggtcccaaggctgggctcctctcaggaaaaatagtgcagtccagccagggcaattaagtcccgacagccactacccactagaggaagagaagacagattgccaggagagctctaaggaagcagttagaagacacataaatgtttcctttgcccttccttcaggtccagagctataccttcactctgctccctggaatccattgtcatcttccctgcagcccccactcttggaaacattctatgtgaccaaaagcagggatgccctgacagaaactgccttagagattccagcttgcagagaagtaagggtaccctccccaccccccagggaagcctggggctttggtcacaaccaccaagctctccaaggtgcttatttgaagaataatttgccagtgctgttacaaaaccagaattctaagattgcctcatctcagcaggtcacagctgagataccagttgatctgaataccagggaagtcatcagagaatcaggtaaatgccctggaaatattacagaagaaagccatgattcagtttattcttctgttactcagaacagacattttctcccctctaccagcacaaaagtatgtgaatttgaaaaccaagttgtaattttaaataaaaaacacagttttccagcacttgagggaggagaggtcactgctcagtcctgttgcggtgcttcctcagacagcactgagtctgggaagtctctcctctttcgtgaatctgaggcacgagaggaagaagagctggatcagaatacggttctgaggcagaccatcaatgtaagccttgagaaagacatgccaggggaaagtgctgtttctttgaaatccagatcagtagatcgtagagtaagcagcccagtgatggtggcccagggtggtggcccaacccctaagtgggaagggaaaaatgaaactgggcttcttgaaaaaggtcttcgtcccaaagatagctcagaagagtttaagcttccaggtacaaagcctgcatatgaaaggttccagttagttgcatgccctcaggaaagaaaccccagtgaatgcaagtcacaagaaatgttaaatcccaacagagaaccttctggaaagaaacagaataaaagagttaataatactgatgaaatggctaggctaattaggagtgtaatgcagctggaaaatggcatcttagaaattgaatctaagcagaataagcaggttcatgcttcccacacaccaggaaccgataaggagttggtgttccaggaccagaaggagcaggagaagactgaccatgcctttaggccagacagctctggaaaccctttgccctctaaggatcagccatcttctccaagacagacagatgatactgtctttagggatagtgaagctggagcgatggaggttaacagcattgggaaccatccccaggtccagaaaatcaccccaaaccccttcaggtcaagggaaggtgtacgagagagtgaacctgtgagagagcacacccacccagctggatcggacagacctgccagggatatttgtgattctttagggaaacacacaacttgcagagagttcaccaacacttctcttcacccacagagaatgaaagcattggctagagctctgccattgcaacccaggctagagaggtcttctaagaataatggccagtttgtaaaagcatcagcaagtctcaaagggcagccttggggcttaggaagtcttgaggaattggagactgtgaaaggttttcaggaaagccaagtagctgaacacgtaagtagttccaaccaagaagagccaaaagctcaaggtaaagttgaagaaatgcctatgcaaaggggaggcagccttcaggaagaaaataaagtgactcagaaatttcctagtctcagccagctttgtagggacacgtttttcaggcaggaaactgtcagcccattactaagccggacagaattctgtacagctcctcttcaccaagacctgagtaataccttgcccttgaattctccaaggtggccaagaaggtgtcttcatgtacctgttgctctaggcatctcttcacttgactgtgtgctggatctcacaatgttgaaaattcataacagtcccttggtaactggagtagagcatcaggaccagagtacggagaccagaagccacagccccgaaggaaatgttagagggcgttcctctgaggcacacactgcctggtgtgggtctgtgcgatccatggccatgggatctcatagtcaatctggtgtaccagagagcattcctctggggacagaggacaggatctcagcaagcaccagcccccaagaccatggaaaggacctcagaatcaccttgctgggtttcagtaccagtgaagattttgcttctgaagccgaggtggctgtacaaaaagaaataagagtcagttcactgaacaaggtctctagccagcctgaaaagagggtcagcttctccttggaagaggatagtgaccaagccagcaagccaaggcagaaggcagagaaggagactgaggacgtcggactgaccagcggtgtttccttagcacctgtttccctgccgagggtgcccagtccagagcctaggctgttggagccctctgaccatgcatccatgtgcctggccatcttggaggagatcagacaggcaaaggcccagagaaagcagcttcatgactttgtggccaggggcacagtcctttcttactgtgaaactttactagaacccgaatgttcttcaagggttgctggcaggcctcagtgtaaacaaatagaccagtcatcatcagaccagaccaggaatgagggtgaagcaccgggatttcatgtggcatctctatctgctgaagcagggcagatagatctgttacctgatgagaggaaagtccaggccacatctctgtctgcagacagctttgaatctctgcccaatacggaaactgacagagagccatgggatcctgtgcaggctttctcccatgctgctcctgctcaagacaggaaacgtcgtactggagaactgaggcagttcgcgggagcaagtgaaccatttatatgtcactctagttcttctgaaatcatagagaaaaagaaagatgcaaccagaacaccttcctcagctgatcctttggccccagacagtcctcgttcttcagcacctgtggaggaggtcaggagggtagtatcaaagaaggtagtggctgccttaccttctcaggccccttatgatgatcctagagtgactctgcatgagctaagtcagtcagttccgcaggagactgcagagggcataccccctggcagtcaggacagcagcccagagcatcaggaacccagaactctagacaccacatatggagaagtttcagataatttgttagtgactgcacagggagaaaaaacagcccattttgaaagtcagtctgtgacctgtgatgttcagaattctacaagtgcctcagggcctaagcaagaccatgtccaatgccctgaggcttctactggctttgaagaaggtagggcaagtcccaaacaagataccattctgcctggagctctgacaagggttgcactggaagctcccacacagcagtgtgtgcagtgtaaggagagtgttgggtctgggttgacagaagtctgcagggctggcagcaaacattccaggccaattccactgccagatcaaagaccaagcgcaaatcctgggggaattggggaggaagccccatgtagacacccaagggaagctttagatggccctgtcttctcaaggaaccctgaaggcagcaggactctcagcccgtctagagggaaagagagcagaactcttccttgccgacagccatgcagttctcaacctgttgctactcatgcttattcctcccattcctctactttactgtgttttagagatggtgacctagggaaggagcctttcaaggctgccccacatactatccacccaccctgtgtagtaccttccagggcctatgaaatggatgagacaggagagatctctaggggacctgatgtgcacttgacacatggccttgagcccaaagatgttaacagggaatttaggctaacagagagcagcacttgtgagccttctactgtggctgctgtcctatctcgagctcaaggctgcagatccccttctgctcctgacgtgaggacaggttccttcagccactcagctactgatggaagcgtggggttaataggggttcctgagaaaaaggttgctgagaagcaagcaagcacagaacttgaggctgcctctttccctgcaggcatgtactctgagcccctgaggcagtttagggacagctctgtaggtgaccagaatgcacaggtgtgtcaaaccaatccagaaccacctgcaacaactcagggaccacacaccctggatttaagtgaagggtctgctgagagcaagttggtggtagagccacagcatgaatgtttagaaaataccactagatgttttttggaaaagccacaattttccactgagttgagggatcacaatcgcttggattcccaagccaagtttgtagcaaggttaaaacatacctgcagcccccaggaagacagtccctggcaggaagaagagcagcacagagaccaggcttcaggtggtggagaaggcttcgcccagggtgtgaatccccttcctgatgaagatggcttagatggctgtcagattttagatgctgggagagaggaggtggctgtggccaagcctcctgtgtccaagattttatcacagggcttcaaagacccagccactgtgtccttgaggcaaaatgaaacaccgcagcctgctgctcagaggagtggccacctctacactggcagagagcagccagcacccaaccacaggggctcacttcctgtgactacaatcttctctggccccaaacactccaggtcctcccccacaccacagttctcagttgtcggctcttctcgttctcttcaggagctgaacttgagtgtggagcctccttcccctacagacgaagatacacaggggcctaacagattgtggaacccacatctcaggggctattcctcaggaaagtcagtggcaagaacatctctgcaggctgaggacagcaatcagaaagcctcatctcgcttggatgatgggactaccgatcacaggcacctgaagcctgccacccctccttatccaatgccttccactctctcacacatgccaacccctgatttcacgaccagctggatgtctggtactttggaacaagcccaacagggaaagcgagagaaactgggtgtccaggttaggccagaaaattggtgctctcagatggacaaaggaatgctgcactttggctccagtgacatcagtccctatgcgctgccgtggcgtccggaggagcctgcacgtatcagctggaagcagtatatgtctggcagtgcagtcgatgtttcctgcagccagaagccccaggggctgacactatcaaatgtggcccggtgctccagcatggacaatggcctagaagaccagaactcccctttccactcccacctcagcacttacgccaatatttgtgatctgtcaaccacacacagcagcactgagaatgcccagggttcaaatgaggcctgggaagtattccgagggagttcttcaattgccttaggagacccccacatcccgacgagccctgaaggagtagcccccacttcgggtcatgacagaaggcctcagttcaggggcccttctggtgaagcagactgtctgaggagtaagccccccttggccaaaggaagtgctgcaggtccagtggatgagattatgctgctgtatccatcagaggcaggctgccctgtgggacagaccaggacgaacacattcgaacagggcacacagaccctcggcagcaggcgccactggagcagcactgacatctcctttgctcagcctgaagccagtgcagtatcagcctttgatctggcctcatggaccagcatgcacaatctgtctctccacctctcacagctcctgcacagtacctcagagctgcttgggagtctctcccagccagatgtggccagaagggagcagaacaccaagagggacatcccagataaagccccacaggccctgatgatggatggctctactcagaccactgtggatgagggcagccagactgacctcaccttacccaccctgtgcctccagacttcagaggctgaacctcagggagccaatgtgatccttgaagggctaggctcagatacctcgactgtgtctcaagaagagggagatgtgccaggggtacctcagaagagagaggcagaggaaacagcacagaaaatggctcagctcctctatcttcaggaagaaagcactccctacaagccccagagcccttcaataccctcatcccacttgaggtttcagaaagcccccgttgggcagcatcttccttctgtgagcccctcagtttctgatgctttcctgcctcccagctcccagccagaggagtcatattgcttagttgtcagcagtcccagtcccagctcccctcattccccagggctctttcccagtacttccgagtatcctggggactccagggtccagaagaagctgggccccacaagtgctttgttcgtggacagggcctcctccccaatcctcactcttagtgccagcacccaagagccgggtctttccccaggctctttgaccctctcagccccttcaactcaccctgttgaaggccaccagaagcttgactccagcccagaccctgttgatgccccaaggactccaatggataattattcccaaaccactgacgagttaggtggctcccagagaggtagaagttccttacaaaggagtaatgggagatccttccttgagttgcactccccacacagcccacagcagagtccaaaactccaatttagtttcttagggcagcaccctcagcagcttcagcccaggacaactatcggggtccaaagcagactgctgccaccaccactgaggcacaggagccaaaggctgggcaacagctttgtgcctgagaaggtggcttccccggagcattgcccactgagcggtagggagccaagtcagtggcagagcaggacagaaaatggaggtgagagttcagcatctccaggggaaccacaacgcactctggaccgaccttcttcatggggaggcctccagcacctcagcccctgccctgtctctgagttgactgatactgcagggctccgaggttctgccttgggcctccctcaggcctgccaacctgaggagttactgtgcttcagttgccagatgtgcatggcccctgagcaccagcaccacagtctgagggacctcccggtgcataacaaatttagtaactggtgtggggttcagaagggctcacctggggggttggacatgactgaggaggagctgggggccagcggtgatctcagctctgaaaagcaggaacagagtcccccacaacctcctaatgaccacagccaggattctgagtggtccaagagggagcagatccccctgcaagttggggcccagaacctctcactcagcgtggaactcacagaagcgaaactgcaccatggctttggggaggccgatgccctgctccaggtgctgcagagtgggacaggggaggcgcttgctgctgatgaacctgtgacatccacctggaaggagctctatgcacggcaaaaaaaggccattgagaccctcaggagagagcgggctgagcgacttgggaacttctgccggacgcgaagccttagccctcagaaacaactgagcctcctgcccaacaaagatctcttcatctgggatcttgacttgcccagcagacgccgagaatacctgcagcaactgaggaaggatgttgtggagaccaccaggagcccagagtcagtgtcaaggtcagctcacacaccctctgacatagagttgatgctgcaagactaccagcaggcccatgaggaggccaaggtggagattgcccgggcccgagaccaactgcgggagcggactgaacaagagaagctgagaatccaccagaagatcatttcccagctattgaaggaagaggataaactacataccttggccaattccagctccctgtgcaccagctctaatggaagcctctcgtctggcatgacctctggctataatagcagcccagccttgtcaggccagctccagttcccagagaatatggggcatacaaacttgcctgattccagggatgtatggataggggatgagcgaggaggccattctgcagtgaggaagaactctgcctacagccacagagcctccctgggcagttgctgctgttcaccatccagtctgtccagcttggggacctgcttttcctcctcctaccaggatttggccaagcatgtcgtggacacttctatggctgatgtaatggctgcttgttcggataatttgcacaacctcttcagctgccaggcaactgctggctggaactatcagggtgaggagcaggcggtgcagctttactacaaggtgttttctcccactcggcatggcttcctgggggcaggtgtggtgtcccagccgctgtctcgtgtgtgggcggctgtcagtgaccccactgtgtggcccctgtattacaagcccatccagacagcaaggctgcatcagcgagtgaccaacagcatcagcctggtgtacttggtgtgcaacaccaccctgtgcgcactgaagcagccacgggatttctgttgtgtctgcgtggaagccaaagagggtcacctgtctgtcatggcagcccagtctgtgtatgatacatccatgccaagacccagcagaaaaatggttcgcggggagatcctgcccagtgcctggatcttgcagcccatcactgtggaagggaaggaagtcaccagagtcatctacttggcccaggtggaacttggtgctccaggcttcccacctcagctcctgagctctttcatcaaacggcagccactggttatagccagactggcttccttccttggtaggtagcatctcaccgtcaagatggtgctgctgagatgcaggcccaggctgctcaagagagacactgtggcagctccttgttactttccataccacagtgcaggaaaagctgatgctacctgctgtggccgattggggcagacagcactggcccagggatgctagcaaagcccagtcagtacttggtcacagctggcaccagtgcagagcaaacggcctgagctcctggcccagactatccagagtgaatgcagctccgctcaccttttggatttctcacctttctttcctgtttctgggactctgcggcagacaggacacttaaggaccaggactgggcacagccagcagagccggggactgcagtgctttggcaaggtgcttccgcaggctggtagggaagcaggcagccactggccaagactctgttctgaatctacctcctctagcattcagctctactgtgtgatgggacgttaaaaataccaaaacagaaagagggtttaaaaaacagctgcacaaaccagaacaccgattcagaatcttttctccctcttgagtttttgcaaaatactttattattgatttttgctttttttctccctttccctcccaggagaagacatttgggtcttggcctgaggcaggggtgttgagcgatgatgctctgatatggagctgtcactctagagctcggtcagatggaagacactatagaaccaggttggacagatttggggtcagggttggaggctgagttcttttgaggactggttggagtggcagccagatggtggctgctgacaaggcaagaggaatttcagagattaaacattgtcctttgaggaagggagaggaggtgaatgaactcccagaggaggtgagtggcttgttgggaggaagctcagttccagaacttacctcagtgcacttgggaggggtggagtcctgagcattccatgatttctgccctggccccacctatcctaggatggggtgggatggagagtgggttcagttttcttgtactttagcctggctgaacatgaactttgtgtttacctggaagtggtaggggtgggagagattctcatctttagttctggtgcccaaaatctttggtagatggagggaactggggattcagaagatgtggtaaaggtctatttctgtagtgtggcagagatgtgtttttctaaagtgtttgcagggcatttttccctcttacctcagattaagttatttatatattgttgattgaaggttttttaaaattgcttttaaacttctatttctcgggtaaattttttggtgacatgatatatttaacaccctatttatatactcctacctcttttcatataaatctcttactaagactactgaccaaaaaagaacattttaaaattaaaagtcctctgtgtacttta

SEQ ID NO: 205649 - protein, 1572 aa, Artificial Sequence
  derived and/or modified sequence
MASSAREHLLFVRRRNPQMRYTLSPENLQSLAAQSSMPENMTLQRANSDTDLVTSESRSSLTASMYEYTLGQAQNLIIFWDIKEEVDPSDWIGLYHIDENSPANFWDSKNRGVTGTQKGQIVWRIEPGPYFMEPEIKICFKYYHGISGALRATTPCITVKNPAVMMGAEGMEGGASGNLHSRKLVSFTLSDLRAVGLKKGMFFNPDPYLKMSIQPGKKSSFPTCAHHGQERRSTIISNTTNPIWHREKYSFFALLTDVLEIEIKDKFAKSRPIIKRFLGKLTIPVQRLLERQAIGDQMLSYNLGRRLPADHVSGYLQFKVEVTSSVHEDASPEAVGTILGVNSVNGDLGSPSDDEDMPGSHHDSQVCSNGPVSEDSAADGTPKHSFRTSSTLEIDTEELTSTSSRTSPPRGRQDSLNDYLDAIEHNGHSRPGTATCSERSMGASPKLRSSFPTDTRLNAMLHIDSDEEDHEFQQDLGYPSSLEEEGGLIMFSRASRADDGSLTSQTKLEDNPVENEEASTHEAASFEDKPENLPELAESSLPAGPAPEEGEGGPEPQPSADQGSAELCGSQEVDQPTSGADTGTSDASGGSRRAVSETESLDQGSEPSQVSSETEPSDPARTESVSEASTRPEGESDLECADSSCNESVTTQLSSVDTRCSSLESARFPETPAFSSQEEEDGACAAEPTSSGPAEGSQESVCTAGSLPVVQVPSGEDEGPGAESATVPDQEELGEVWQRRGSLEGAAAAAESPPQEEGSAGEAQGTCEGATAQEEGATGGSQANGHQPLRSLPSVRQDVSRYQRVDEALPPNWEARIDSHGRIFYVDHVNRTTTWQRPTAPPAPQVLQRSNSIQQMEQLNRRYQSIRRTMTNERPEENTNAIDGAGEEADFHQASADFRRENILPHSTSRSRITLLLQSPPVKFLISPEFFTVLHSNPSAYRMFTNNTCLKHMITKVRRDTHHFERYQHNRDLVGFLNMFANKQLELPRGWEMKHDHQGKAFFVDHNSRTTTFIDPRLPLQSSRPTSALVHRQHLTRQRSHSAGEVGEDSRHAGPPVLPRPSSTFNTVSRPQYQDMVPVAYNDKIVAFLRQPNIFEILQERQPDLTRNHSLREKIQFIRTEGTPGLVRLSSDADLVMLLSLFEEEIMSYVPPHALLHPSYCQSPRGSPVSSPQNSPGTQRANARAPAPYKRDFEAKLRNFYRKLETKGYGQGPGKLKLIIRRDHLLEDAFNQIMGYSRKDLQRNKLYVTFVGEEGLDYSGPSREFFFLVSRELFNPYYGLFEYSANDTYTVQISPMSAFVDNHHEWFRFSGRILGLALIHQYLLDAFFTRPFYKALLRILCDLSDLEYLDEEFHQSLQWMKDNDIHDILDLTFTVNEEVFGQITERELKPGGANIPVTEKNKKEYIERMVKWRIERGVVQQTESLVRGFYEVVDARLVSVFDARELELVIAGTAEIDLSDWRNNTEYRGGYHDNHIVIRWFWAAVERFNNEQRLRLLQFVTGTSSIPYEGFASLRGSNGPRRFCVEKWGKITALPRAHTCFNRLDLPPYPSFSMLYEKLLTAVEETSTFGLE

SEQ ID NO: 205650 - protein, 118 aa, Artificial Sequence
  derived and/or modified sequence
MASSAREHLLFVRRRNPQMRYTLSPENLQSLAAQSSMPENMTLQRANSDTDLVTSESRSSLTASMYEYTLGQAQNLIIFWDIKEEVDPSDWIGLYHIDENSPANFWDSKNRGVTGTQK

SEQ ID NO: 205651 - protein, 133 aa, Artificial Sequence
  derived and/or modified sequence
MASSAREHLLFVRRRNPQMRYTLSPENLQSLAAQSSMPENMTLQRANSDTDLVTSESRSSLTASMYEYTLGQAQNLIIFWDIKEEVDPSDWIGLYHIDENSPANFWDSKNRGVTGTQKGQIVWRIEPGPYFME

SEQ ID NO: 205652 - DNA, 402 bp, Artificial Sequence
  derived and/or modified sequence
atggccagcagcgccagagagcacctgctgttcgtgagaagaagaaacccccagatgagatacaccctgagccccgagaacctgcagagcctggccgcccagagcagcatgcccgagaacatgaccctgcagagagccaacagcgacaccgacctggtgaccagcgagagcagaagcagcctgaccgccagcatgtacgagtacaccctgggccaggcccagaacctgatcatcttctgggacatcaaggaggaggtggaccccagcgactggatcggcctgtaccacatcgacgagaacagccccgccaacttctgggacagcaagaacagaggcgtgaccggcacccagaagggccagatcgtgtggagaatcgagcccggcccctacttcatggagtag

SEQ ID NO: 205653 - DNA, 4719 bp, Artificial Sequence
  derived and/or modified sequence
atggctagctctgctcgagaacaccttttgttcgtgcgccgccgcaatccacagatgcgttatactctctccccagaaaacctccagtccctcgcagcccagtcctctatgcccgaaaatatgacactccaaagggccaatagcgacacagacctggtaacatctgagtctcgcagcagtcttacagcctccatgtacgagtacaccttggggcaggcgcagaatctgattatattttgggacattaaggaagaggtggacccaagcgactggataggactgtaccatattgacgaaaatagccctgccaacttttgggactccaagaaccggggggtaaccggaactcagaagggccaaatcgtatggaggatcgaacccggtccatacttcatggaacccgagataaagatttgttttaaatactaccacggtatatctggggcactgcgagcaacgactccatgtatcactgtgaaaaatcccgcagtgatgatgggggccgaaggcatggagggcggtgccagcggcaatttacactcccgtaagctggtgagtttcacactatccgatcttcgggcggtgggtctgaagaaaggcatgttctttaatccagatccctacctgaagatgtcgattcagcctggcaagaaaagtagcttcccaacctgcgcgcatcacggacaggaacggaggagtacaattatcagtaacacaacaaatcctatttggcaccgagagaaatatagcttcttcgcactgttaacggatgttcttgaaatcgagattaaggacaaatttgcaaagtccagaccaattatcaaacgcttcctgggcaagctgactataccagtccagcgcttgctagaacgccaagccataggcgaccaaatgctgtcgtataatcttgggcggaggctgcccgctgaccacgtcagtggttacttgcagttcaaagtggaagtgacctcgtcagtgcacgaagacgcttctcctgaggccgtgggcaccatcctcggagtaaactctgtgaatggcgacttaggaagcccttctgacgacgaagacatgcccgggtcacatcacgattcacaagtgtgtagcaatggaccagtgagcgaggatagtgccgcagacggaacgccaaagcactcgttcagaacgtcctctaccctggaaatagatacagaggagctgacatctacatcaagcagaaccagcccacccaggggaagacaggacagtcttaacgactatctagacgcaattgagcataatggacactcccggccgggtactgcaacatgcagcgagagatctatgggggccagccccaagctgcggtctagtttccccacagacacacgactgaatgcaatgctccatatcgattcggatgaggaggatcacgagtttcaacaggatctgggatacccctcaagtttggaggaggaaggtggtctcatcatgttctcaagggcctcgcgggcggacgatgggtctctgaccagtcagaccaagcttgaggataatccagttgagaacgaagaagcaagcactcacgaagcggcttcgttcgaagacaaacccgagaatctacctgagcttgcggagagcagcctcccagcaggccctgccccggaggaaggggagggcgggcctgagccgcagccgtccgccgaccaggggtcagccgagctttgcggatctcaagaagtcgatcagccaactagcggtgccgacactggaacctccgatgcaagcggaggttctcgacgggctgtcagcgagaccgaatccctggaccagggaagcgagccttcacaggtgagtagtgaaacagagccatctgatcctgcccggacagagtcagtgagcgaagcttctactcgaccggaaggggaaagcgacttagagtgcgccgattccagttgtaacgagagtgttaccactcagcttagctcagtggatactcgttgttcctccctggagagtgctcgttttccagagacacccgcgtttagctctcaagaggaggaagatggggcctgtgcagcagagccaacaagttcgggtccagctgaagggagccaggaatccgtctgcactgccggaagtctaccagtcgtgcaggtgccttcaggcgaggacgaaggaccgggcgctgagagtgctacagtacccgatcaagaggaacttggtgaagtctggcagcggcgcggaagcctcgaaggagccgccgctgccgctgaaagcccgccacaagaggaaggatctgcgggcgaggcgcaggggacttgtgaaggggccacagcccaggaagaaggtgctacaggagggtcacaggctaatggacatcaacccctgcgttctctgccttcagtaagacaggatgtgtctcgctaccaacgcgtcgatgaagccttgccccccaactgggaggcccgcatcgatagccacggaaggattttctatgttgatcatgtgaacaggactacaacctggcagcgacctactgcccctcctgctccccaggtcctgcaaagaagtaacagtatacagcagatggagcagctgaacaggcgataccaatcaatccggcgcaccatgactaatgaaaggccagaggaaaacactaatgccatagacggggctggggaggaggccgatttccaccaggcctccgccgattttcgacgtgagaatattctcccacatagcaccagtaggtctcggattactctgctgctacagagccctccagtgaagttcctaatatctccagaattttttacggtgctgcactctaatccctctgcttatagaatgttcacaaataacacctgcctgaagcatatgatcacaaaggtgcgcagggatacacaccattttgagaggtaccagcataatcgggatttggtgggttttctgaacatgtttgccaacaaacaactcgagctgccccgaggctgggagatgaagcacgaccaccagggaaaggcattcttcgtggatcacaactcgcgaactactacattcatagatccacgacttccactgcagtcttctcggcctacctccgctctggtacataggcagcatcttacccgtcagaggtcacatagtgcaggagaagtgggcgaagactcacgtcatgctggcccacccgtgctgcctagacctagctctaccttcaatactgtgtcccggccccagtaccaggatatggtcccagtagcatacaatgataagattgtggctttcctgcgacaacctaacatttttgaaatcctccaagaacgccaacccgatctgaccaggaatcatagcctccgcgaaaagatccaattcatacggacggaggggacacccggtctcgtgcgactgagcagtgatgctgatttggtgatgctgctgagtttatttgaagaagagattatgtcctacgtgcctcctcacgccctcctccaccccagctactgccagagtccccgagggagtccagtctctagcccgcagaattcccccggtactcagcgagcgaatgcacgcgcgcccgctccctacaagcgggactttgaagcaaaactccggaatttttaccgcaagcttgagacgaaaggatacgggcaaggcccaggtaagctcaaacttattatccgaagagaccatctgttggaggacgcgttcaatcagatcatgggctattcgaggaaggacctccagagaaataaactttatgtgaccttcgttggagaagagggactggactactccggccctagccgggagtttttctttctggtgagtcgcgagctttttaacccatactacggactgttcgagtactctgccaatgacacatacactgtccaaattagtcccatgtcagcctttgtagataaccaccatgagtggtttagatttagcgggagaatcctcggcctggccctcatacaccaatacctcctggatgccttcttcacacggccattttataaagcgctgcttagaattctgtgcgatctcagcgacctggagtacctggatgaggagttccaccagagccttcaatggatgaaagacaatgacatccacgatatacttgatctgacctttaccgtaaacgaggaggtgtttggccagattaccgaaagagagcttaagcctggaggcgccaatattcctgttacggagaaaaacaagaaagagtatatagagaggatggtaaagtggcggatagagcgaggggtcgtccagcagactgagtccctggtgagaggcttctacgaggtagtggatgcccgccttgtctccgtatttgacgccagggagttagagctggtaatcgctgggactgccgaaattgacttgtctgactggaggaacaataccgagtaccgagggggatatcacgacaaccacatcgttatccggtggttctgggccgctgtggaacgttttaacaacgagcagagactgcggttgctgcagtttgtgaccggcacaagcagtatcccctacgagggcttcgcctctttgagggggtctaacggccctcgtaggttctgtgtggagaagtgggggaaaatcacagccctgccaagggcccacacctgttttaaccggttggacttacctccatacccttccttttcaatgctgtacgagaagctgctgactgctgtggaagaaacatcaaccttcggcctggagtag

SEQ ID NO: 205654 - DNA, 402 bp, Artificial Sequence
  derived and/or modified sequence
atggcttcctccgccagggaacatctgctgttcgtgcgacgtaggaaccctcagatgaggtatacactatcgcccgagaacctacagtctctggcggcacaatcctctatgcctgagaatatgacgctgcaaagggctaatagtgataccgatctggtaacgagtgaatccaggtcctccttgaccgccagtatgtatgaatatacattgggccaggcccagaacttgatcatcttctgggacattaaagaggaggtagatccgagtgattggatcggcctgtatcatatcgacgaaaattccccagccaacttctgggacagcaagaacaggggggtgacaggcactcagaaaggtcaaatcgtttggcggattgaacctggaccctattttatggaatag

SEQ ID NO: 205655 - DNA, 4719 bp, Artificial Sequence
  derived and/or modified sequence
atggccagcagcgcccgggagcacctgctgtttgtgagaagaagaaacccccagatgagatacaccctgagccctgagaacctgcagagcctggccgcccagagctccatgcctgagaacatgaccctgcagagggccaacagcgacacagacctggtgaccagcgagagccgcagcagcctgacagcctccatgtatgagtacaccctgggccaggcccagaacctgatcatcttctgggacatcaaggaggaggtggaccccagcgactggattggcctgtaccacattgatgagaacagccctgccaacttctgggacagcaagaacagaggagtgacaggcacccagaagggccagatcgtgtggagaattgagcccggcccctacttcatggagcctgagatcaagatctgcttcaagtactaccacggcatcagcggggccctgcgggccaccaccccctgcatcaccgtgaagaacccagctgtgatgatgggcgctgagggcatggagggcggggccagcggcaacctgcacagcaggaagctggtgtccttcaccctgagtgacctgcgggctgtgggcctgaagaagggcatgttcttcaacccagacccctacctgaagatgagcatccagcccgggaagaagagcagcttccccacctgtgcccaccacggccaggagaggaggagcaccatcatcagcaacaccaccaaccccatctggcaccgggagaagtacagcttctttgccctgctgacagatgtgctggagattgagatcaaggacaagtttgccaagagccggcccatcatcaagcgcttcctgggcaagctgaccatccctgtgcagaggctgctggagcggcaggccatcggggaccagatgctgagctacaacctgggccgccgcctgcctgctgaccacgtgtctggctacctgcagttcaaggtggaggtgaccagctctgtgcatgaagatgccagccctgaggccgtgggcaccatcctgggcgtgaacagcgtgaatggagacctgggcagccccagtgatgatgaggacatgcctggcagccaccacgacagccaggtgtgcagcaatggacctgtgtctgaggacagcgctgctgatggcacccccaagcacagcttccgcaccagcagcaccctggagattgacacagaggagctgaccagcaccagcagcaggaccagccccccccggggccggcaggacagcctgaatgactacctggatgccatcgagcacaacggccacagcaggcctggaacagccacctgcagcgagaggtccatgggcgccagccccaagctgcggagcagcttccccacagacacccggctgaatgccatgctgcacatcgacagtgatgaggaggaccacgagttccagcaggacctgggctaccccagcagcctggaggaggagggcggcctcatcatgttcagccgggccagcagagcagatgatggcagcctgaccagccagaccaagctggaggacaaccctgtggagaatgaggaggccagcacccatgaagctgccagctttgaggacaagccagagaacctgcctgagctggccgagagcagcctgcctgctggccctgcccctgaggagggggagggcggccctgagccccagcccagcgctgaccagggcagcgctgagctgtgtggcagccaggaggtggaccagcccaccagcggggctgacaccggcaccagtgatgccagcggcggcagccggcgggctgtgtctgaaacagagagcctggaccagggcagcgagcccagccaggtgagcagcgagacagagcccagcgaccctgccaggacagagagcgtgtctgaggccagcaccaggcctgagggggagagtgacctggagtgtgccgacagcagctgcaatgaatctgtgaccacccagctgagctctgtggacacccgctgcagcagcctggagagcgcccgcttccctgagaccccagccttcagcagccaggaggaggaggatggagcctgtgccgctgagcccaccagcagcggccctgctgagggcagccaggagagcgtgtgcacagctggcagcctgcctgtggtgcaggtgcccagcggggaggatgagggccctggagctgagagcgccaccgtgcctgaccaggaggagctgggggaggtgtggcagaggcggggcagcctggagggcgctgctgctgctgctgagagccccccccaggaggagggcagcgctggggaggcccagggcacctgtgagggcgccacagcccaggaggagggcgccaccggcggcagccaggccaacggccaccagcccctgcggagcctgcccagcgtgcggcaggatgtgagccgctaccagagggtggatgaggccctgccccccaactgggaggccagaattgacagccacggccgcatcttctacgtggaccacgtgaacagaaccaccacctggcagaggcccacagcccccccagccccccaggtgctgcagaggagcaacagcatccagcagatggagcagctgaacagacgctaccagagcatccggaggaccatgaccaatgaaagacctgaggagaacaccaatgccattgatggagctggggaggaggccgacttccaccaggccagcgctgacttcagaagagagaacatcctgccccacagcaccagccgcagccgcatcaccctgctgctgcagagcccccctgtgaagttcctgatcagccctgagttcttcaccgtgctgcacagcaaccccagcgcctacaggatgttcaccaacaacacctgcctgaagcacatgatcaccaaggtgcggcgggacacccaccactttgagcgctaccagcacaacagagacctggtgggcttcctgaacatgtttgccaacaagcagctggagctgccccggggctgggagatgaagcatgaccaccagggcaaggccttctttgtggaccacaacagcaggaccaccaccttcatcgacccccggctgcccctgcagagcagccggcccaccagcgccctggtgcaccggcagcacctgacccggcagaggagccacagcgctggggaggtgggggaggacagcagacatgctggcccccctgtgctgccccggcccagcagcaccttcaacacagtgtcccggccccagtaccaggacatggtgcctgtggcctacaatgacaagatcgtggccttcctgcggcagcccaacatctttgagatcctgcaggagcggcagcctgacctgaccaggaaccacagcctgcgggagaagatccagttcatcagaacagagggcaccccaggcctggtgcggctgagcagtgatgctgacctggtgatgctgctgagcctgtttgaggaggagatcatgtcctatgtgccccctcatgccctgctgcaccccagctactgccagagcccccggggcagccctgtgagcagcccccagaacagccctggcacccagagggccaatgcccgggccccagccccctacaagagggactttgaggccaagctgaggaacttctacaggaagctggagaccaagggctacggccagggccctgggaagctgaagctgatcatcagaagagaccacctgctggaggatgccttcaaccagatcatgggctacagcaggaaggacctgcagaggaacaagctgtatgtgacctttgtgggggaggagggcctggactacagcggccccagccgggagttcttcttcctggtgtcccgggagctgttcaacccctactacggcctgtttgagtacagcgccaatgacacctacacagtgcagatcagccccatgtctgcctttgtggacaaccaccacgagtggttccgcttcagcggccgcatcctgggcctggccctgatccaccagtacctgctggatgccttcttcacccggcccttctacaaggccctgctgcgcatcctgtgtgacctgagtgacctggagtacctggatgaggagttccaccagagcctgcagtggatgaaggacaatgacatccatgacatcctggacctgaccttcaccgtgaatgaggaggtgtttggccagatcacagagcgggagctgaagccaggaggagccaacatccctgtgacagagaagaacaagaaggagtacatcgagaggatggtgaagtggagaattgaaagaggagtggtgcagcagacagagagcctggtgcggggcttctatgaggtggtggatgcccggctggtgtctgtgtttgatgcccgggagctggagctggtgattgctggaacagctgagattgacctgagtgactggaggaacaacacagagtacagaggaggctaccatgacaaccacatcgtcatccgctggttctgggccgctgtggagcgcttcaacaatgagcagaggctgcggctgctgcagtttgtgacaggcaccagcagcatcccctatgagggctttgccagcctgcggggcagcaatggcccccggcgcttctgtgtggagaagtggggcaagatcacagccctgccccgggcccacacctgcttcaaccggctggacctgcccccctaccccagcttctccatgctgtatgagaagctgctgacagctgtggaggagaccagcaccttcggcctggagtag

SEQ ID NO: 205656 - DNA, 402 bp, Artificial Sequence
  derived and/or modified sequence
atggccagcagcgcccgggagcacctgctgtttgtgagaagaagaaacccccagatgagatacaccctgagccctgagaacctgcagagcctggccgcccagagctccatgcctgagaacatgaccctgcagagggccaacagcgacacagacctggtgaccagcgagagccgcagcagcctgacagcctccatgtatgagtacaccctgggccaggcccagaacctgatcatcttctgggacatcaaggaggaggtggaccccagcgactggattggcctgtaccacattgatgagaacagccctgccaacttctgggacagcaagaacagaggagtgacaggcacccagaagggccagatcgtgtggagaattgagcccggcccctacttcatggagtag

SEQ ID NO: 205657 - DNA, 4719 bp, Artificial Sequence
  derived and/or modified sequence
atggccagcagcgcccgggagcacctgctgttcgtgcggcggcggaaccctcaaatgcgctatacactttccccggaaaatctacagtcacttgcagcccaaagctcgatgccagaaaatatgactctgcagcgcgcgaattccgatacagacctggtgaccagcgagagccgaagcagcttaactgcttccatgtacgagtatacccttggccaggcacagaacctgattatattttgggacatcaaagaagaggtcgaccccagcgattggatcgggctttaccatattgacgaaaattcgccagccaacttctgggactctaaaaacagaggagtcaccggaacacagaagggacaaatagtgtggcggatcgaaccagggccatattttatggagcccgaaataaagatctgcttcaaatactatcatggtatatccggggccctccgagctacaactccatgcattaccgtaaagaaccctgctgtcatgatgggcgcagagggcatggagggaggagcctccggcaatctgcacagccgcaagctggtgtcattcactcttagtgatctgcgggccgtgggcctgaagaaaggcatgttttttaaccctgatccttatctaaaaatgagcattcagcccggtaaaaaatccagcttccccacgtgtgcgcaccacggccaagagcgacggtcaaccataatatccaatacaaccaaccccatatggcaccgagagaaatactccttcttcgcgctgcttactgatgtcttagagatagagattaaggacaagttcgcgaaatccaggcctatcatcaagcgcttcttgggtaagctcactatacccgtccagaggctactggaacgacaggcgatcggtgaccagatgctgtcctacaacctgggccggaggctgccggcggatcacgtgagtggctacctgcagttcaaagtcgaagtaaccagctctgttcatgaggacgcgtccccagaggctgtaggcacaatcctgggtgtgaacagcgtgaacggagacctcggctctccttctgatgatgaggacatgcctggatcccaccacgatagtcaggtttgcagcaacgggcccgtcagcgaggactccgctgccgatgggacaccaaaacattcctttcggacgtcgtccacactggaaatcgatacagaggaactgaccagtacctcttctcgcacctccccacctcggggcagacaggattccctcaacgactatttagatgctattgaacacaatggacactcccggcccggaactgctacctgctcagagcgttcaatgggggcctctccaaagcttaggagcagtttccccacagacaccaggctcaatgcaatgctccacatcgactctgacgaggaggatcacgaatttcagcaggatctcggatacccatcctccctggaagaggaaggtgggctcattatgttctctagagcatcacgcgcagatgacggctctcttacatctcagaccaaactcgaggataaccctgttgaaaacgaagaagcatctacccacgaggcagcgtctttcgaggacaaacccgagaacttaccagagttggccgaatcaagcctccctgccggacctgcacctgaagagggagagggcgggccagagcctcagccgtctgccgatcagggaagtgcagaactctgcggtagtcaggaagtggaccaaccaacaagcggcgcggacaccgggactagcgatgcctccggagggtctcggcgagcggtatctgagacagagtcccttgaccagggctccgagccctcccaggtgagctctgagactgagccatccgacccagcgagaaccgagagtgtcagcgaggcctctacccgccctgagggggagagcgatctggaatgcgccgactccagttgcaacgaatccgtaacaactcagctgagctctgttgatacaaggtgtagctcactcgagagtgctcggtttccagaaacgccggccttctcatcccaagaggaggaggatggcgcttgcgccgccgaaccaactagctccggacctgcagaggggtcccaggaaagcgtgtgtacagccggaagtcttcctgtcgtgcaagttccatccggagaggatgaaggacccggagccgagagtgctactgttcctgatcaggaggaactgggggaggtgtggcaacgacgaggaagcctcgaaggagccgctgcagccgccgaatcccccccacaggaggaaggttctgcaggagaggcacagggcacctgcgagggcgccacggcccaggaggagggtgcgacaggcggatcccaggccaacggacaccagccccttcggtctttgccttctgtcagacaagacgtgagccgctatcagagggtggatgaggctctgccacctaactgggaggcacgaatagactcccacggcagaatcttctacgtggaccatgtaaacaggacaacaacttggcagaggccaactgctccgccagctcctcaggtcctgcagcgctccaactccatacaacagatggagcagctgaacaggcggtatcagtccattcgccgtacaatgacaaatgaacgccctgaggaaaatacaaatgctatagatggggccggcgaggaggccgatttccatcaggcgagtgcagatttcaggagggaaaatattctgccgcacagtacttcacgcagcagaatcacactgcttttgcagagcccccccgtgaaatttctgatatcccctgagttctttaccgttttacatagcaatccatcagcttataggatgtttacgaacaatacctgtctcaagcacatgattacgaaagttcggcgggatacccaccacttcgagaggtaccaacataaccgggacctcgtaggattcctgaacatgtttgctaacaagcagctggaattaccccgcggatgggagatgaaacatgaccaccaggggaaagcctttttcgttgaccataatagccgcaccaccacattcatcgatccacgcctcccgcttcagagcagccgccccacctcagcacttgttcaccgacaacaccttactagacagagatcgcacagtgcaggggaggtcggagaagatagtagacacgccggcccaccagtgctccccaggccttctagtaccttcaatacggtgtctaggcctcagtaccaggacatggtccctgtggcatataacgacaaaatagtggccttcttgaggcagccaaacattttcgagatacttcaggagaggcagccagacctaaccaggaatcactcgctccgggagaaaatacagtttattagaactgagggtacccccgggctggttaggttgagctcagatgccgatctggtgatgttgctttcactttttgaggaagagatcatgtcctacgtcccaccacacgccttgttgcacccctcctattgccaaagcccaaggggctctccggtatcttccccccaaaactcacctggaacccagagggctaacgctagggcacctgctccatacaagcgtgattttgaggcaaagctcagaaacttttacaggaaactggaaaccaaaggctacggccagggccccggcaagctgaaactgattatacgacgcgaccatttgctcgaggacgcttttaatcagatcatgggatactctaggaaagatttgcagagaaataagttatatgtgaccttcgttggtgaagagggactggattacagcggccctagtcgagaatttttctttcttgtgagtagagaattgttcaacccatattacggcctatttgaatattcagcgaatgacacctataccgtgcaaattagtccgatgtctgcatttgtggataatcaccacgagtggttcaggttctcaggccgaattctcggactggctttaatccatcaatatctgctggacgcattctttactcgccctttctataaagctctgctccgcatcctctgcgacttgtcagatctcgaataccttgatgaggagtttcaccaaagcctgcagtggatgaaagacaacgatatacacgacattttggatttaacatttactgttaatgaagaagttttcggtcagataactgaacgggaattaaagccggggggcgccaatataccggtaaccgagaaaaacaagaaggagtatatcgagcggatggtgaagtggcgtattgaacggggcgttgtacaacagacagagtcgctggtaaggggcttttacgaggtggttgacgccagactggtgtcggtcttcgacgcccgagaactggagctggtgatcgctggcactgctgaaattgacctgagcgactggcgcaataatacagaatatcgcggcggttaccacgataaccatatcgtgatccgctggttctgggccgccgtggaaagattcaataatgagcagcggctgaggctgcttcagttcgtgaccgggacaagctctattccctatgagggctttgccagcctcaggggctctaacggaccaaggagattctgtgtggagaaatgggggaagatcacggctcttccaagggctcacacctgctttaataggctcgacctccctccctacccctctttctcaatgttgtatgagaaactgctaaccgctgtggaggagacctccaccttcggactggaatag

SEQ ID NO: 205658 - DNA, 402 bp, Artificial Sequence
  derived and/or modified sequence
atggccagcagcgcccgggagcacctgctgttcgtgcggcggcggaatccccagatgagatacactttatctccagagaaccttcagtcgttggccgcccagagctcaatgcccgagaatatgaccctgcagcgggctaactcagacaccgacctggtgacctccgagtccagaagctccctaaccgcgagtatgtatgagtacactctgggccaggcccagaatctgattatcttctgggacatcaaggaagaagtggatccttcagattggatcggattatatcacatcgacgagaacagccccgccaatttttgggacagcaagaatcggggcgtgacaggtactcagaagggacagatcgtctggcgcatcgagcctggtccgtatttcatggaatag

SEQ ID NO: 205659 - DNA, 4719 bp, Artificial Sequence
  derived and/or modified sequence
atggcctcatccgctcgtgagcacttactattcgttcgcaggaggaatccacagatgagatatactctctctccggaaaacttacaatctctggccgctcaaagctccatgcccgaaaacatgacattacaacgcgcaaattcggacactgacctggtcacttcggagagtagatctagcctgactgccagtatgtatgagtacaccttgggacaagcacagaaccttattattttctgggacatcaaagaagaggtagatcccagtgactggatcggtctgtatcacattgatgagaattctccggctaatttttgggacagcaagaatagaggggtcaccggtactcagaaagggcagatcgtgtggcggatcgagccaggcccttacttcatggagccggaaatcaaaatctgctttaaatactatcacggaatctccggagccctcagggctactaccccctgcattaccgtaaaaaatccagctgtgatgatgggcgcagaggggatggagggtggagcctccggaaacctccacagtcgtaaactggtgtctttcactctaagcgatctgagggccgtaggcctaaaaaagggtatgtttttcaaccctgacccctatttaaaaatgagcatccagcccggtaagaaaagcagctttcccacttgcgcccaccacggccaggaaaggagaagtactataatttccaacaccaccaaccctatatggcaccgggaaaagtactcttttttcgcattactcaccgacgtcctcgaaatagagattaaggataagtttgccaaaagcagacctattattaaacgcttcctgggaaaactgactattccagtgcagaggcttttggaacgtcaggccatcggtgatcaaatgttgtcatataatcttggtcggcgattacccgcagatcatgtttctgggtaccttcagtttaaggtcgaagtcacctcgtctgtccacgaggacgcatcacccgaagccgtgggaactattctcggtgtgaatagtgtgaatggagatttgggctcccccagtgacgatgaagacatgcccggtagccatcatgactctcaggtgtgcagtaatggacccgtgagtgaggacagtgccgcagacggtacaccgaagcactccttccgcacaagtagcaccctggagattgacaccgaagagctgacctcgaccagcagcaggacatcgcctcctcggggacgacaggattctttgaatgactatctggatgctattgagcacaacggtcactctagaccaggtaccgccacctgttctgaacgctctatgggcgcatcccctaaacttcgctcaagctttccgactgacaccaggctcaatgcaatgcttcacatagatagcgacgaggaggaccatgagttccaacaggatctcggctatcctagctctcttgaggaagagggaggactgatcatgttttcacgggcatcaagggctgacgacggttctctcacgtcgcagaccaaattggaggacaatccggtggagaatgaagaagctagcacacacgaagccgctagcttcgaggataaacctgagaacctgccagagttggccgagtcatctctgcctgctggaccggctcccgaggagggagaaggtgggcctgagccgcaaccctcagctgatcagggtagtgccgagctgtgtggcagccaagaggtggaccaacctaccagcggtgctgatactgggaccagcgatgcatcagggggttctcgcagagcagtttcagagacggagtcgctggaccagggttctgaaccctctcaggtgtcatctgagactgaaccttccgatccagcaagaacggagtctgtgtcagaagcgtccacccgacccgaaggtgagtcagatctcgagtgtgcagactccagctgtaacgaaagtgttacaacccaactcagttctgtggacacaaggtgtagtagcttggagagtgctcgattccccgagacacccgcattttcttctcaagaggaggaagatggcgcttgtgcagccgaaccgacctcttctggccctgcagaaggatctcaggaatctgtgtgtacagcaggttccttgcctgttgtgcaagtcccatctggggaggatgaaggccctggcgcagagtctgcaacagtgccagatcaggaagaactgggcgaagtctggcagcgccgaggcagcctcgagggtgctgctgccgcagctgaaagcccaccgcaggaggaggggagcgccggtgaggcccagggaacatgcgagggggctaccgcacaggaggagggcgcaaccggagggagtcaggctaatgggcaccaacccctgcgcagcctccccagtgtgaggcaagacgtgagccgctaccagcgagtggacgaagcactgccccctaattgggaagcacgcattgactctcatggaagaatcttctatgtcgatcatgttaacagaaccactacttggcaacggccaactgctccaccagccccacaggtcttgcaaaggtctaactctatccagcaaatggaacagcttaatcggaggtatcagagcatccggaggactatgactaacgaacgccctgaggaaaataccaacgccattgacggcgctggcgaggaagcagactttcatcaggcctctgcagacttccgccgtgagaacatactgcctcacagcaccagtaggtcaagaatcacactgctgctgcagtcccccccagtgaagttcttgatcagtcctgaattttttaccgttctgcactccaatccctcagcttatcgcatgttcacgaataacacttgcctcaagcatatgataactaaagtgcgtcgcgatactcaccatttcgaaaggtaccagcacaatcgagacctagtgggtttcctcaatatgtttgctaataagcaactcgaactccccaggggctgggaaatgaaacatgaccaccaagggaaagccttcttcgtggaccataacagtaggacaacaaccttcatcgatccacgactgccattgcagtcgtctcgacctacgtcggccctggtgcatagacagcatctgacaaggcagagatcccactcagctggagaggtgggagaggattcccgtcatgcgggaccgccagttctgccacgcccaagcagcacgtttaacacagtctcaaggcctcagtatcaggacatggttccagtagcctacaacgacaaaatagtcgctttcctacgacagcccaatatcttcgaaattctacaagagcgacagcccgatctcacccgcaatcactcactgcgggaaaagatccagttcatccggaccgaaggaacacccggtctcgtgcggctctcatctgacgccgatctggtcatgctgctgtcactttttgaggaagagattatgagttacgtgcctccccatgcacttctgcatccctcctattgtcaatcccccagaggctcccctgtctcaagtccccagaattctccaggtacccagagagccaacgccagagcacctgccccttacaaacgcgatttcgaagcgaagctgcggaatttttataggaagctggagaccaagggctacggtcagggtcccggaaagctgaagcttattataagacgagaccatttgctcgaagatgcctttaatcagataatgggttactctcgtaaggacctacagaggaataagctctacgtcacttttgtaggcgaagagggcctcgattacagcggacctagtcgcgaattctttttccttgtgagccgcgagctgtttaacccctattatggtcttttcgagtattccgctaatgacacttacactgtgcaaatctcaccaatgtcagcctttgttgacaaccaccatgaatggttccgcttctccggacgtatcctaggtctcgcactgatccatcagtacttgctagatgccttcttcacgcggcctttttacaaggcactcttaaggattctgtgcgatctgtccgatttggagtaccttgatgaagagttccatcagtcactccaatggatgaaagacaatgacatccacgacatactagacctcactttcaccgtgaacgaggaggtttttggccagatcactgaacgagaactgaaacctgggggtgcaaatatccccgtcactgagaaaaacaaaaaggagtacattgaaaggatggtgaagtggaggatcgagagaggggtggtgcagcagaccgagagtctggtaaggggtttttatgaggttgtggatgcgagactggtgtctgtcttcgacgccagggaactagaactggtaattgcaggaacagctgaaatagacctcagcgactggcggaacaataccgaataccgtggaggctaccacgataaccacattgtcattcgatggttctgggccgcagtagaaaggttcaacaatgagcagcgactgagattgctgcaatttgttacgggtacctcatccatcccctatgagggcttcgcctccttgaggggcagtaatggtccaagaaggttctgtgtcgagaagtggggcaagatcaccgcccttcctcgcgctcatacctgctttaaccgattagatctcccaccctatcctagttttagcatgctctatgaaaagctactgactgctgtggaggaaacctccacattcggactcgagtag

SEQ ID NO: 205660 - DNA, 402 bp, Artificial Sequence
  derived and/or modified sequence
atggccagcagtgccagggagcatctgttattcgtgcgaaggcgcaatccccaaatgcgatatacattaagtccggaaaacctacaatcgctcgccgcacagagctctatgccagaaaatatgaccctgcagagagccaatagtgacactgacctcgtgacttccgaaagccgctcaagtctcacagcctcaatgtatgagtacactctaggtcaggctcagaatctcattatcttctgggatatcaaggaagaagtagatccctctgactggatagggctctaccatattgatgagaactcacccgctaacttttgggactccaagaacaggggggtgactggcacccaaaaaggtcagattgtgtggagaattgagcctggcccttacttcatggagtag

SEQ ID NO: 205661 - DNA, 620 bp, Artificial Sequence
  derived and/or modified sequence
gttcttccgcaccttcctcagggaggtcccgctggccaaggtctggctgtccctcctgtcctctgcccccgcctcccttccaccggtccccgacgtgccgccagctcccagcccagcgtcccgcagggcggtgcgggcagatgccgccgaagcgtctagcgggaagggcgccggcgcggctggagctttgtaggcagccaatcccagagaagcagacgggatggctagttcagcccgggagcacctgctttttgtgaggcgtcgaaatccccagatgcggtacacattgagcccagagaacctccagagccttgccgcccagagctccatgccagagaacatgaccctgcagcgggccaacagcgacaccgacctggtgacttctgagagccgctccagcttaactgccagcatgtacgagtacacgctggggcaagcccagaacctcattatcttctgggacattaaagaggaggtggaccccagtgattggattggactttatcatatagatgagaattctccagccaacttctgggattctaagaacaggggtgtgactggaacacaaaaagggcaaattgtatggagaattgagcctgggccctatttcatggaac

SEQ ID NO: 205662 - DNA, 6926 bp, Artificial Sequence
  derived and/or modified sequence
atttgagcatcagttgagggagaggacgcttcatttcctttttggttgggaatgtgccgtgaacatcctctgctggagcttggggcctggagcaaactggggctgcagatttagacgtagacgtttccgaggacgcgagactgcagagctttgtaggcagccaatcccagagaagcagacgggatggctagttcagcccgggagcacctgctttttgtgaggcgtcgaaatccccagatgcggtacacattgagcccagagaacctccagagccttgccgcccagagctccatgccagagaacatgaccctgcagcgggccaacagcgacaccgacctggtgacttctgagagccgctccagcttaactgccagcatgtacgagtacacgctggggcaagcccagaacctcattatcttctgggacattaaagaggaggtggaccccagtgattggattggactttatcatatagatgagaattctccagccaacttctgggattctaagaacaggggtgtgactggaacacaaaaagggcaaattgtatggagaattgagcctgggccctatttcatggaaccggagataaaaatctgttttaaatattaccacggcattagtggagccctgcgagccacgaccccctgcatcaccgtgaagaacccagctgtgatgatgggggcagaaggcatggagggaggtgcttcaggaaacctgcattctcgaaaacttgttagctttacattgtcagatcttagggcagttgggctaaagaaagggatgttcttcaatcctgacccttatcttaagatgtcaattcagccaggaaagaagagcagtttccccacctgtgcccaccacgggcaggagagacggtctactatcatcagtaacaccaccaatccaatttggcaccgagagaaatattccttttttgcacttcttactgatgtcttagaaattgaaattaaagacaaatttgccaagagccgtcccatcatcaagcgttttctggggaaactaaccattccagtccagaggctgctggagcgacaagccatcggtgatcaaatgctcagctacaaccttggcagaaggctcccagctgaccacgtgagtgggtacctccagtttaaagtggaggttacgtcttctgttcatgaagatgcctctccagaagctgttggcacaatacttggagtcaattctgtgaatggagacttaggtagcccttccgatgacgaggacatgccagggagccatcacgacagccaggtgtgctctaatgggccagtttctgaggacagtgctgccgatggaacccccaagcattcattcaggactagctccactctggaaatagacacagaggaattaacctctacgtcttcaaggacctcacctcccagaggacgtcaggattcactcaatgattacttagatgctatcgaacacaatggccactccaggccggggacagcgacctgctctgagaggtccatgggtgcctctccgaaactgaggagtagttttcccactgacacaagactcaatgccatgcttcatattgattcagatgaagaagatcacgagttccagcaagacctgggttacccatcttccttggaggaggagggaggcctgatcatgtttagcagggcatccagagctgatgatggaagcctgacatctcagacaaagctggaggacaaccctgttgagaatgaggaagcctccacacacgaagctgcttcctttgaggataagccagaaaatcttccagagcttgcagagagctccttacctgcaggcccagccccagaggaaggtgaaggcggcccagagcctcaacccagtgctgaccagggcagtgctgaactgtgtggctctcaagaggtagatcagcccacaagtggcgcagacacagggacttccgatgcatcaggaggaagccgaagagccgtcagtgagaccgagtctctcgatcagggctctgagccttcccaggtgtcctctgaaacagaacccagtgatcctgccaggacagagagtgtgagcgaagccagcaccaggcctgagggagagagtgacctggaatgcgctgacagctcctgcaatgagagtgtgaccacgcagctgtcctctgtggacacacggtgctcctctcttgagagcgcacggtttcctgaaaccccagccttttcttctcaggaggaggaagacggagcctgtgcagcagagcccaccagcagtggccctgccgaagggtcgcaggaatccgtgtgcactgctggttctttacctgtggtacaggtgcccagtggggaggatgaagggccaggggcagaatcggccactgtacctgaccaggaggagctgggggaggtctggcagcggagggggagcctggagggagctgcagctgctgccgagagcccaccgcaagaagaaggcagtgctggggaggcccaaggcacctgtgaaggggcaactgcccaggaggagggcgctactggaggttctcaagccaacggccaccagccactgcgatcactaccttcagtgcgccaggatgttagccggtaccagagggtggacgaggctctcccaccaaactgggaggcacgcattgacagccacggcaggatcttctacgtggatcacgtaaacagaaccacgacgtggcagcgaccgacagctcccccagccccgcaggtgctgcagagatctaactccatacagcaaatggagcagctgaaccggcgatatcagagtatccgcagaaccatgaccaatgagaggcctgaggaaaataccaatgctattgatggggcaggggaggaagctgactttcaccaagccagtgcagatttccgacgggagaacatcctgcctcactctacctccagatccaggatcacgttgctgttacagtctccccccgtgaagttcctcatcagcccagagttcttcaccgtgctgcattctaaccctagtgcctaccgcatgtttacaaacaacacgtgtttgaagcacatgatcaccaaagtccggagggacacccaccactttgaacgctaccagcataaccgcgaccttgtgggattcctcaacatgttcgcgaacaaacagctagagctgccgcggggatgggaaatgaaacatgatcaccagggcaaggcattctttgtggaccacaactcccgcaccaccactttcattgatccccggctcccacttcagagcagtagacccacaagtgcgctggttcatcggcaacacctgacaaggcaacgcagccacagtgcgggtgaggtaggagaagattctcgacatgcaggaccaccagttcttcccaggccatccagtacattcaatacagtcagtaggccacagtaccaggacatggttccagtggcttacaatgacaagattgttgcatttctacgtcaacccaatatctttgaaattctacaggagcgtcaacctgatcttaccaggaatcactcactcagggagaagatccaatttatccgaactgaagggactccaggattggtgcgcctttcaagcgatgcagaccttgttatgttgctgagcttatttgaagaagagataatgtcgtatgtgcctccacatgccttactccaccccagctactgtcagtccccacgtggctctcccgtgtcatctcctcagaactcgccaggtacccagcgtgccaatgcccgggctccagccccttacaagcgggatttcgaagccaaactgaggaacttttacaggaagttagagactaaaggatatggacaaggcccagggaagttaaagttaattatccgaagagatcacttactagaagatgcttttaatcagattatgggctactccagaaaagacctgcagagaaataagctatatgtcaccttcgttggggaggaagggctggattacagtgggccttctagagagtttttcttcctggtatccagagaactctttaacccatattatggcttatttgaatattcagccaatgacacatacacagtacaaataagtcctatgtctgcttttgtagacaatcaccatgaatggttccgattcagtggtaggatccttggtcttgcactaatacaccagtatttgttggatgccttcttcacacggcccttttataaggctcttctcagaattctatgtgacctgagtgacctagaataccttgatgaagagttccatcagagcctgcagtggatgaaagacaatgatatccatgacatcctagacctcacgttcactgtgaacgaagaagtatttgggcagataactgaacgagaattaaagccagggggtgccaatatcccagttacagagaagaacaagaaggagtacatcgagaggatggtgaagtggaggattgagaggggtgttgtacagcaaacagagagcttagtgcgtggcttctatgaggtggtggatgccaggctggtatctgtttttgatgcaagagaactggaattggtcatcgcaggcacagctgaaatagacctaagtgattggagaaacaacacagaatatagaggaggataccatgacaatcatattgtaattcggtggttctgggctgcagtggaaagattcaacaatgaacaacgactaaggttgttacagtttgttacaggcacatccagcattccctatgaaggatttgcttcactccgagggagtaacggcccaagaagattctgtgtggagaaatgggggaaaatcactgctcttcccagagcgcatacatgttttaaccgtctggatctgcctccctacccatccttttccatgctttatgaaaaactgttgacagcagttgaagaaaccagtacttttggacttgagtgacctggaagctgaatgcccatctctgtggacaggcaggttcagaagctgccttctagaagaatgattgaacattggaagtttcaagaggatgcttcctttaggataaagctatgtgctgttgttttccaggaacaagtgctctgtcacatttggggactggagatgagtcctcttggaaggatttgggtgagcttgatgcccagggaacaacccaaccgtctttcaatcaacagttcttgactgccaaactttttccatttgttatgttccaagacaaagatgaacccatacatgatcagctccacggtaatttttagggactcaggagaatcttgaaacttacccttgaacgtggttcaagccaaactggcagcatttggcccaatctccaaattagagcaagttaaataatataataaaagtaaatatatttcctgaaagtacattcatttaagccctaagttataacagaatattcatttcttgcttatgagtgcctgcatggtgtgcaccataggtttccgctttcatgggacatgagtgaaaatgaaaccaagtcaatatgaggtacctttacagatttgcaataagatggtctgtgacaatgtatatgcaagtggtatgtgtgtaattatggctaaagacaaaccattattcagtgaattactaatgacagattttatgctttataatgcatgaaaacaattttaaaataactagcaattaatcacagcatatcaggaaaaagtacacagtgagttctgtttattttttgtaggttcattatgtttatgttctttaagatgtatataagaacctacctatcatgctgtatgtatcactcattccattttcatgttccatgcatactcgggcatcatgctaatatgtatccttttaagcactctcaaggaaacaaaagggccttttatttttataaaggtaaaaaaaattccccaaatattttgcactgaatgtaccaaaggtgaagggacattacaatatgactaacagcaactccatcacttgagaagtataatagaaaatagcttctaaatcaaacttccttcacagtgccgtgtctaccactacaaggactgtgcatctaagtaataattttttaagattcactatatgtgatagtatgatatgcatttatttaaaatgcattagactctcttccatccatcaaatactttacaggatggcatttaatacagatatttcgtatttcccccactgctttttatttgtacagcatcattaaacactaagctcagttaaggagccatcagcaacactgaagagatcagtagtaagaattccattttccctcatcagtgaagacaccacaaattgaaactcagaactatatttctaagcctgcattttcactgatgcataattttcttattaatattaagagacagtttttctatggcatctccaaaactgcatgacatcactagtcttacttctgcttaattttatgagaaggtattcttcattttaattgcttttgggattactccacatctttgtttatttcttgactaatcagattttcaatagagtgaagttaaattgggggtcataaaagcattggattgacatatggtttgccagcctatgggtttacaggcattgcccaaacatttctttgagatctatatttataagcagccatggaattcctattatgggatgttggcaatcttacattttatagaggtcatatgcatagttttcataggtgttttgtaagaactgattgctctcctgtgagttaagctatgtttactactgggaccctcaagaggaataccacttatgttacactcctgcactaaaggcacgtactgcagtgtgaagaaatgttctgaaaaagggttatagaaatctggaaataagaaaggaagagctctctgtattctataattggaagagaaaaaaagaaaaacttttaactggaaatgttagtttgtacttattgatcatgaatacaagtatatatttaattttgc

SEQ ID NO: 205663 - DNA, 4719 bp, Artificial Sequence
  derived and/or modified sequence
atggccagcagcgccagagagcacctgctgttcgtgagaagaagaaacccccagatgagatacaccctgagccccgagaacctgcagagcctggccgcccagagcagcatgcccgagaacatgaccctgcagagagccaacagcgacaccgacctggtgaccagcgagagcagaagcagcctgaccgccagcatgtacgagtacaccctgggccaggcccagaacctgatcatcttctgggacatcaaggaggaggtggaccccagcgactggatcggcctgtaccacatcgacgagaacagccccgccaacttctgggacagcaagaacagaggcgtgaccggcacccagaagggccagatcgtgtggagaatcgagcccggcccctacttcatggagcccgagatcaagatctgcttcaagtactaccacggcatcagcggcgccctgagagccaccaccccctgcatcaccgtgaagaaccccgccgtgatgatgggcgccgagggcatggagggcggcgccagcggcaacctgcacagcagaaagctggtgagcttcaccctgagcgacctgagagccgtgggcctgaagaagggcatgttcttcaaccccgacccctacctgaagatgagcatccagcccggcaagaagagcagcttccccacctgcgcccaccacggccaggagagaagaagcaccatcatcagcaacaccaccaaccccatctggcacagagagaagtacagcttcttcgccctgctgaccgacgtgctggagatcgagatcaaggacaagttcgccaagagcagacccatcatcaagagattcctgggcaagctgaccatccccgtgcagagactgctggagagacaggccatcggcgaccagatgctgagctacaacctgggcagaagactgcccgccgaccacgtgagcggctacctgcagttcaaggtggaggtgaccagcagcgtgcacgaggacgccagccccgaggccgtgggcaccatcctgggcgtgaacagcgtgaacggcgacctgggcagccccagcgacgacgaggacatgcccggcagccaccacgacagccaggtgtgcagcaacggccccgtgagcgaggacagcgccgccgacggcacccccaagcacagcttcagaaccagcagcaccctggagatcgacaccgaggagctgaccagcaccagcagcagaaccagcccccccagaggcagacaggacagcctgaacgactacctggacgccatcgagcacaacggccacagcagacccggcaccgccacctgcagcgagagaagcatgggcgccagccccaagctgagaagcagcttccccaccgacaccagactgaacgccatgctgcacatcgacagcgacgaggaggaccacgagttccagcaggacctgggctaccccagcagcctggaggaggagggcggcctgatcatgttcagcagagccagcagagccgacgacggcagcctgaccagccagaccaagctggaggacaaccccgtggagaacgaggaggccagcacccacgaggccgccagcttcgaggacaagcccgagaacctgcccgagctggccgagagcagcctgcccgccggccccgcccccgaggagggcgagggcggccccgagccccagcccagcgccgaccagggcagcgccgagctgtgcggcagccaggaggtggaccagcccaccagcggcgccgacaccggcaccagcgacgccagcggcggcagcagaagagccgtgagcgagaccgagagcctggaccagggcagcgagcccagccaggtgagcagcgagaccgagcccagcgaccccgccagaaccgagagcgtgagcgaggccagcaccagacccgagggcgagagcgacctggagtgcgccgacagcagctgcaacgagagcgtgaccacccagctgagcagcgtggacaccagatgcagcagcctggagagcgccagattccccgagacccccgccttcagcagccaggaggaggaggacggcgcctgcgccgccgagcccaccagcagcggccccgccgagggcagccaggagagcgtgtgcaccgccggcagcctgcccgtggtgcaggtgcccagcggcgaggacgagggccccggcgccgagagcgccaccgtgcccgaccaggaggagctgggcgaggtgtggcagagaagaggcagcctggagggcgccgccgccgccgccgagagccccccccaggaggagggcagcgccggcgaggcccagggcacctgcgagggcgccaccgcccaggaggagggcgccaccggcggcagccaggccaacggccaccagcccctgagaagcctgcccagcgtgagacaggacgtgagcagataccagagagtggacgaggccctgccccccaactgggaggccagaatcgacagccacggcagaatcttctacgtggaccacgtgaacagaaccaccacctggcagagacccaccgccccccccgccccccaggtgctgcagagaagcaacagcatccagcagatggagcagctgaacagaagataccagagcatcagaagaaccatgaccaacgagagacccgaggagaacaccaacgccatcgacggcgccggcgaggaggccgacttccaccaggccagcgccgacttcagaagagagaacatcctgccccacagcaccagcagaagcagaatcaccctgctgctgcagagcccccccgtgaagttcctgatcagccccgagttcttcaccgtgctgcacagcaaccccagcgcctacagaatgttcaccaacaacacctgcctgaagcacatgatcaccaaggtgagaagagacacccaccacttcgagagataccagcacaacagagacctggtgggcttcctgaacatgttcgccaacaagcagctggagctgcccagaggctgggagatgaagcacgaccaccagggcaaggccttcttcgtggaccacaacagcagaaccaccaccttcatcgaccccagactgcccctgcagagcagcagacccaccagcgccctggtgcacagacagcacctgaccagacagagaagccacagcgccggcgaggtgggcgaggacagcagacacgccggcccccccgtgctgcccagacccagcagcaccttcaacaccgtgagcagaccccagtaccaggacatggtgcccgtggcctacaacgacaagatcgtggccttcctgagacagcccaacatcttcgagatcctgcaggagagacagcccgacctgaccagaaaccacagcctgagagagaagatccagttcatcagaaccgagggcacccccggcctggtgagactgagcagcgacgccgacctggtgatgctgctgagcctgttcgaggaggagatcatgagctacgtgcccccccacgccctgctgcaccccagctactgccagagccccagaggcagccccgtgagcagcccccagaacagccccggcacccagagagccaacgccagagcccccgccccctacaagagagacttcgaggccaagctgagaaacttctacagaaagctggagaccaagggctacggccagggccccggcaagctgaagctgatcatcagaagagaccacctgctggaggacgccttcaaccagatcatgggctacagcagaaaggacctgcagagaaacaagctgtacgtgaccttcgtgggcgaggagggcctggactacagcggccccagcagagagttcttcttcctggtgagcagagagctgttcaacccctactacggcctgttcgagtacagcgccaacgacacctacaccgtgcagatcagccccatgagcgccttcgtggacaaccaccacgagtggttcagattcagcggcagaatcctgggcctggccctgatccaccagtacctgctggacgccttcttcaccagacccttctacaaggccctgctgagaatcctgtgcgacctgagcgacctggagtacctggacgaggagttccaccagagcctgcagtggatgaaggacaacgacatccacgacatcctggacctgaccttcaccgtgaacgaggaggtgttcggccagatcaccgagagagagctgaagcccggcggcgccaacatccccgtgaccgagaagaacaagaaggagtacatcgagagaatggtgaagtggagaatcgagagaggcgtggtgcagcagaccgagagcctggtgagaggcttctacgaggtggtggacgccagactggtgagcgtgttcgacgccagagagctggagctggtgatcgccggcaccgccgagatcgacctgagcgactggagaaacaacaccgagtacagaggcggctaccacgacaaccacatcgtgatcagatggttctgggccgccgtggagagattcaacaacgagcagagactgagactgctgcagttcgtgaccggcaccagcagcatcccctacgagggcttcgccagcctgagaggcagcaacggccccagaagattctgcgtggagaagtggggcaagatcaccgccctgcccagagcccacacctgcttcaacagactggacctgcccccctaccccagcttcagcatgctgtacgagaagctgctgaccgccgtggaggagaccagcaccttcggcctggagtag

SEQ ID NO: 205664 - protein, 1335 aa, Artificial Sequence
  derived and/or modified sequence
MESEMLQSPLLGLGEEDEADLTDWNLPLAFMKKRHCEKIEGSKSLAQSWRMKDRMKTVSVALVLCLNVGVDPPDVVKTTPCARLECWIDPLSMGPQKALETIGANLQKQYENWQPRARYKQSLDPTVDEVKKLCTSLRRNAKEERVLFHYNGHGVPRPTVNGEVWVFNKNYTQYIPLSIYDLQTWMGSPSIFVYDCSNAGLIVKSFKQFALQREQELEVAAINPNHPLAQMPLPPSMKNCIQLAACEATELLPMIPDLPADLFTSCLTTPIKIALRWFCMQKCVSLVPGVTLDLIEKIPGRLNDRRTPLGELNWIFTAITDTIAWNVLPRDLFQKLFRQDLLVASLFRNFLLAERIMRSYNCTPVSSPRLPPTYMHAMWQAWDLAVDICLSQLPTIIEEGTAFRHSPFFAEQLTAFQVWLTMGVENRNPPEQLPIVLQVLLSQVHRLRALDLLGRFLDLGPWAVSLALSVGIFPYVLKLLQSSARELRPLLVFIWAKILAVDSSCQADLVKDNGHKYFLSVLADPYMPAEHRTMTAFILAVIVNSYHTGQEACLQGNLIAICLEQLNDPHPLLRQWVAICLGRIWQNFDSARWCGVRDSAHEKLYSLLSDPIPEVRCAAVFALGTFVGNSAERTDHSTTIDHNVAMMLAQLVSDGSPMVRKELVVALSHLVVQYESNFCTVALQFIEEEKNYALPSPATTEGGSLTPVRDSPCTPRLRSVSSYGNIRAVATARSLNKSLQNLSLTEESGGAVAFSPGNLSTSSSASSTLGSPENEEHILSFETIDKMRRASSYSSLNSLIGVSFNSVYTQIWRVLLHLAADPYPEVSDVAMKVLNSIAYKATVNARPQRVLDTSSLTQSAPASPTNKGVHIHQAGGSPPASSTSSSSLTNDVAKQPVSRDLPSGRPGTTGPAGAQYTPHSHQFPRTRKMFDKGPEQTADDADDAAGHKSFISATVQTGFCDWSARYFAQPVMKIPEEHDLESQIRKEREWRFLRNSRVRRQAQQVIQKGITRLDDQIFLNRNPGVPSVVKFHPFTPCIAVADKDSICFWDWEKGEKLDYFHNGNPRYTRVTAMEYLNGQDCSLLLTATDDGAIRVWKNFADLEKNPEMVTAWQGLSDMLPTTRGAGMVVDWEQETGLLMSSGDVRIVRIWDTDREMKVQDIPTGADSCVTSLSCDSHRSLIVAGLGDGSIRVYDRRMALSECRVMTYREHTAWVVKASLQKRPDGHIVSVSVNGDVRIFDPRMPESVNVLQIVKGLTALDIHPQADLIACGSVNQFTAIYNSSGELINNIKYYDGFMGQRVGAISCLAFHPHWPHLAVGSNDYYISVYSVEKRVR

SEQ ID NO: 205665 - DNA, 4008 bp, Artificial Sequence
  derived and/or modified sequence
atggaatccgagatgctgcaatcccccttgcttggactaggagaggaggatgaggcagatctcaccgactggaacctgcccctggcttttatgaagaagaggcactgcgagaaaatcgagggcagtaaatcgctggcccagtcttggcggatgaaggacagaatgaagaccgtttcagtcgcactcgtgctctgtctcaatgtcggggtggacccccctgacgtcgttaagactacaccttgtgctcggctggaatgttggatcgatccattgtctatgggaccccaaaaggcactggaaaccataggagccaacctacagaagcagtacgagaattggcagcctcgggctcgttacaagcagagccttgacccaaccgtggacgaagtcaaaaagctctgcacttcacttagacgcaatgccaaggaggaacgcgtgctgtttcactataacggccacggagttcctcgccccacagtgaatggtgaggtttgggtgtttaacaaaaattatacacagtacattcctttgtccatctatgatctgcagacctggatgggatcaccatcgatttttgtgtatgattgctccaacgccggcctgattgtcaaatccttcaagcagtttgcactccagagggagcaagaacttgaagtggcagccataaatcctaatcaccctctagcccagatgcctctacctccttcaatgaagaattgtatccagttggccgcatgcgaagcaactgaactgcttccaatgatccccgatctccctgcagatctattcacttcttgcctaaccacacctatcaagattgccctgaggtggttctgcatgcagaagtgcgtgtcactcgttcccggagtgacattagacttgattgagaaaataccgggcaggttgaatgataggcgaacacctcttggagaacttaattggattttcaccgctattactgacacgatagcttggaacgttctgccccgagacttgtttcagaagctgttcaggcaggatctgcttgtggcttctctctttcggaattttctgctggctgagagaatcatgagaagttataactgtacacctgtgtcatcccctagacttccgccaacatacatgcacgccatgtggcaggcgtgggatctcgcagtcgatatttgtctgagtcaactgccgactattattgaggaagggacagccttccgacattcacctttctttgcggaacagctgacggcctttcaagtctggctgacaatgggcgtggagaatcgcaacccacctgagcagctcccaattgtcctgcaagtgctgttgagccaggtccatcggcttagggctttggacctattgggtcgcttcctggacctcggaccatgggcggtaagtctcgcactgtccgtgggcatcttcccctacgttttgaagttgcttcagagctccgcaagagagctacgcccgctgctggtgttcatttgggctaaaatcttggccgtggacagcagttgccaggccgatctggtcaaagacaatgggcacaagtactttttgtcggtcttagctgacccatacatgccagcagaacaccgcacgatgactgcctttatcctcgccgtgattgtcaactcgtaccataccggacaagaggcatgtcttcaggggaacctgatcgctatttgtttggagcaactgaacgacccacacccactcctgcggcagtgggtagctatctgcctgggccgaatttggcagaactttgacagcgctagatggtgtggcgtgcgagattccgcccatgagaagctgtacagcctcttgtctgaccctatccccgaggtgaggtgcgccgctgtgtttgctctcggaacttttgttgggaacagcgccgaaaggactgatcattccaccactatagaccataatgtcgcgatgatgctggctcaactggtgagcgatggcagcccaatggttcgcaaggaactggtggttgccttaagtcacctcgtagtacaatacgagtctaatttttgcaccgttgccctgcaattcattgaagaggagaagaactacgcactgccgtcccccgcaaccacggagggagggagtctgacacccgtgcgagactctccatgcacccctcgactgaggtctgtgtcctcctacggcaatatccgcgccgtggccactgctcgctccctgaataaatctctccagaacttgagtttgacggaggaatctgggggcgcagtggcgtttagccccgggaacctctctactagctcctctgcatcttccactctgggatccccagagaacgaggagcacattctgagctttgaaactatcgataagatgcgacgcgcctcctcgtactcatctcttaacagtctgataggagtcagcttcaactcagtgtatactcagatttggcgtgttttgctgcatctcgctgccgatccataccctgaggtgagcgatgtggcaatgaaggtgctgaactccatcgcttacaaagcgaccgttaacgctagacctcagcgggtgcttgacacctcatccttaacccagagcgcacccgccagtccaacaaataagggagtgcatattcaccaggccggtggctccccccccgcaagctcgacatcctcatcaagtcttaccaatgatgtggcaaaacagcctgtgtcacgcgatctgcccagtgggagacccggtacaacagggcccgcgggcgctcagtatacacctcacagccaccaattcccacgtacaagaaagatgttcgacaagggcccagaacagaccgctgacgatgcggatgacgccgcaggtcataaatcgtttatcagcgctaccgtgcagacaggcttttgtgactggtctgcgcgttacttcgctcagcccgttatgaaaatccctgaggagcatgatttagagtctcagattcgaaaagaacgcgagtggcggttcctccgcaattcccgagtgcgccgccaagcgcagcaggtgatccagaaaggcatcactcggctggatgatcagatcttccttaacaggaaccctggcgttccatccgtggtgaaattccatcccttcactccatgcattgccgtggctgacaaggactctatttgcttctgggattgggaaaaaggcgaaaagctcgactatttccacaatgggaaccctcgctacacacgcgtcacagctatggagtatttaaacgggcaagactgcagtctgctacttaccgcaacagatgacggagcgattcgagtctggaaaaactttgccgacctcgagaagaaccctgagatggtcaccgcctggcaggggctgtccgatatgctccccactacccggggcgccggtatggtggtggactgggagcaggagactggcctcttaatgagctccggagacgtccgcattgttcgcatttgggatacagatagagagatgaaggtgcaagacatcccgaccggggctgactcgtgcgtcacttctctttcttgtgattcccaccgttccttaatcgttgcgggactcggagacggatccatccgtgtgtacgataggagaatggccctttctgaatgccgagtcatgacttatagagagcataccgcctgggtcgtaaaggcttccctccaaaaaaggcccgatggacacatcgtctcggtgtctgtgaatggagacgttagaatatttgatcccagaatgccagaaagcgtgaatgtgctccaaatcgtgaagggacttacagctcttgacatccacccgcaggccgacctcatcgcttgtgggtcggtgaatcagtttacagccatctacaattcttccggagagctcattaacaatataaaatactatgatggatttatgggtcagcgggttggggccatctcctgtctggcattccacccccactggccccatctggccgtggggagcaatgactactacatttccgtctatagcgtggagaagcgagtgagatag

SEQ ID NO: 205666 - DNA, 4008 bp, Artificial Sequence
  derived and/or modified sequence
atggagagcgagatgctgcagagccccctgctgggcctgggggaggaggatgaagctgacctgacagactggaacctgcccctggccttcatgaagaagaggcactgtgagaagattgagggcagcaagagcctggcccagagctggaggatgaaggacaggatgaagacagtgtctgtggccctggtgctgtgcctgaatgtgggcgtggaccccccagatgtggtgaagaccaccccctgtgcccggctggagtgctggattgaccccctgtccatgggcccccagaaggccctggagaccatcggggccaacctgcagaagcagtatgagaactggcagccccgggcccgctacaagcagagcctggaccccaccgtggatgaggtgaagaagctgtgcaccagcctgcggagaaatgccaaggaggagcgggtgctcttccactacaatggacatggagtgccccggcccaccgtgaatggagaggtgtgggtgttcaacaagaactacacccagtacatccccctgagcatctatgacctgcagacctggatgggcagccccagcatctttgtgtatgactgcagcaatgccggcctcatcgtgaagagcttcaagcagtttgccctgcagcgggagcaggagctggaggtggccgccatcaaccccaaccaccccctggcccagatgcccctgccccccagcatgaagaactgcatccagctggccgcctgtgaggccacagagctgctgcccatgatcccagacctgcctgctgacctcttcaccagctgcctgaccacccccatcaagatcgccctgcgctggttctgcatgcagaagtgtgtgtccctggtgcctggggtgaccctggacctgattgagaagatccctggccgcctgaatgacaggaggacccccctgggggagctgaactggatcttcaccgccatcacagacaccatcgcctggaatgtgctgccccgggacctcttccagaagctgttccggcaggacctgctggtggccagcctcttcaggaacttcctgctggccgagcgcatcatgaggagctacaactgcacccctgtgagcagcccccggctgccccccacctacatgcacgccatgtggcaggcctgggacctggccgtggacatctgcctgagccagctgcccaccatcatcgaggagggcacagccttccgccacagccccttctttgctgagcagctgacagccttccaggtgtggctgaccatgggcgtggagaacagaaatcctcctgagcagctgcccatcgtgctgcaggtgctgctgagccaggtgcaccggctgcgggccctggacctgctgggccgcttcctggacctgggcccctgggccgtgtccctggccctgtctgtgggcatcttcccctacgtgctgaagctgctgcagagcagcgcccgggagctgcggcccctgctggtgttcatctgggccaagatcctggccgtggacagcagctgccaggccgacctggtgaaggacaatggccacaagtacttcctgtctgtgctggccgacccctacatgcctgctgagcacaggaccatgacagccttcatcctggccgtcatcgtgaacagctaccacacaggccaggaggcctgcctgcagggcaacctgattgccatctgcctggagcagctgaatgacccccaccccctgctgcggcagtgggtggccatctgcctgggccgcatctggcagaactttgacagcgcccgctggtgtggggtgcgggacagcgcccacgagaagctgtacagcctgctgagtgaccccatccctgaggtgcgctgtgccgctgtgtttgccctgggcacctttgtgggcaacagcgctgagaggacagaccacagcaccaccatcgaccacaacgtggccatgatgctggcccagctggtgtctgatggcagccccatggtgaggaaggagctggtggtggccctgagccacctggtggtgcagtatgagagcaacttctgcaccgtggccctgcagttcatcgaggaggagaagaactatgccctgcccagccctgccaccacagagggcggcagcctgacccctgtgcgggacagcccctgcaccccccggctgcggtctgtgagcagctatggcaacatccgggctgtggccacagcccggagcctgaacaagagcctgcagaacctgagcctgacagaggagagcggcggcgctgtggccttcagccctggcaacctgagcaccagcagcagcgccagcagcaccctgggcagcccagaaaatgaggagcacatcctgagctttgagaccatcgacaagatgaggcgggccagcagctacagcagcctgaacagcctcatcggcgtgtccttcaacagcgtgtacacccagatctggagggtgctgctgcacctggccgctgacccctacccagaggtgtctgatgtggccatgaaggtgctgaacagcatcgcctacaaggccaccgtgaatgcccggccccagagggtgctggacaccagcagcctgacccagagcgccccagccagccccaccaacaagggcgtgcacatccaccaggccggcggcagccccccagccagcagcaccagcagcagcagcctgaccaatgatgtggccaagcagcctgtgtcccgggacctgcccagcggccggcccggcaccactggacctgctggggcccagtacaccccccacagccaccagttccccaggaccaggaagatgtttgacaagggccctgagcagacagcagatgatgctgatgatgctgctggccacaagagcttcatcagcgccaccgtgcagacaggcttctgtgactggagcgcccgctactttgcccagcctgtgatgaagatccctgaggagcatgacctggagagccagatcaggaaggagcgggagtggaggttcctgaggaacagccgggtgcggcggcaggcccagcaggtgatccagaagggcatcacccggctggatgaccagatcttcctgaacagaaatcctggggtgcccagcgtggtgaagttccaccccttcaccccctgcatcgctgtggccgacaaggacagcatctgcttctgggactgggagaagggggagaagctggactacttccacaacggcaacccccgctacaccagggtgacagccatggagtacctgaatggccaggactgcagcctgctgctgacagccacagatgatggagccatccgggtgtggaagaactttgctgacctggagaagaaccctgagatggtgacagcctggcagggcctgagtgacatgctgcccaccaccagaggagctggcatggtggtggactgggagcaggagaccggcctgctgatgagcagtggagatgtgcgcatcgtgcgcatctgggacacagaccgggagatgaaggtgcaggacatccccactggagctgacagctgtgtgaccagcctgagctgtgacagccacaggagcctgattgtggccggcctgggagatggcagcatccgggtgtatgacaggaggatggccctgtctgaatgtcgggtgatgacctaccgggagcacacagcctgggtggtgaaggccagcctgcagaagaggccagatggccacatcgtgtctgtgtctgtgaatggagatgtgcgcatctttgaccccaggatgcctgagagcgtgaatgtgctgcagatcgtgaagggcctgacagccctggacatccacccccaggccgacctgattgcctgtggctctgtgaaccagttcaccgccatctacaacagcagtggagagctgatcaacaacatcaagtactatgatggcttcatgggccagagggtgggcgccatcagctgcctggccttccacccccactggccccacctggccgtgggcagcaatgactactacatctctgtgtacagcgtggagaagagggtgaggtag

SEQ ID NO: 205667 - DNA, 4008 bp, Artificial Sequence
  derived and/or modified sequence
atggagagcgagatgctgcagagccccctgctgggcctgggcgaggaagacgaggcagatttgacagactggaatctaccactcgcctttatgaagaaaagacactgtgagaaaattgaaggctccaaatctctggctcagtcctggcggatgaaagaccggatgaaaacagtctcagtggccctcgtgctgtgcctgaatgtcggcgttgatccccccgatgtcgtgaagaccacgccatgcgctcgcctggagtgttggattgatccgttatccatggggccgcaaaaagccctggagaccataggcgctaatctgcagaaacagtatgagaattggcagccccgggcacgttataaacagtcactcgaccccaccgtcgacgaagtgaagaagctgtgtaccagcctgagacgcaatgctaaagaggagcgcgtcctctttcactataatggtcacggtgtgccacgtcctaccgtgaacggcgaggtgtgggtattcaataagaactatacccagtatatacctctctctatctacgatctccagacatggatgggctcaccatcgattttcgtttatgattgttccaacgctggcctgattgtcaagagttttaagcagtttgccctccagcgggagcaggagctggaagtggctgccattaacccgaaccacccactggctcagatgcctttgcccccaagtatgaagaattgcatacaattagccgcttgtgaggcaacagaactcctccctatgatacccgatctccccgccgacctattcacttcttgtctgaccactcctataaagattgcgctgaggtggttttgtatgcaaaagtgtgtctcccttgtcccaggagtcacattagatcttatcgagaaaatccctggtcgacttaatgaccggcgcacccctttgggtgaactgaattggatcttcactgcaatcaccgatacgattgcatggaatgtgctgccccgcgacctgttccagaagcttttccgccaggatcttctggtcgcctccctgtttcgaaatttcttgctggcagagcggataatgaggagctataactgtactcctgtgagctcaccaaggctgccccccacgtacatgcacgccatgtggcaggcgtgggatctggctgtggacatctgtctgagccaactcccaacgatcattgaggagggcacagcattccgtcactccccattcttcgcagagcagctcaccgcattccaggtttggctgacaatgggcgtcgagaaccggaaccctcctgagcagctccccattgtgctccaggtgctgctgtcccaggtccatcgcctgcgggctcttgatctgctcggaagattcctggacctcggaccctgggcagtgtccttggccttgtccgtcggcatctttccctacgtcctcaagctgttacagagcagtgctcgggagctgcgacctctactggtgttcatttgggccaagattcttgccgttgattcctcctgtcaggccgatctggtcaaggataacggacataaatacttcctgagcgtgttggccgatccatatatgcccgctgaacatagaaccatgaccgcatttatcctggccgtgatagtcaatagctaccataccgggcaagaggcatgcctgcaaggaaacctgatcgctatatgcctcgaacaactcaatgaccctcacccgctgcttcgacaatgggtcgccatctgtttgggccgcatctggcagaactttgacagcgcccgatggtgcggggtccgggattctgctcatgagaagctgtattcactgctgtctgaccctattccagaggtaagatgcgccgctgtgttcgcgctcgggacatttgttgggaacagcgcagaaaggaccgatcactcaactactatcgaccataatgtggcaatgatgctagcacagctggtgagtgatggctctcctatggtgagaaaggagttggtggttgccctgtcccatctggtggttcagtatgagagcaacttttgcactgttgcactgcagttcatcgaggaggagaagaattacgcactgccctctcccgcaacaactgagggcggctccctgacccccgtgcgtgattcgccatgtacacctcggctgcgttctgtcagttcatatgggaacatcagggcagtagctacagctcgctccttaaataaatctttgcagaaccttagcttgacagaggagagtggaggagcggtggccttctccccaggcaacttgagcacgagcagtagcgccagttctacactcggaagtcccgagaatgaggagcacatactctcttttgaaactattgacaagatgcgacgagcgagcagttatagctcgctgaacagcctgatcggggtgtcctttaacagcgtttatacacaaatttggcgggttctgctccatctagcagctgatccttatcccgaagtctccgacgttgccatgaaggtcctcaactctatcgcgtacaaggccaccgtgaacgctcgtccacagcgtgtcctggacacatcaagtttaacacagtcagcgcctgctagcccgaccaacaagggggtacatattcaccaggccggaggctctcccccagcttcttctacctcctcttcaagccttacaaacgacgtagctaaacagccagtaagcagggatctgccaagcggacgtcctggcactaccggccccgctggggcccagtacacccctcacagtcaccaatttccgagaactagaaaaatgtttgacaaaggcccagagcagactgcagatgacgcagacgacgcagccggtcacaagtcttttatatctgctaccgtgcagaccgggttttgcgactggtctgcgagatacttcgctcagcctgtgatgaaaatccctgaggaacacgacttggaatcccagattcggaaggagcgggagtggaggttcctccgcaacagcagggtcagacgccaggcgcagcaggtaatccagaagggaattacccgactagatgaccagatcttcttaaatagaaaccccggcgtaccctcagttgtgaaatttcacccattcactccatgcatcgccgtcgcggataaagacagtatttgtttttgggactgggagaagggggaaaaactggactacttccacaacggaaacccccgctatacacgcgtgacagcgatggagtatttgaatggtcaggattgtagcctcctgctgaccgccaccgatgatggcgcaattcgggtctggaaaaacttcgctgacctcgaaaagaatcccgagatggtgacagcctggcagggcctgtcggatatgttacccacgacccgcggagccggtatggtggtcgattgggagcaggaaaccggcctgctcatgagctccggagacgtccggatagtgcgcatctgggataccgatcgcgagatgaaggtgcaagatatccctactggagccgactcgtgcgtgacctctctctcctgtgacagtcaccgctcactgatcgtggccggcctgggagacggcagtataagagtttatgataggcgtatggccttgagcgagtgtcgggtgatgacctatagagagcatacagcttgggtcgtgaaagctagtttgcagaaaaggccagatggacatatcgtttcagtaagcgttaacggtgatgtgcgaatcttcgaccctcgtatgccggagtccgttaacgtgctgcagattgtgaagggcttgaccgcactggacattcacccacaagctgacttgatcgcatgcggcagtgtgaatcagttcacagccatctataattcctccggcgagttaattaataacatcaagtactacgacggcttcatgggccagagggttggggccatttcatgtctggcctttcatccccattggccccaccttgccgttggaagcaacgattattacatatcagtctatagcgtggaaaaacgagtgcgatag

SEQ ID NO: 205668 - DNA, 4008 bp, Artificial Sequence
  derived and/or modified sequence
atggagagtgagatgctccagagtccactccttggattgggggaagaggatgaagcggacctgacagattggaacctgcctttggctttcatgaagaagaggcactgcgaaaaaatcgaaggctccaaatcattggcgcaatcgtggagaatgaaggatcgaatgaagactgtatcagtggccctggtgctctgtctaaacgtgggggtggatcctccggatgtggtgaaaacaactccatgtgctaggctggagtgctggatcgacccattgtctatgggtccccagaaagcccttgagaccataggcgctaacctccagaagcagtatgaaaactggcaacccagagccagatacaagcagtcactggaccccacagtggacgaggtcaaaaaactgtgcacaagcctgagacggaatgcgaaggaggaaagggtgctttttcattataacggccatggcgtgcccagacctactgttaacggcgaagtgtgggttttcaacaaaaactatacccagtatatcccactgtctatttacgatctacagacatggatgggaagtcctagcatcttcgtatatgactgctctaacgccggactgattgtgaaatcctttaaacaattcgccctgcagcgtgaacaggaactagaagtggcagcgatcaatcccaaccaccccctggcacaaatgcccctccctccctcaatgaaaaattgtattcaattggccgcttgcgaggccactgagctgttgccaatgattccagatcttcccgcagacctctttacctcctgtctcacaacccccataaagatcgctctgaggtggttttgtatgcagaaatgtgtgtccctagtgcccggagtcacacttgacctgatcgagaaaatccccggacggctgaacgatcgacggacacctctcggagaacttaactggatcttcaccgccattaccgatacaattgcgtggaacgtcctacctagagatttgttccagaagctttttcgacaggaccttttggtagcgtccctgtttcgaaattttctgctcgctgagcggatcatgcgctcctacaattgcaccccagtgtcgagtcctcgattaccaccaacttacatgcacgctatgtggcaagcatgggatctagcggtagacatctgcctgagccaactccctacaatcatagaggaggggaccgcctttcgccactcaccctttttcgccgaacagcttacggcatttcaagtctggctgacgatgggggttgaaaatcgcaacccccctgagcagctacccatcgttctccaggtgctgctgtcacaggtgcacagacttcgggcacttgatctactggggagatttctcgacttaggaccctgggctgtgtccttagcactgtccgtgggcattttcccatatgtgctcaaactgctccaatcatctgctcgggaactgaggccgctgttggtcttcatctgggccaagatcctggccgtcgattcgtcctgccaagccgacttggtgaaagacaacggccacaagtactttttatccgtcctcgctgatccatatatgccagccgaacaccggactatgactgcattcatcctagcggtcatcgttaacagctaccacacaggacaggaagcatgtctgcagggaaacttaatcgccatctgcctggagcagctcaatgacccacacccacttcttcgccagtgggtggctatctgcctggggcgtatatggcagaatttcgattcagcacgctggtgcggtgtgagagacagcgcccacgagaagctgtacagcctgttaagcgatccaatccctgaggtgcggtgcgccgctgtgtttgccctaggaaccttcgtcggaaatagcgctgagagaactgatcactcgacgacaatagaccataacgtagcaatgatgctggcccaactggtgagcgatggcagtcccatggtgaggaaagaattggtggtcgccctgtcccatctggtggtgcaatacgagagtaatttctgtacggtcgctcttcagttcatcgaagaagagaagaactacgcactccccagtccggcaactactgaaggaggctccctcacaccagtgcgtgacagtccatgtacacccaggcttcgcagcgtgagtagttatgggaacattcgggctgtcgctaccgccaggtccctgaacaagtctcttcaaaatctgtcgcttacagaagagtctggaggcgctgtggcttttagtccagggaatcttagcacgagctcgtccgcctctagcactctagggtcacctgaaaacgaggagcacattctctctttcgaaaccattgataaaatgaggcgcgcatccagttattcctccctaaattcactcatcggggtgtcgttcaattctgtctatacccaaatatggcgggtgctgcttcatctcgcggctgacccataccctgaggtaagcgacgtggccatgaaagtgttgaattccatcgcctataaggctaccgttaacgcacgtcctcagcgcgtccttgatacctcttccttgacccaatcagcaccggctagccccacgaacaagggggtccacatccaccaggccggtggttctcctcctgcatctagcacatcgagcagcagcctgacgaatgatgtggccaagcagccagtgtccagagacctaccaagcggcagaccaggcactactgggcctgctggcgcacagtacaccccccattcccaccaatttcctcgaacccggaaaatgtttgacaaaggaccggagcagacagccgatgacgctgacgacgctgccggtcacaagagcttcatttccgccaccgtacagaccggcttttgtgattggtcagcccgttacttcgctcagcctgtcatgaaaatccctgaggaacacgatctggagtctcagatcagaaaggagcgcgaatggcggttcctccgcaattcaagagttaggcggcaggcacaacaggtgatccaaaagggcataacgcgtctcgacgaccagatctttctgaacagaaatccaggagtgccctctgtggtaaagttccacccatttactccatgtatagcagtagccgataaagactccatttgcttctgggattgggagaagggcgaaaagttagactacttccataatggcaacccaagatatactcgtgtgactgccatggaatacctcaacggccaggattgtagtctcctgcttaccgcgactgacgatggggcaatcagggtctggaaaaatttcgcggatctcgaaaaaaatcctgaaatggtgaccgcgtggcagggcctgtccgatatgctgcctactacgagaggcgctgggatggtcgtcgactgggaacaggaaaccggcctccttatgtctagtggcgatgttcgtatagtgcgaatctgggatacagacagagagatgaaggtgcaggatatccccactggagcagattcttgcgttacaagtttaagctgtgatagtcacaggtcgctcattgtagctggactgggtgacggctccattagggtgtatgataggcgcatggcgctgagtgaatgcagagtgatgacttaccgagaacacaccgcctgggtggtaaaagccagcctgcaaaagcgccctgacgggcatatcgtgtcagtctcggtcaacggtgacgtcaggatcttcgatcccagaatgccagagtccgtgaacgtgctgcagatcgtcaaaggcctcactgccctggacattcacccacaggctgatttgatagcatgcggtagcgtgaatcagttcacagccatctacaacagctctggggagctgattaataatataaagtattacgacggttttatggggcagagagtgggcgcaatctcttgccttgcctttcacccacactggccccacctagcggtgggaagcaacgactattatatcagtgtatacagtgtcgagaaaagagtccgatag

SEQ ID NO: 205669 - DNA, 6856 bp, Artificial Sequence
  derived and/or modified sequence
cggtgcattctgggtcctggcaatatggcgtcctccttgatgggctgatgagatgagtttcactgtagctccaaaccagagggcaaagctcccatgacccaataagcccacattgtccctttcctccgtggttccgtgtcgcccgtttctcaggactcgttctcaggcaggagagagcctcggggctgaaggccaggaccagccaggccgcgcggacctgaggttgaggaaccgggtgcaggcgagcacgatgggccggtcgtggctctggttgcagcagctcagacgagtgcgggacccgcagggctgagagtggctggaggagacccagggccctttgaacccgatcccttggccggagacctcagcccagtcggcccagtgggcgaaccggcaccaagagcggcctgcctgtcttcggaactgctgaggcggtggaggccgagagcagggtcatcgtgaggcctgaagtctcttacgcttttggcagctcccctcgcagcccctctggaaacgtacagcctcaggagcagccagtggcttgggacctggggtggtgtgtgtctgcggagcttcttgggctgccccatttcctagcggcccccacctccccacttcccgctcagagttagagataaggatctcagacttttgcctgagtaagggtctccgcactctttatccatttggttttcgatttcccgtttttgtttcttatttcaccaattctggtacacgctagtttttaaggctggaggttctcgagcgcttgctgccaaggactcccccaccccctcccccactgatggagtccgaaatgctgcaatcgcctcttctgggcctgggggaggaagatgaggctgatcttacagactggaacctacctttggcttttatgaaaaagaggcactgtgagaaaattgaaggctccaaatccttagctcagagctggaggatgaaggatcggatgaagacagtcagtgttgccttagttttgtgcctgaatgttggtgtggaccctcccgatgtggtgaagaccacgccctgtgcacgcttggaatgctggatcgatcctctgtcgatgggtcctcagaaagctctggaaaccatcggtgcaaatttacagaagcagtacgagaactggcagccaagggcccggtacaagcagagccttgacccaactgtggatgaagtcaagaagctctgcacgtccttacgtcgcaacgccaaggaggagcgagtcctctttcactacaatggccacggggtgccccggcccacagtcaacggggaggtctgggtcttcaacaagaactacacgcagtacatccctctgtccatatatgacctgcagacgtggatgggcagcccgtcgatcttcgtctacgactgctccaatgctggcttgatcgtcaagtccttcaagcagttcgcactacagcgggagcaggagctggaggtagctgcaatcaacccaaatcaccctcttgctcagatgcctttgcctccgtcgatgaaaaactgcatccagctggcagcctgcgaggccaccgagctgctgcccatgatccccgacctcccggctgacctattcacctcctgcctcaccacccccatcaagatcgccctgcgctggttttgcatgcagaaatgtgtcagtctggtgcctggcgtcacactggatttgatagaaaagatccctggccgcctgaacgacaggaggacgcccctgggtgaactgaactggatcttcacagccatcacagacaccatcgcgtggaacgtgctcccccgggatctcttccaaaagctcttcagacaggacttgctggtggctagtctgtttcgaaattttttattggcggaaaggattatgaggtcgtataactgcactcccgtcagcagcccgcgtctgccgcccacgtacatgcacgccatgtggcaagcctgggacctggctgttgacatctgtctgtctcagctgccgacgatcatcgaggaaggcactgcgtttcggcacagcccgttcttcgccgagcagctgaccgcattccaggtgtggctcaccatgggcgtggagaaccgaaacccacccgaacagctgcccatcgtcctgcaggtgctgttaagccaagtgcaccggctgagagcattggacttgcttggaagatttttggacctgggtccctgggcagtgagcctggccttgtctgtcggcatcttcccctacgtgctgaagctgctccagagctcggcccgagagctgcggccacttctcgttttcatctgggccaagatcctcgcagtggacagctcgtgccaagcggacctcgtgaaggacaacggccacaagtacttcctgtcggtcctggcggacccctacatgccagctgaacaccggaccatgacggctttcattctcgccgtgatcgtcaacagctatcacacggggcaggaagcctgccttcagggaaacctcattgccatctgcctggagcagctcaacgacccgcaccccttgctgcgccagtgggtggccatctgcctcggcaggatctggcagaacttcgactcggcgaggtggtgcggcgtgagggacagcgctcatgagaagctctacagcctcctctccgaccccattcccgaggtccgctgcgcagcggtcttcgcccttggcacgttcgtgggcaactctgcagagaggacggaccactccaccaccatcgaccacaacgtggccatgatgctggcccagctggtcagcgacgggagccccatggtccggaaggagctggtggtggctctgagtcatcttgtggttcagtatgaaagcaatttctgcaccgtggccctgcagttcatagaagaggaaaagaactacgccttgccttctccagcaaccacagagggagggagtttgaccccagtgcgagacagcccgtgcacccccagacttcgttctgtgagctcctatggaaacatccgtgctgtcgccacagccaggagcctcaacaaatctttgcagaacctgagtttgacagaggaatctggtggcgcggtggcgttctcccccggaaacctcagcaccagcagcagcgccagcagcaccctgggcagccccgagaatgaggagcatatcctgtccttcgagaccatcgacaagatgcgccgcgccagctcctactcctccctcaactccctcatcggagtttcctttaacagtgtttacactcagatttggagagtcctgctgcacctggctgctgacccctatccagaggtctcggacgtggccatgaaagtactcaacagcatcgcctacaaggccaccgtgaacgcccggccgcagcgcgtcctggacacctcctccctcacgcagtcggcccccgccagccccaccaacaagggcgtgcacatccaccaggcggggggctcccctccggcgtccagcaccagcagctccagcctgaccaacgatgtggccaagcagccggtcagccgagacttgccttctggccggccgggcaccacaggccccgctggggcgcagtacacccctcactcccaccagttcccccggacacggaagatgttcgacaagggcccagagcagactgcggacgacgcggacgatgctgctggacacaaaagtttcatctccgccacggtgcagacggggttctgcgactggagcgcccgctattttgcccagcccgtcatgaagatcccagaagagcacgacctggagagtcagatccgcaaggagcgggagtggcggttcctgcgaaacagccgtgtcaggaggcaggcccagcaagtcattcagaagggcattacgagattggacgaccaaatatttctgaacaggaaccccggcgtcccctctgtggtgaaattccaccccttcacgccgtgcatcgccgtagccgacaaggacagcatctgcttttgggactgggagaaaggggagaagctggattatttccacaatgggaaccctcggtacacgagggtcactgccatggagtatctgaacggccaggactgctcgcttctgctgacggccacagacgatggtgccatcagggtctggaagaattttgctgatttggaaaagaacccagagatggtgaccgcgtggcaggggctctcggacatgctgccaacgacgcgaggagctgggatggtggtggactgggagcaggagaccggcctcctcatgagctcaggagacgtgcggatcgtccggatctgggacacagaccgtgagatgaaggtgcaggacatccctacgggcgcagacagctgtgtgacgagtctgtcctgtgattcccaccgctcactcatcgtggctggcctcggtgacggctccatccgcgtctacgacagaaggatggcactcagcgaatgccgcgtcatgacgtaccgggagcacacagcctgggtggtgaaggcctccctgcagaagcgtcccgacggccacatcgtgagtgtgagcgtcaatggagatgtgcgcatctttgatccccggatgcctgagtcggtaaatgtgcttcagatcgtgaaggggctgacggccctggacatccacccccaggcggacctgatcgcatgtggctccgtcaatcagttcaccgccatctacaacagcagcggagagctcatcaacaacatcaagtactacgacggcttcatgggccagcgggtcggcgccatcagctgcctggccttccacccgcactggcctcacctggccgtgggaagcaacgactactacatctccgtgtactcggtggagaagcgtgtcagatagcggcgtgacccgggcccaccaggccacggccgcctgctgtacatagtgaagctgtcactcgccggggcacggggcgtcggctgctgcggccccgcagtgtgaacgttggctgctgccttagctgctgatgacggcaggagggccctgctactcgcttttgtctgtcttcgctgtcgtgtctggaatgtcagggaaggggagggctcgggttgacggtggcttcccactgagcaccagcatccaggtgcacccccgcggccacggcgcctctgtccctctcctgttctgtgtttctctgagacgctgaaaggggaaacacctcactttatttccatgtaatcagagcattagctgcagaaaaaccccccgacagagccctggcggagaggcaggcgctggggctcctacgggtccctggggcagctgtccccatcaggccaagagcgagcgagaggcgctgccccagccaggcccaccacctctcacagtcagtgcacgcaagcagggacatttcctagccagctgggggacactggaaattcgggaaaccaagagagaggaagaaggagacgcccctccaactggcgggtgtgaaggaagccgcccaggggtccgggctgtccttggccgctggcagcatcactgagcaggaagcgcacagcccaccctccccgcacctccaggtctctggactccagttttggcccctctcacacagagctgtcagcaggggccgctgtggcggtgcacaggggaggcaggtccttggcgaggtagcccctgccttaatccacggggctcctttccctccgaagggctgctcttccccacaggcgcggggacagcagcccgacctgtggtctccatgcctgtgccctcacacaggtgtagcacacgcatgtgcagatggcaccacggccggcacctgggggcacacacatgcaggcggcgtggtctccctgctctgtccccacacgttcctcacatacaggcaagaggcactgccgggtcccggacggctccgggtgacaccagccccgtctccagccttgagccgcccatgctgatgcgacctcggctgacagctgggcctgtggtgcagacaggagctgtgtggacagtcccgcccaggaggggccgcagggcgtgtatgagcagttttgcaaacagaacacaaccacaatgatggtattttgaaaagtgttctttccgtgttcgtcgggaatcaggattattgagaggtgaaggagccaggtggcttcattctggcggtgagaggcccacgaccacgggagtgagagctggtgtggcgaggcccggctctcctgcggtgtggctggtggcctgccgtggccaagagcatcttctgggtggatggaaccctgcctggtcacatttggccagagacacacctggccctcagggggctgagctggagactgagctggggctggccgggacgtgacaaggcaggacagaggcggcccctccgctgctcctttttggaatgcgagctcccaccagaagaaggttccggcacgaatcccatccccacgtctgggccgagaaagcagcccgggtccggaaggtgtagagagtcccggcctcactcagctcacagggcgtgccaggcggcaacaccagaatcttccagaagcccagctccacccgcacacgcagcttcccatccagtccttcaactcaattcttacccaacacgcgtttctgtttgttttgagacaaaatcaccacctgtcaaaaggcaggtggctccagaggggtcaagacccccccccgcccccgctccaccctggagcccacccccatgggcaccgcgtgccgcctgcacgtgggctgtcttcacaggtctgatgtgaaaattcaatcacgacgttaaccggctcgagagagcgccggcctagaggctcattatctatttattttaccaaacgcgaattgagacggactttgacaaaacacgaaatggtaatgtgaagctaagagcagagagtgaccaacagtaaacaacacgcgcagactccg

SEQ ID NO: 205670 - DNA, 4008 bp, Artificial Sequence
  derived and/or modified sequence
atggagagcgagatgctgcagagccccctgctgggcctgggcgaggaggacgaggccgacctgaccgactggaacctgcccctggccttcatgaagaagagacactgcgagaagatcgagggcagcaagagcctggcccagagctggagaatgaaggacagaatgaagaccgtgagcgtggccctggtgctgtgcctgaacgtgggcgtggacccccccgacgtggtgaagaccaccccctgcgccagactggagtgctggatcgaccccctgagcatgggcccccagaaggccctggagaccatcggcgccaacctgcagaagcagtacgagaactggcagcccagagccagatacaagcagagcctggaccccaccgtggacgaggtgaagaagctgtgcaccagcctgagaagaaacgccaaggaggagagagtgctgttccactacaacggccacggcgtgcccagacccaccgtgaacggcgaggtgtgggtgttcaacaagaactacacccagtacatccccctgagcatctacgacctgcagacctggatgggcagccccagcatcttcgtgtacgactgcagcaacgccggcctgatcgtgaagagcttcaagcagttcgccctgcagagagagcaggagctggaggtggccgccatcaaccccaaccaccccctggcccagatgcccctgccccccagcatgaagaactgcatccagctggccgcctgcgaggccaccgagctgctgcccatgatccccgacctgcccgccgacctgttcaccagctgcctgaccacccccatcaagatcgccctgagatggttctgcatgcagaagtgcgtgagcctggtgcccggcgtgaccctggacctgatcgagaagatccccggcagactgaacgacagaagaacccccctgggcgagctgaactggatcttcaccgccatcaccgacaccatcgcctggaacgtgctgcccagagacctgttccagaagctgttcagacaggacctgctggtggccagcctgttcagaaacttcctgctggccgagagaatcatgagaagctacaactgcacccccgtgagcagccccagactgccccccacctacatgcacgccatgtggcaggcctgggacctggccgtggacatctgcctgagccagctgcccaccatcatcgaggagggcaccgccttcagacacagccccttcttcgccgagcagctgaccgccttccaggtgtggctgaccatgggcgtggagaacagaaacccccccgagcagctgcccatcgtgctgcaggtgctgctgagccaggtgcacagactgagagccctggacctgctgggcagattcctggacctgggcccctgggccgtgagcctggccctgagcgtgggcatcttcccctacgtgctgaagctgctgcagagcagcgccagagagctgagacccctgctggtgttcatctgggccaagatcctggccgtggacagcagctgccaggccgacctggtgaaggacaacggccacaagtacttcctgagcgtgctggccgacccctacatgcccgccgagcacagaaccatgaccgccttcatcctggccgtgatcgtgaacagctaccacaccggccaggaggcctgcctgcagggcaacctgatcgccatctgcctggagcagctgaacgacccccaccccctgctgagacagtgggtggccatctgcctgggcagaatctggcagaacttcgacagcgccagatggtgcggcgtgagagacagcgcccacgagaagctgtacagcctgctgagcgaccccatccccgaggtgagatgcgccgccgtgttcgccctgggcaccttcgtgggcaacagcgccgagagaaccgaccacagcaccaccatcgaccacaacgtggccatgatgctggcccagctggtgagcgacggcagccccatggtgagaaaggagctggtggtggccctgagccacctggtggtgcagtacgagagcaacttctgcaccgtggccctgcagttcatcgaggaggagaagaactacgccctgcccagccccgccaccaccgagggcggcagcctgacccccgtgagagacagcccctgcacccccagactgagaagcgtgagcagctacggcaacatcagagccgtggccaccgccagaagcctgaacaagagcctgcagaacctgagcctgaccgaggagagcggcggcgccgtggccttcagccccggcaacctgagcaccagcagcagcgccagcagcaccctgggcagccccgagaacgaggagcacatcctgagcttcgagaccatcgacaagatgagaagagccagcagctacagcagcctgaacagcctgatcggcgtgagcttcaacagcgtgtacacccagatctggagagtgctgctgcacctggccgccgacccctaccccgaggtgagcgacgtggccatgaaggtgctgaacagcatcgcctacaaggccaccgtgaacgccagaccccagagagtgctggacaccagcagcctgacccagagcgcccccgccagccccaccaacaagggcgtgcacatccaccaggccggcggcagcccccccgccagcagcaccagcagcagcagcctgaccaacgacgtggccaagcagcccgtgagcagagacctgcccagcggcagacccggcaccaccggccccgccggcgcccagtacaccccccacagccaccagttccccagaaccagaaagatgttcgacaagggccccgagcagaccgccgacgacgccgacgacgccgccggccacaagagcttcatcagcgccaccgtgcagaccggcttctgcgactggagcgccagatacttcgcccagcccgtgatgaagatccccgaggagcacgacctggagagccagatcagaaaggagagagagtggagattcctgagaaacagcagagtgagaagacaggcccagcaggtgatccagaagggcatcaccagactggacgaccagatcttcctgaacagaaaccccggcgtgcccagcgtggtgaagttccaccccttcaccccctgcatcgccgtggccgacaaggacagcatctgcttctgggactgggagaagggcgagaagctggactacttccacaacggcaaccccagatacaccagagtgaccgccatggagtacctgaacggccaggactgcagcctgctgctgaccgccaccgacgacggcgccatcagagtgtggaagaacttcgccgacctggagaagaaccccgagatggtgaccgcctggcagggcctgagcgacatgctgcccaccaccagaggcgccggcatggtggtggactgggagcaggagaccggcctgctgatgagcagcggcgacgtgagaatcgtgagaatctgggacaccgacagagagatgaaggtgcaggacatccccaccggcgccgacagctgcgtgaccagcctgagctgcgacagccacagaagcctgatcgtggccggcctgggcgacggcagcatcagagtgtacgacagaagaatggccctgagcgagtgcagagtgatgacctacagagagcacaccgcctgggtggtgaaggccagcctgcagaagagacccgacggccacatcgtgagcgtgagcgtgaacggcgacgtgagaatcttcgaccccagaatgcccgagagcgtgaacgtgctgcagatcgtgaagggcctgaccgccctggacatccacccccaggccgacctgatcgcctgcggcagcgtgaaccagttcaccgccatctacaacagcagcggcgagctgatcaacaacatcaagtactacgacggcttcatgggccagagagtgggcgccatcagctgcctggccttccacccccactggccccacctggccgtgggcagcaacgactactacatcagcgtgtacagcgtggagaagagagtgagatag

SEQ ID NO: 205671 - protein, 1085 aa, Artificial Sequence
  derived and/or modified sequence
MSTPSRFKKDKEIIAEYESQVKEIRAQLVEQQKCLEQQTEMRVQLLQDLQDFFRKKAEIETEYSRNLEKLAERFMAKTRSTKDHQQYKKDQNLLSPVNCWYLLLNQVRRESKDHATLSDIYLNNVIMRFMQISEDSTRMFKKSKEIAFQLHEDLMKVLNELYTVMKTYHMYHAESISAESKLKEAEKQEEKQIGRSGDPVFHIRLEERHQRRSSVKKIEKMKEKRQAKYSENKLKSIKARNEYLLTLEATNASVFKYYIHDLSDLIDCCDLGYHASLNRALRTYLSAEYNLETSRHEGLDIIENAVDNLEPRSDKQRFMEMYPAAFCPPMKFEFQSHMGDEVCQVSAQQPVQAELMLRYQQLQSRLATLKIENEEVKKTTEATLQTIQDMVTIEDYDVSECFQHSRSTESVKSTVSETYLSKPSIAKRRANQQETEQFYFMKLREYLEGSNLITKLQAKHDLLQRTLGEGHRAEYMTTRPPNVPPKPQKHRKSRPRSQYNTKLFNGDLETFVKDSGQVIPLIVESCIRFINLYGLQHQGIFRVSGSQVEVNDIKNSFERGENPLADDQSNHDINSVAGVLKLYFRGLENPLFPKERFNDLISCIRIDNLYERALHIRKLLLTLPRSVLIVMRYLFAFLNHLSQYSDENMMDPYNLAICFGPTLMPVPEIQDQVSCQAHVNEIIKTIIIHHETIFPDAKELDGPVYEKCMAGDDYCDSPYSEHGTLEEVDQDAGTEPHTSEDECEPIEAIAKFDYVGRSARELSFKKGASLLLYHRASEDWWEGRHNGIDGLVPHQYIVVQDMDDTFSDTLSQKADSEASSGPVTEDKSSSKDMNSPTDRHPDGYLARQRKRGEPPPPVRRPGRTSDGHCPLHPPHALSNSSVDLGSPSLASHPRGLLQNRGLNNDSPERRRRPGHGSLTNISRHDSLKKIDSPPIRRSTSSGQYTGFNDHKPLDPETIAQDIEETMNTALNELRELERQSTAKHAPDVVLDTLEQVKNSPTPATSTESLSPLHNVALRSSEPQIRRSTSSSSDTMSTFKPMVAPRMGVQLKPPALRPKPAVLPKTNPTIGPAPPPQGPTDKSCTM

SEQ ID NO: 205672 - DNA, 3258 bp, Artificial Sequence
  derived and/or modified sequence
atgtctactcctagtagatttaagaaagacaaagagattatcgctgagtacgagtcacaggtgaaggagattcgcgctcagttggtagagcagcaaaagtgtcttgagcagcaaacagaaatgcgagttcagctattgcaggacctgcaggattttttccgaaaaaaggccgaaattgagacagagtactctagaaacttagagaagcttgccgagaggttcatggctaagactaggtctacaaaggaccaccaacaatacaagaaggaccagaatcttctctcccccgtgaactgctggtacctgctgctgaaccaagtccgacgcgagtcaaaagaccacgcgacgctgagcgacatttacctgaacaacgtgatcatgcgcttcatgcagatctcagaagattcaacaagaatgttcaaaaaatccaaggaaatcgcattccagctgcacgaggatctcatgaaggtgctaaacgaactctatactgttatgaaaacctaccacatgtaccatgcagagtcaatctccgcagagagtaaattaaaggaggcggagaaacaggaggaaaagcaaatcggcagatcaggtgatcccgtattccatatacggctcgaggaaagacaccagcgtaggtcatctgttaagaagatcgagaaaatgaaagagaagcggcaagccaagtattcagaaaacaagttaaagtccatcaaagcccgcaatgagtacttgttgactttagaggctacaaacgcctccgtctttaagtattatatccatgacctgtccgacttaatagattgttgtgaccttggataccacgcgagccttaaccgagccctcagaacttatctcagcgcagagtacaacttggaaaccagcagacacgagggtttagacatcattgaaaacgccgtggataacctcgagcctcgttccgacaagcagcggttcatggagatgtatccagccgccttctgcccacctatgaaatttgagttccagtcccacatgggagatgaggtgtgccaggtcagtgctcagcaaccagttcaagccgagctgatgttgcgctaccaacagctgcagagtcgcttagccaccttgaagatcgaaaatgaagaggtgaagaagactactgaagccactctccagaccatccaagacatggtgacaatagaggattacgacgtttcagagtgtttccagcacagcaggtccacagagagtgttaaatcaacggtctctgaaacatacctgtcaaagccaagcattgctaagcgaagagctaatcagcaggagactgagcagttctattttatgaaactccgtgagtatctagagggtagcaaccttataaccaagctgcaagccaagcacgacctgctccagagaaccctgggtgaaggtcacagagcggaatatatgacgactaggccacctaacgtgccgcctaagccacagaagcacagaaagtctcgccctaggagtcagtacaacaccaagttgtttaacggtgatctggagacttttgtgaaggatagcgggcaggtgatcccactcattgtggagtcatgcatccggtttattaacctgtacggactgcagcaccagggtattttccgggtttcggggagtcaagtggaggttaacgacattaagaactcctttgagcgcggcgagaatcccctggccgacgatcagagcaatcatgacatcaactcagttgccggagtgctgaagctgtacttcagaggtttagagaatcctttatttccgaaggagcgcttcaatgacctcatctcctgcataaggattgataacttgtacgaaagggccctgcacataaggaaacttctcctgacacttcctaggtctgtcctaatcgtgatgaggtacctctttgcattcctgaatcacctttcccagtactctgatgagaatatgatggatccctacaatttagccatttgttttgggcccaccctgatgcccgtgccagagatacaggaccaggtgtcctgtcaagctcatgtgaatgagatcatcaagactataattatccaccatgagacgatcttcccagacgccaaagaactagacgggcccgtttacgagaagtgcatggccggggacgactactgtgattctccctactcagagcatggcacactcgaggaagtcgaccaggacgcagggactgagcctcatacttccgaagatgagtgcgaacctatcgaggcgatcgccaaattcgattacgttgggcgtagcgcacgcgaactgagttttaagaaaggcgcttctttgttgttgtaccacagggcctctgaagattggtgggagggtaggcacaatggaattgacgggctcgtcccacatcaatatatcgtggtccaggatatggatgacacattttccgatactctctcccagaaagccgacagcgaagcttccagtgggccagtgacggaagacaagtcctctagcaaagatatgaacagccctactgacaggcatccagatggttatcttgcccgccaacgcaaacgaggggaacccccacccccagtgagaagacctggacgaacaagcgatggccactgcccgctgcacccccctcatgccctcagtaactcatccgtcgatcttgggtctccaagcctggcttctcatcctaggggtctcctgcaaaaccgtggccttaataacgatagccctgaaaggcgcaggcgccccggacacggatcgttgactaatatctctaggcacgactcactaaaaaaaattgatagccctccaattcgcaggtcaacaagttccgggcaatatactggctttaacgaccataaacctttggaccctgagaccattgcacaggatattgaggaaaccatgaataccgcccttaacgaactgcgcgaactcgagaggcagtcaacagccaaacacgcgcctgacgtagttctggacacacttgaacaggtgaagaacagccccacaccggccaccagtaccgaatccctctcacctttacacaatgttgccctccggagcagtgagccacaaatcagacgttcgaccagctcttcctcggatactatgtccaccttcaaacctatggtcgcccccagaatgggggtacagctcaagccacctgcactgaggcccaagccagccgtgctgccaaaaaccaacccgacaattggacccgccccacctccccaagggcccaccgataagagctgtacgatgtag

SEQ ID NO: 205673 - DNA, 3258 bp, Artificial Sequence
  derived and/or modified sequence
atgagcacccccagccgcttcaagaaggacaaggagatcatcgccgagtatgagagccaggtgaaggagatccgggcccagctggtggagcagcagaagtgcctggagcagcagacagagatgagggtgcagctgctgcaggacctgcaggacttcttcaggaagaaggccgagattgaaacagagtacagcaggaacctggagaagctggccgagcgcttcatggccaagaccaggagcaccaaggaccaccagcagtacaagaaggaccagaacctgctgagccctgtgaactgctggtacctgctgctgaaccaggtgcggcgggagagcaaggaccacgccaccctgagtgacatctacctgaacaacgtcatcatgaggttcatgcagatcagcgaggacagcaccaggatgttcaagaagagcaaggagatcgccttccagctgcacgaggacctgatgaaggtgctgaatgagctgtacacagtgatgaagacctaccacatgtaccacgccgagagcatctctgctgagagcaagctgaaggaggccgagaagcaggaggagaagcagatcggccgcagcggggaccctgtgttccacatccggctggaggagcggcaccagaggaggagctctgtgaagaagattgagaagatgaaggagaagaggcaggccaagtacagcgagaacaagctgaagagcatcaaggccagaaatgagtacctgctgaccctggaggccaccaatgcctctgtgttcaagtactacatccatgacctgagtgacctgattgactgctgtgacctgggctaccacgccagcctgaacagagccctgcggacctacctgtctgctgagtacaacctggagaccagcagacatgagggcctggacatcattgaaaatgctgtggacaacctggagcccaggagtgacaagcagcgcttcatggagatgtacccagctgccttctgcccccccatgaagtttgagttccagagccacatgggagatgaggtgtgccaggtgtctgcccagcagcctgtgcaggccgagctgatgctgcgctaccagcagctgcagagccggctggccaccctgaagattgaaaatgaggaggtgaagaagaccacagaggccaccctgcagaccatccaggacatggtgaccatcgaggactatgatgtgtctgagtgcttccagcacagccgcagcacagagagcgtgaagagcacagtgtctgagacctacctgagcaagcccagcatcgccaagaggcgggccaaccagcaggagacagagcagttctacttcatgaagctgcgggagtacctggagggcagcaacctgatcaccaagctgcaggccaagcatgacctgctgcagaggaccctgggggagggccacagagctgagtacatgaccacccggccccccaacgtgccccccaagccccagaagcacaggaagagccggcccaggagccagtacaacaccaagctgttcaatggagacctggagacctttgtgaaggacagcggccaggtgatccccctcatcgtggagagctgcatccgcttcatcaacctgtatggcctgcagcaccagggcatcttccgggtgtctggcagccaggtggaggtgaatgacatcaagaacagctttgaaagaggagagaaccccctggctgatgaccagagcaaccacgacatcaacagcgtggccggcgtgctgaagctgtacttccggggcctggagaaccccctcttccccaaggagcgcttcaatgacctgatcagctgcatcagaattgacaacctgtatgaaagagccctgcacatcaggaagctgctgctgaccctgcccaggtctgtgctgattgtgatgagatacctgtttgccttcctgaaccacctgagccagtacagtgatgagaacatgatggacccctacaacctggccatctgcttcggccccaccctgatgcctgtgcctgagatccaggaccaggtgtcctgccaggcccacgtgaatgagatcatcaagaccatcatcatccaccacgagaccatcttcccagatgccaaggagctggatggccctgtgtatgagaagtgcatggctggagatgactactgtgacagcccctacagcgagcacggcaccctggaggaggtggaccaggatgctggaacagagccccacaccagtgaagatgaatgtgagcccatcgaggccatcgccaagtttgattatgtgggccgcagcgcccgggagctgtccttcaagaagggggccagcctgctgctgtaccaccgggccagcgaggactggtgggagggccgccacaacggcattgatggcctggtgccccaccagtacatcgtggtgcaggacatggatgacaccttcagtgacaccctgagccagaaggctgacagcgaggccagcagcggccctgtgacagaggacaagagcagcagcaaggacatgaacagccccacagacagacacccagatggctacctggcccggcagaggaagagaggagagcccccacctcctgtgagaagacctggccgcaccagtgatggccactgccccctgcacccccctcatgccctgagcaacagctctgtggacctgggcagccccagcctggccagccacccccggggcctgctgcagaacagaggcctgaacaatgacagccctgagaggagaagaagacctggccacggcagcctgaccaacatcagcagacatgacagcctgaagaagattgacagcccccccatccgccgcagcaccagcagcggccagtacacaggcttcaatgaccacaagcccctggaccctgagaccatcgcccaggacatcgaggagaccatgaacacagccctgaatgagctgcgggagctggagcggcagagcacagccaagcacgccccagatgtggtgctggacaccctggagcaggtgaagaacagccccaccccagccaccagcacagagagcctgagccccctgcacaacgtggccctgcggagcagcgagccccagatcagaagaagcaccagcagcagcagtgacaccatgagcaccttcaagcccatggtggcccccaggatgggcgtgcagctgaagcccccagccctgcggcccaagccagctgtgctgcccaagaccaaccccaccatcggccctgcccccccaccccagggccccacagacaagagctgcaccatgtag

SEQ ID NO: 205674 - DNA, 3258 bp, Artificial Sequence
  derived and/or modified sequence
atgagcacccccagccggttcaagaaggacaaggagatcatcgccgagtacgaatcgcaagtgaaggagatcagggcgcagcttgtggagcagcagaagtgcttggaacagcagaccgaaatgagggtccagctcctgcaagacctccaagacttttttagaaaaaaggctgaaatagaaactgaatactctcgaaatctggagaagctggccgagcgctttatggcaaaaacaaggagtactaaggatcaccagcagtataaaaaagatcagaatttgttgtcaccagtcaactgctggtacctgttgctgaaccaggtgcgccgcgaaagcaaggatcacgccacactgtccgacatctatctcaacaatgtgatcatgaggttcatgcaaatttccgaggacagtaccagaatgttcaagaaatccaaagagatagctttccagctgcacgaggacctgatgaaagtcctcaacgaactgtacacagtaatgaagacttaccacatgtaccatgctgaaagcatctccgcagaatctaaattgaaagaagctgagaagcaggaggagaagcagatcggaaggagtggtgaccctgtcttccacatccggttagaagagagacaccagcgtcgctccagcgtaaaaaagattgagaagatgaaagagaagaggcaggccaagtactcagaaaataaactcaaaagtattaaggcaagaaatgagtacctactgactcttgaagccaccaatgcttctgtgttcaagtactatatccatgacttgtccgaccttatagactgctgtgacctgggctaccatgcttccctgaaccgcgccctccgtacctacctatccgctgagtacaacctggaaaccagccggcatgaggggctcgatattattgagaatgccgtggataatctcgagccacggagtgataagcagcgcttcatggagatgtatcctgcggccttttgtccccccatgaaatttgaatttcagtcccacatgggcgacgaggtctgccaggtaagcgcccagcagcctgttcaggctgagctgatgctgaggtaccagcaactgcagagtcgcctggccactctaaaaatagaaaacgaagaggttaagaagacaactgaggccaccctccagacaatacaagatatggtgaccatagaagactatgacgtcagtgagtgctttcagcactcacgcagcacagagtctgtcaagagcacagtttctgaaacttatttgtctaagcccagcattgctaaacgccgggccaaccagcaggagaccgagcagttctactttatgaaattgagagagtacttagaaggaagtaatctgatcaccaagttgcaggcaaaacacgatctgctgcaacgaacactgggagaaggtcacagagcagagtacatgacaacccggccacctaacgtgccccccaaacctcagaagcaccggaaatcccgcccaaggtcgcaatataacaccaaactatttaatggtgatctggagacattcgtgaaagactctggccaagtgatcccccttatcgttgaatcctgtattcgattcataaatctttacgggctccagcaccaggggatcttcagagtgtcagggagccaggtggaggtgaacgacataaaaaactctttcgagaggggggaaaacccattagctgatgatcaaagcaaccacgacattaacagcgtggcaggggtccttaaactgtattttcgggggctggaaaatcctctatttcctaaagaacggttcaatgatctcatttcatgcatcagaatcgataatctgtacgagcgcgcattgcatatccgcaaactcttactgactcttccgagatccgtgctaatcgtcatgcgctatctgtttgctttcctcaaccacctaagtcaatattccgatgagaacatgatggatccctacaatcttgcgatctgtttcggccccacactgatgccggtaccagaaattcaggaccaagtatcttgccaggcccatgttaatgaaatcattaagacaattatcatccaccacgaaacaatcttccctgacgcgaaggagctggacggccctgtctacgagaaatgcatggcaggtgacgactactgcgactccccgtactctgagcacggaaccttagaggaggtggatcaggatgccggcacggagccccatacctccgaggacgaatgtgagcctatagaggctatcgccaagtttgattatgtgggacgatccgcccgagaactgtcgtttaagaaaggcgcttccttgctactgtaccaccgggccagtgaggactggtgggagggccgccacaacggcattgacggtctcgtgccgcatcaatacatagtggtgcaagacatggatgatacattttccgataccttatcacaaaaagccgacagtgaagcaagctccggcccagttacagaggacaagtcatctagcaaagacatgaacagtcctacagacaggcaccccgacggctacttagctagacagcgtaaacgtggtgagccaccacctcccgttcgacgacctgggcggacgtcagatggccactgtcccctgcatccaccacatgctttaagcaactccagcgtcgacctgggaagtccctctctggcgagtcatcccagaggactgctccaaaaccgtggtctgaacaacgacagtccagaaagacgcagaagacccggtcacgggagtctaaccaatatctcgcgccacgactccttgaagaaaattgattccccacctattcgccgttccacctcctctggccaatacactggatttaacgatcacaaacctctcgatcctgaaaccatcgcacaagacatcgaggagacgatgaacacagcactcaacgaattgcgggaattggaacgccagagcactgcaaaacacgcgcctgatgtcgtgctcgataccctggagcaggtgaagaacagccccactcccgctaccagcacagagagccttagtcccctccacaatgtagcccttagaagtagcgaacctcagatccggagatccactagctcatcctcagacaccatgtccaccttcaaacctatggttgctcctcggatgggagtgcaactcaagccacccgcgctgcggccaaagcccgcggtccttcccaaaaccaacccgaccatcgggcccgcgcctccaccgcagggtcccacagacaagagttgcacaatgtag

SEQ ID NO: 205675 - DNA, 3258 bp, Artificial Sequence
  derived and/or modified sequence
atgtcaaccccgtctagattcaaaaaggacaaagagattattgcagagtacgagtcccaggtgaaggagatcagggctcaactcgtggaacagcagaaatgcctagagcagcagaccgaaatgcgggtgcagcttctgcaagatctgcaagatttctttaggaaaaaggccgaaatagagacggagtactctaggaatctcgagaaactggctgaaaggtttatggctaaaactcgctcaacaaaggatcatcagcaatacaaaaaagatcagaatctcttgtcaccagtgaattgctggtacctcctactgaatcaggttaggcgcgaatccaaagaccacgccactctgagcgatatatatctgaataacgtcatcatgcgctttatgcaaatttcagaggactccacacgcatgttcaagaaatcgaaggagatcgcctttcagctgcatgaggatctgatgaaggtgctgaacgagctgtataccgttatgaagacgtaccacatgtatcatgctgagtcgattagtgccgagtcaaaacttaaggaagctgagaagcaggaagagaagcagattggacgctccggcgacccagttttccatatcagactcgaagagagacatcagaggcggtcgagtgtcaagaagatagaaaagatgaaggagaaaagacaggcaaaatactccgagaataaactcaaaagcatcaaggctcgaaatgagtacctgctgactctggaagcgacaaacgcctccgtgttcaaatattacatacatgacctgtctgatctgattgattgttgcgaccttggttatcatgcttccttgaatagggccctgaggacatatctcagtgctgagtataacctcgagaccagtcgtcacgaggggttggacattattgaaaacgcagttgataatctcgagcccaggagcgacaaacagcgcttcatggaaatgtatccggctgccttttgtcctccaatgaaattcgagtttcaatctcacatgggagacgaagtctgccaggttagtgcccaacagccagtgcaggctgagttgatgctgcgataccagcaactacagagtcggttggccactctaaaaatcgagaacgaagaggtgaagaagaccacggaggccactctgcagaccattcaagatatggtgacaattgaagactacgatgttagcgaatgctttcagcattcaagatccacagagagtgtaaaaagcacagtctccgagacgtatctctccaagccctctatcgcaaaaagacgagccaaccaacaggagaccgaacagttctattttatgaagctcagagagtacctcgagggctccaatctcatcacaaagttacaggccaagcacgaccttttacaacgcacactcggtgaggggcaccgtgctgagtacatgaccacacggccacctaacgtccccccaaagccacagaaacaccgtaagagtaggcccagaagtcagtataacaccaagttgttcaacggcgacttggagaccttcgtgaaggattctggccaggtgatcccgctgattgtggagtcctgtattcgctttatcaacctatacggactgcaacatcagggaatcttcagagtgtccggcagccaggtcgaagtgaacgatatcaaaaactcatttgagcgcggtgagaacccgttagcagacgaccagagcaatcacgatataaactcagtagcaggggtccttaagctgtatttcaggggcctggaaaatcccttgttccccaaggagaggttcaatgacctgataagctgcattcgtatagataatctttacgagagggctcttcatatccggaagctcctgctgacattgcccagaagcgtgctgatcgtgatgagatacttgttcgcctttcttaatcatctgtcccagtattctgatgagaatatgatggatccgtacaacctggccatatgttttggacccactctcatgccggtccctgagattcaggatcaagtgtcctgtcaagcacatgtcaatgagatcatcaaaacaatcatcattcaccacgaaacaattttccccgatgccaaggaattggacggccctgtctatgagaagtgtatggccggtgatgactattgcgattcaccctacagtgaacatggaacgctggaggaggtggaccaagatgcaggcacagagccccacacctctgaagacgagtgcgagcccatcgaagctatcgcgaagtttgattacgtcggtagatcagctcgggagctctccttcaagaagggtgcttcactcttattgtatcacagagcatccgaagattggtgggagggaagacataatggaattgatggtttggtgccccatcagtacatcgtggtgcaagatatggatgacacctttagtgatacactctcgcagaaggctgacagtgaagcctcttcagggcctgtcacggaagacaagagctccagcaaggacatgaacagcccaactgataggcaccccgacggctatctggcacgacagaggaaacggggagagcctcctcccccagtacggaggccaggccgaacttcagacggccactgtcctttacatccaccccacgccctgtccaactcaagtgttgacttgggctctccttctctggcatcacatcctcggggactgctgcagaatagggggctgaacaacgatagcccagaacggaggcgcagacctggtcacggctcactcaccaacattagtaggcacgactcactcaagaagattgatagcccaccaattagacggagcacgagctccggccagtacactgggttcaacgaccacaaacctttagaccctgagacaatcgctcaagacatcgaggaaactatgaatacagccctcaacgaactccgggagctcgaaaggcagagcacagccaaacatgcgcctgacgtcgtcctagataccttggagcaggtcaaaaattcaccaaccccagccacgtccacggaatcattgagcccactccataatgtagctctccggtcctcagagcctcagatccgcagatccaccagctcctcctctgacacgatgtctacattcaagcccatggtggctcctcggatgggagtacagctgaagccacccgcactgcgacctaagcctgcggtcctgccgaaaactaatccaaccataggcccagctcccccaccgcagggcccaactgacaagagctgtaccatgtag

SEQ ID NO: 205676 - DNA, 8943 bp, Artificial Sequence
  derived and/or modified sequence
cgggacccttgagcgccggagccgacagctggaggcaggaagggagggttgtggcgcccgagctgggcgcgttcccagcgcctgccctccgccgctggccctgtcccgggcgcccggtgcgggtctcgaacaatggtgcggagcgccggcgcgagccccgcgcccgcccagcggccgtagaggaagtggccgggctcccggcgaggtgggcagggagacgtcccccgccactcgctggctggagtttgcctgcgcgtccggcctctcccccggggatcccctgggattaccgacggagctcaatttcgagagtatggtgccagcgcccgggctaatctagtcctctctactcgctctttttcccctcctcctcctacttctcctctccctcctcccttccctcgggtcggcgctgcctctggattgcctgcgtgtgggagtacaactctgcctctccaaggagaacgggttgtgaccactgaacaaaacttgcccattgaaagcaaacccggaacagctggataatgtccaccccgagccgattcaagaaggacaaagagatcatagccgagtatgaaagtcaagtcaaagaaattcgagctcaactggtagaacaacaaaaatgcctggagcagcaaacggagatgcgagttcagcttctccaggatctgcaagatttcttccgaaaaaaagctgaaattgagacggaatattcccggaatctagagaagttagcagaaaggttcatggcaaaaacaagaagcactaaggatcatcaacaatacaagaaagaccagaacctgttgtctccagtgaactgctggtatttgctcctgaaccaagtaaggagagaaagcaaagaccatgcaaccttgagtgacatctatctgaacaatgtgattatgcggttcatgcagataagtgaggattctaccaggatgtttaaaaagagcaaagagattgcattccaacttcatgaggatttaatgaaggttcttaatgagctttatacggtgatgaaaacataccatatgtatcatgcagagagcatcagtgcagagagcaagctgaaagaggccgaaaaacaagaggaaaagcaaattgggagatctggtgatccagtcttccatattcgactagaggagagacatcaacggcgaagctctgtaaagaaaattgaaaaaatgaaagaaaaaagacaagcaaaatattcagaaaataagctaaaatcaattaaggcacggaacgaatatctcctaacacttgaagccaccaatgcctcagttttcaagtactatattcatgatctttctgatttaattgattgctgtgatcttggctaccatgcaagtctgaacagagccctaagaacatatctgtctgcggagtacaaccttgaaacctccagacatgagggcttagacattattgagaatgcagttgataatttagagcccaggagcgataagcagagattcatggagatgtaccctgctgcgttctgtccaccaatgaagtttgagtttcagtctcacatgggtgatgaggtgtgccaggtcagtgcccagcagccagtccaggcagagctcatgctcaggtaccaacagttgcagtcccgccttgccacgctcaaaatcgagaatgaagaggttaagaaaacgactgaagccaccttgcagacgatacaagatatggtcaccatcgaggactatgatgtttctgaatgcttccagcacagtcgttccacagaatcagtgaagtccactgtctctgaaacctacctgagtaaacccagcatcgccaagagaagagccaaccagcaggaaactgaacagttctacttcatgaaactcagagaatatttggaaggcagtaatctcatcacaaaacttcaagccaaacatgacttgctgcagaggaccctgggagaaggtcatagagctgaatatatgactacaaggcctccaaatgttccccctaagccccagaaacacaggaagtccaggccccgctcacagtataatactaagttgtttaatggggatttggaaacattcgtcaaggactcaggacaggttattcccctcattgtggaaagctgtattcggttcatcaatctctatggtcttcagcatcaggggattttcagagtgtctggttcccaggtggaagtcaatgatattaaaaattcatttgagagaggtgaaaatcctttggctgatgaccagagtaaccatgatattaactcagttgctggcgttctgaagctctatttccgtgggctggaaaaccccctctttcctaaggaaagatttaacgatctgatttcttgtatcagaatagataatctctatgagagggcgcttcacatccgcaaactcctcctgactttgcccaggtcggtccttatagtgatgaggtacctctttgccttcctcaatcatctatcacagtacagcgatgagaatatgatggacccttataacctggccatttgctttggcccaacattgatgcctgtcccagaaatacaggatcaagtgtcttgccaggcacatgtgaatgaaattatcaaaaccatcatcatccaccatgagactattttcccagatgctaaagagctggatggccctgtttatgagaaatgtatggctggagatgactattgcgacagcccatacagtgagcacggtacattggaggaagtggaccaagatgctggtacagagccccacacaagtgaagatgaatgtgagccaatagaagcaatagccaagtttgactatgttgggcggtctgccagagaactatccttcaagaagggtgcctccctgctgctgtatcaccgtgcatctgaggactggtgggaaggcaggcacaacgggattgacgggctggtgcctcaccagtatatagtggtgcaggatatggatgatacgttttcagacactctgagccaaaaagccgacagtgaggccagcagtgggccagtcacggaagacaagtcctcatccaaggacatgaactccccgacagaccgtcatcctgacggctatttagccaggcaacgaaaaagaggagagccaccccctccagtaaggcgtcctggcaggaccagtgatggccattgcccgctccaccctccacatgccctttctaactcctcagttgacctagggtccccaagccttgccagtcacccccggggcctgctgcagaaccgtggcctcaacaatgacagtcctgagcggaggcgcaggcctggccatggcagcctgaccaacatcagccggcacgactccctcaagaagatcgacagccctcccattagaaggtccacgtcatcagggcaatacacgggcttcaatgaccacaagccactggacccagagacaattgctcaggatattgaagaaacgatgaacacagctttgaatgaactccgagaactggagagacagagcacagcaaagcatgcccctgatgtggtgctggataccctggagcaagtgaaaaactctcccacccctgccacttccacggaatctctcagccctttgcacaacgttgccctcaggagctccgagcctcagattcgacgtagcacgagctcctccagtgacacaatgagtactttcaagcctatggtggcacccagaatgggcgtgcagctgaagcctccagcccttaggccaaaacctgctgttcttccaaaaacaaatcctaccataggacctgccccacctccccagggtccaacagacaagtcatgcacaatgtaaaaaccagccaagcaaggccataaagggaggtgacttaaaaaagaaaatggattagtgacaaaagtcactgatccataactttccttagttttgtgcttataactggagatcttttggcttttctatgttgtcgaatgtaatgtctgagactagctaaattaacacgggcatttgtattttgtaatttttttaaataactggacatatgtcattttaaggacaatagaaacacttagacttacttgaaaatccaatgctgcaccacttgtaatgaaggcaacaccgctctccacattgtacagagcttcaggtttaatgtagcccagctgagtcagaaaggttgtgacctgaaggcagaagaacccgaatgccacacctcattggagtatagccagtgttggtctgtggcacttgggctgaaaggtgataatggcattgcgtggtagctgacaatgagcaccttcggttccatgtggagcggggtttagctcatgcaaaagacttgcaattgtctccatgggacgatcccagtgggactgtcagcccacagctcgagtgggttggatgcttgcctctttcctaacagttatttccccgggtccagcttaaagactcgatggaaggaggtagaacctctgctgttactgcttgaacttaacctgggaaaggagaggaagacaccatctccaaagctattaatgtcactccttttgcgagcatgattaggccccggagatttccaagtccccccatctacacttacaaacgattagaagggtttaattttaaagactttctggttacactactccacgaactcctccaaagatccgttattcaataactgcctagaaaatgtttccatctcctctaaatccctgtgttctcctctgtggaaatgaaggcagcaagaagcacctgaggccttggttcatgcagtgttctcttttgactaaatcacctaggttcctttaaacatgctacaaagcccaggcatggtggtgcacacctgtactcccagctactcgggtggtttacacaggaggatggctttgggcctagtagttcgagtccagcctgggcagcatagtgtgagaccctgtctcttaaaaaaaaaaaaaatgctacaaagtcctgatgatcctaaatttgaaatcccaactgtcctctccatttgtctttgagccaaccctgaactggccctggtacctgagtaagagccatgcagggccatcagcagaacatggccttgtggttctcacccagttgtgtacctcacaaccacaacttctttttctttgtcccttttcccctttttggttttggttttgtatgtgggctctatgtaactcccatagtcagctgaactctcaattggagaccctctttctctggcatcctagcacacaggcaattttttaagcctatatttatgctacattttcccccatcttaagaaaatttgctttgatttccattctcctactagcagcagctgatatcacctgtagacctatgagcattttatctattctatcattgaagttactgataaagatttttgttgttgttgttgttgttgggagaaatggatttcccacaactaatccctctggcccaccattaatttccttcttggtttcatttcaaactggcagccaattgcacgcccatctaagagctacacagtgtagattttacttcatcagcccattggtgaatgcatcgtgcagaaaagaactgggatctgtactaaaatcaagatcattactttgatctctacctcagtttgccagtgtagtcattctattgcaggaagagattaaattgatgagatattgttactttcagagtcacactgctgattgcttgcctggggcctaatttcacaaatgaatagtgacttttttcccatgtatttctaggtatggtaaacttttaaacctccaaattttcagagccatactttttgcccattttgaaaaagaagcccaggacagcaccttgtctagcccctccccatttctcctgagcttttggggtccttcagcacccttggacaccgtggagatccagccaagactgagctttgaatagcactagcccttttaaacaatcctcacaaattccttaggaatttaaactttccaaaataatcccccacttttttttttttttttttttttttttgagttggagtcttgctctgtcgcccaggccagagtacagtggtgcaatctcggctccctgcaacctccatctcccgggttcaagcaattctcctgagtagctgggattacaggcgccaccaccacgcccagctaatttttgtatttttagtagagatggggtgtcaccatgttggccaggctggtctcaaactcctgacctcaggtgacccaccagcctcagcctcccaaagtgctgggattacagatgtgagccaccatgcccggccattccaccacttctttaaaatagtaagaattcttaaaaaccatattccttgtttgatggaagagtaagatgttaacagagggcatcaaagggccagaggtgtctttgaatttattttttttcaatgtcttttctgagcttcagccttagcttttcagatcttcctcctacctgttcatttattcagccttctatctggtcatcctccccagcggctcctctctctgatgtgtccacctacggtggaacgaggattgcctttctgtgctccccatcaggactttgctgtcttggccggcaggagtcgtgctgctgcagagcctcacaggctgtgccttgtttcaggaaacagctcctaatactctcccatcactcactttacctgtctccatcttatttccctatactcctattgtcagcttgagactttttttttttttcaattccaaatgaagggtatgacctcagagtgagtgaggactcagtaaagactcacctctccttacttggtttattaaatgtcttcagattccagagataagacaaggtggccacttcacaaagaatccagaatcatgctcagtaaagctcattaaaagccactgcagctgagaaggttcacagcccttctttatagccacagaggcagcacacaggggaggtgggaagacacagggaaacgagagaagaaggataatgaggccttgaggtgttctgcccccaatttcaaggagcttatcaggcttcatgtgcaatttggggaggggagctttttgatggtgggtaaataatggctctacaaagattacctgactccactgacacaagaatatgtattctcagctgatataactgtgtgttcacatcccatccatagaactcactgaaggagattcatcaagtcagccttttggactgggttggggtttggggagtggatttggggatagagagaaaggtgtacttagtacacattttctaatgggcgttacgtgaactgtttgaacctgctgagtggcgctttgtagagctccatgttcacgttcagtgtcaacaccattcaacagctttgcacatcttcgtacaacataatctggctttggtgccccttgagccacctgtagaataatttatagcagggtcccacaatctactgcaatgatcgtgaacagttatcagtggatatagtgctccaagagtcaaattgtatccgttaagggttttctaacttttgctatcccccccgcgaccaaaaaaagggggggtttataatttaaagaaaaggaaaagaggcgtgggttggtagttgtgtccttaacatttaggaatgacatagcctctggagtctacaaactgaagaaactttcatctgatcagccttggaaatccaaagttaaagagcctatgtgtctcttgaggcgggggttagaggattcaaatttgggatgatgctcattgattcctgaccatagcagtgagaggccattttttgtgcaggaaatgtgcttaggactcagtcttgttttcgattatccaccacagaaaccctgagacacagagcagcttagaagtctctacccaggcgtaaatagagctccctactccagaccacctgccacccacctcccaagttgagaacacaagctccagctgggctggagagtcaggcttggtgcagggtgactttggcgaagttttgtcagatccataaagcaaactggaatttgagctttcacttaccctagtatacgttcttaaaaaaaaaaaaaagtctatgtggtataatcgagatggatacctgtgtctttaaattacgtagggaattttgtatgtttaaataattgtactgggttccataatgcttatcttagaaactttagtaaaagaaaatatatgaaccgtgcatttgtgaatgccccccttagagcattcatccaagttcagtgtgtagtgtgatggttattatagatatttaaagtatagtaagtggctgtgtaacaggagagactgctgtttacctacgtactgaagggtaactgctgcccgcgtaattaaatcagtattgtcctttcctgtcggtttgatcaattgcggtaccggtagcttcctgcttgtgactgttacctaattgtgtcaatgtacatctgtagtatgtacatgtgaaagtgcctttctattttagaggagttttagccttgctcttgtaccgttgccccgctctgtgccccacccccacctcctcctcccaattcctgctgcccactcgagtgtttcgaagcttcctccctgtcccccaccttccccatccccgccttcctgtgcctcggtgctcagtaatgtcccatctcacctccctgtcggtcctcagactgtctcgttttccttgtagacgtgattgtgcctttctcacccctgtgtcctcccatcccaccgcatcagtcccccgctcatgtgctgctgacagcatcgcattcgcccgtgctctgtactgcctctcaccatttcattccctcctctctgaggtgaaaataaagggggatgcttttacagtctggaaagaaaaaaaatgttttgttaatctgttgtgacaatgcacttttatgtatagtactgtacatttttggcatgtaccattacaggcttcagtatacagtcaggtttgttcttcacggtgtatctttataataaataagatagttctggc

SEQ ID NO: 205677 - DNA, 3258 bp, Artificial Sequence
  derived and/or modified sequence
atgagcacccccagcagattcaagaaggacaaggagatcatcgccgagtacgagagccaggtgaaggagatcagagcccagctggtggagcagcagaagtgcctggagcagcagaccgagatgagagtgcagctgctgcaggacctgcaggacttcttcagaaagaaggccgagatcgagaccgagtacagcagaaacctggagaagctggccgagagattcatggccaagaccagaagcaccaaggaccaccagcagtacaagaaggaccagaacctgctgagccccgtgaactgctggtacctgctgctgaaccaggtgagaagagagagcaaggaccacgccaccctgagcgacatctacctgaacaacgtgatcatgagattcatgcagatcagcgaggacagcaccagaatgttcaagaagagcaaggagatcgccttccagctgcacgaggacctgatgaaggtgctgaacgagctgtacaccgtgatgaagacctaccacatgtaccacgccgagagcatcagcgccgagagcaagctgaaggaggccgagaagcaggaggagaagcagatcggcagaagcggcgaccccgtgttccacatcagactggaggagagacaccagagaagaagcagcgtgaagaagatcgagaagatgaaggagaagagacaggccaagtacagcgagaacaagctgaagagcatcaaggccagaaacgagtacctgctgaccctggaggccaccaacgccagcgtgttcaagtactacatccacgacctgagcgacctgatcgactgctgcgacctgggctaccacgccagcctgaacagagccctgagaacctacctgagcgccgagtacaacctggagaccagcagacacgagggcctggacatcatcgagaacgccgtggacaacctggagcccagaagcgacaagcagagattcatggagatgtaccccgccgccttctgcccccccatgaagttcgagttccagagccacatgggcgacgaggtgtgccaggtgagcgcccagcagcccgtgcaggccgagctgatgctgagataccagcagctgcagagcagactggccaccctgaagatcgagaacgaggaggtgaagaagaccaccgaggccaccctgcagaccatccaggacatggtgaccatcgaggactacgacgtgagcgagtgcttccagcacagcagaagcaccgagagcgtgaagagcaccgtgagcgagacctacctgagcaagcccagcatcgccaagagaagagccaaccagcaggagaccgagcagttctacttcatgaagctgagagagtacctggagggcagcaacctgatcaccaagctgcaggccaagcacgacctgctgcagagaaccctgggcgagggccacagagccgagtacatgaccaccagaccccccaacgtgccccccaagccccagaagcacagaaagagcagacccagaagccagtacaacaccaagctgttcaacggcgacctggagaccttcgtgaaggacagcggccaggtgatccccctgatcgtggagagctgcatcagattcatcaacctgtacggcctgcagcaccagggcatcttcagagtgagcggcagccaggtggaggtgaacgacatcaagaacagcttcgagagaggcgagaaccccctggccgacgaccagagcaaccacgacatcaacagcgtggccggcgtgctgaagctgtacttcagaggcctggagaaccccctgttccccaaggagagattcaacgacctgatcagctgcatcagaatcgacaacctgtacgagagagccctgcacatcagaaagctgctgctgaccctgcccagaagcgtgctgatcgtgatgagatacctgttcgccttcctgaaccacctgagccagtacagcgacgagaacatgatggacccctacaacctggccatctgcttcggccccaccctgatgcccgtgcccgagatccaggaccaggtgagctgccaggcccacgtgaacgagatcatcaagaccatcatcatccaccacgagaccatcttccccgacgccaaggagctggacggccccgtgtacgagaagtgcatggccggcgacgactactgcgacagcccctacagcgagcacggcaccctggaggaggtggaccaggacgccggcaccgagccccacaccagcgaggacgagtgcgagcccatcgaggccatcgccaagttcgactacgtgggcagaagcgccagagagctgagcttcaagaagggcgccagcctgctgctgtaccacagagccagcgaggactggtgggagggcagacacaacggcatcgacggcctggtgccccaccagtacatcgtggtgcaggacatggacgacaccttcagcgacaccctgagccagaaggccgacagcgaggccagcagcggccccgtgaccgaggacaagagcagcagcaaggacatgaacagccccaccgacagacaccccgacggctacctggccagacagagaaagagaggcgagccccccccccccgtgagaagacccggcagaaccagcgacggccactgccccctgcaccccccccacgccctgagcaacagcagcgtggacctgggcagccccagcctggccagccaccccagaggcctgctgcagaacagaggcctgaacaacgacagccccgagagaagaagaagacccggccacggcagcctgaccaacatcagcagacacgacagcctgaagaagatcgacagcccccccatcagaagaagcaccagcagcggccagtacaccggcttcaacgaccacaagcccctggaccccgagaccatcgcccaggacatcgaggagaccatgaacaccgccctgaacgagctgagagagctggagagacagagcaccgccaagcacgcccccgacgtggtgctggacaccctggagcaggtgaagaacagccccacccccgccaccagcaccgagagcctgagccccctgcacaacgtggccctgagaagcagcgagccccagatcagaagaagcaccagcagcagcagcgacaccatgagcaccttcaagcccatggtggcccccagaatgggcgtgcagctgaagccccccgccctgagacccaagcccgccgtgctgcccaagaccaaccccaccatcggccccgccccccccccccagggccccaccgacaagagctgcaccatgtag

SEQ ID NO: 205678 - protein, 1100 aa, Artificial Sequence
  derived and/or modified sequence
MESLLLPVLLLLAILWTQAAALINLKYSVEEEQRAGTVIANVAKDAREAGFALDPRQASAFRVVSNSAPHLVDINPSSGLLVTKQKIDRDLLCRQSPKCIISLEVMSSSMEICVIKVEIKDLNDNAPSFPAAQIELEISEAASPGTRIPLDSAYDPDSGSFGVQTYELTPNELFGLEIKTRGDGSRFAELVVEKSLDRETQSHYSFRITALDGGDPPRLGTVGLSIKVTDSNDNNPVFSESTYAVSVPENSPPNTPVIRLNASDPDEGTNGQVVYSFYGYVNDRTRELFQIDPHSGLVTVTGALDYEEGHVYELDVQAKDLGPNSIPAHCKVTVSVLDTNDNPPVINLLSVNSELVEVSESAPPGYVIALVRVSDRDSGLNGRVQCRLLGNVPFRLQEYESFSTILVDGRLDREQHDQYNLTIQARDGGVPMLQSAKSFTVLITDENDNHPHFSKPYYQVIVQENNTPGAYLLSVSARDPDLGLNGSVSYQIVPSQVRDMPVFTYVSINPNSGDIYALRSFNHEQTKAFEFKVLAKDGGLPSLQSNATVRVIILDVNDNTPVITAPPLINGTAEVYIPRNSGIGYLVTVVKAEDYDEGENGRVTYDMTEGDRGFFEIDQVNGEVRTTRTFGESSKSSYELIVVAHDHGKTSLSASALVLIYLSPALDAQESMGSVNLSLIFIIALGSIAGILFVTMIFVAIKCKRDNKEIRTYNCRIAEYSYGHQKKSSKKKKISKNDIRLVPRDVEETDKMNVVSCSSLTSSLNYFDYHQQTLPLGCRRSESTFLNVENQNTRNTSANHIYHHSFNSQGPQQPDLIINGVPLPETENYSFDSNYVNSRAHLIKSSTFKDLEGNSLKDSGHEESDQTDSEHDVQRSLYCDTAVNDVLNTSVTSMGSQMPDHDQNEGFHCREECRILGHSDRCWMPRNPMPIRSKSPEHVRNIIALSIEATAADVEAYDDCGPTKRTFATFGKDVSDHPAEERPTLKGKRTVDVTICSPKVNSVIREAGNGCEAISPVTSPLHLKSSLPTKPSVSYTIALAPPARDLEQYVNNVNNGPTRPSEAEPRGADSEKVMHEVSPILKEGRNKESPGVKRLKDIVL

SEQ ID NO: 205679 - DNA, 3303 bp, Artificial Sequence
  derived and/or modified sequence
atggaaagcctgttactccctgtcctattactgttagccattttgtggactcaggcggccgcactaattaacctgaagtattccgtggaggaggaacaaagggcaggcaccgtgatcgctaatgttgcgaaagatgcaagggaggcaggatttgccttagacccgcggcaggcatccgcttttcgcgtggtgagcaatagtgcaccacatctagtggacattaatcccagttcgggactgctcgttactaaacaaaaaatcgatcgcgatttactgtgcagacagtccccaaagtgtataatctcgctcgaggtgatgagtagttcaatggagatctgcgtgatcaaagtggagattaaggatctgaacgataatgccccttcttttccagctgctcaaattgagttggagatatccgaagccgccagccccggcacccgcatccctctggattctgcttacgaccctgattccggatcatttggggtgcagacatacgagctgactcccaatgagttattcggtttggagattaaaactagaggagatggatcaaggttcgctgaactcgtagtcgaaaagagcttggacagagaaacccaatcacactatagcttcagaattactgccttggacggcggcgacccccctaggctgggcactgtgggcctgtcaataaaagtcaccgacagtaatgacaacaaccccgtcttttccgagtctacatacgccgtttctgtgccagagaactctccccccaacactcctgtgattcgccttaacgctagtgaccccgacgagggtactaatggccaggtggtttatagcttctacggatacgttaacgaccgcacacgcgagttgttccagatcgatccacactccggtctggtgacagtcaccggagcactcgattacgaagaagggcatgtgtacgagctggatgttcaggcaaaggatttgggacctaactccattcccgcccactgcaaggtgacggtttcagttcttgacaccaatgacaatcctcccgtgatcaacctgcttagtgtgaacagtgagctggtcgaggtcagcgagagcgctcctcccggctacgtaattgctttggtccgagtgtccgatagggatagtggcctgaacggccgcgtgcaatgccgattgctgggaaatgtaccatttaggttgcaggagtacgaatctttcagcactatcctcgtagacgggcgcttggacagggagcagcatgatcagtataatctgacaatccaggcacgcgacggaggggtgccaatgcttcagagcgccaaaagttttacagtgctgattaccgatgagaatgacaatcatccacacttctcaaaaccttattaccaggtcattgttcaggaaaataacaccccgggggcttacctcctgtctgtgtccgcgcgggatccggacctcggcctgaatggaagcgtttcttatcagatcgtcccaagccaggtgagggacatgcctgtctttacctatgtcagcattaacccaaatagtggcgacatttatgccttgcggtcttttaatcacgaacagactaaagcatttgaattcaaagtactggccaaggacggaggcctgcctagtctgcagtccaatgctacagttagggtgataattctggacgtgaacgataatacgccagtcatcacggcacccccattaatcaatggcacagccgaagtctacatacccagaaattctggcatcggttatctcgtgaccgtggtgaaggccgaagactatgatgaaggggagaatgggcgggtgacctacgatatgaccgagggcgatagaggctttttcgaaatcgaccaggtgaacggagaggtccggacaactcgaacttttggcgagtcttccaaatccagctatgagctgatcgtggtggcacatgatcacgggaaaacttctctcagcgcttccgcattggtgcttatctacctgtcccctgcccttgatgcccaagaatcaatggggagcgtgaatctgagtctgattttcataattgccctgggttctatagcgggtattctgtttgtgactatgatctttgttgccatcaaatgtaagcgggacaataaggagatccggacatataattgcaggatcgcggagtacagttatggacatcagaaaaaatcaagtaagaaaaaaaaaattagcaagaacgacattcgattagtgccccgagacgtcgaggagacggacaagatgaatgtggtgtcttgctcttctttaacttccagtctaaattattttgattatcatcagcagacgctgccactgggttgcaggcgatccgagtcgacattcttgaatgtggaaaaccagaacacaagaaatacttctgcgaaccacatctatcaccactccttcaactcacagggcccccagcagcctgacttaataattaacggtgtgcctctacctgaaaccgagaactacagctttgactctaattatgtaaattctagagcacatttaattaagagcagtaccttcaaggatctggaaggtaattctctgaaggattcaggtcatgaggaaagcgatcagactgattcagagcacgacgtccagcggtccctctattgcgacactgccgttaacgacgtgctgaataccagcgttacctctatgggcagccaaatgcctgaccacgatcaaaatgagggctttcactgtagggaagagtgcaggatactggggcattccgacaggtgctggatgccacggaatccaatgcccatacgctccaagagccccgagcacgtcaggaatataatcgccctctctatcgaggccactgccgccgacgtggaggcctacgatgactgtggcccaaccaagcgaacattcgctacattcggtaaggatgtaagtgatcaccctgccgaagaaagaccaacactaaagggaaagcgcactgtcgatgtaaccatctgctcaccaaaggtaaacagtgtgataagagaagcgggcaatggctgcgaagcaatttctcccgtgacaagccctctccacctgaaaagctctcttcccaccaaaccttctgttagctacacgatcgcgctggcccccccggctagggatctggaacaatatgtcaataacgttaataacggtccaacccgtcccagcgaggctgaaccaaggggtgctgactcagagaaggtgatgcatgaagtcagccccatactaaaggaggggagaaacaaagagtcacctggagtgaaacggctgaaagacatcgttctatag

SEQ ID NO: 205680 - DNA, 3303 bp, Artificial Sequence
  derived and/or modified sequence
atggagagcctgctgctgcctgtgctgctgctgctggccatcctgtggacccaggccgccgccctgatcaacctgaagtacagcgtggaggaggagcagagagctggcaccgtgattgccaacgtggccaaggatgcccgggaggccggctttgccctggacccccggcaggccagcgccttccgggtggtgagcaacagcgccccccacctggtggacatcaaccccagcagcggcctgctggtgaccaagcagaagattgaccgggacctgctgtgccggcagagccccaagtgcatcatcagcctggaggtgatgagcagctccatggagatctgtgtgatcaaggtggagatcaaggacctgaatgacaatgcccccagcttccctgctgcccagatcgagctggagatcagcgaggccgccagccctggcacccgcatccccctggacagcgcctatgaccctgacagcggcagctttggagtgcagacctatgagctgaccccaaatgagctgtttggcctggagatcaagaccagaggagatggcagcagatttgctgagctggtggtggagaagagcctggaccgggagacccagagccactacagcttccgcatcacagccctggatggaggagaccccccccggctgggcaccgtgggcctgagcatcaaggtgacagacagcaatgacaacaaccctgtgttttctgagagcacctatgctgtgtctgtgcctgagaacagcccccccaacacccctgtgatccggctgaatgccagtgaccctgatgagggcaccaacggccaggtggtgtacagcttctacggctacgtgaatgacaggacccgggagctgttccagattgacccccacagcggcctggtgacagtgactggagccctggactatgaggagggccacgtgtatgagctggatgtgcaggccaaggacctgggccccaacagcatcccagcccactgcaaggtgacagtgtctgtgctggacaccaatgacaacccccctgtgatcaacctgctgtctgtgaacagcgagctggtggaggtgtctgagagcgcccctcctggctacgtgattgccctggtgcgggtgtctgaccgggacagcggcctgaatggccgggtgcagtgccgcctgctgggcaatgtgcccttccggctgcaggagtatgagagcttcagcaccatcctggtggatggccgcctggaccgggagcagcacgaccagtacaacctgaccatccaggccagagatggaggagtgcccatgctgcagagcgccaagagcttcaccgtgctgatcacagatgaaaatgacaaccacccccacttcagcaagccctactaccaggtgattgtgcaggagaacaacacccctggggcctacctgctgtctgtgtctgcccgggaccctgacctgggcctgaatggatctgtgtcctaccagatcgtgcccagccaggtgcgggacatgcctgtgttcacctacgtgtccatcaaccccaacagcggggacatctatgccctgcggagcttcaaccacgagcagaccaaggcctttgagttcaaggtgctggccaaggatggcggcctgcccagcctgcagagcaatgccaccgtgcgggtcatcatcctggatgtgaatgacaacacccctgtgatcacagccccacccctcatcaatggaacagctgaggtgtacatccccagaaattctggaattggctacctggtgacagtggtgaaggcagaagattatgatgaaggagaaaatggccgggtgacctatgacatgacagaaggagaccggggcttctttgaaattgaccaggtgaatggagaggtgaggaccaccaggaccttcggggagagcagcaagagcagctatgagctgattgtggtggcccatgaccacggcaagaccagcctgagcgccagcgccctggtgctgatctacctgagccctgccctggatgcccaggagagcatgggctctgtgaacctgagcctcatcttcatcatcgccctgggcagcattgctggcatcctgtttgtgaccatgatctttgtggccatcaagtgcaagagggacaacaaggagatccgcacctacaactgcagaattgctgagtacagctatggccaccagaagaagagcagcaagaagaagaagatcagcaagaatgacatccggctggtgcccagagatgtggaggagacagacaagatgaatgtggtgtcctgcagcagcctgaccagcagcctgaactactttgactaccaccagcagaccctgcccctgggctgcagaagaagtgagagcaccttcctgaatgtggagaaccagaacaccaggaacaccagcgccaaccacatctaccaccacagcttcaacagccagggcccccagcagcctgacctgatcatcaatggagtgcccctgcctgagacagagaactacagctttgacagcaactacgtgaacagccgggcccacctgatcaagagcagcaccttcaaggacctggagggcaacagcctgaaggacagcggccacgaggagagtgaccagacagattctgaacatgatgtgcagaggagcctgtactgtgacacagctgtgaatgatgtgctgaacacctctgtgacctccatgggcagccagatgccagaccatgaccagaatgaaggcttccactgccgggaggagtgccgcatcctgggccacagcgaccgctgctggatgcccaggaaccccatgcccatccgcagcaagagccctgagcacgtgaggaacatcatcgccctgagcattgaggccacagctgctgatgtggaggcctatgatgactgtggccccaccaagaggacctttgccaccttcggcaaggatgtgtctgaccaccctgctgaggagcggcccaccctgaagggcaagaggacagtggatgtgaccatctgcagccccaaggtgaacagcgtcatccgggaggccggaaatggctgtgaggccatcagccctgtgaccagccccctgcacctgaagagcagcctgcccaccaagcccagcgtgtcctacaccatcgccctggcccccccagcccgggacctggagcagtatgtgaacaacgtgaacaacggccccacccggcccagcgaggccgagcccagaggagctgacagcgagaaggtgatgcatgaggtgagccccatcctgaaggagggcaggaacaaggagagccctggggtgaagaggctgaaggacatcgtgctgtag

SEQ ID NO: 205681 - DNA, 3303 bp, Artificial Sequence
  derived and/or modified sequence
atggagagcctgctgctgcccgtgctgctgctgctggccatcctgtggacacaagccgccgccttaatcaatctcaaatattcagtggaagaagagcagagagcaggaacggtcatcgctaacgttgctaaggacgcaagagaggccggcttcgctcttgatccacgtcaagctagtgcttttagagtggtcagcaacagcgcaccgcacttggtggacattaatccaagctccgggctgctcgtcacaaaacaaaagatagaccgggacctgctgtgtagacagtctccaaaatgcatcatctctctggaggtcatgtcctcttcaatggagatttgcgttataaaggtggagattaaggacctcaatgacaacgctcctagttttcccgccgctcagattgagcttgaaatttccgaggcagcatcaccagggactcggatccctttggactcagcttatgacccagatagcggatccttcggtgtccagacctacgagctcacacccaacgaactattcggtctagagattaagacccgaggagatggatccagattcgccgaactggtcgttgagaaaagtctggaccgtgagactcaaagccattacagttttcgaattaccgcgttggacgggggcgaccctcctaggctggggacagttggactatcgatcaaggtcaccgactcaaacgacaacaatcccgtcttttcggagtccacatatgctgttagtgttcctgaaaattctccacctaacacaccagtcattcgtctgaacgcctccgatccagatgaagggaccaacgggcaggtggtttatagtttctacggctacgtgaacgaccggacccgggagcttttccagatcgacccccactcaggtctggttactgtgactggagctttagattacgaggaggggcatgtgtacgaacttgacgtccaggcaaaggacctgggtccaaactctatccccgctcattgtaaggtaaccgtgagtgtgctagacacgaacgacaaccctccagtcatcaaccttctatcggtgaacagcgaactcgtagaggtctcagaatctgctcccccaggctacgtgattgccctggtccgcgtctctgatagagactccgggctgaacggcagagtacaatgtcgattgcttggcaacgtgccctttagactccaagagtacgagagcttttcaacaattttggtggacggacgtctggatagagaacagcacgatcagtacaatctgaccatccaggctcgggatggcggagtgcccatgttgcaatccgcgaaaagttttaccgttctcatcactgatgaaaatgataaccaccctcacttctcaaagccctattaccaggtaattgtgcaggagaataataccccgggcgcctaccttctgagcgtcagcgctagggacccggacctaggcttaaatggctctgtttcttatcagatcgttccctcccaggtccgtgatatgccagttttcacttacgtctcaatcaacccaaacagcggcgatatttacgccctcagaagcttcaaccatgagcagacaaaggccttcgagttcaaggtactcgctaaagacggagggttgccgagcctgcaatccaatgcaaccgtgagagtaattatcctggatgtgaacgacaatacccccgtgattaccgctccgcctctgatcaatggaactgctgaggtgtatattcctcggaattccgggataggctacctggtaacggtggtgaaagctgaagattacgatgaaggtgagaatggccgagtgacctacgacatgactgaaggagatcggggctttttcgagattgaccaggttaatggcgaggttaggacaacgcgcacctttggcgaaagcagcaagagtagctacgaattgatcgtcgtagctcacgaccatggcaaaacttcgctgtcagcatctgctctggtactcatttacctatcgccggcccttgatgctcaagaatcaatggggtctgtgaatttatccctaattttcatcatagcattgggaagcatagcagggatcctgttcgtaacgatgatcttcgtagctatcaagtgcaaacgagacaacaaagaaatccgtacctataactgtcggattgctgaatactcctacggccatcaaaaaaagagtagtaagaagaagaagataagcaagaacgacatcaggttagttcccagggacgtggaggagaccgacaagatgaatgtggtttcttgtagctccctcacttcctcacttaactactttgattaccatcagcagaccctgccactggggtgtcgcagatcagaaagtacatttcttaatgtggagaaccagaatacacgcaatacaagcgccaatcatatctaccaccacagcttcaacagtcagggaccacagcaacctgatctcattattaacggggtccctctcccagagacggagaactatagcttcgatagcaactatgtgaacagcagagcgcatctgattaagagttccacctttaaggatttggaaggcaacagtctgaaggactctggccacgaggagtctgatcagactgattccgagcacgatgttcagcgatctctatactgtgatactgccgtgaacgacgtgttaaacacgagtgtgacgtcgatggggtcacagatgcccgatcatgaccagaacgaaggcttccactgtcgggaagaatgccggatcttgggccacagcgatcgttgctggatgccaagaaaccctatgcccattagatcaaagagtcctgagcacgtccgaaacattattgcgttgtccatcgaggctaccgcagctgacgtagaggcatatgatgattgcgggcccacaaaacgcacatttgccactttcgggaaggacgttagtgatcaccctgccgaggaaagaccaacactgaagggaaagcgcaccgtggacgtgacaatttgctcgccaaaagtgaattcggtgatcagggaggcgggaaatgggtgcgaggctatctctcctgttacttcgccactccacttgaagtcctccctgccaacaaagccgtctgtgagctacaccatagccctggcaccccccgctcgggatcttgagcagtacgtcaacaacgtgaacaatggcccaacaagaccctccgaggcagaacctagaggggctgattcagagaaggtcatgcatgaggtgagccctatcctcaaggagggcaggaacaaagagtccccaggcgtaaaacggcttaaggatatagtcctgtag

SEQ ID NO: 205682 - DNA, 3303 bp, Artificial Sequence
  derived and/or modified sequence
atggaatcccttctgctccctgtgcttttactcctggcaattctctggacccaggctgccgctcttatcaatctgaaatatagtgttgaggaggagcagcgtgcaggcacagtgatcgcgaatgtcgccaaggacgcccgtgaggctggcttcgctttggacccaaggcaggccagtgccttccgcgtggtttccaattcagcaccccaccttgtggacattaatccttcctcggggctgttagtaactaagcagaagatcgatagggacctgttatgcaggcagtcaccaaaatgtattatctcccttgaagtcatgtcttcatccatggagatctgcgtcattaaggtggagattaaagatcttaatgataatgcaccgtcatttcctgctgcgcagattgagctggaaatatccgaagctgccagccccggaacacggatccctctcgatagcgcgtatgatcctgattccggttccttcggcgttcagacctacgagctcacccccaacgaattgtttggccttgagatcaaaactcgtggagatggtagtagattcgccgagctggttgtggaaaaaagtctggacagggaaacgcaaagccattattcattccgcattaccgccctggacgggggagatccacccaggttaggaaccgtaggactgtccatcaaggtgacggacagcaatgataacaatccagtctttagcgaaagtacctacgcagtctccgtccccgagaatagccctcccaatacacctgtgattaggctgaacgcctcggaccccgatgagggcactaacgggcaggtggtctattcgttctatggatacgtaaatgatcgaaccagagagctgtttcaaatcgacccccacagcggcctcgtgaccgttacaggcgcactggattacgaggaaggacacgtttacgaactcgatgtgcaggctaaggacttaggccctaatagcatccccgctcattgtaaggtgaccgtgtctgtgttagatacgaacgacaacccacccgtgatcaatctgctgtctgtcaattccgagctggttgaagtctcggaatcggccccaccgggttacgtcatcgcactggtgcgcgtcagcgatcgcgactccgggctaaacggcagggtacagtgtcgacttctgggaaatgtgccttttaggttgcaggaatatgagagcttcagtacaattctcgtggatggtcgactggatcgggaacaacacgaccagtacaacctaaccatccaggctcgtgacggcggagttccgatgttgcagtcagcaaagtcattcactgtgctgattacagatgagaacgacaaccatccccactttagcaaaccgtactatcaggtaattgtccaagagaataatacacccggagcctatttattgtcagtctccgcgcgagacccagatcttggtctgaacgggtcagtgagctaccagattgtgcctagccaagtcagagacatgcccgtcttcacctacgtttccattaatccgaactcaggagacatctacgctttacgctcttttaaccacgagcagacgaaagcctttgagttcaaggtcctggctaaagatggaggtctgcctagtctgcaaagcaacgccacagtgcgcgtcatcattctggacgttaacgataatacaccagtcataactgcccctccattgattaatggaaccgccgaagtgtatatccctcgcaattccggaatcggatatctagttacagtcgttaaggctgaagactacgatgagggggaaaatggtcgagtcacttacgacatgactgagggcgataggggattctttgagattgaccaggtcaatggggaggtgcggacaacccggacattcggggaatctagcaaaagcagctatgagctcatcgtagttgcgcacgaccacgggaagacaagcctaagcgctagcgcccttgtccttatttatctttctcccgctctggacgcccaggagtccatggggtccgtgaacctgtcccttatcttcatcatcgccctcggcagcatcgccggaatcttatttgtgaccatgatattcgtggctataaaatgcaagagagataacaaagagatcagaacatacaactgtcgaattgccgagtactcttacggacatcagaagaaatcaagcaaaaagaagaagattagtaagaacgatatccggctggttcccagagatgttgaagaaaccgataagatgaatgtggtcagctgcagctcactgacgagtagcctgaattacttcgattatcaccaacagactctgccactgggttgccggaggagcgagtccacattcttgaacgttgagaatcagaataccagaaacacttccgcaaatcatatttaccatcacagttttaacagtcagggcccacagcagccagatttaatcattaacggggtgcccctgccggaaacagagaactacagcttcgactctaactacgtgaactcccgcgctcatctgattaaatcaagcacctttaaagatcttgagggaaacagcctgaaggactccggacatgaggaaagcgaccaaactgatagcgaacacgatgtccaaagaagcctgtattgcgacacagccgttaacgacgtgctcaatacgagcgttacctccatgggtagccagatgcctgatcacgaccaaaatgaaggctttcactgtcgggaggagtgccgaatcctgggacatagtgatcggtgttggatgccgcgaaatcctatgcccatacggtctaaaagccctgagcacgtacgcaacataatcgctctcagcattgaggcaaccgcggcagacgtggaagcctatgatgactgtggtcccaccaagaggacctttgcaacgtttggaaaggatgtttcagaccaccccgctgaagaaagaccgaccttaaaggggaaaagaactgtggatgtgaccatctgcagtccaaaggtaaacagcgtcataagggaggcaggaaacggatgtgaagcaatctctcccgtgacctcgcctttgcacctcaaaagttcactccccaccaagccttccgtcagctatactatcgcgctcgcgccaccagccagggatctggaacagtatgttaataatgtgaataacggtccaaccagacccagtgaggctgagccacgcggagcagattccgagaaagttatgcatgaggtgtcaccaattctgaaagaggggaggaacaaggagtccccaggcgtgaagcgcctcaaggatatagtgctgtag

SEQ ID NO: 205683 - DNA, 7936 bp, Artificial Sequence
  derived and/or modified sequence
atggagtcgctcctgctgccggtgctgctgctgctggccatactgtggacgcaggctgccgccctcattaatctcaagtactcggtagaagaggagcagcgcgccgggacggtgattgccaacgtggccaaagacgcgcgagaggcgggcttcgcgctggacccccggcaggcttcagcctttcgcgtggtgtccaactcggctccacacctagtggacatcaatcccagctctggcctgctggtcaccaagcagaagattgaccgtgatctgctgtgccgccagagccccaagtgcatcatctcgctcgaggtcatgtccagctcaatggaaatctgcgtgataaaggtggagatcaaggacctgaacgacaatgcgcccagtttcccggcagcacagatcgagctggagatctcggaggcagccagccctggcacgcgcatcccgctggacagcgcttacgatccagactcaggaagctttggcgtgcagacttacgagctcacgcccaacgagctgttcggcctggagatcaagacgcgcggcgacggctcccgctttgccgaactcgtggtggaaaagagcctggaccgcgagacgcagtcgcactacagcttccgaatcactgcgctagacggtggcgacccgccgcgcctgggcaccgttggccttagtatcaaggtgaccgactccaatgacaacaacccggtgtttagcgagtccacctacgcggtgagcgtgccagaaaactcgcctcccaacacacccgtcatccgcctcaacgccagcgatccagacgagggcaccaacggccaggtggtctactccttctatggctacgtcaacgaccgcacgcgcgagctctttcagatcgacccgcacagtggcctggtcactgtcactggcgctttagactacgaagaggggcacgtgtacgaactggacgtgcaggctaaggacttggggcccaattccatcccggcacactgcaaggtcaccgtcagcgtgctggacaccaatgacaatccgccggtcatcaacctgctgtcagtcaacagtgagcttgtggaggtcagcgagagcgcccccccgggctacgtgatcgccttggtgcgggtgtctgatcgcgactcaggcctcaatggacgtgtgcagtgccgtttgctgggcaatgtgccctttcgactgcaggaatatgagagcttctccactattctggtggacggacggctggaccgcgagcagcacgaccaatacaacctcacaattcaggcacgcgacggcggcgtgcccatgctgcagagtgccaagtcctttaccgtgctcatcactgacgaaaatgacaaccacccgcacttttccaagccctactaccaggtcattgtgcaggagaacaacacgcctggcgcctatctgctctctgtgtctgctcgcgaccccgacctgggtctcaacggcagtgtctcctaccagatcgtgccgtcgcaggtgcgggacatgcctgtcttcacctatgtctccatcaatcccaactcaggcgacatctacgcgctgcgatcctttaaccacgagcagaccaaggcgttcgaattcaaggtgctggccaaggacggcggccttccctcactgcaaagcaacgctacggtgcgggtcatcatcctcgacgtcaacgacaacaccccggtcatcacagccccacctctgattaacggcactgccgaggtctacataccccgcaactctggcataggctacctggtgactgttgtcaaggcagaagactacgatgagggcgaaaatggccgagtcacctacgacatgaccgagggcgaccgcggcttctttgaaatagaccaggtcaatggcgaagtcagaaccacccgcaccttcggggagagctccaagtcctcctatgagcttatcgtggtggctcacgaccacggcaagacatctctctctgcctctgctctcgtcctaatctacttgtcccctgctctcgatgcccaagagtcaatgggctctgtgaacttgtccttgattttcattattgccctgggctccattgcgggcatcctctttgtaactatgatcttcgtggcaatcaagtgcaagcgagacaacaaagagatccggacctacaactgcagaattgctgagtactcctatgggcatcaaaagaaatcaagcaagaagaaaaaaatcagtaagaatgacatccgcctggtaccccgggatgtggaggagacagacaagatgaacgttgtcagttgctcttccctgacctcctccctcaactattttgactaccaccagcagacgctgcccctgggctgccgccgctctgagagcactttcctgaatgtggagaaccagaatacccgcaacaccagtgctaaccacatctaccatcactctttcaacagccaggggccccagcagcctgacctgattatcaacggtgtgcctctgcctgagactgaaaactattcttttgactccaactacgtgaatagccgagcccatttaatcaagagctccaccttcaaggacttagagggcaacagcctgaaggatagtggacatgaggagagtgaccaaactgacagtgagcatgatgtccagcggagcctgtattgtgatactgctgtcaacgatgtgctgaacaccagtgtgacctccatgggatctcagatgcctgatcatgatcagaatgaaggatttcattgccgggaagaatgccggattcttggccactctgacaggtgctggatgccccggaaccccatgcccatccgttccaagtcccctgagcatgtgaggaacatcatcgcgctgtctattgaagctactgctgctgatgtcgaggcttatgacgactgcggccccaccaaacggactttcgcaacctttgggaaagatgtcagcgaccacccggctgaggagaggcctaccctgaaaggcaagaggactgtcgatgtgaccatctgcagccccaaggtcaacagcgttatccgggaggcaggcaatggctgtgaggcgattagccctgtcacctcccccctccacctcaagagctctctgcccaccaagccttccgtgtcttacaccattgccctggctcccccagcccgtgatctggagcagtatgtcaacaatgtcaacaatggccctactcgtccctctgaagctgagccccgtggagctgatagcgagaaagtcatgcatgaggtcagccccattctgaaggaaggtcgcaacaaagagtcccctggtgtgaagcgtctgaaggatatcgttctctaaaccagtctccaggaagaagagaaagaaaccacactggctagtgaagaagcaggagcttcttgttttaattgctcaccaatggttggttcttgagtggctatatttcagagcttttcctaaatgtattgtttataggtgattatcattctgtgacagtcccttgtttcaacaggcagcaggggtgttcagttggagcaaattagctttggcttgagttgttcatggggccttgatgttggggaaacagagacaaattcagttgtgaaaagtattatgtattaagtgtttgaatttatatatttttctatgtcaaaattataatataaattaccattgtttgtggaggattacatttaaaaaagcaaaaagtgaaaaaaaaaagctctggacacctttaataagctcgccactgttttttgtagtgtagacaagttaatggtcatttattgtgtactattcattgattcagtgatgtgaaattgagcccccaaaaggttgtttctgaagctcgagtacttcccaatgccgctactttgctgtggacacccctgctttaaaaacccttttgctagctgtgctattgttgtatttgatattgcaaattgctatgtgtgtggtgatggcaaaaggcttttaaaagttggtgttttctttttcttaaaaaaataataaaactacagacaaaaacaaagtgcaaacaactgagacagcaaatgaatgagcaacaccatgcatatagattgagtacttggagaatactcacgttttttaactcatgtagtgattgctcaccactttgcaaagtatttttcctgcctttcagtggtctgcccaggtccatgatagatcattgcagaaagtcatttttggataggctgctatctaatttgcagttgtcagaaatactgtgctgaaagttttatgacatccatcttttaaattttcaggccctgaacaggaaagttgctcctgaagttatgtttccaggcttagaaattccctctctccaatcatctaaaattgaagatgactgaatctattttaagatctaaattagcatctcttcagacacacacttcctgattcagtgtttcccaatcatgattagaattagactgcaaagcacgtcatgggctgggattgagaactccatgttgctctgtatcttaggcttatatacgtagggatagagtaagcagtacaaagtgtatattttggaaaagacaggtaacaggtaacagcatcgctaatccaattactgtgccttctaaacggagacactcagacacttgaactcatctttttatgactaatagttttttgattaaaaatgtgaacaagaaaatactaaaataaaaatcctttcgatttagccaactctttttgctgtaggctaggaatacaccctttttaaattaacacactgtagatcctttttttctgttttaacattcctctaactcccccatttatcttttgtctattaatattcactagccaacatagtatttttgcagcctaagagttcattatttaaaaataaactaaagaaatatgtcacctttgttctgccttggtcttaagagagttgtttctagagaaacaagttttatggttctgttttcatttgtttcattttttgaaattcaggaatacacagagagaaggcctagaggttagagcactagaatgcaaaagaggatttattttcttaagtttaggtagataagtcagctcttttgaatgttttacttatttttgcctgagttcctagctttacgcattactaggaatattttcttttacaggagggagaagggttttgagggagggggtgggtaaggcagtagggatggggttaggtaggggagaacatttctgaaaaagaacttataatgaagctacaaatccatccttatttcttattcagtgctgaatactacctcatgcaaaatattggtgtggctgcaaatttccctctgaagctgacacaattaaggatgaattaccataacatcttcatttttcctcatttcattgcctctcatacagttttctccctctgatttatttcattttggtagtggattttgaattaagtatttatttctctttgcaagtgactatttgattaacacattaaaaattttttaaaaatttcccctttaagttatgatggctgcctatagaatttagactgtttctcaccctgatccatcctgatattatgttattagctacgatttcaaggtcactttgaagtcagacttcacagttttctacaggtgtatttcttgctatgctcagtgggaaccagggagcagaaaagattgtggaaagtgggaacattaattgtcacgtggctgttgagccagagaggccactggctgccatgcctcttaccagccaagttttaaatggttagagtggcattggcattgattttgcttttctcttgggttttcttcatttcttttcataattcatcttcaagctatagatccatccttcttccctatccaaatactttgttctcagtgggcagtcagatttttttggcttccaaacctcactgagcatgttcagagaattcctctcattaaggaaatatttttccccacaattgtctgatgtatgagtcctctcagaagcacaagtgcatactaggaaggctttgtaaactggttttgtaggcaggctgtacctgcaaataggcattctgagcaaggatcctaaatttccctttggctcatgtcccccccgccccaccccaccttctcctttttggcatgtctggtgaaaagctacaaggttcacagggccaaatattctcccttttgttctctaaacatgttgcacacataaactcaagggagtgatttcggttcctaagtcctagggagttctattccatttattctgatgtcccttttaaggaggagttggtgttgaagtgtgacatgctttaatgataactgctttggcaattccccagacaggtatacttcttcatccaaaattgcacctaaggtgttcatttagacaaaattgttcgcttagtgatccactgatctctaatcagaaatatttttaaaaaatacaatttagatctctgaaaattggaaccactcaagagtatcatcttgatagtgttacttcagcatatgactgactgattttatgaagggagtttagctgacttttccctgtagccctatcatattaaaaacaaaaagtggtccacttgaagcagcaaggacaaagggcagtttagggagaggcagggtgaaggggatagctcgattgggcatccagagtggaaaaggattattattgtacataatagcagttctggctggaattccaatccactttctggggatcattttgatgttgaatgttcccccaaagcattctgacaagtttggtccacttggctctttaccccgggtaataagacccttattgactttgaaaaactggcataaatgagcttaagaaatccattgtatacagtcctagtgtttgccttcttggtaaaattacatttaaggatgtcatttcatgagtcaaattgtatctgctgacactgaagtgtattgagatgttgttctttagtttaagtatgtaacaaagtaatattcaaaggggatgtttgggggtggggctgggaccgggtggctttatattgataatgaaatattccagagcaaaacacattgtcctaatgaagttgttgcagctctcttcgttttcttgtgccgctggaattggcttgtgggtcacttgttgtgcaaaagtgaattaatttcaaataggaatcatattgcttttgtgaaacaaagaaaatttaccaccttgtctgatacatagattggaaggcgctcttggtaaagaataacccacaaacacctgatcttgattggaaagcattgtaggtcattagggaaaactgatgatgctgactgttgctccagctgtgttggcaattcaagatgaccttgttactaactgaaagttgctgtcaaccttagcaaacaaaccagctaacaccattacagcactggttaagtagatttttactggcactggctggcgttcagctgaggaaggctaggatacagactttaatgaccaagagccagactagctcgagctagaaatcagcaacaaatacctccttgtgctatttgaatgctaaggtattagttgcaataggcttacgccttcgctcctctagtgaggggaatgagcctgatgacactattactgtttacctgtcaaaccagggtggaaatttagagggatgcaagtacagtatgtctcattaagcagtctctgttgctgattatatgaagataaaattgttgtatatgctgatctgtatgttatgtacattttcacagtgattgaatcattgtaaaaagaaaaaagacaaaaaagaatcaccactgtctattttatgaagatgataaagcagctttattaaattattacagttatgtttcaaatggtgttatctgccacattgtttccttttatctggtggttctctgtttccccctttaaatgtgttttctctgcttcaaaaatttaatgcattttagtattaaaggctattatggaaaaagta

SEQ ID NO: 205684 - DNA, 3303 bp, Artificial Sequence
  derived and/or modified sequence
atggagagcctgctgctgcccgtgctgctgctgctggccatcctgtggacccaggccgccgccctgatcaacctgaagtacagcgtggaggaggagcagagagccggcaccgtgatcgccaacgtggccaaggacgccagagaggccggcttcgccctggaccccagacaggccagcgccttcagagtggtgagcaacagcgccccccacctggtggacatcaaccccagcagcggcctgctggtgaccaagcagaagatcgacagagacctgctgtgcagacagagccccaagtgcatcatcagcctggaggtgatgagcagcagcatggagatctgcgtgatcaaggtggagatcaaggacctgaacgacaacgcccccagcttccccgccgcccagatcgagctggagatcagcgaggccgccagccccggcaccagaatccccctggacagcgcctacgaccccgacagcggcagcttcggcgtgcagacctacgagctgacccccaacgagctgttcggcctggagatcaagaccagaggcgacggcagcagattcgccgagctggtggtggagaagagcctggacagagagacccagagccactacagcttcagaatcaccgccctggacggcggcgacccccccagactgggcaccgtgggcctgagcatcaaggtgaccgacagcaacgacaacaaccccgtgttcagcgagagcacctacgccgtgagcgtgcccgagaacagcccccccaacacccccgtgatcagactgaacgccagcgaccccgacgagggcaccaacggccaggtggtgtacagcttctacggctacgtgaacgacagaaccagagagctgttccagatcgacccccacagcggcctggtgaccgtgaccggcgccctggactacgaggagggccacgtgtacgagctggacgtgcaggccaaggacctgggccccaacagcatccccgcccactgcaaggtgaccgtgagcgtgctggacaccaacgacaacccccccgtgatcaacctgctgagcgtgaacagcgagctggtggaggtgagcgagagcgccccccccggctacgtgatcgccctggtgagagtgagcgacagagacagcggcctgaacggcagagtgcagtgcagactgctgggcaacgtgcccttcagactgcaggagtacgagagcttcagcaccatcctggtggacggcagactggacagagagcagcacgaccagtacaacctgaccatccaggccagagacggcggcgtgcccatgctgcagagcgccaagagcttcaccgtgctgatcaccgacgagaacgacaaccacccccacttcagcaagccctactaccaggtgatcgtgcaggagaacaacacccccggcgcctacctgctgagcgtgagcgccagagaccccgacctgggcctgaacggcagcgtgagctaccagatcgtgcccagccaggtgagagacatgcccgtgttcacctacgtgagcatcaaccccaacagcggcgacatctacgccctgagaagcttcaaccacgagcagaccaaggccttcgagttcaaggtgctggccaaggacggcggcctgcccagcctgcagagcaacgccaccgtgagagtgatcatcctggacgtgaacgacaacacccccgtgatcaccgccccccccctgatcaacggcaccgccgaggtgtacatccccagaaacagcggcatcggctacctggtgaccgtggtgaaggccgaggactacgacgagggcgagaacggcagagtgacctacgacatgaccgagggcgacagaggcttcttcgagatcgaccaggtgaacggcgaggtgagaaccaccagaaccttcggcgagagcagcaagagcagctacgagctgatcgtggtggcccacgaccacggcaagaccagcctgagcgccagcgccctggtgctgatctacctgagccccgccctggacgcccaggagagcatgggcagcgtgaacctgagcctgatcttcatcatcgccctgggcagcatcgccggcatcctgttcgtgaccatgatcttcgtggccatcaagtgcaagagagacaacaaggagatcagaacctacaactgcagaatcgccgagtacagctacggccaccagaagaagagcagcaagaagaagaagatcagcaagaacgacatcagactggtgcccagagacgtggaggagaccgacaagatgaacgtggtgagctgcagcagcctgaccagcagcctgaactacttcgactaccaccagcagaccctgcccctgggctgcagaagaagcgagagcaccttcctgaacgtggagaaccagaacaccagaaacaccagcgccaaccacatctaccaccacagcttcaacagccagggcccccagcagcccgacctgatcatcaacggcgtgcccctgcccgagaccgagaactacagcttcgacagcaactacgtgaacagcagagcccacctgatcaagagcagcaccttcaaggacctggagggcaacagcctgaaggacagcggccacgaggagagcgaccagaccgacagcgagcacgacgtgcagagaagcctgtactgcgacaccgccgtgaacgacgtgctgaacaccagcgtgaccagcatgggcagccagatgcccgaccacgaccagaacgagggcttccactgcagagaggagtgcagaatcctgggccacagcgacagatgctggatgcccagaaaccccatgcccatcagaagcaagagccccgagcacgtgagaaacatcatcgccctgagcatcgaggccaccgccgccgacgtggaggcctacgacgactgcggccccaccaagagaaccttcgccaccttcggcaaggacgtgagcgaccaccccgccgaggagagacccaccctgaagggcaagagaaccgtggacgtgaccatctgcagccccaaggtgaacagcgtgatcagagaggccggcaacggctgcgaggccatcagccccgtgaccagccccctgcacctgaagagcagcctgcccaccaagcccagcgtgagctacaccatcgccctggccccccccgccagagacctggagcagtacgtgaacaacgtgaacaacggccccaccagacccagcgaggccgagcccagaggcgccgacagcgagaaggtgatgcacgaggtgagccccatcctgaaggagggcagaaacaaggagagccccggcgtgaagagactgaaggacatcgtgctgtag

SEQ ID NO: 205685 - protein, 909 aa, Artificial Sequence
  derived and/or modified sequence
MERAMEQLNRLTRSLRRARTVELPEDNETAVYTLMPMVMADQHRSVSELLSNSKFDVNYAFGRVKRSLLHIAANCGSVECLVLLLKKGANPNYQDISGCTPLHLAARNGQKKCMSKLLEYSADVNICNNEGLTAIHWLAVNGRTELLHDLVQHVSDVDVEDAMGQTALHVACQNGHKTTVQCLLDSGADINRPNVSGATPLYFACSHGQRDTAQILLLRGAKYLPDKNGVTPLDLCVQGGYGETCEVLIQYHPRLFQTIIQMTQNEDLRENMLRQVLEHLSQQSESQYLKILTSLAEVATTNGHKLLSLSSNYDAQMKSLLRIVRMFCHVFRIGPSSPSNGIDMGYNGNKTPRSQVFKPLELLWHSLDEWLVLIATELMKNKRDSTEITSILLKQKGQDQDAASIPPFEPPGPGSYENLSTGTRESKPDALAGRQEASADCQDVISMTANRLSAVIQAFYMCCSCQMPPGMTSPRFIEFVCKHDEVLKCFVNRNPKIIFDHFHFLLECPELMSRFMHIIKAQPFKDRCEWFYEHLHSGQPDSDMVHRPVNENDILLVHRDSIFRSSCEVVSKANCAKLKQGIAVRFHGEEGMGQGVVREWFDILSNEIVNPDYALFTQSADGTTFQPNSNSYVNPDHLNYFRFAGQILGLALNHRQLVNIYFTRSFYKHILGIPVNYQDVASIDPEYAKNLQWILDNDISDLGLELTFSVETDVFGAMEEVPLKPGGGSILVTQNNKAEYVQLVTELRMTRAIQPQINAFLQGFHMFIPPSLIQLFDEYELELLLSGMPEIDVSDWIKNTEYTSGYEREDPVIQWFWEVVEDITQEERVLLLQFVTGSSRVPHGGFANIMGGSGLQNFTIAAVPYTPNLLPTSSTCINMLKLPEYPSKEILKDRLLVALHCGSYGYTMA

SEQ ID NO: 205686 - DNA, 2730 bp, Artificial Sequence
  derived and/or modified sequence
atggagagggcaatggaacagctgaatcggcttacgcgatccctcaggagggctcggaccgtagagcttccggaagacaacgagacagctgtatacaccctgatgccgatggtaatggcggatcagcatagatctgtctcggagctgctcagtaatagcaagtttgacgttaactacgcgttcgggcgagtcaaacgcagtttactgcacattgccgctaactgtggctctgtcgaatgtctggtactcctcctgaagaagggggctaatccgaattaccaggacatctccggttgtaccccactgcatctggctgctaggaacgggcaaaagaagtgcatgtcgaagctgctcgagtattctgctgatgtgaacatttgcaacaacgaaggtttgaccgccattcactggttagcggtcaatggccgaaccgagctgctgcacgacctggttcagcacgtttccgacgtcgatgtcgaggatgctatgggccagacggccctacacgtggcctgtcagaacgggcataagacaaccgtgcaatgtttgctggatagtggggccgatatcaacaggccaaatgttagtggggcgacccctttgtatttcgcctgctcacatgggcaacgggataccgctcagattctgctgctgagaggcgccaaatacctgcctgacaagaacggtgttacacctctggatctttgtgtccagggaggctatggtgaaacctgtgaggtcctgattcagtatcaccccaggctgttccagaccatcatccagatgacccagaacgaggatctgagggagaacatgttacgccaggtgctggagcatctctcccagcagagtgagtcccagtatctgaagatcctgacatccctagctgaggtggccactacaaatggtcacaaacttctgagcttgagtagcaattacgacgcccaaatgaagtccctgctgcgaattgtgcgaatgttttgtcacgtgttcagaattggcccctctagtcccagcaatggcattgacatggggtacaacggaaataaaactccccgcagtcaagtgttcaaacccctggagcttctgtggcacagcctggacgagtggctggtactgattgctacggagctaatgaaaaacaaacgcgattcgactgagataaccagcattctgctaaaacagaaaggacaagaccaggatgctgccagcattccaccatttgagcccccaggaccaggctcctatgaaaacttgtctacaggaactagagagagcaagcccgacgcactagcgggccggcaggaggcttccgctgattgtcaggatgtgatctccatgacggcaaatagactgtctgcggtgatccaggccttctatatgtgttgctcctgccaaatgcccccgggcatgacttctcctagattcatcgagttcgtgtgcaagcacgacgaggtcctgaaatgtttcgtgaatcggaatcctaaaatcatctttgatcactttcactttcttctggaatgccctgaacttatgagtagattcatgcatatcattaaggcacagcctttcaaagaccgttgcgagtggttttacgagcacctacactctggccaacccgactctgacatggtgcacaggcccgttaatgagaatgatatcttactggtccatcgagacagcatttttcggtcatcctgtgaggttgtttccaaggccaactgtgctaagctcaagcaaggaatcgccgtcaggtttcacggcgaggagggaatggggcagggagtagtgagggagtggttcgacatactgtccaatgagatcgtgaatcccgactacgcattattcacacagtctgctgatggtaccacttttcagcccaattccaactcatatgtgaatcctgatcatctaaattatttccggttcgccggacagatactcgggttagctctgaatcatcgccagcttgttaacatctatttcactaggtctttctacaaacatatattaggaatccctgtgaactaccaggatgtcgcttccattgaccctgaatacgccaaaaatctgcagtggatcctggataatgatatctccgatctgggcttagaactcaccttctccgttgagactgacgtgtttggcgcaatggaggaggtgcccctgaagcctgggggaggctccattcttgtgacacagaacaataaggctgaatatgtgcagctagtcaccgagctaagaatgacccgggctattcagccccagataaacgcatttctccagggttttcacatgttcatcccaccatctcttattcagctgttcgatgagtacgagctggaattgctgctgagtggcatgccagaaatagatgtgtctgactggatcaagaacaccgagtacacctctgggtacgaacgggaagaccctgttatccagtggttttgggaagtggtcgaggatattacccaggaagagcgggtgctgctgctgcaattcgttaccgggtcctcccgggtccctcacggtggcttcgccaatattatgggcggctcaggactgcagaactttaccatcgctgccgtgccttacacacctaacctgctgcccacgagctcgacttgcatcaatatgcttaagctgcctgagtacccctcaaaagagatccttaaggaccgacttctggtcgccttgcattgtggatcttatggttacacaatggcttag

SEQ ID NO: 205687 - DNA, 2730 bp, Artificial Sequence
  derived and/or modified sequence
atggagcgggccatggagcagctgaaccggctgaccaggagcctgcggcgggccaggacagtggagctgcctgaagataatgaaacagctgtgtacaccctgatgcccatggtgatggctgaccagcacaggtctgtgtctgagctgctgagcaacagcaagtttgatgtgaactatgccttcggccgggtgaagaggagcctgctgcacatcgccgccaactgtggctctgtggagtgcctggtgctgctgctgaagaagggggccaaccccaactaccaggacatcagcggctgcacccccctgcacctggccgccagaaatggccagaagaagtgcatgagcaagctgctggagtacagcgcagatgtgaacatctgcaacaatgaaggcctgacagccatccactggctggccgtgaatggaagaacagagctgctgcatgacctggtgcagcacgtgtctgatgtggatgtggaggatgccatgggccagacagccctgcacgtggcctgccagaatggccacaagaccaccgtgcagtgcctgctggacagcggggctgacatcaaccggcccaacgtgtctggggccacccccctgtactttgcctgcagccacggccagagggacacagcccagatcctgctgctgcggggggccaagtacctgcctgacaagaatggagtgacccccctggacctgtgtgtgcagggcggctatggagagacctgtgaggtgctgatccagtaccaccccaggctcttccagaccatcatccagatgacccagaatgaagacctgcgggagaacatgctgcggcaggtgctggagcacctgagccagcagagcgagagccagtacctgaagatcctgaccagcctggccgaggtggccaccaccaacggccacaagctgctgagcctgagcagcaactatgatgcccagatgaagagcctgctgagaattgtgaggatgttctgccacgtgttcagaattggccccagcagccccagcaatggcatcgacatgggctacaatggaaacaagacccccaggagccaggtgttcaagcccctggagctgctgtggcacagcctggatgagtggctggtgctgattgccacagagctgatgaagaacaagagggacagcacagagatcaccagcatcctgctgaagcagaagggccaggaccaggatgctgccagcatccccccatttgagcccccaggccctggcagctatgagaacctgagcacaggcacccgggagagcaagccagatgccctggccggccggcaggaggccagcgctgactgccaggatgtgatctccatgacagccaaccggctgtctgctgtgatccaggccttctacatgtgctgcagctgccagatgcctcctggcatgaccagcccccgcttcattgaatttgtgtgcaagcatgatgaggtgctgaagtgctttgtgaacagaaaccccaagatcatctttgaccacttccacttcctgctggagtgcccagagctgatgagccgcttcatgcacatcatcaaggcccagcccttcaaggacagatgtgagtggttctatgagcacctgcacagcggccagcctgacagcgacatggtgcacaggcctgtgaatgaaaatgacatcctgctggtgcaccgggacagcatcttccgcagcagctgtgaggtggtgtccaaggccaactgtgccaagctgaagcagggcattgctgtgcgcttccatggagaggagggcatgggccagggcgtggtgcgggagtggtttgacatcctgagcaatgagatcgtgaacccagactatgccctcttcacccagagcgcagatggcaccaccttccagcccaacagcaacagctatgtgaacccagaccacctgaactacttccgctttgctggccagatcctgggcctggccctgaaccaccggcagctggtgaacatctacttcaccaggagcttctacaagcacatcctgggcatccctgtgaactaccaggatgtggccagcattgatcctgaatatgccaagaacctgcagtggatcctggacaatgacatcagtgacctgggcctggagctgaccttctctgtggagacagatgtgtttggagccatggaggaggtgcccctgaagccaggcggcggcagcatcctggtgacccagaacaacaaggccgagtatgtgcagctggtgacagagctgaggatgacccgggccatccagccccagatcaatgccttcctgcagggcttccacatgttcatcccccccagcctcatccagctgtttgatgaatatgagctggagctgctgctgagcggcatgcctgagattgatgtgtctgactggatcaagaacacagagtacaccagcggctatgaaagagaagatcctgtgatccagtggttctgggaggtggtggaggacatcacccaggaggagcgggtgctgctgctgcagtttgtgacaggcagcagccgggtgccccatggaggctttgccaacatcatgggcggcagcggcctgcagaacttcaccatcgctgctgtgccctacacccccaacctgctgcccaccagcagcacctgcatcaacatgctgaagctgcctgagtaccccagcaaggagatcctgaaggaccggctgctggtggccctgcactgcggcagctatggctacaccatggcctag

SEQ ID NO: 205688 - DNA, 2730 bp, Artificial Sequence
  derived and/or modified sequence
atggagcgggccatggagcagctgaaccggctgacccggagcctgcgcagggctcggacagttgagctgcccgaggacaacgagaccgcagtctataccctgatgcccatggtgatggccgaccaacacaggagtgtaagcgagctgttaagcaactctaagttcgacgtgaattacgcgttcggccgcgtgaagcggtctctcctgcacattgcagcaaactgtggctctgtagagtgccttgtcctcctgctgaaaaagggtgcgaacccgaactaccaagacataagcggttgtaccccactgcatctggccgcgagaaatggacagaagaagtgtatgtcaaagttattagagtattcagctgatgttaacatttgcaacaacgaggggttgacagcaatccactggttagcggttaatgggcggaccgagctccttcacgatctagtacaacacgttagcgatgtggacgtggaggacgccatgggtcaaacggccctgcacgttgcatgccaaaatgggcataaaactaccgtgcaatgtctgctcgacagtggcgcagatataaacaggcccaatgtcagtggagcaactcctctctatttcgcgtgttctcacggccagcgggacactgctcagatactcctcctccgtggagccaaatatctccctgataaaaacggggtcactccgttagatctctgtgttcagggtgggtatggagagacttgcgaggtcttgatccagtatcatcctcggttgtttcagaccataattcaaatgacgcagaacgaagacctaagagaaaatatgctccgccaagtcctcgagcacctgtctcagcaatccgaatcccaatatctaaaaatattgaccagtctggcagaggtggctacaaccaatggccacaagttacttagcctttcgagtaattacgacgctcaaatgaagtccctactaagaatcgtgaggatgttctgccacgtttttcgtattggtccatccagcccctcaaatggcattgacatggggtacaatggaaacaagacacctaggtcccaagtgttcaagcctctggaactactgtggcactccttggacgaatggctggtactgatcgcgacggaacttatgaagaataagagagatagtacagagataacttcaattctgctgaagcagaagggccaggaccaagacgcagcttccatccctcccttcgagccacctggacccgggagctacgagaatctttcaactggcacccgcgagtccaaacctgatgcccttgccggccgacaggaggccagcgcagactgtcaggatgttatcagcatgaccgctaaccggctcagcgcggttatacaggctttttacatgtgttgttcatgtcaaatgcccccaggaatgacaagtccaagatttatagaatttgtgtgcaaacacgacgaggttctgaagtgctttgtgaatagaaatcctaaaattatctttgatcacttccattttctgctggaatgtccagagcttatgtctagattcatgcacattattaaggcccaaccctttaaggaccggtgtgaatggttttacgaacatcttcactccgggcagccagactcagatatggtccaccgccctgtgaatgagaacgatattttactcgtgcatagggactccatctttcgatcctcatgtgaggtagtgtccaaagcaaattgcgctaaactgaaacagggcatcgccgttcggtttcacggggaagaaggcatgggacaaggggtggtgagagaatggttcgacatactgtctaatgaaattgtgaatcctgactacgccttatttacacagtccgccgacggcaccacattccagccaaacagcaattcatatgttaacccagaccaccttaactatttccgcttcgcaggccagatcctaggactggctttgaaccaccggcagctggtgaatatatactttacacggagcttctacaagcacattctcggaatcccagtgaattaccaggatgtggcctccattgaccctgaatatgctaagaacttgcagtggatcctggacaacgatataagtgacctgggattggagctgacattctctgtggagacagacgtgttcggtgcaatggaggaggtgcctcttaaaccaggaggcgggtctattcttgtgacacaaaacaataaagccgaatacgtccaactagttaccgagctgcgcatgactcgtgccatccagcctcagataaacgcttttttgcaggggttccacatgttcattcccccttccctgatccaacttttcgatgagtatgagctggagctcctgctctcaggtatgcctgagatcgacgtgagcgattggataaaaaataccgagtacacaagtggttacgagcgtgaagaccctgttattcagtggttctgggaggtggttgaagacatcacgcaggaagagcgtgtgcttctgctgcagttcgtcaccgggagtagccgggtgccgcatggcggatttgcaaatattatgggaggtagcggcctgcagaactttacgattgctgctgtgccatacacccccaaccttttacctaccagctccacatgcatcaatatgttgaagttacctgaatacccatctaaagagatcctgaaggataggttgctggttgctctccattgcggcagttacggatacactatggcatag

SEQ ID NO: 205689 - DNA, 2730 bp, Artificial Sequence
  derived and/or modified sequence
atggaaagagccatggagcagctgaatcggttgactcgctccctgaggagggcacgcacagtggagctccctgaggataacgaaacagctgtttacactctcatgccaatggttatggcagatcagcaccggtcggtcagcgaactactctcaaatagtaagtttgatgtcaactacgcgtttgggcgtgtgaaaaggtccttgctacatattgcagccaattgtggcagtgtggaatgccttgtgctgctacttaagaaaggagcaaaccctaactaccaggatatttctggctgcactcctctccacctcgccgctagaaatggtcaaaaaaaatgtatgtccaaactgcttgagtattccgctgacgtgaacatatgcaacaatgagggacttacggcaatacattggttggccgtcaacggaagaacagagctgctgcacgacctcgtgcagcacgtgagcgatgttgatgttgaagacgccatggggcagactgctctccacgtggcatgccagaacggacataagacgacagtgcagtgcttgttggacagcggggcagacattaaccgtccgaatgtctcaggggcaacacctctgtattttgcatgtagtcacggtcaacgcgatacagctcaaatcttactgctgcgtggggctaagtatctgcctgacaaaaatggtgttacgcctctagatctgtgtgtgcagggcggttacggtgaaacttgcgaggtgttgatccagtaccacccacggttgttccagacaatcatccagatgacgcagaacgaggatctaagggaaaacatgctgcgacaggttcttgaacacttgagtcaacagtcagaaagccaatacttgaagatccttacctcactggcggaggttgccaccactaatgggcataagttgctgtcactgagtagcaattacgatgcgcagatgaaatccctgctgcgcattgttcggatgttctgccacgtgtttaggatcggaccttcctccccctccaatggtatagatatgggttataacgggaacaagacccctcgatcccaggtgtttaaacccctggagctcttatggcactcccttgacgagtggctggtgctcatagccacggagctgatgaaaaataagagggactccaccgagataacttctatcctcctgaagcagaaaggacaggaccaggatgcagcaagcatcccacctttcgaaccacccggacccggatcttatgagaatctgtccacaggaaccagggagtcgaagcctgatgcattagctgggcgtcaggaggcaagcgcagactgtcaagacgtgatatctatgacggctaacagactgtcagcagtcatacaggccttctatatgtgttgtagttgtcagatgccccctgggatgacgtctccacgcttcattgaatttgtgtgtaagcacgatgaggtcctgaaatgtttcgtaaatcgcaatccaaaaatcattttcgaccattttcactttctgctggagtgtcctgagctgatgtcccggttcatgcatattatcaaggcccagccctttaaggatcgctgtgagtggttttacgagcatctgcatagtgggcagcccgattcggacatggtacatcgaccagtgaacgagaatgacatcctgctggtgcatagggatagtattttcagaagttcatgtgaggtggtgtcaaaggctaactgtgcgaaacttaaacagggtatcgcagtgcggtttcacggcgaggagggcatgggacaaggagtggttagggagtggttcgacattttgagcaatgagatcgtgaaccctgactacgcactcttcacccaatccgccgatggaacaacatttcagccaaactctaattcttatgtaaatcctgaccacctcaattacttcaggtttgccggtcagattctgggcttggccttgaaccatcgacaacttgtgaatatctacttcactcggtccttctacaagcacatactcggtatccccgttaattaccaagacgtggcttctattgaccctgagtatgctaaaaatctgcagtggattctcgataacgatatcagcgacctgggcctggaattgacgttctccgtggagaccgatgtgtttggagcgatggaagaggtccccctgaagcccggagggggatcaattctcgtgactcaaaacaacaaagccgaatacgtgcagttggtcactgaattaagaatgaccagagcgatccagcctcagataaacgctttcctccagggattccacatgttcatcccaccatctctcatccagttgttcgatgaatacgaattagagctcctgttgagtggaatgcctgagattgatgtttccgattggataaagaacaccgagtatacatcaggatatgagcgtgaagatcccgttatccagtggttctgggaggtcgttgaggatatcacccaggaagagcgcgtcctactccttcagttcgtgactggcagctctcgtgttcctcatggtgggtttgctaacataatgggtggcagtgggctgcagaactttaccattgccgctgttccatatacccctaacttgctgcccacctcctccacttgtatcaacatgctgaaattgcccgaatatccctccaaagagatactgaaagataggctcctagttgcacttcactgcgggagctacgggtacactatggcctag

SEQ ID NO: 205690 - DNA, 4576 bp, Artificial Sequence
  derived and/or modified sequence
agaaggccacgcgagcccgggagggacgcggcggcgggggctgcaggaaaggcgcgagcagaggcggcggcgggtgtactgtaggtggtcggtccggcagcagcccggcccccggacgcaggacgtggccccaggcagccctcgcagctcagtgctctagccggggcaagcccgcgtctccgcctgctggacgggcccaggcgagatgtagggctctgggcgcggaggccgccggtggggcggctgatcgcggaggatcgcggagggcgcgccgaggatggagagagcgatggagcaactcaaccgcctgacgcgctcgctgcgccgcgcgcgcaccgtggagttgcccgaggataatgaaactgctgtttatacattaatgccaatggttatggctgatcaacacaggtctgtttctgaactactatcaaattcaaaatttgatgtcaattatgcattcggacgtgtgaaaagaagcttgcttcacattgcagcaaattgtggatcggtggaatgcttggttttgctgttaaagaaaggagcaaatcctaactatcaagatatttcaggctgtacaccccttcatttggcagcaagaaatgggcagaagaaatgtatgagtaaattattagaatatagcgctgatgtcaacatttgtaataatgaaggccttacagcaatacattggctggctgtgaatgggcggacagaactactccatgaccttgtgcagcatgtcagtgatgttgatgttgaggatgccatggggcagacagcactgcatgttgcctgccagaacggtcacaagacgacagtgcagtgcttgctagacagtggtgctgatattaacaggccaaatgtatcaggagcaactccattgtactttgcttgcagtcatggtcagagagatacagcacagatcctactattacgaggagccaaatatctgccagataaaaatggagtaactcctctggatttatgtgtacagggtggatatggagagacttgtgaagtattaattcaatatcacccgaggctttttcagactattattcaaatgacacagaatgaagacctccgagaaaacatgttacggcaagttctggagcatttgtctcagcaaagtgaaagccagtacctaaagattctaacaagccttgctgaagttgctacaacaaatggtcataaactgcttagcctctctagcaattatgatgctcaaatgaagagccttttaaggattgtgagaatgttttgtcacgtctttcgaattggtccatcctcccccagtaatggaattgatatgggctacaatgggaataaaactccaagaagccaggtgttcaagcctctggaattgctttggcactcgttagatgaatggctagttttaatagccacagaattgatgaaaaacaaaagagactcaacagagatcacttctattttactgaaacaaaaaggccaagatcaagatgctgcttccattcctccatttgaacctccaggacctgggagctatgaaaatctgtccactggcacaagggaatctaaaccagatgctcttgcagggagacaggaagccagtgcagattgtcaggatgttatttctatgacagctaaccggctaagtgctgtcattcaagctttttacatgtgctgttcttgtcagatgcctccgggaatgacttcacctcgtttcattgaatttgtctgcaaacatgatgaagttttaaaatgctttgttaatagaaatcccaaaattatatttgaccactttcactttctccttgaatgtcctgagttgatgtcaagattcatgcatatcataaaagcacagccttttaaagatcgctgtgaatggttctatgaacatttgcattcaggacagccagattcagatatggtgcacaggccagtgaatgaaaatgatatcctgctggttcacagagattctatttttaggagtagctgtgaagttgtgtcaaaagcaaattgtgcaaagctaaagcaagggattgctgtacggttccatggagaagaaggcatgggtcaaggtgttgtgcgtgagtggtttgatattctgtccaatgagatagtcaatcctgattatgcattgtttacccagtcagctgatggaacaacttttcagcctaatagcaactcttatgtaaatcctgatcacttgaactattttcggtttgctgggcagatcttgggattagcgttgaaccacaggcagctggtcaatatttacttcacacgatccttctacaagcacattcttggtattcctgtaaattaccaagatgtggcatccattgatccagaatatgcgaaaaatttgcaatggattttagataatgatataagtgatctgggtctagaactaactttttctgttgagactgatgtgtttggagcaatggaagaggtgcctttgaaacctgggggtgggagtattcttgtgacacaaaataataaagcggagtacgtccagcttgttactgaacttcgaatgacaagagccattcagcctcagatcaatgcttttttacagggctttcatatgttcattccaccctccctcatacagctttttgatgaatatgaattggagctactgctttctggcatgccagaaattgatgtgagtgattggataaaaaatacagaatacacaagtggctatgaaagagaagatccagttattcagtggttctgggaagttgtagaagacattactcaagaggagagagttcttctcttacagtttgttacgggcagttccagggtcccacatggtgggtttgctaatatcatgggtggaagtggattgcaaaactttacaatcgctgctgtgccatatactccaaatcttttaccaacttcaagcacatgcatcaacatgctcaagttacctgaatacccaagtaaagaaatactcaaggacagacttcttgtggcactacattgtggcagctatggttacacaatggcataatgaagtctggaaaactcctctgactactgatgcacaattcagaatggcagaagtaatttgggaaaatgtcaacaaaaaagcagcctaaatgcaacccataggcagggctgatgcttccaatttataaaggatcatcaggttttctgtttctctcttttcccttttatgttttctctgtttgtgatacaattagaaaatataaaatcacagtagattttattttttaaaatgctaactgaaagtaatagagactgtcctttttcataattaattttatccaagattgtattaaggcaaaatctgattctacattccacctctgctatgtaactgtcttgttaaaagggtgttttctcctaatttctgatatattatatgaggtcatccagctggtgtgttcttttgcatgtaaactgccatttatattttagaaaactattgtatagaatggatttagattgtctataaagccacaaatacgtattttgccacagtgtattctatattgcaatgatttttttagcattttaatattttaatatatattgtaaaatttagactgatgatactaacagttgatgaaatgacatataatttatatatgaaagcttacgctatattgtatgaattatttgcatctttcagtggccagttttccatatgtatatattatggtctcaatgtttttcttacgcctcattttaatttataatgaaggtaaaattaaaatgtattttaccacgtttcttttcattacttttatctgtgagctctgacacatctgaaaaagtaatctgatgtgcaaattataatttaaatatgttaatttttttgcttcttaaatttgcttttcatcattaaaatgtcaagttcaagtgatatgtgcctaatatcacttggatgttggtgggtttttgaatttttgggtggttaatcagttttattttgaaaagacgtacttgaatagttacagcatatgtttgaacaggaagtaggaacatgcatacacgaagaaatgctaacggaaggatttgttatgtttaggatcttcccttggaaactaaaaatagaatattaatgacattactgtttgtagaatgacatatgcagattttctcataagcagtcattgtgtttgccagtaatgtttgagagacatgtaagttgaaagttttgctaaattataaagctcctttaattcgttggttttgattctcttattctcttgtcttttctaaatgttaacaaaatatatcttaacagattacatgaaatttaggaattatttaaaagttaccattagctctaaaattaagattcggatgctttatttatagtaactgaagctaataatgttttatgttttgattttttgaaatttaattgtagaagtcactgccttctgagttttcaaatagataaccacctttaatattacactgcttataatactaatgtttacagatatgtttctgtttataaccatataatacattggctttgtcatattagttttttttgcaagtagttatgtaaaagagatagataataaaatattaaataactgag

SEQ ID NO: 205691 - DNA, 2730 bp, Artificial Sequence
  derived and/or modified sequence
atggagagagccatggagcagctgaacagactgaccagaagcctgagaagagccagaaccgtggagctgcccgaggacaacgagaccgccgtgtacaccctgatgcccatggtgatggccgaccagcacagaagcgtgagcgagctgctgagcaacagcaagttcgacgtgaactacgccttcggcagagtgaagagaagcctgctgcacatcgccgccaactgcggcagcgtggagtgcctggtgctgctgctgaagaagggcgccaaccccaactaccaggacatcagcggctgcacccccctgcacctggccgccagaaacggccagaagaagtgcatgagcaagctgctggagtacagcgccgacgtgaacatctgcaacaacgagggcctgaccgccatccactggctggccgtgaacggcagaaccgagctgctgcacgacctggtgcagcacgtgagcgacgtggacgtggaggacgccatgggccagaccgccctgcacgtggcctgccagaacggccacaagaccaccgtgcagtgcctgctggacagcggcgccgacatcaacagacccaacgtgagcggcgccacccccctgtacttcgcctgcagccacggccagagagacaccgcccagatcctgctgctgagaggcgccaagtacctgcccgacaagaacggcgtgacccccctggacctgtgcgtgcagggcggctacggcgagacctgcgaggtgctgatccagtaccaccccagactgttccagaccatcatccagatgacccagaacgaggacctgagagagaacatgctgagacaggtgctggagcacctgagccagcagagcgagagccagtacctgaagatcctgaccagcctggccgaggtggccaccaccaacggccacaagctgctgagcctgagcagcaactacgacgcccagatgaagagcctgctgagaatcgtgagaatgttctgccacgtgttcagaatcggccccagcagccccagcaacggcatcgacatgggctacaacggcaacaagacccccagaagccaggtgttcaagcccctggagctgctgtggcacagcctggacgagtggctggtgctgatcgccaccgagctgatgaagaacaagagagacagcaccgagatcaccagcatcctgctgaagcagaagggccaggaccaggacgccgccagcatcccccccttcgagccccccggccccggcagctacgagaacctgagcaccggcaccagagagagcaagcccgacgccctggccggcagacaggaggccagcgccgactgccaggacgtgatcagcatgaccgccaacagactgagcgccgtgatccaggccttctacatgtgctgcagctgccagatgccccccggcatgaccagccccagattcatcgagttcgtgtgcaagcacgacgaggtgctgaagtgcttcgtgaacagaaaccccaagatcatcttcgaccacttccacttcctgctggagtgccccgagctgatgagcagattcatgcacatcatcaaggcccagcccttcaaggacagatgcgagtggttctacgagcacctgcacagcggccagcccgacagcgacatggtgcacagacccgtgaacgagaacgacatcctgctggtgcacagagacagcatcttcagaagcagctgcgaggtggtgagcaaggccaactgcgccaagctgaagcagggcatcgccgtgagattccacggcgaggagggcatgggccagggcgtggtgagagagtggttcgacatcctgagcaacgagatcgtgaaccccgactacgccctgttcacccagagcgccgacggcaccaccttccagcccaacagcaacagctacgtgaaccccgaccacctgaactacttcagattcgccggccagatcctgggcctggccctgaaccacagacagctggtgaacatctacttcaccagaagcttctacaagcacatcctgggcatccccgtgaactaccaggacgtggccagcatcgaccccgagtacgccaagaacctgcagtggatcctggacaacgacatcagcgacctgggcctggagctgaccttcagcgtggagaccgacgtgttcggcgccatggaggaggtgcccctgaagcccggcggcggcagcatcctggtgacccagaacaacaaggccgagtacgtgcagctggtgaccgagctgagaatgaccagagccatccagccccagatcaacgccttcctgcagggcttccacatgttcatcccccccagcctgatccagctgttcgacgagtacgagctggagctgctgctgagcggcatgcccgagatcgacgtgagcgactggatcaagaacaccgagtacaccagcggctacgagagagaggaccccgtgatccagtggttctgggaggtggtggaggacatcacccaggaggagagagtgctgctgctgcagttcgtgaccggcagcagcagagtgccccacggcggcttcgccaacatcatgggcggcagcggcctgcagaacttcaccatcgccgccgtgccctacacccccaacctgctgcccaccagcagcacctgcatcaacatgctgaagctgcccgagtaccccagcaaggagatcctgaaggacagactgctggtggccctgcactgcggcagctacggctacaccatggcctag

SEQ ID NO: 205692 - protein, 695 aa, Artificial Sequence
  derived and/or modified sequence
MEEKPGQPQPQHHHSHHHPHHHPQQQQQQPHHHHHYYFYNHSHNHHHHHHHQQPHQYLQHGAEGSPKAQPKPLKHEQKHTLQQHQETPKKKTGYGELNGNAGEREISLKNLSSDEATNPISRVLNGNQQVVDTSLKQTVKANTFGKAGIKTKNFIQKNSMDKKNGKSYENKSGENQSVDKSDTIPIPNGVVTNNSGYITNGYMGKGADNDGSGSESGYTTPKKRKARRNSAKGCENLNIVQDKIMQQETSVPTLKQGLETFKPDYSEQKGNRVDGSKPIWKYETGPGGTSRGKPAVGDMLRKSSDSKPGVSSKKFDDRPKGKHASAVASKEDSWTLFKPPPVFPVDNSSAKIVPKISYASKVKENLNKTIQNSSVSPTSSSSSSSSTGETQTQSSSRLSQVPMSALKSVTSANFSNGPVLAGTDGNVYPPGGQPLLTTAANTLTPISSGTDSVLQDMSLTSAAVEQIKTSLFIYPSNMQTMLLSTAQVDLPSQTDQQNLGDIFQNQWGLSFINEPSAGPETVTGKSSEHKVMEVTFQGEYPATLVSQGAEIIPSGTEHPVFPKAYELEKRTSPQVLGSILKSGTTSESGALSLEPSHIGDLQKADTSSQGALVFLSKDYEIESQNPLASPTNTLLGSAKEQRYQRGLERNDSWGSFDLRAAIVYHTKEMESIWNLQKQDPKRIITYNEAMDSPDQ

SEQ ID NO: 205693 - DNA, 2088 bp, Artificial Sequence
  derived and/or modified sequence
atggaggagaaacccgggcagccccagccacagcaccatcattcacatcaccacccgcatcaccaccctcaacagcaacaacagcagccgcatcatcaccatcattactacttctacaaccattcccacaaccaccaccatcaccaccatcaccagcagccgcaccagtacctgcagcacggggccgaagggtctcctaaggcacaacctaagcccctcaagcacgagcagaagcatactctgcagcagcaccaggagacacccaagaagaagaccgggtacggtgagcttaatggaaacgccggggagcgagagatttccctgaagaacttgagttccgacgaggcaacaaatcctatttctagggtgctgaacgggaatcagcaggtcgtggatacttctctgaaacagaccgtcaaggctaatacttttggtaaagcgggcatcaaaaccaaaaacttcatccagaagaatagcatggataagaagaatggaaagagttatgaaaacaagtcgggcgaaaaccaatctgtggacaagtcagacacgattccaattccgaacggagtcgttacgaataactccggttacatcacaaatgggtatatgggcaaaggtgctgataacgacggaagcggctctgaatccgggtatactacacccaagaagagaaaggcccggcggaacagcgcaaagggatgtgagaacctgaatatcgttcaagataaaataatgcaacaagaaacctcagtccccaccctcaagcagggcttggagacttttaagccagactactccgagcagaagggaaatcgggtggatggaagcaaaccgatttggaagtacgaaaccggtcctggagggacttcacgagggaagccagctgtgggcgacatgctgcgaaaatcttctgattctaaacctggcgtatcaagtaagaaattcgacgaccggcctaagggcaagcacgcatccgctgtggcatctaaggaagacagctggacgttgttcaaacccccacccgtctttcctgtagataactcgagcgccaaaatcgtccccaagatcagctatgccagtaaggtgaaagaaaatctgaataagaccattcagaactcctcagtctctccaacctcctccagctcttcctcttccagcaccggcgaaacgcagacccagtcatcaagccggcttagtcaggttcccatgagcgcgttgaaatctgtcacttccgccaactttagcaacggcccagtgctagccggcacggatggtaacgtgtatcctccaggtggacaaccactgctgacgactgcagcgaacactctgacacccatcagcagtggtaccgactcagtcctacaggatatgtccttgacatctgcagcggttgaacagattaaaacatctttgttcatttacccgagtaacatgcagactatgctgttgtccacagcacaggtggatctcccgtcccagacagatcagcagaacttgggtgacatatttcaaaatcagtggggacttagtttcatcaatgagcccagtgcagggcctgagaccgtgacagggaagtcttctgaacataaggtcatggaagttacatttcaaggggaatacccagctaccctcgtgtctcagggcgcagagattatccccagcggcaccgaacatcctgtgtttccgaaggcatatgagctggaaaagagaaccagtccccaggtgctggggagcatcctgaaatccggaacaacctctgaaagcggcgccctgagcctggagcccagccacatcggagaccttcagaaagctgacacctcatcccagggggccctggtgtttctgtctaaagattatgagattgaatctcagaaccccttggcgagccctactaatacactgctcggcagcgcaaaagagcagaggtatcaaaggggcctggaaaggaacgatagttggggatcctttgaccttcgagcagcaatcgtctatcacaccaaggaaatggagtctatctggaacttgcagaaacaggatcctaagcgcataattacgtacaacgaagccatggactccccagatcagtag

SEQ ID NO: 205694 - DNA, 2088 bp, Artificial Sequence
  derived and/or modified sequence
atggaggagaagccaggccagccccagccccagcaccaccacagccaccaccacccccaccaccacccccagcagcagcagcagcagccccaccaccaccaccactactacttctacaaccacagccacaaccaccaccaccaccaccaccaccagcagccccaccagtacctgcagcacggggctgagggcagccccaaggcccagcccaagcccctgaagcatgagcagaagcacaccctgcagcagcaccaggagacccccaagaagaagacaggctacggggagctgaatggaaatgctggggagcgggagatcagcctgaagaacctgagcagtgatgaggccaccaaccccatcagccgggtgctgaatggaaaccagcaggtggtggacaccagcctgaagcagacagtgaaggccaacaccttcggcaaggccggcatcaagaccaagaacttcatccagaagaacagcatggacaagaagaatggcaagagctatgagaacaagagcggggagaaccagagcgtggacaagagtgacaccatccccatccccaacggggtggtgaccaacaacagcggctacatcaccaacggctacatgggcaaaggagctgacaatgatggcagcggcagcgagagcggctacaccacccccaagaagaggaaggcccggaggaacagcgccaagggctgtgagaacctgaacatcgtgcaggacaagatcatgcagcaggagacctctgtgcccaccctgaagcagggcctggagaccttcaagccagactacagcgagcagaagggcaacagagtggatggcagcaagcccatctggaagtatgagaccggccctgggggcaccagccggggcaagccagctgtgggggacatgctgaggaagagcagtgacagcaagccaggagtgagcagcaagaagtttgatgaccggcccaagggcaagcacgccagcgctgtggccagcaaagaagattcctggaccctcttcaagcccccacctgtgtttcctgtggacaacagcagcgccaagatcgtgcccaagatctcctatgccagcaaggtgaaggagaacctgaacaagaccatccagaacagctctgtgagccccaccagcagcagcagcagcagcagcagcactggagagacccagacccagagcagcagccggctgagccaggtgcccatgtctgccctgaagtctgtgaccagcgccaacttcagcaatggacctgtgctggccggcacagatggaaatgtgtacccacctgggggccagcccctgctgaccacagctgccaacaccctgacccccatcagcagcggcacagacagcgtgctgcaggacatgagcctgaccagcgctgctgtggagcagatcaagaccagcctcttcatctaccccagcaacatgcagaccatgctgctgagcacagcccaggtggacctgcccagccagacagaccagcagaacctgggggacatcttccagaaccagtggggcctgtccttcatcaatgagcccagcgctggccctgagaccgtgacaggcaagagcagcgagcacaaggtgatggaggtgaccttccagggcgagtacccagccaccctggtgtcccagggcgctgagatcatccccagcggcacagagcaccctgtgttccccaaggcctatgagctggagaagaggaccagcccccaggtgctgggcagcatcctgaagagcggcaccaccagcgagagcggggccctgagcctggagcccagccacatcggggacctgcagaaggctgacaccagcagccagggcgccctggtgttcctgagcaaggactatgaaattgagagccagaaccccctggccagccccaccaacaccctgctgggcagcgccaaggagcagcgctaccagaggggcctggagagaaatgacagctggggcagctttgacctgcgggccgccatcgtgtaccacaccaaggagatggagagcatctggaacctgcagaagcaggaccccaagaggatcatcacctacaatgaggccatggacagcccagaccagtag

SEQ ID NO: 205695 - DNA, 2088 bp, Artificial Sequence
  derived and/or modified sequence
atggaggagaagcccggccagccccagccccagcaccaccacagccaccatcacccacatcatcatccacagcaacaacagcagcagccacatcaccaccatcattattacttttacaatcacagccacaatcaccaccaccatcaccaccaccagcagccccaccagtacctccagcacggggcagagggctcacccaaagctcagcccaaacctctgaaacacgagcagaagcacactcttcagcaacaccaggagacaccaaagaaaaaaactggatatggggagctgaacggaaacgctggcgagagggaaattagtctcaagaatttgtcctccgacgaggccaccaaccccataagccgagtgctgaacgggaatcagcaggtggtggacaccagtttaaaacagaccgtgaaggccaatacattcggcaaagccgggataaagacaaagaattttattcagaaaaatagtatggataagaagaacgggaaatcttacgagaataagagcggcgagaaccaatctgtggacaagtccgataccatccctatccccaacggagtggtcacaaacaacagcggttatattaccaatggttacatgggtaagggcgccgataacgatggtagtggctcagagtctggctatacgactcccaagaaaaggaaggcccgacggaatagcgcgaaaggttgcgaaaacctgaatattgtccaggataaaatcatgcagcaggagacatctgtgcccacactgaaacaggggttggaaacatttaagccagattacagcgagcaaaaggggaacagggtcgatgggtctaaacctatttggaagtatgagacaggcccgggcggaaccagtcgcggtaagcccgcggtgggagacatgttacgcaaaagcagtgacagcaaacccggtgtctcaagtaaaaagtttgacgaccgaccaaaaggcaaacatgcttctgccgtcgccagtaaagaagactcctggaccctgttcaagccccctccagttttcccagtggacaatagtagcgccaagatagttccaaagattagctatgcaagcaaagtcaaggaaaacctgaataagacaatccagaattctagtgtgtcccctacttccagttcctcctcctccagttccaccggcgaaacacagacgcagagttcttcccgactttcccaggttcctatgagcgcgctaaaaagcgtaaccagtgccaatttttccaatgggcctgtactggctgggacagacggcaacgtgtatcctcccggtgggcagccactcttgactacagcggccaatactttgacgccaatctcctccggaaccgacagtgtgcttcaggacatgtctttaaccagtgctgcagtcgagcagattaagactagtctgttcatctatccttccaacatgcaaactatgttgctcagtactgctcaagtggacctaccatcacagactgatcagcaaaatctcggggatattttccagaatcaatgggggctatcctttattaatgaaccatccgcagggcctgagactgtgactggtaaatcctcagagcacaaagtcatggaagtcacgtttcagggtgaataccccgctacactcgtttcgcagggcgccgaaatcatcccaagtggtactgaacacccagtgttccccaaggcttacgaactcgagaaacgcacatccccacaagtgcttggttctattctaaaatccggaacaacgagtgaatccggagccttgtccctcgaacccagtcatatcggcgacttgcaaaaggcagataccagttcccagggagccctagtgtttctttctaaagactatgagatcgaaagccagaatcccctcgcttcacctaccaacacccttctgggatcggcgaaagaacagcgttatcaacgaggactggagcggaacgattcctgggggtcctttgacctcagggctgctatcgtgtaccacactaaagagatggagtccatctggaacctccagaagcaggatcctaagaggattataacatataatgaagccatggactctccagatcagtag

SEQ ID NO: 205696 - DNA, 10879 bp, Artificial Sequence
  derived and/or modified sequence
agatatactgagtgagccctgagaagcagtctcagatcctgacggtgcagcagcccgcagcctcagccagggagtcccagccgctttcaatggaggagaagcccggccagccacagcctcagcaccatcacagccaccaccatccgcaccatcaccctcagcagcagcagcagcagccgcaccaccaccaccattattatttctacaaccacagccacaaccaccaccaccaccatcatcaccagcagcctcaccaatacctgcagcatggagccgagggcagccccaaggcccagccaaagccgctgaaacatgagcagaaacacaccctccagcagcaccaggaaacgccgaagaagaaaacaggctatggtgaactaaacggtaatgctggagaaagagaaatatctttaaagaacctgagttctgatgaagccaccaaccctatttccagggtcctcaatggcaaccagcaagttgtagacactagcctgaagcagactgtaaaggccaacacctttgggaaagcaggaattaaaaccaagaatttcattcagaaaaacagtatggacaaaaagaatgggaagtcttatgaaaataaatctggagagaatcagtctgtagataagtctgatactataccaattccaaatggtgtggtaacaaataattctggttatattactaatggttatatgggtaaaggagcagataatgatggtagtggatctgagagcggatatacaactcctaaaaaaaggaaagctaggcgcaatagtgccaagggttgtgaaaaccttaatatagtgcaggacaaaataatgcaacaagagaccagtgtcccaaccttaaaacagggacttgaaactttcaagcctgactatagtgaacaaaagggaaatcgagtagatggttcgaagcccatttggaagtatgaaactgggcctggaggaacaagtcgaggaaaacctgctgtgggtgatatgcttcggaaaagctcagatagtaaacctggtgtgagcagcaaaaagtttgatgatcggcccaaaggaaagcatgcttcagctgttgcctccaaagaggactcgtggaccctatttaaaccacccccagtttttccagtggacaatagcagtgctaaaatagttcctaaaataagttatgcaagcaaagttaaggaaaacctcaacaaaactatacagaactcttctgtgtcaccaacttcatcttcatcatcttcatcatctaccggggaaactcagacccaatcatcaagtcgcttatcccaggtccctatgtcagcgctgaaatctgttacttctgccaacttttctaatgggcctgttttagcagggactgatggaaatgtttatcctccagggggtcagccactgctaactactgctgctaatactctaacacccatctcttctgggacagattcagttctccaggacatgagtctaacttcagcagctgttgaacaaattaagactagcctttttatctatccttcaaatatgcaaactatgctgttgagcacagcacaagtggatctgccctctcagacagatcagcaaaacctgggggatatcttccagaatcagtggggtttatcatttataaatgagcccagtgctggccctgagactgttactgggaagtcatcagagcataaagtgatggaggtgacatttcaaggagaatatcctgctactttggtttcacagggtgctgaaataattccctcaggaactgagcatcctgtgtttcccaaggcttacgagctggagaaacggactagtcctcaagttctgggtagcattctaaaatctgggactactagtgagagtggagccttatccttggaacccagtcatataggtgacctgcagaaagcagacaccagtagtcaaggtgctttagtgtttctctcaaaggactacgagatagaaagtcaaaatcctctggcctctcctacgaacactttgttaggctctgccaaagaacagagataccagagaggcctagaaaggaatgatagctggggttcttttgacctgagggctgctattgtatatcacactaaagaaatggaatctatttggaatttgcagaagcaagatcccaaaaggataatcacttacaatgaagccatggatagtccagatcaatgaaggaccagactgcctattcgtaacctttctgcagcattagagccatcgttcatgggggacacaaggcttttatgctcctagatcttcaacgcagcagaggaaccataagtagaatcacaggataatatatacaaatatatatatatacatatatatatatatagttatttaaaaaaggcaactgaaagtaattagacttcttaaggaatcaaatttatttcaagagactacacatggttatttaatctccggtactgaataggttttttttcttctgttagtttttgtttttaagtgtgaatgcaagtgattaatgaatacagacttaacaagtgtggttctaaagttcctgctgtcatcaacttgggcaacaaatgacccactggaaaggcaaatccacttaaaagatctctgtatcttgttctgtgactgaagtgatacactaatcacggggaacccagaatgattcaacattttccccccactcctcccttgatctttttggttttactttaattaagccctgcgagaatgctggataaatgccttgaagttagcagggtgtatttttttagcgaatatgatttgcatgtcttgccaggagttaagcggcctctggggtgttggggaaatactttatttctttccatttattttttgtggggcggggataggggagggcattgaagttctacaattctggaatagttagttgatggtacatagttaacttggcttcggttacatattggactttaacaactgaagaatctatgcgtgtcatttaaagaaaagttgcagaacaagcaattggcttagatatacaatctggaaaaatattcctgtgcccatattttaatgtaattgtataactgggagcaaaaatatattctgcttttcaactgtaggtgctccagacttgctctccgtcactaacactaaatgtgctgttttccttgtttttcatcaaacatttaagacaaacttagacctttctgtaaattatcttttaatttctcagcaaaatctaaaaggggaagaaaaaagtccatgaaaactaaaacttttcatgtttttagccagtgagaagataataaaccctgactgtagaaggtgtgttttcatgcaaactatacttctgagcttgttagcttctaattatatcttaataaatatattttattactagagcaagatgggtttttaaggaaaataatgtgaaattctggaaattttctttggggcagagaagagcattagccctgtcttatcattacattgccatcctgttgcactgcagcttgtgtatagcatgctaaaataaatttttgtgtgtgtgtgcagaaattaagggtccaattgagattgggtgatgttagtaacataataacaagttgtctggcctgacacagcatcacatcacacacacagaaattagtatatccatgtatgtcaaatacaggttaaaatatcagggcatttatataaagagttgtagtcttctgataaaagtagactggatcccctggggtatttggggagaaagtaactactttggctctacccctagaaatgtccagttttgagtgactgtagtatggatgggttttcttgttttgttgattatttgaggcttttaaaacaagtagttcatgaaagaagctgttggactcaacatagagtagagtaactatctttttagtctggatttctgccctgcttagattttaaaagtataagcatggattgccaattccacttgatgtaaacaaaacttttttttatacataatatatatatatatatataaaataacttattgtatcagtccaggttcagaaacttgtggtaggccagttccagatagtttcatttcacctgtaaactgtatcactttgactgatattgtaattttcaaatgtataatatgtttacagatgtgccctgcatttagtctgccttgttcctattttgatttttgttgagtctcctgcctgcttgccaaaagctaggatgcttcaggcccatgtacaattgaaagcagaggcatccttgagctttaaagcattgaacaaactggaaaatgcaacataccacataactgaagtgaaaaaagtctgtgtttttgtgtttttttaaataaaaattttcaaaaagttaaaaaaaaagacatataaggttgattaaagggaaaaaaggctccagtttgttttacaggttttaaagttctgctgtgtgttcaattgccttgtgtaaccacttgtcgccttagggccagattcccctctctagtccccttttttaaatgtccattttgcttgcctggaattttaaagttcttccgtctcacaactcacaagaaactttctgggtttgtgacatacagaggttgaattgagtatatatttgaaaaggaaaaaacaaaaaacaaacccagaccccacctgaattgggctttttaacttagaagcaacacttgattaaacatctttagaaagctattgcttttctaatttccttccatatccctcaggcctcagtgttcagagaagccaaaaagaatgtatcacttctctgtctgtccaaaggtttttgagagtctcacttctaaatgaaacaatgcaacatttcactttgatttctccactgaaatttccttgattatatggttagaggtatgtagttaggaatgtctgttaactttctgagaaccctagtgccccatcatattaactgtcagtattttgggggcattaggttaatagacttaattgcctaggtacaagcaggactttgggacaaatctctttgtgctgtttggtaacacttaactctatttgttgcaatctttctccttaggtcctcacacaattccttacagagcacttattaaaaaaaaatcttaagagttgatctgttttctgattattttgtgtaagcttctaaacaaacttcagctgtgattaatttagcacatttaaataacgtgttattgtttggtataaagaattttccttcaactcagagtattagtactgtagcataaaccaaatacagtctagaggggatttttaacatccctccattataaagactgaaaaaggggtgtgtgtgtgtgtgtgtgtttatgtatgtatgtatgtgtgtgtgaggaaaagatggagatattaaaaattagtaaatgaatgtgtataagacattagtattcagagaatgaacttgtatttattttgtgccatttgttttcattacacagaaaaaagtcaggtggtttaaatccttaaaagggtagtattgaaaaatggcactaagaatgaaattatgacctatttttttaatagctatgaagatactaattatgggtgaagatttctttttaaatctgttttgattattgtaggcttctgtgtcacataccactcttgtaggtgtcctcaataatccccttttcccacaaaatacacagggtgtattatctttctctttattcacccccactttgctgaactgaagttaattacatagcctttcttctaacctccttagtaatgaaccttcacataaagtgtatttacagcgtctgtggtagccagcccttcctcctctactttctaggaggggatagccaataactaggaatttaatgacagatttttttttctttgaaataaatggccagagtttctccattttagaattttgttgtcctccttaatcatctgcttacctagtcattactcaatctgcagaaacttcataaaggaaaagtgctgcattgtttttacaaataacagtttgtagggaaaatatgacaaacctcaactatgggagttgtccacaatacaaaattttgaaaaaacattacatagtgataatatcatacttggttgttaggcttgttgcttccccacatcagaggcatctaatgatttatcttttgtaattgctgtgaacttttttaaataagccatttagtgtgaaattgtcatgtatcaaatggctattggaaatggactttactcaattttaattccactgtaaataaggacggagtcattcctacaaggctctcttcagagaaatagattaaaagtccaatttccaggtattattagtatagttatgccgctgggccacatcctcaacaacagctgatccctcttgtataaatatgttaactgtgcagaacagttatgttatgggacaaatataatggtcattatggtcagattggttgatgccacaccagtcaaggtagagtctgatagggcagtatcttaataaccctacccatgacttaactgttggatttgaaaggaaaacgtaggatttgctcttgtccccttacccgccacaaaattttgataatttgtttaaaagggagaggcagaggaaaagactagaagcataaatagctgctttaggtttgccagaggcacatagcttaacattagttcttaatatcgatgttatttttactaatgtaattaatcaacagagcaccaagattctttcatggtgaaaagggtgggcttctgttttggtatcttaaaatgtttcttttaaaatatacatcacctgtgtgagaaccaggaccacctgggagagtgatgaatcattggctccactcaaaagcattgctttactgagttttaaatttcacactgttttgccgctcaagaaaggtcttaaagtagttaaaggatgccagcaatagtgcgaatagaattttcggttgtctgcataataaaaacacccattgcagcatgattggtatgttgctcttgcattattgggaatggtaaatcagttatgggctagaaactatggaatggccgtcctcatatgtgatgggattgctgattcagacttccctattttccatacaattttgttatgtgcagagttctaaagccattttataatactgcagtatcccccccccccccacctttttttttttgagacggactgtctgttgcccaggctggagtacagtggcgcaatcttggctcactgcaacctccacctccctggttcaagcaattcccctgcctcagcctcccatgtagctgggattacgggcgcacaccaccacacctggctaatttgtattcttagtagagacggggtttcaccatgttgaccagactggtctcgaactcctgacctcaggcaatctgcccgcctcagcctcccaaagtgctggaattacaggtgtgagccaccgtgcccggccaagtatctcttttctacagccttattaaactaactacaaacatttattttccaatttagttttactttcagtgcatatcaaagttgttgtactcttcagaccaacaaattaacttgagggcaaattacatagctttccatgtacccttttttcctcaggtgctaatcaaaggctctgaaaatggatactgctttagtgatgtctgctttattcttaaaatgcttatttcttttgctagatgtaaagatttggtgttaacaaaagtggttttaatatgtaaatatgaatgaatgcctttagtttaccctgtttgtctattattaatctgttttcatttatccttcatagaggaggatcctttcatgatcttgaatacatttcattagatattgttgcattttaagaatgaaaatacaactgttttctgtcttagattaatcctgctgctatgagaaactgaaaatcaagaatgtgatgcactttttacattactatataccatacatataccataggttgctttgatacctttcctgtagcacagccactaacaagagtgaatgaattataaaattctttttgggagggaatcaatacaagtaactaattcttagctgatattgtcctatgaaggacaataacttaggaatataagaattctgttaatagtacactttttggccttaaatgtcttctactactgaaaatagtttaaatcttagctttgtttctattattccctctctctgcctcagaaagaggaattgggaagaatggcttaaaggacgtggtgtcattgatttgttgctgatcttttagaaaacatttgtctatgtaagctggggacttattttttgtttgtatatagaggggaaatagtgctgccctgaaccaatcagatttagtttaaatcaaatcaatcaaaactccagctgtttctcttgtctttttacttagcaaaggaaaactttagtgaatgctacttgacaagaagaaaagtcatttctcaagcacatacccaaacttgaaggtgattgaacccaaaataatgggtgggaaacaccaaatgaggtggaggaatgagaaagatgtgtgggccaaagctatctggttatattttgatgttgccaatatcgcaaagccaaaattttaatttgcttatttaatatatttgttggccagagatctatttttatatcaatgtgccttgcatgtatattaaaaaaaaaaaattggaaacgccatgtagtaatgcctgagatagtcgatggttcttaccacctcactaatttttatgcagtatgaaatgctcattctattgcccaactggtgctctctgtttaaagttacagatcttgcgaaactggaactattttataagctggggaagtgatttactttttttgttgtatcttttttgttcttagtctgttagtggctgtcctgtagtgggaaatagtaaaaggattcttcactcccttctcccctcagcaccttcttcaagtaaacatttcttgtgtgctttgaaaaaagtttcagcttgctgtctcttttagtgttttaaagaagtgttatacaaagcattgtttgcaaaatatagggagataatggagtccactttaatttggaattctgtgtgagctatgatccaagttatcagctctttccaactttaaaaattttgttaaaagcaccttgcttagaaaattttaaatatttatgtctgcaacaattgtctcaaaataataaactgtgcaattcttgtcattaaaaaaaaaaaagatctgaattttccctaatgtgacttgttagtttctctctgtatttcctgccagtgtaaatgtgaaagctttgcttgcattacgttttagaaatgcattttgcacactcgaattttgccgaagctccgtgaaaaggttagatctaagtagatgaataaagctatgcacatgttttgaaagtttaatttgtgtgtcattaccaaaagtgaccgatttgtccttactactttgctgttgttagctttaccatctttggaaacttggctcaaagttacatagttctgggctagctcatcagtggaactaggagagaggaaaactggcacctattttaataaagttcaatttaaacgagagcttgacttgtatctattaaagagcttttcttgaaacagggcagttttatcagctttacaaatcattggatgctcttccttagtaatattttggtttatttgatcaaatagaaatggaaagtaattcaaactgaaagacccttttttgtcatatggaacttggtgacgattttttgtcttaaagctggtttaaaggtaggataggcttttacctttattgctttagcataaatttggtttactgaattgactggcttgagattagaattattcagttgtttgtaagatcaaagcactggttgttttaaagataacgtgtatcttttaaaaaattgcccaagctgattagaacaagtttaggagttgggtacatttggttcaagtgctgcaatctgtatgtactaaatagctttactttgtgtatgtgtacttataatgtgtagatgtactactacccaggttttgtcaaatcatcttttttaaagtttttttttttttaattggttcaggacctttgtaggagaggctaatatgtttaagtagaagatattactgatagcattttccccatgctcctacataaaaaataaatatttccattttatagctttttcaatatacagaagagggttacttcttcatcaagtatattgttgcctttgaggacacagcaaaacccttctatatgtatcttcattgatagtggcagttaaaaactaagttatccagttaagacttaaaaggtgacccatattaattgcatggccttaaaaggcagaaatgcaggagtgtagcaagcatcattttagatggctatggttcctcttccgcatctgtcagtagttcacttatgttcagtcttagaacctactggaggagtgaagtaatttctctgtctcgtgcagaggcactaaggagctgagttacctcttaatctgggggaatggataataagtggagtacagttatgttaaaggatgttccccccgctcaaaaaaaagtttcaatgtttgttttgcccagtcaaaaatataggtcttttctacatataagaacagtcaccagaaattttcccttttgctaaatgcttaggtatttgctatagctgtttctgatgtcatggattctgaggaagtgtcatttacgtgatgatcttcctttattgatgtcttcatcatgttcagtgttttaaaaatataaattacaaacactctacaaccatacccagatttacttattttatcagaaaaaaaacttgagaaatttgtagatcaaattgagagacaataagtgtacattgttgaataaaaaattttaaagtttctg

SEQ ID NO: 205697 - DNA, 2088 bp, Artificial Sequence
  derived and/or modified sequence
atggaggagaaaccaggccagccccagccacaacatcatcactcacaccatcacccccaccaccatccccaacagcaacagcagcaaccccaccaccaccaccactactacttctacaatcatagccataatcaccatcatcatcaccatcaccagcaaccgcaccaatacctgcagcatggggctgagggtagtccaaaagcgcagcccaagccactcaagcatgagcagaagcacaccctccagcagcatcaggagacccccaagaaaaaaacgggttacggtgaattaaacgggaacgctggagaaagggaaatcagcttaaagaacctgtcttccgacgaggctaccaatccaatcagcagggtgcttaacgggaatcaacaggtcgtggacaccagtctgaagcagaccgtgaaggcgaacaccttcggcaaggccggtatcaaaacaaaaaatttcatacagaaaaactccatggacaagaagaacggcaaatcctacgaaaacaagtcaggggaaaatcaaagtgtagacaaatccgatactatccccatccctaacggagtggtcacgaacaacagcggatatattaccaatgggtatatgggaaagggggcagataatgacgggtctggaagtgaatccggttatactacccctaaaaagagaaaggcaaggcgcaacagcgccaaaggttgtgaaaacttaaatattgtccaagataaaatcatgcagcaggagactagtgtgcccactctgaagcagggccttgaaacatttaagccggattatagcgagcagaagggtaacagagtagatggctcaaagcccatatggaagtatgaaaccgggccagggggaacttcaaggggaaagcccgcagtgggagatatgctccgtaagtctagcgatagcaagcctggcgtatcaagtaagaaattcgatgaccgtcccaaaggcaagcacgctagcgcagttgccagcaaagaagactcttggacactgtttaagcctcctcctgtctttcctgtggacaacagcagcgcgaaaattgttccgaagatttcctacgcatccaaggtcaaagaaaatctgaataaaactatccagaatagtagtgtgagccctacatctagctcctcctctagcagcagcaccggggagacacagacacaatcctcatctagactcagtcaggtgccaatgtctgcgttgaagagcgtaacgtcggccaatttctcgaacggtccagtgctcgccggaaccgatggcaacgtctaccctccaggcggacagccgctcctgacaacggctgcaaataccctgacacctatctcttccggaactgattccgttctacaggacatgtctctgacatccgcagctgtcgagcagattaaaacttccctgtttatatatcccagcaacatgcaaacaatgctgctgagtactgctcaagtagacctgccctctcagacagaccagcagaatctgggcgacatcttccagaatcagtggggtctaagctttattaatgagccctccgctgggcctgagacagtgaccgggaagtcaagcgagcacaaagtcatggaagtcactttccaaggcgaatatccggcaactcttgtcagccagggggctgaaatcatcccttcaggaaccgagcaccctgtctttcccaaagcttacgaactcgagaagaggacaagtccccaggtattaggcagcatccttaagagcggtaccacgagtgagtctggcgctctgagtctggaaccgtcacatatcggggatctgcagaaggctgacaccagcagtcagggtgccctggtgttcctttctaaagattacgagatagaaagtcagaaccctctagcctcgcccacgaatactctgcttggatcggctaaagaacagcgctatcagagaggactggaaaggaatgatagttggggatcattcgatctccgggcagccattgtgtaccatacaaaggaaatggaatcaatctggaacttgcagaagcaggacccaaagcgaattattacttacaatgaggcgatggactcccccgatcaatag

SEQ ID NO: 205698 - DNA, 2088 bp, Artificial Sequence
  derived and/or modified sequence
atggaggagaagcccggccagccccagccccagcaccaccacagccaccaccacccccaccaccacccccagcagcagcagcagcagccccaccaccaccaccactactacttctacaaccacagccacaaccaccaccaccaccaccaccaccagcagccccaccagtacctgcagcacggcgccgagggcagccccaaggcccagcccaagcccctgaagcacgagcagaagcacaccctgcagcagcaccaggagacccccaagaagaagaccggctacggcgagctgaacggcaacgccggcgagagagagatcagcctgaagaacctgagcagcgacgaggccaccaaccccatcagcagagtgctgaacggcaaccagcaggtggtggacaccagcctgaagcagaccgtgaaggccaacaccttcggcaaggccggcatcaagaccaagaacttcatccagaagaacagcatggacaagaagaacggcaagagctacgagaacaagagcggcgagaaccagagcgtggacaagagcgacaccatccccatccccaacggcgtggtgaccaacaacagcggctacatcaccaacggctacatgggcaagggcgccgacaacgacggcagcggcagcgagagcggctacaccacccccaagaagagaaaggccagaagaaacagcgccaagggctgcgagaacctgaacatcgtgcaggacaagatcatgcagcaggagaccagcgtgcccaccctgaagcagggcctggagaccttcaagcccgactacagcgagcagaagggcaacagagtggacggcagcaagcccatctggaagtacgagaccggccccggcggcaccagcagaggcaagcccgccgtgggcgacatgctgagaaagagcagcgacagcaagcccggcgtgagcagcaagaagttcgacgacagacccaagggcaagcacgccagcgccgtggccagcaaggaggacagctggaccctgttcaagcccccccccgtgttccccgtggacaacagcagcgccaagatcgtgcccaagatcagctacgccagcaaggtgaaggagaacctgaacaagaccatccagaacagcagcgtgagccccaccagcagcagcagcagcagcagcagcaccggcgagacccagacccagagcagcagcagactgagccaggtgcccatgagcgccctgaagagcgtgaccagcgccaacttcagcaacggccccgtgctggccggcaccgacggcaacgtgtacccccccggcggccagcccctgctgaccaccgccgccaacaccctgacccccatcagcagcggcaccgacagcgtgctgcaggacatgagcctgaccagcgccgccgtggagcagatcaagaccagcctgttcatctaccccagcaacatgcagaccatgctgctgagcaccgcccaggtggacctgcccagccagaccgaccagcagaacctgggcgacatcttccagaaccagtggggcctgagcttcatcaacgagcccagcgccggccccgagaccgtgaccggcaagagcagcgagcacaaggtgatggaggtgaccttccagggcgagtaccccgccaccctggtgagccagggcgccgagatcatccccagcggcaccgagcaccccgtgttccccaaggcctacgagctggagaagagaaccagcccccaggtgctgggcagcatcctgaagagcggcaccaccagcgagagcggcgccctgagcctggagcccagccacatcggcgacctgcagaaggccgacaccagcagccagggcgccctggtgttcctgagcaaggactacgagatcgagagccagaaccccctggccagccccaccaacaccctgctgggcagcgccaaggagcagagataccagagaggcctggagagaaacgacagctggggcagcttcgacctgagagccgccatcgtgtaccacaccaaggagatggagagcatctggaacctgcagaagcaggaccccaagagaatcatcacctacaacgaggccatggacagccccgaccagtag

SEQ ID NO: 205699 - protein, 1006 aa, Artificial Sequence
  derived and/or modified sequence
MSNSRNNRVMVEGVGARVVRGPDWKWGKQDGGEGHVGTVRSFESPEEVVVVWDNGTAANYRCSGAYDLRILDSAPTGIKHDGTMCDTCRQQPIIGIRWKCAECTNYDLCTVCYHGDKHHLRHRFYRITTPGSERVLLESRRKSKKITARGIFAGARVVRGVDWQWEDQDGGNGRRGKVTEIQDWSASSPHSAAYVLWDNGAKNLYRVGFEGMSDLKCVQDAKGGSFYRDHCPVLGEQNGNRNPGGLQIGDLVNIDLDLEIVQSLQHGHGGWTDGMFETLTTTGTVCGIDEDHDIVVQYPSGNRWTFNPAVLTKANIVRSGDAAQGAEGGTSQFQVGDLVQVCYDLERIKLLQRGHGEWAEAMLPTLGKVGRVQQIYSDSDLKVEVCGTSWTYNPAAVSKVASAGSAISNASGERLSQLLKKLFETQESGDLNEELVKAAANGDVAKVEDLLKRPDVDVNGQCAGHTAMQAASQNGHVDILKLLLKQNVDVEAEDKDGDRAVHHAAFGDEGAVIEVLHRGSADLNARNKRRQTPLHIAVNKGHLQVVKTLLDFGCHPSLQDSEGDTPLHDAISKKRDDILAVLLEAGADVTITNNNGFNALHHAALRGNPSAMRVLLSKLPRPWIVDEKKDDGYTALHLAALNNHVEVAELLVHQGNANLDIQNVNQQTALHLAVERQHTQIVRLLVRAGAKLDIQDKDGDTPLHEALRHHTLSQLRQLQDMQDVGKVDAAWEPSKNTLIMGLGTQGAEKKSAASIACFLAANGADLSIRNKKGQSPLDLCPDPNLCKALAKCHKEKVSGQVGSRSPSMISNDSETLEECMVCSDMKRDTLFGPCGHIATCSLCSPRVKKCLICKEQVQSRTKIEECVVCSDKKAAVLFQPCGHMCACENCANLMKKCVQCRAVVERRVPFIMCCGGKSSEDATDDISSGNIPVLQKDKDNTNVNADVQKLQQQLQDIKEQTMCPVCLDRLKNMIFLCGHGTCQLCGDRMSECPICRKAIERRILLY

SEQ ID NO: 205700 - DNA, 3021 bp, Artificial Sequence
  derived and/or modified sequence
atgagcaacagcagaaacaacagagtgatggtggagggcgtgggcgccagagtggtgagaggccccgactggaagtggggcaagcaggacggcggcgagggccacgtgggcaccgtgagaagcttcgagagccccgaggaggtggtggtggtgtgggacaacggcaccgccgccaactacagatgcagcggcgcctacgacctgagaatcctggacagcgcccccaccggcatcaagcacgacggcaccatgtgcgacacctgcagacagcagcccatcatcggcatcagatggaagtgcgccgagtgcaccaactacgacctgtgcaccgtgtgctaccacggcgacaagcaccacctgagacacagattctacagaatcaccacccccggcagcgagagagtgctgctggagagcagaagaaagagcaagaagatcaccgccagaggcatcttcgccggcgccagagtggtgagaggcgtggactggcagtgggaggaccaggacggcggcaacggcagaagaggcaaggtgaccgagatccaggactggagcgccagcagcccccacagcgccgcctacgtgctgtgggacaacggcgccaagaacctgtacagagtgggcttcgagggcatgagcgacctgaagtgcgtgcaggacgccaagggcggcagcttctacagagaccactgccccgtgctgggcgagcagaacggcaacagaaaccccggcggcctgcagatcggcgacctggtgaacatcgacctggacctggagatcgtgcagagcctgcagcacggccacggcggctggaccgacggcatgttcgagaccctgaccaccaccggcaccgtgtgcggcatcgacgaggaccacgacatcgtggtgcagtaccccagcggcaacagatggaccttcaaccccgccgtgctgaccaaggccaacatcgtgagaagcggcgacgccgcccagggcgccgagggcggcaccagccagttccaggtgggcgacctggtgcaggtgtgctacgacctggagagaatcaagctgctgcagagaggccacggcgagtgggccgaggccatgctgcccaccctgggcaaggtgggcagagtgcagcagatctacagcgacagcgacctgaaggtggaggtgtgcggcaccagctggacctacaaccccgccgccgtgagcaaggtggccagcgccggcagcgccatcagcaacgccagcggcgagagactgagccagctgctgaagaagctgttcgagacccaggagagcggcgacctgaacgaggagctggtgaaggccgccgccaacggcgacgtggccaaggtggaggacctgctgaagagacccgacgtggacgtgaacggccagtgcgccggccacaccgccatgcaggccgccagccagaacggccacgtggacatcctgaagctgctgctgaagcagaacgtggacgtggaggccgaggacaaggacggcgacagagccgtgcaccacgccgccttcggcgacgagggcgccgtgatcgaggtgctgcacagaggcagcgccgacctgaacgccagaaacaagagaagacagacccccctgcacatcgccgtgaacaagggccacctgcaggtggtgaagaccctgctggacttcggctgccaccccagcctgcaggacagcgagggcgacacccccctgcacgacgccatcagcaagaagagagacgacatcctggccgtgctgctggaggccggcgccgacgtgaccatcaccaacaacaacggcttcaacgccctgcaccacgccgccctgagaggcaaccccagcgccatgagagtgctgctgagcaagctgcccagaccctggatcgtggacgagaagaaggacgacggctacaccgccctgcacctggccgccctgaacaaccacgtggaggtggccgagctgctggtgcaccagggcaacgccaacctggacatccagaacgtgaaccagcagaccgccctgcacctggccgtggagagacagcacacccagatcgtgagactgctggtgagagccggcgccaagctggacatccaggacaaggacggcgacacccccctgcacgaggccctgagacaccacaccctgagccagctgagacagctgcaggacatgcaggacgtgggcaaggtggacgccgcctgggagcccagcaagaacaccctgatcatgggcctgggcacccagggcgccgagaagaagagcgccgccagcatcgcctgcttcctggccgccaacggcgccgacctgagcatcagaaacaagaagggccagagccccctggacctgtgccccgaccccaacctgtgcaaggccctggccaagtgccacaaggagaaggtgagcggccaggtgggcagcagaagccccagcatgatcagcaacgacagcgagaccctggaggagtgcatggtgtgcagcgacatgaagagagacaccctgttcggcccctgcggccacatcgccacctgcagcctgtgcagccccagagtgaagaagtgcctgatctgcaaggagcaggtgcagagcagaaccaagatcgaggagtgcgtggtgtgcagcgacaagaaggccgccgtgctgttccagccctgcggccacatgtgcgcctgcgagaactgcgccaacctgatgaagaagtgcgtgcagtgcagagccgtggtggagagaagagtgcccttcatcatgtgctgcggcggcaagagcagcgaggacgccaccgacgacatcagcagcggcaacatccccgtgctgcagaaggacaaggacaacaccaacgtgaacgccgacgtgcagaagctgcagcagcagctgcaggacatcaaggagcagaccatgtgccccgtgtgcctggacagactgaagaacatgatcttcctgtgcggccacggcacctgccagctgtgcggcgacagaatgagcgagtgccccatctgcagaaaggccatcgagagaagaatcctgctgtactag

SEQ ID NO: 205701 - DNA, 3021 bp, Artificial Sequence
  derived and/or modified sequence
atgtcaaattcaagaaataatcgagtcatggttgaaggagtaggggcccgcgttgttaggggccctgactggaagtgggggaaacaggacggaggggaaggacacgtgggcactgtgagaagctttgagtcacctgaggaggtcgtggtggtttgggataacggaactgccgcaaattatcgctgctctggggcctatgatctgcggattctggactccgctccaacagggattaaacatgacggcaccatgtgtgatacttgtagacaacagccaatcattggcatacgatggaaatgtgccgagtgcacaaattatgatttgtgtacagtctgctatcatggcgacaagcaccacctcagacataggttttacagaatcaccactccagggtcggagcgggtgctgctcgaatccaggaggaagagtaaaaaaattaccgcccggggcatcttcgcaggcgcccgggtggtacgaggagttgattggcagtgggaggaccaggatggcggtaatggtcgcagaggcaaagttaccgaaattcaggattggtctgcttcctcgccacacagcgcagcctacgtcttatgggacaatggagcaaagaatttgtatcgggtgggcttcgaagggatgagcgacctcaagtgcgtccaagatgcaaagggcggctccttctatagggaccactgtccggtactgggcgaacaaaacggcaatcggaatcccggtggcctccagattggcgatctggtcaatatcgatctggatctggaaattgttcagagtctccagcacggtcacgggggctggacggacggtatgttcgaaactctcactaccactggaaccgtctgcggaatcgatgaggaccacgacatcgtcgtgcagtatcctagcggcaatagatggactttcaacccagccgtccttacgaaagcaaatatagtgcgtagtggcgacgccgcgcaaggcgccgagggcggtacgagtcagttccaggtgggagacctcgtgcaagtctgctacgacctcgagaggattaagctcctgcagagaggccacggggaatgggccgaggctatgctgcccacccttggcaaggttggccgggtgcagcaaatttattccgactcagatctgaaggtggaggtctgtggaacctcctggacttataaccccgccgccgtgagtaaggtcgcttcggccgggtccgcaatatcaaatgcatccggggaacgattgtcacagcttcttaaaaaactgtttgagactcaggaatcaggggatctgaacgaggaactggtgaaggcagccgcgaatggggatgtggccaaagtggaagacctgttaaagaggcccgacgtggatgtgaacggacaatgtgccgggcacactgctatgcaggccgctagccagaacggccatgtggacatcctgaagctgctacttaaacagaatgtagacgtagaggcagaagacaaggacggtgatcgtgcagtgcatcatgctgcatttggcgatgagggagccgtgatagaagttctacataggggctccgccgatctcaatgcccgcaataagaggagacagacgccactgcacatagccgtcaacaagggccatctgcaggtggtaaagacattgctggacttcgggtgccatccttccctccaggactctgagggagacacacctctgcatgacgccatcagtaaaaagcgagatgacattctggccgtgctgctagaagccggtgccgacgtaactatcacgaacaataatgggtttaatgctctgcaccacgccgccctaagaggaaaccccagtgcaatgagagttctcttgtcaaaactacctaggccttggatcgttgacgagaagaaggacgacgggtacactgcattgcacctagcggcactgaacaaccatgtcgaggtcgctgagttgctcgttcaccaaggcaacgcaaatctggacatacagaatgtcaaccaacaaacagctctccaccttgcagtggagcgtcagcacacccaaattgtgaggctgctcgtgcgcgctggggccaagcttgacatccaggataaagacggggatacccccctccacgaggctcttcggcaccacacccttagccagctgagacaacttcaggacatgcaagatgtaggcaaggtagacgccgcctgggaaccaagtaaaaacacactgataatggggttaggaacacaaggggcggagaagaagtcagccgccagcatcgcatgcttcctcgctgccaacggtgctgacctgtccatcagaaacaagaagggtcagagccctctggatttgtgccccgatcccaacctgtgtaaagcactagccaagtgtcataaggaaaaggtttctgggcaagtggggtcacgatcgcccagtatgatttcaaatgactccgagactttagaggagtgtatggtttgttctgacatgaaaagagacaccctctttggcccgtgcgggcacattgctacatgttctttatgctccccccgggtcaagaaatgtttgatctgcaaggaacaagtgcaaagcaggactaaaatagaagagtgtgttgtctgttcagacaagaaagccgccgttttatttcagccatgcggccacatgtgcgcctgcgagaattgcgctaatttgatgaagaaatgtgtccagtgccgcgcagttgtggaacgccgggttccattcattatgtgttgtggcggaaaaagttctgaagacgccacagacgatataagctccggtaatattcctgttcttcagaaagataaagacaacacaaacgtgaatgcagatgtgcagaagcttcagcagcaactgcaggacattaaggaacagactatgtgcccggtgtgcctggatcgtctgaaaaacatgatcttcctctgtggacacggcacctgtcagctgtgtggtgataggatgagtgagtgccctatctgcaggaaggccatcgaacgcaggatactgctgtattag

SEQ ID NO: 205702 - DNA, 3021 bp, Artificial Sequence
  derived and/or modified sequence
atgagcaacagcaggaacaacagagtgatggtggagggcgtgggcgcccgggtggtgcggggccctgactggaagtggggcaagcaggacggcggggagggccacgtgggcaccgtgcgcagctttgagagccctgaggaggtggtggtggtgtgggacaatggaacagctgccaactaccgctgcagcggggcctatgacctgcgcatcctggacagcgcccccaccggcatcaagcatgatggcaccatgtgtgacacctgccggcagcagcccatcatcggcatccgctggaagtgtgccgagtgcaccaactatgacctgtgcaccgtgtgctaccacggggacaagcaccacctgcggcaccgcttctaccgcatcaccaccccaggcagcgagcgggtgctgctggagagcaggaggaagagcaagaagatcacagcccggggcatctttgctggggcccgggtggtgcggggcgtggactggcagtgggaggaccaggacggcggcaatggccggcggggcaaggtgacagagatccaggactggagcgccagcagcccccacagcgctgcctacgtgctgtgggacaatggagccaagaacctgtacagagtgggctttgagggcatgtctgacctgaagtgtgtgcaggatgccaagggcggcagcttctacagagaccactgccctgtgctgggggagcagaatggaaacagaaatcctgggggcctgcagatcggggacctggtgaacatcgacctggacctggagatcgtgcagagcctgcagcacggccacggcggctggacagatggcatgtttgagaccctgaccaccaccggcaccgtgtgtggcattgatgaggaccatgacatcgtggtgcagtaccccagcggcaaccgctggaccttcaacccagctgtgctgaccaaggccaacatcgtgcgctctggagatgctgcccagggcgctgagggcggcaccagccagttccaggtgggggacctggtgcaggtgtgctatgacctggagcgcatcaagctgctgcagaggggccatggagagtgggccgaggccatgctgcccaccctgggcaaggtgggccgggtgcagcagatctacagcgacagcgacctgaaggtggaggtgtgtggcacctcctggacctacaacccagctgctgtgtccaaggtggccagcgctggcagcgccatcagcaatgccagcggggagcggctgagccagctgctgaagaagctgtttgagacccaggagagcggggacctgaatgaggagctggtgaaggctgctgccaatggagatgtggccaaggtggaggacctgctgaagaggccagatgtggatgtgaatggccagtgtgccggccacacagccatgcaggccgccagccagaatggccacgtggacatcctgaagctgctgctgaagcagaatgtggatgtggaggccgaggacaaggatggagacagagctgtgcaccacgccgcctttggagatgagggcgctgtgattgaggtgctgcaccggggcagcgctgacctgaatgccaggaacaagaggcggcagacccccctgcacatcgctgtgaacaagggccacctgcaggtggtgaagaccctgctggactttggctgccaccccagcctgcaggacagcgagggggacacccccctgcatgatgccatcagcaagaagagagatgacatcctggccgtgctgctggaggccggggctgatgtgaccatcaccaacaacaacggcttcaatgccctgcaccacgccgccctgcggggcaaccccagcgccatgagggtgctgctgagcaagctgccccggccctggatcgtggatgagaagaaggatgatggctacacagccctgcacctggccgccctgaacaaccacgtggaggtggccgagctgctggtgcaccagggcaatgccaacctggacatccagaatgtgaaccagcagacagccctgcacctggccgtggagcggcagcacacccagatcgtgcggctgctggtgcgggccggggccaagctggacatccaggacaaggatggagacacccccctgcacgaggccctgcggcaccacaccctgagccagctgcggcagctgcaggacatgcaggatgtgggcaaggtggatgctgcctgggagcccagcaagaacaccctcatcatgggcctgggcacccagggcgctgagaagaagtctgctgccagcatcgcctgcttcctggccgccaacggggctgacctgagcatccggaacaagaagggccagagccccctggacctgtgcccagaccccaacctgtgcaaggccctggccaagtgccacaaggagaaggtgtctggccaggtgggcagccgcagccccagcatgatcagcaatgattctgagaccctggaggagtgcatggtgtgcagcgacatgaagagggacaccctgtttggcccctgtggccacatcgccacctgcagcctgtgcagcccccgggtgaagaagtgcctgatctgcaaggagcaggtgcagagcaggaccaagattgaagaatgtgtggtgtgcagcgacaagaaggctgctgtgctcttccagccctgtggccacatgtgtgcctgtgagaactgtgccaacctgatgaagaagtgtgtgcagtgcagagctgtggtggagcggcgggtgcccttcatcatgtgctgcggcggcaagagcagtgaagatgccacagatgacatcagcagcggcaacatccctgtgctgcagaaggacaaggacaacaccaacgtgaatgctgatgtgcagaagctgcagcagcagctgcaggacatcaaggagcagaccatgtgccctgtgtgcctggaccggctgaagaacatgatcttcctgtgtggccacggcacctgccagctgtgtggggacaggatgtctgaatgtcccatctgcaggaaggccattgaaagacgcatcctgctgtactag

SEQ ID NO: 205703 - DNA, 9576 bp, Artificial Sequence
  derived and/or modified sequence
tgcccgctctccgccgccgcctccgagcagccgcgggccgccctccactccgagcggggggcgcggcggcgacagctgggcagcggctttgggctccgcggggaccgcgccgccgcccccgtgagttattctcacgtcccccggggctcgctgccgcccccgccgacgcctagagtccggcccgggcccaactccctcacgggccccccggcggcagcggcggcggcggcggcggcagcggcggagcccaccgcccgggccccgatgagtaactcccggaataaccgggtgatggtggaaggggttggcgctcgggtagtgcgcggcccggactggaagtgggggaagcaggacggcggcgagggccatgtgggcaccgtccggagcttcgagagccccgaggaggtggtggtagtgtgggacaacggcacagctgccaactaccgctgctccggggcttacgacctccgcatcctggacagcgcgcccaccggcatcaagcatgatggaaccatgtgtgatacctgccgccagcaaccaatcattggcattcgatggaagtgtgcagagtgtacaaattatgatttgtgcacagtgtgttatcatggagataaacatcatttaagacatcgcttttaccgaattactacaccgggaagtgagagggttctgttagagtctcgtaggaaatctaagaagattacagccagaggaatctttgcaggtgccagagtggtgcgaggagtggactggcagtgggaagatcaagatggaggaaatggacgtaggggaaaggtaacagaaatccaggactggagtgcatcaagcccacatagcgcagcatatgtcctctgggataatggtgctaagaacctttacagagttggctttgagggcatgtctgatctgaaatgtgtccaggatgccaagggaggttctttctacagagatcactgccctgtgctaggtgagcagaatggcaacaggaatcctggtggattgcagattggtgacctggtaaatatagatctcgacctcgaaattgtacagtctttgcagcatggtcatggaggatggactgatggaatgtttgagactttaactacaactggaactgtttgtggcattgatgaagatcatgacattgtagtacagtatccaagtggcaataggtggaccttcaatcctgctgttctcactaaagcgaacattgtccgaagtggagatgctgctcagggtgcagaaggaggcacctcgcagtttcaagtgggtgatcttgtacaagtttgttatgacctggaacgaattaaacttctacaaagaggacatggagaatgggctgaagcgatgcttccaactttaggtaaagttggccgagtacaacagatttattcagacagtgatttaaaggtggaagtttgtggaacatcttggacatacaatccagcagcagtttccaaggtggcatctgcaggatcagccattagcaatgcatctggtgaaagactctcacaactcctgaagaaattatttgaaacccaagaatctggtgacctcaatgaagaattagttaaggctgctgccaatggagatgttgctaaagtggaagatttgcttaaaagaccagatgtggatgtaaatgggcaatgtgctggccacacagctatgcaagctgctagtcagaatggacatgttgacattttgaagttacttttgaagcaaaacgtggatgtcgaagcagaggataaagatggtgatagagcagttcaccatgcagcttttggagatgaaggcgctgttatagaagtactacatcgaggtagtgctgatttgaatgctcgaaacaagcgccgacagacaccacttcatattgctgtcaataaaggtcatcttcaagttgtgaagactttattggactttggctgtcatcccagtctccaggattctgaaggtgatacccctcttcatgatgcaataagtaagaaacgtgatgatatcctagcagttcttttggaagctggagcagatgttaccatcacaaacaataatggatttaatgctctgcatcatgctgcactaaggggaaatcccagtgcaatgcgtgttttactatctaaattaccaagaccatggattgtggatgagaagaaagatgatggttatactgccttacatctggctgcccttaataatcacgtagaagtggctgaactgttggtacatcagggtaatgcaaacctggatatccagaatgtgaaccaacaaactgccctacaccttgctgttgaacgacagcatacccagattgttaggcttttggtccgtgcaggtgccaagcttgatattcaggataaggatggggatactcctttgcatgaagctctaaggcatcacactttgtctcagctacgtcagctccaagatatgcaagatgtggggaaggtggatgctgcctgggagccatccaaaaacacgttaataatgggacttggtacccagggggcagagaagaagagtgcagcatctattgcctgtttcttggcagccaatggtgctgacctgagcattcgaaataagaagggtcaatcgccacttgatctctgtcctgatccgaatctctgcaaagcactggcaaagtgtcataaggaaaaagtcagtggtcaagtgggttctcggagtccttctatgattagtaatgattctgaaaccttagaagagtgtatggtgtgctcagatatgaagagagatactctttttggtccatgtggacatattgctacctgttctttatgttctccacgtgtcaagaaatgcctcatctgtaaagaacaggttcaatccaggacaaagattgaagaatgtgtggtatgctctgacaagaaagcagctgttctttttcaaccctgtggccacatgtgtgcttgtgagaactgtgctaacctgatgaaaaagtgtgtgcagtgtcgagcagtagttgaacgaagagtgcctttcattatgtgctgtggagggaaaagttcagaagatgccactgatgatatctcaagtgggaatattccagtattacaaaaggacaaggataataccaatgtcaatgcagatgtgcaaaagttgcagcaacagttacaagacattaaagagcagacaatgtgccctgtgtgtctagatcgtctgaagaatatgattttcctttgtggtcacggaacctgtcaactctgtggagaccgcatgagtgaatgtcctatctgtcgcaaggctattgaacgaaggattcttttgtattaactaagacacatggtgtattttgttagctaatgtatctagtcatgagatcttaataggcttttgatctagttggaagttctgatgagttaatttctaatatcatagtttctttactagagtataattgggctgtaaatgtaccagaacaaaaaaccctacaaaatggtgttggaaattgtgttttttgtttttgttttaaatttgaaacatcaaattcatgtaactcataggataatttacctttggcttctaagaggaaagtcctttaaggatatccttttttaaaaaattgcatttttctcttataatttgtaaatttgttggatctcaaaagacataattctttgtgatcagttatccttcatttcatcgtggttttacacagtgagttgataacaggttctctgagaagtcatgcatcaaataaaagaggcaggtcaaacaattatgtcacatggtaaattataaaatgacagtacaagttccagatagttaagggaataccgaagggatgattctttttttaagataacaggaagttacccacatgtttgtttctgaattcttagagtaaatggaagcatagaatgagggaataatgactttgcatttctcttgttttctagattcaaaaggaacattgtttaacttgaatcagattaccagtttcaaggtgactgatagacaagaaaaggaaaaataagcaataatagtgggcaactgaagagaaaaaaaaaacgagtatctattaactggccactaacagttgcctttcttacattaatttatacactattttgttcagccagtgtttttaaaaaaaatctatgaaaagtgtacttccggttttctgtgattacttatctgggcttgatctgaccagtgaaatgacattgccctatttggacctctgaggttctatttagctttgcagatgtacatagtatcccagtgatctgcaaaattaatgccttttccaagaaaaaatcttttcttctctgtatcagttaattctgacagtgttagtgattctgtcttcattataggccttatttccattatctctttctttatagtattttttgttataaagaaaacagtctttctgtgtatacctacggatgagggtattatttaaactgccaacaatatccaagacatggtcaataacctaattataaatactttagaaagagtgaccaggacatgtatagaaatgtctgcttacctgtagactttaaaaacaaacaaaatttttggagcatttaatcattttttttctccttttatctcctttgtaatcttattgtctcctgagtaaatatacacataaatgtttggggattcattgctgctagattatatcaggtgtttacatagtgtctactatatgctgttgataagctttttcctaaaaatagttatcctcttttgtagtttttttccctcctttaaatctggctagcttttcttacttcagtttttatagaacaccaactaaatttgaaagtatgaagtctctagccctcttacactgtttctggctgtttaatccttgctgcctttgcaagtcctggtgaaagcaatggggagctttgctggctggttttgtagtctcaacaattccatgtctgtgtttagctgagtaactgctatcatttagaacagtaaaatttttatagatttcaaatttgaaaattcatgtacactcagttatctaataaggggccaccgacgctgtttttaaaactattttgaagttataaaaaggtagaacatctgactgatgatgttcacataaagagacagacagactatcatgttgcagacatgaaaacagcatgtcaggtttttcctttccttccatgccatgggctacccatctcttcccactagatcacctggtgaggagggagcacctggctgactcatgcagagtttggccaatcagagaattgtgtggtctccagctctactttccttaaacaaatcctttctgttttctgagctgcagtgctaaaacagatccctaaaaggtaatagcatcttccagactagtttaattatttcctttataagaatatgacataaatttttattatagaaataatgtcattataattttagtgctagtacttgtgggttttctgtatttgtatcaccttgaaatttgttccatgaatagaaaatacttctttattcatgttttcaatcacttagaattattttaaatttattttgggtttgtgagagataataagattaagaacttcatcatttcagtgactttcctccaactctctgaatctgctacctcttattatatgtcccttagcagtacttttccagttaggttcgttaccctgctcattagctaaacctctttatcttgtgcctcaaaagagcttttacttttcttagaaacatttataaaaaagaaaaaaactgacacgcattcattcaaaaaagtatttattgggctttagggattagatacacaacagtggaaaaatggcatcttagcacactcagaatttattgtgcagcagttgtgtattttaaggaatctgtagttaaaaggaagagatccaaaggtcctgataacatttcctaacgtttcagaagagttgtcattgagtagtgtttggatttcctctctgtatccctcaccctaccattttctcctttattcttctaagattgttagcgttgttactcaaaacatacacatacaacataccagatggtgctgttctaatggtatttgttcacgtaatttaacgttcttactgcttatactatatacatatttaattttgttgggagcaagaaggttttcaagaaaagataattttgtattagtgtaggaatatattagacaaatgtttagttggtcaaattatgcataagatatttgtaactttaaacattgcaaattgaccagctagctatggaagcataaaattaattgataattaatgttggaaatacatttctaaaatttatatttttatggtgttagcctgtaagagcattttagcatattgaaatgcatgctgcttaagatgtgtctggttcaaatatcaaaacttgctgggtcatttttacatagtagaaacatactgtctatgtgttgcccaattgctgtttgtccactctgaattctggaccctttttggactaagaattagttaaattcatgaactaagagaattagagatggggtagagtaggatcaggacagtggggttacaacagataggaaaggaaagtcagcatttgagtgtagagaaaaaaagaggatcatacagatgtcatcaaattataggctttaatacaggttgctttttttaatccaaaaggaaaagcacttatcctatcagaatgtctaccatgttttatagtaataatttgtgtaaaaaattgaatttttgaatagttttttgtattttttgtgatgaaaaactcataacataaaatttaccatattaactgtttctaaagaatacagttcagccatgtgaagtacatttacactgttgtgaagcagatctccagaactttttcatcttgcaaaactgaaactccatacccattaaacaactcccctttttgttttctcctcagtggaatagaattttgactccatataaatcaagaaacacctaaattctttagttgtttgtgtttgcaagatctaaggtcatggtaaacattaagttcttaaaatttttgggagggacagtgcacctctcctctgaattgttagcaattaaattgagtaggttttaaatgtctattcattggaagggtttgttatttcattttgagccagaggggagaggcacattttaaatatcagaattagattagctttgagtttgtacaattgggaacataatagattttcataaattatgtgtgccttgttggaagtgtcaactgtctttatgtctgcttgtaaaagtttcaaaatatgttttccctcaaaaaggcaacgttacttcatttgcttgaatattatgataggaatgcttactgatattacttgatagtcatatatagcctaggaaatttaacatatatataactatagcagtattaataatgatagttgtacttctttaaaacattaaatttgaggaaactttaatgctgtctcgtgtacattgctttactacagtgagggggaatatcctttagattgagcctcaatttactggttagtagtatgtgaaactctggtataaaaacgtaaactagacagtagagccgatgaattaaaattgtaaattgctacattggcattttctacctccttttctgtcagagtattactttttccagcatttattcttatttgtgagtaaagaggaaatgggaacctgaggttaaaattgacatttttgtttcattgagaatttaagcagtaggtacaggagaagtgacttgtcacattaatttggtgcctaaatctgtaactacaagttgtgatcgacatgtacaaaatgtctaagaaaggtcatatgctgaatattttacttttcctgtatagtctgcatgatttgtttcataaacccagcttatttcctccaaaaagcaaaatggtcctgtaatttttaaagtaaaataaacgtgccattttgtctgcaatctataatttcaggaagttattgaaagttctgactcagggctttttaacagttcaagcaattgtcagttatattttggaaactccatctgtgtaattctccagtgccttgaaagaattattaacttggcaacactattaaaactttataaaagatggtctttagtgcacgtgtatcattatatacacgttttaaagtcatattgcttagcttgttaataatgattctgcatgtgtgctgggtttgggtaattctttaaaggaagttttctagatttgcacttgatgtttgttttttaaaaactgattatttatggccgtgacactgttaccagaaaagtaattctaattaagttattatgcaaagtcatctataagtagcatctgggaagaggagatcgaggccacagtttgctattttagtatgaaaggaggatctgtttgggaaacatagattgtcttcccctcaaatgaggggaaaaaaaaaagaccctttgttcaaatggattctgttgtaaaaaattatttttaaaggaaatcacaaattgtatgtcattcttaatgctagtcttatagaataaatccataaaattgtttttatgttcagtatgtttatgtcattctaaatgcagcaaattcaatgatagcagttcaattgactcatagcagtgttttgtattttttctaattctttagctttcaatattggattaaagtcttgtttgtgaatatagtttccgtatggcaaatgatttcttgcttattagcttttgttaaagaatgcttagtaagagctaagcttttaaaagtaatgcaaacatttatcgttaataaaacctatggtgtaatatcatataatgcttttctttgatctttggagaattattcttttatagtagtatacatgaattttgatttttaaagcatttaaaaacaaatctcaatacattaaaaaacctgttattgttaaaaaggaaattaccatgcctttaagaaacaaggatgtacatcttcaattcagcataagtgtccacatctagaaggctctcattgcagttgtttacagttaaggtacctctatctaaagggccaaagaagcatttcatattttaacacctcacattctttcaggattaagacatatgaaaatagtctgaataggataaatttgataggaagtaacttaaccagtctggaagattcagctttttctataaaaagcttattcctcttcacaactcagatgtagatttcattttcaagaggtagatattttaaagcaatgatctatttgggttttagttttatgagtaaatcattaattgtatggtttgggggttattttattttccatgttaatataagcacttatttctgaagttattgagaggtcatctagctccagttcaaaagattatgtatatctgatgtttaagaggaaaaacatctgaaaaaatatcttttgtttatttgaaaaaagcatatatattccaactttaaaattgtgaatttattttgagtaacctctaattaactgtatttttttgtttctgttgctgtatagttagaaatttcatggcaatattttttactaaattgaaactataggttttaaaaataaagacattttagaaaatttg

SEQ ID NO: 205704 - DNA, 3021 bp, Artificial Sequence
  derived and/or modified sequence
atgagcaacagccggaacaaccgggtgatggtggagggcgtgggcgcccgggtcgtgaggggaccggattggaaatgggggaaacaggacggcggcgaaggacatgtcggaactgtcaggagcttcgaaagtcccgaagaggtagtcgtggtgtgggataatgggaccgccgccaactaccgatgttcaggggcctacgacctgcgcatcctggactccgcaccaacaggcattaagcacgatggtaccatgtgcgatacttgcaggcaacaacccatcattggcatccgttggaagtgcgccgaatgtaccaattatgatctctgcaccgtctgctaccatggggacaagcatcacctccgacatcgcttttatcggattacaacacccggctctgagcgcgttctgctggaatcccggagaaagtcaaaaaagataacggcccgcgggatcttcgctggagcccgagtggtgcggggcgtagactggcagtgggaggatcaagacggggggaacggccgacgcggcaaagttaccgaaatccaggattggagtgcatcttcaccacacagtgccgcctatgtgctgtgggataacggcgccaagaatctctacagagtcgggttcgaaggtatgtctgatctgaagtgcgttcaggatgcaaagggtggcagcttttacagagaccattgtcccgtgctcggagagcagaacggcaacaggaatccagggggactccagatcggcgatctggtgaacatcgatcttgatttggaaattgtgcaatctctgcaacacggccacggcggctggactgacggaatgttcgaaactctgacaaccacaggaacggtctgtggaatcgatgaggaccacgacatcgtggtgcagtatccttccggcaatcgatggacatttaaccccgccgttttaaccaaggccaatattgtccgaagcggtgacgcagcgcagggcgccgaaggcgggacaagccagtttcaggttggcgaccttgtccaggtatgttatgaccttgagcggatcaaattactccagcgcggccacggcgaatgggccgaagccatgcttccaactctcggcaaagtaggtcgggtgcagcaaatctatagcgattccgatcttaaagtggaggtctgcggcactagctggacttataaccccgctgccgtgtccaaggttgcgtccgccggtagcgccataagcaacgctagcggcgagcgccttagccagctgttgaagaaactttttgagacacaggaatctggcgacttgaatgaggagctggtgaaggccgctgcaaatggcgatgtggcaaaggttgaggacctgcttaagagaccagatgtggatgtgaacggacaatgcgccggccacacggcgatgcaggccgcttcacagaatgggcacgttgacatcttgaaactgttgctgaagcagaacgtcgatgtcgaagctgaggataaagacggggaccgggcagtgcatcatgctgcttttggcgatgagggtgccgtgatagaagtcctgcacagaggctctgcggacctgaacgcccgaaacaaaaggcgccagacacccctacacatcgcagtcaacaaagggcatctccaggttgtgaaaacccttttggatttcggatgccatccctccctgcaagatagcgagggagacaccccgttgcacgacgcaatctccaaaaagcgagacgacattttggcagtcctgttagaggccggggcagatgtgacaatcaccaacaacaacggcttcaacgccttgcaccacgcagctctccgcggaaatccatcagccatgcgagtactgctttccaaactaccgcgaccttggatcgttgatgagaagaaagatgacggctatacagccttacatctggctgcactgaataaccacgtggaagtggctgaacttttagtgcaccaggggaatgccaatctggacattcagaacgtaaaccaacaaacagccttgcacctcgcagttgagagacagcacacccaaattgtacgccttctagtgagggccggcgcaaagctcgacatacaggataaagatggggatacaccactgcatgaggctctcaggcatcatactttatcgcagctgcgccaactccaagatatgcaagatgtagggaaggttgacgccgcctgggagccttccaagaatacactgatcatgggtctgggaacacagggtgctgaaaagaagtctgctgcaagtatcgcctgctttctcgcagctaatggagccgatttgtcaattcggaacaaaaagggccaaagtcccctggatctgtgtcccgatccgaacctctgtaaagctctcgctaaatgtcacaaagaaaaagtctcggggcaggtgggcagccgatccccctccatgatttcaaacgacagcgaaacccttgaggagtgcatggtgtgcagtgatatgaagcgcgataccctatttgggccatgcggacacattgctacttgttccctgtgtagcccaagagtgaaaaaatgccttatatgcaaagagcaagtacaaagccgaaccaagatcgaggaatgtgttgtgtgcagtgataagaaggccgcagtgcttttccagccctgcggtcatatgtgtgcatgcgaaaactgcgctaacctgatgaaaaagtgtgtgcagtgccgggcagtagtagagcggagagtccccttcatcatgtgttgcggagggaaatcatcagaagacgccaccgacgacatctcttctggaaacatacccgtccttcagaaggataaagataatacaaacgtcaacgcggatgtgcaaaagttgcagcagcagctgcaggatattaaggagcaaacaatgtgccccgtttgtctggacaggcttaaaaacatgatcttcctctgtggccacgggacctgccagctgtgcggagatcgcatgtccgagtgccccatttgcagaaaggcaatagagagacggatcctcctgtactag

SEQ ID NO: 205705 - DNA, 3021 bp, Artificial Sequence
  derived and/or modified sequence
atgtccaattccaggaataatcgtgtgatggttgaaggtgtcggggctcgcgttgtgcgtggacctgattggaagtgggggaaacaggacggcggagaggggcacgtggggactgtgaggtcatttgagtcccccgaggaggttgtcgtggtgtgggacaatggtacggccgctaactatcggtgttctggggcatacgacctgcggattctggatagcgcacctacaggcatcaaacacgatggcacaatgtgcgatacttgcaggcagcagccaataatcggcatcagatggaagtgtgcagaatgcaccaattacgacctctgcaccgtgtgctatcacggagataagcatcacctgagacacaggttttacagaattacaaccccaggatctgaacgtgtcctcctggaatctaggagaaaatcgaagaagataacagccagaggtattttcgctggagccagagtggtgcggggagtcgattggcagtgggaggaccaagatggcggtaacgggagaaggggcaaggttacggaaatccaggactggtctgcctcatccccgcactctgccgcttatgtgctctgggataacggggctaagaacctgtatagagtggggtttgagggtatgtccgatctgaagtgcgtacaggatgctaaaggaggcagcttctacagggaccactgccccgtgctgggcgaacagaacgggaataggaaccccggagggctacagatcggtgacttggtaaatatcgatcttgatctcgagattgtccaaagcctgcagcatgggcacggaggatggacagatggtatgtttgaaacgctgaccaccaccgggacggtttgcggaattgacgaggaccacgatatcgtggtgcagtatcccagcggtaaccgctggacattcaatccagcagtactgaccaaggctaacattgtgcgttccggcgacgccgcacaaggggctgaaggcggaacaagccaattccaggtcggcgatcttgtgcaggtgtgttacgacttggaaaggattaaacttttgcagcgaggtcacggcgagtgggccgaggccatgctgcccacacttggaaaggtaggcagggttcagcagatatatagcgacagcgatctgaaggtggaggtgtgtggcactagttggacctacaaccccgctgcggtttcaaaagtggcgtctgcaggcagcgccatcagcaatgcaagcggtgagcgcctcagtcagctgctgaaaaagctgtttgagacccaagagtccggcgacctgaacgaggagctcgtgaaagcggcagccaacggcgacgtggcaaaagtggaagacctgttaaagagaccggatgtggacgtaaacggccaatgcgctggtcataccgccatgcaggcggctagccagaatggccacgtagacatactgaagttgctgctcaaacagaacgtggacgtggaggcggaagacaaagacggagatcgggctgtccaccacgccgcattcggagacgaaggggctgtcatcgaagttttacacaggggtagtgcggacttgaacgcacgtaataaacgaaggcagacccccctgcacatcgctgtcaataagggacaccttcaggtggttaagacgctgttagacttcggatgtcacccgtctctccaggactcagagggtgatacccctcttcacgatgccatcagtaagaagcgggacgatatactcgccgtcctcttagaggcgggagccgacgtgaccatcaccaataacaatggcttcaatgcattacatcacgctgccctcagaggtaacccatccgctatgcgcgtcctgcttagtaagctccctagaccctggattgtggacgaaaagaaagacgacggctatacagccttgcatcttgccgctctcaataaccacgtcgaagtcgctgagctgctggtgcatcagggcaatgcaaatctcgacattcagaatgtgaatcagcagaccgctctgcaccttgcagtagaaagacagcacactcaaattgtcagattgctcgtacgggctggagcaaaattggatatccaggacaaagatggagacactcctctgcacgaggccttacggcaccatactctctcacaactacggcagcttcaggatatgcaggacgtgggtaaggtggacgccgcatgggagccctccaagaacaccctgattatgggtctaggtacgcaaggcgctgaaaagaaatcagcagcctccatcgcatgttttttggccgctaatggtgcagatctctcaatccgcaacaagaagggccagtctccgttggatctgtgccctgaccccaacctctgcaaggccctagcgaagtgccacaaggagaaggtcagcggtcaggtgggtagcagatcgccttcaatgatatctaacgattccgagacactcgaagagtgcatggtgtgctccgatatgaagcgcgatacattattcgggccttgtggacatattgcaacatgtagtctgtgcagccctagagtgaagaagtgcctcatttgtaaagaacaggtccagagccggaccaagatcgaagaatgtgttgtatgctccgacaagaaggcagccgtactgttccagccgtgtggccacatgtgcgcttgcgaaaactgcgctaacctcatgaagaagtgcgtccaatgcagagctgtggtggagaggcgtgtgccttttattatgtgttgtgggggtaaatcctcggaggacgctaccgatgatattagttccgggaacatccccgtgcttcagaaagataaggataacaccaatgtgaatgccgacgtgcagaagctccaacagcagcttcaggatatcaaagaacagaccatgtgcccggtgtgtttggaccgactgaaaaatatgatcttcctatgtggccatggcacctgccagctgtgcggtgatagaatgagtgaatgccctatatgtcgaaaagctatcgagagacgtattctcttgtactag

SEQ ID NO: 205706 - protein, 1159 aa, Artificial Sequence
  derived and/or modified sequence
MAHRGPSRASKGPGPTARAPSPGAPPPPRSPRSRPLLLLLLLLGACGAAGRSPEPGRLGPHAQLTRVPRSPPAGRAEPGGGEDRQARGTEPGAPGPSPGPAPGPGEDGAPAAGYRRWERAAPLAGVASRAQVSLISTSFVLKGDATHNQAMVHWTGENSSVILILTKYYHADMGKVLESSLWRSSDFGTSYTKLTLQPGVTTVIDNFYICPTNKRKVILVSSSLSDRDQSLFLSADEGATFQKQPIPFFVETLIFHPKEEDKVLAYTKESKLYVSSDLGKKWTLLQERVTKDHVFWSVSGVDADPDLVHVEAQDLGGDFRYVTCAIHNCSEKMLTAPFAGPIDHGSLTVQDDYIFFKATSANQTKYYVSYRRNEFVLMKLPKYALPKDLQIISTDESQVFVAVQEWYQMDTYNLYQSDPRGVRYALVLQDVRSSRQAEESVLIDILEVRGVKGVFLANQKIDGKVMTLITYNKGRDWDYLRPPSMDMNGKPTNCKPPDCHLHLHLRWADNPYVSGTVHTKDTAPGLIMGAGNLGSQLVEYKEEMYITSDCGHTWRQVFEEEHHILYLDHGGVIVAIKDTSIPLKILKFSVDEGLTWSTHNFTSTSVFVDGLLSEPGDETLVMTVFGHISFRSDWELVKVDFRPSFSRQCGEEDYSSWELSNLQGDRCIMGQQRSFRKRKSTSWCIKGRSFTSALTSRVCECRDSDFLCDYGFERSSSSESSTNKCSANFWFNPLSPPDDCALGQTYTSSLGYRKVVSNVCEGGVDMQQSQVQLQCPLTPPRGLQVSIQGEAVAVRPGEDVLFVVRQEQGDVLTTKYQVDLGDGFKAMYVNLTLTGEPIRHRYESPGIYRVSVRAENTAGHDEAVLFVQVNSPLQALYLEVVPVIGLNQEVNLTAVLLPLNPNLTVFYWWIGHSLQPLLSLDNSVTTRFSDTGDVRVTVQAACGNSVLQDSRVLRVLDQFQVMPLQFSKELDAYNPNTPEWREDVGLVVTRLLSKETSVPQELLVTVVKPGLPTLADLYVLLPPPRPTRKRSLSSDKRLAAIQQVLNAQKISFLLRGGVRVLVALRDTGTGAEQLGGGGGYWAVVVLFVIGLFAAGAFILYKFKRKRPGRTVYAQMHNEKEQEMTSPVSHSEDVQGAVQGNHSGVVLSINSREMHSYLVS

SEQ ID NO: 205707 - DNA, 3480 bp, Artificial Sequence
  derived and/or modified sequence
atggcccacagaggccccagcagagccagcaagggccccggccccaccgccagagcccccagccccggcgccccccccccccccagaagccccagaagcagacccctgctgctgctgctgctgctgctgggcgcctgcggcgccgccggcagaagccccgagcccggcagactgggcccccacgcccagctgaccagagtgcccagaagcccccccgccggcagagccgagcccggcggcggcgaggacagacaggccagaggcaccgagcccggcgcccccggccccagccccggccccgcccccggccccggcgaggacggcgcccccgccgccggctacagaagatgggagagagccgcccccctggccggcgtggccagcagagcccaggtgagcctgatcagcaccagcttcgtgctgaagggcgacgccacccacaaccaggccatggtgcactggaccggcgagaacagcagcgtgatcctgatcctgaccaagtactaccacgccgacatgggcaaggtgctggagagcagcctgtggagaagcagcgacttcggcaccagctacaccaagctgaccctgcagcccggcgtgaccaccgtgatcgacaacttctacatctgccccaccaacaagagaaaggtgatcctggtgagcagcagcctgagcgacagagaccagagcctgttcctgagcgccgacgagggcgccaccttccagaagcagcccatccccttcttcgtggagaccctgatcttccaccccaaggaggaggacaaggtgctggcctacaccaaggagagcaagctgtacgtgagcagcgacctgggcaagaagtggaccctgctgcaggagagagtgaccaaggaccacgtgttctggagcgtgagcggcgtggacgccgaccccgacctggtgcacgtggaggcccaggacctgggcggcgacttcagatacgtgacctgcgccatccacaactgcagcgagaagatgctgaccgcccccttcgccggccccatcgaccacggcagcctgaccgtgcaggacgactacatcttcttcaaggccaccagcgccaaccagaccaagtactacgtgagctacagaagaaacgagttcgtgctgatgaagctgcccaagtacgccctgcccaaggacctgcagatcatcagcaccgacgagagccaggtgttcgtggccgtgcaggagtggtaccagatggacacctacaacctgtaccagagcgaccccagaggcgtgagatacgccctggtgctgcaggacgtgagaagcagcagacaggccgaggagagcgtgctgatcgacatcctggaggtgagaggcgtgaagggcgtgttcctggccaaccagaagatcgacggcaaggtgatgaccctgatcacctacaacaagggcagagactgggactacctgagaccccccagcatggacatgaacggcaagcccaccaactgcaagccccccgactgccacctgcacctgcacctgagatgggccgacaacccctacgtgagcggcaccgtgcacaccaaggacaccgcccccggcctgatcatgggcgccggcaacctgggcagccagctggtggagtacaaggaggagatgtacatcaccagcgactgcggccacacctggagacaggtgttcgaggaggagcaccacatcctgtacctggaccacggcggcgtgatcgtggccatcaaggacaccagcatccccctgaagatcctgaagttcagcgtggacgagggcctgacctggagcacccacaacttcaccagcaccagcgtgttcgtggacggcctgctgagcgagcccggcgacgagaccctggtgatgaccgtgttcggccacatcagcttcagaagcgactgggagctggtgaaggtggacttcagacccagcttcagcagacagtgcggcgaggaggactacagcagctgggagctgagcaacctgcagggcgacagatgcatcatgggccagcagagaagcttcagaaagagaaagagcaccagctggtgcatcaagggcagaagcttcaccagcgccctgaccagcagagtgtgcgagtgcagagacagcgacttcctgtgcgactacggcttcgagagaagcagcagcagcgagagcagcaccaacaagtgcagcgccaacttctggttcaaccccctgagcccccccgacgactgcgccctgggccagacctacaccagcagcctgggctacagaaaggtggtgagcaacgtgtgcgagggcggcgtggacatgcagcagagccaggtgcagctgcagtgccccctgaccccccccagaggcctgcaggtgagcatccagggcgaggccgtggccgtgagacccggcgaggacgtgctgttcgtggtgagacaggagcagggcgacgtgctgaccaccaagtaccaggtggacctgggcgacggcttcaaggccatgtacgtgaacctgaccctgaccggcgagcccatcagacacagatacgagagccccggcatctacagagtgagcgtgagagccgagaacaccgccggccacgacgaggccgtgctgttcgtgcaggtgaacagccccctgcaggccctgtacctggaggtggtgcccgtgatcggcctgaaccaggaggtgaacctgaccgccgtgctgctgcccctgaaccccaacctgaccgtgttctactggtggatcggccacagcctgcagcccctgctgagcctggacaacagcgtgaccaccagattcagcgacaccggcgacgtgagagtgaccgtgcaggccgcctgcggcaacagcgtgctgcaggacagcagagtgctgagagtgctggaccagttccaggtgatgcccctgcagttcagcaaggagctggacgcctacaaccccaacacccccgagtggagagaggacgtgggcctggtggtgaccagactgctgagcaaggagaccagcgtgccccaggagctgctggtgaccgtggtgaagcccggcctgcccaccctggccgacctgtacgtgctgctgcccccccccagacccaccagaaagagaagcctgagcagcgacaagagactggccgccatccagcaggtgctgaacgcccagaagatcagcttcctgctgagaggcggcgtgagagtgctggtggccctgagagacaccggcaccggcgccgagcagctgggcggcggcggcggctactgggccgtggtggtgctgttcgtgatcggcctgttcgccgccggcgccttcatcctgtacaagttcaagagaaagagacccggcagaaccgtgtacgcccagatgcacaacgagaaggagcaggagatgaccagccccgtgagccacagcgaggacgtgcagggcgccgtgcagggcaaccacagcggcgtggtgctgagcatcaacagcagagagatgcacagctacctggtgagctag

SEQ ID NO: 205708 - DNA, 3480 bp, Artificial Sequence
  derived and/or modified sequence
atggcccatcggggtccctctagggccagcaaaggcccgggccccacggcccgggcgccctcccccggcgccccccctcctccaagatcacctcgctctcggcctctgctgctgcttctcctgcttctgggtgcttgtggtgccgcaggccgctctccagagccaggcaggctgggccctcacgcccagctcacacgcgtccctagaagccccccagctgggcgggccgaacctggaggaggagaagacagacaggctcggggtaccgagcccggagctcccgggcccagccctggccctgctccaggaccaggtgaggatggggcccctgccgccggatatcgccgctgggagagagccgcccccctggcaggtgtggccagccgcgcacaggtctccctgatttctactagcttcgtgctgaaaggagatgccacccacaatcaggccatggtgcactggacaggggaaaatagctcggtgatcctgatattgactaaatactaccacgccgatatgggaaaggtcctcgagtcttctctctggagaagtagcgactttggaacttcatataccaaactgacactccagcccggagtcaccacagtcatcgacaacttttacatttgcccaactaacaagagaaaagtgatccttgtatccagctctttgagcgacagggatcagtcccttttcctgagcgctgatgaaggggcgaccttccaaaaacagcctatccctttcttcgtagagactctgatctttcaccctaaggaggaagacaaggtattggcatataccaaggagtctaagctttacgtttctagcgacttaggcaagaagtggaccctcctgcaggagcgggtgactaaagatcacgtgttttggtccgtctccggtgtggacgccgatcctgacctcgtacatgtagaggcccaggacctagggggggattttcgctacgttacctgtgcaattcacaactgcagtgagaagatgctgactgcacccttcgccgggcctatcgaccacggctcacttactgtccaggatgattacatcttttttaaggctacttccgctaatcaaaccaagtattatgtgagctatagacgaaacgaatttgtgctcatgaagttgcccaaatacgcgctccctaaagatcttcagattatcagcacggacgagtcacaggttttcgtggcggttcaagaatggtatcagatggacacgtataacctctaccagagtgaccctcggggtgtgcgctacgctctcgtgctccaggatgttcgctcatccagacaggcggaagaaagtgtcctgattgacatcttagaagtgcgaggggttaagggggtcttcctagcaaatcagaaaattgacgggaaagttatgaccctaatcacatacaataagggacgcgactgggactatcttaggcctccatccatggatatgaatgggaaacccacaaattgtaaaccgccggactgtcatctgcatctccatttacgttgggcggacaacccgtacgtgagtgggactgtacataccaaggacacagcgcctggcctcattatgggggcagggaatctcggaagtcaattggttgagtacaaggaggagatgtacatcacgagcgattgcgggcacacttggagacaggttttcgaggaagagcatcatatcctctacctggatcatggaggagtgatcgtggctatcaaagacacctccattcccctgaaaatcctgaaatttagtgtggatgaaggcctgacctggagcacccataattttacttccacatcagtcttcgttgacggtctcctgagtgagccaggggacgaaaccctggtcatgacggtttttggacatatctctttcaggtccgattgggaattagtgaaagtggactttcgtccatccttttctagacagtgcggagaagaggattattcaagttgggagctgtccaacctgcagggagataggtgcataatgggccagcagaggagcttccgcaaacgcaaaagcacatcttggtgtatcaagggaagaagcttcactagtgccctcacatcacgcgtatgtgagtgtcgcgacagtgatttcctgtgcgattatgggtttgagaggagcagttccagcgagtcctccacaaacaaatgctcagctaatttctggtttaatccactgtcaccgccagacgattgcgccttgggacagacgtataccagcagcctcggttatcggaaagtggtgtctaatgtttgtgagggtggcgtggacatgcagcagtctcaagttcagctgcaatgccccctcactcctccgagggggctacaggtgtcaatacaaggcgaggcggttgcggttcgacccggagaggatgtcttgtttgtggtgagacaggagcagggagatgttctaaccaccaagtatcaggtggacttgggtgacgggtttaaggccatgtacgtgaacctgaccctcacgggcgagcccatacgtcacaggtatgaatcacccggcatttaccgtgttagcgttcgcgcggaaaacacggctggccacgacgaagcagtgttgttcgtccaggtcaacagccccctccaagctctgtaccttgaggtggtccctgtgattggtttaaaccaagaggtgaatcttacagccgttctgctgcccctgaacccaaatcttacagtcttttattggtggattggacatagccttcaaccgttgctatcccttgataacagtgttactacaaggttcagcgatactggagatgtccgcgttaccgtacaggcagcctgcggcaactctgtcctgcaagatagtagggtactccgcgtgctggatcagtttcaagttatgccactgcagttttctaaagaactcgacgcctacaacccaaatacccccgaatggcgtgaggatgttggattagttgtcactaggctgctgtcaaaagagacaagcgtacctcaagagttactcgtaacagttgttaaaccgggacttcccacgttagctgacttatacgtcttactgccacctcccagaccaacccggaaacggagtctgtcctccgacaagcgcttggccgcaattcagcaagtgctcaacgctcagaaaattagtttcctcttaaggggcggggtcagagtgctggtggccctgagggacacaggaacaggtgctgagcagctgggtggcggcggaggctattgggccgtcgttgttctgtttgtaattggcctcttcgcagccggtgcattcatactctacaaatttaagagaaagcgccccggccgtaccgtgtatgctcagatgcataacgagaaggagcaggaaatgacatcacctgtctcccattctgaggacgttcagggtgccgtgcaaggaaaccactccggcgtcgtgctaagcataaatagtcgcgagatgcactcatatcttgtcagttag

SEQ ID NO: 205709 - DNA, 3480 bp, Artificial Sequence
  derived and/or modified sequence
atggcccaccggggccccagccgggccagcaaaggacctggccccacagcccgggcccccagccctggggcccctcctccacccaggagccccaggagccggcccctgctgctgctgctgctgctgctgggcgcctgtggggctgctggccgcagccctgagcccggccgcctgggcccccacgcccagctgaccagggtgcccaggagccccccagctggccgggcagagcccggcggcggggaggaccggcaggcccggggcacagagcccggggcccctggccccagccctggccctgcccctggccctggagaagatggagccccagctgctggctaccgccgctgggagcgggccgcccccctggccggcgtggccagccgggcccaggtgtccctcatcagcaccagctttgtgctgaagggagatgccacccacaaccaggccatggtgcactggacaggagagaacagcagcgtcatcctgatcctgaccaagtactaccacgccgacatgggcaaggtgctggagagcagcctgtggaggagcagtgactttggcaccagctacaccaagctgaccctgcagcccggggtgaccaccgtcatcgacaacttctacatctgccccaccaacaagaggaaggtgatcctggtgagcagcagcctgagtgaccgggaccagagcctcttcctgtctgcagatgagggcgccaccttccagaagcagcccatccccttctttgtggagaccctcatcttccaccccaaggaggaggacaaggtgctggcctacaccaaggagagcaagctgtatgtgtccagtgacctgggcaagaagtggaccctgctgcaggagcgggtgaccaaggaccacgtgttctggagcgtgtctggagtggatgctgaccctgacctggtgcacgtggaggcccaggacctgggcggggacttccgctacgtgacctgtgccatccacaactgcagcgagaagatgctgacagccccctttgctggccccatcgaccacggcagcctgactgtgcaggatgactacatcttcttcaaggccaccagcgccaaccagaccaagtactacgtgtcctacagaagaaatgaatttgtgctgatgaagctgcccaagtatgccctgcccaaggacctgcagatcatcagcacagatgagagccaggtgtttgtggccgtgcaggagtggtaccagatggacacctacaacctgtaccagagcgacccccggggcgtgcgctatgccctggtgctgcaggatgtgcgcagcagccggcaggccgaggagagcgtgctgattgacatcctggaggtgcggggcgtgaagggcgtcttcctggccaaccagaagattgatggcaaggtgatgaccctcatcacctacaacaagggccgggactgggactacctgcggccccccagcatggacatgaatggcaagcccaccaactgcaagcccccagactgccacctgcacctgcacctgcgctgggccgacaacccctacgtgtctggcaccgtgcacaccaaggacacagcccctggcctcatcatgggcgccggcaacctgggcagccagctggtggagtacaaggaggagatgtacatcaccagtgactgtggccacacctggaggcaggtgtttgaggaggagcaccacatcctgtacctggaccatggaggagtgattgtggccatcaaggacaccagcatccccctgaagatcctgaagttctctgtggatgagggcctgacctggagcacccacaacttcaccagcacctctgtgtttgtggatggcctgctgtctgagcctggagatgagaccctggtgatgacagtgtttggccacatctccttcagaagtgactgggagctggtgaaggtggacttccggcccagcttcagccggcagtgtggggaggaggactacagctcctgggagctgagcaacctgcagggcgaccgctgcatcatgggccagcagaggagcttcaggaagaggaagagcacctcctggtgcatcaagggccgctccttcaccagcgccctgaccagccgggtgtgtgagtgccgggacagcgacttcctgtgtgactatggctttgagaggagcagcagcagcgagagcagcaccaacaagtgcagcgccaacttctggttcaaccccctgagccccccagatgactgtgccctgggccagacctacaccagcagcctgggctacaggaaggtggtgtccaatgtgtgtgagggcggcgtggacatgcagcagagccaggtgcagctgcagtgccccctgaccccaccccggggcctgcaggtgtccatccagggcgaggccgtggccgtgcggcctggagaagatgtgctgtttgtggtgcggcaggagcagggagatgtgctgaccaccaagtaccaggtggacctgggagatggcttcaaggccatgtatgtgaacctgaccctgaccggggagcccatccgccacagatatgagagccctggcatctacagagtgtctgtgcgggcagaaaatacagctggccatgatgaagctgtgctgtttgtgcaggtgaacagccccctgcaggccctgtacctggaggtggtgcctgtgattggcctgaaccaggaggtgaacctgacagctgtgctgctgcccctgaaccccaacctgaccgtcttctactggtggattggccacagcctgcagcccctgctgagcctggacaacagcgtgaccacccgcttcagtgacacaggagatgtgcgggtgacagtgcaggccgcctgtggcaacagcgtgctgcaggacagccgggtgctgcgggtgctggaccagttccaggtgatgcccctgcagttcagcaaggagctggatgcctacaaccccaacaccccagagtggagagaagatgtgggcctggtggtgacccggctgctgagcaaggagacctctgtgccccaggagctgctggtgacagtggtgaagccaggcctgcccaccctggccgacctgtatgtgctgctgcccccaccccggcccaccaggaagaggagcctgagcagtgacaagaggctggccgccatccagcaggtgctgaatgcccagaagatctccttcctgctgcggggcggcgtgcgggtgctggtggccctgcgggacacaggaactggagctgagcagctgggcggcggcggcggctactgggccgtggtggtgctgtttgtgattggcctgtttgctgctggggccttcatcctgtacaagttcaagaggaagaggcctggccgcacagtgtatgcccagatgcacaatgagaaggagcaggagatgaccagccctgtgagccacagtgaagatgtgcagggcgctgtgcagggcaaccacagcggcgtggtgctgagcatcaacagccgggagatgcacagctacctggtgtcctag

SEQ ID NO: 205710 - DNA, 3480 bp, Artificial Sequence
  derived and/or modified sequence
atggcccaccggggccccagccgggccagcaagggccccggccccaccgctcgggctccgagtcctggagcccctccaccccctcggagtcccaggtcacggccgctgctcctgctgctgctcttgctgggggcttgtggagccgctggtaggtcccctgagcccggacggttagggcctcacgcccagttgactagagtccctagaagtcctcccgccggcagggccgagcctggaggcggggaggaccgccaagcccgaggtacagagcccggtgctccaggccccagtcctggacccgcgccaggaccaggagaggacggcgcccccgccgccggttacaggaggtgggaacgagccgcccccttggccggtgtggcctccagagcccaggttagtcttatctcaacaagctttgtgcttaagggcgacgccactcacaatcaagccatggtgcactggactggcgaaaacagctctgtgatccttatcctgactaaatattaccatgccgacatgggcaaggtgctcgaatcttccttgtggagatctagcgatttcggcactagctacacaaagcttaccctgcagcccggcgtgacaacagtcatagacaatttttacatttgtccgacaaataagagaaaggtgattctcgtctcaagctcgctctctgatagagatcagtcgctgttcctcagtgccgacgagggcgcaacttttcagaaacagccaatcccgttctttgtggagactctcatattccatccgaaggaggaagacaaggtattagcctataccaaggaatctaagctgtatgtgtcgtcggacctggggaagaagtggacgctgctgcaagagcgtgtaacaaaagaccacgtcttctggagtgtctccggcgttgacgcagatcccgatctggtccatgtggaagctcaagatctggggggcgattttagatacgtgacctgcgcgattcacaattgttcagagaaaatgctgaccgcccctttcgctgggcctatcgaccatggtagcctgacggtccaggacgactatatcttctttaaggcaacatctgccaatcagactaagtattatgttagttatcgcaggaatgaattcgttttaatgaagctaccaaagtatgcccttcctaaggacctgcaaatcataagtaccgacgagtctcaggtgttcgttgccgtgcaagagtggtaccagatggatacatacaatctgtatcagagcgatcctagaggggtgaggtatgcgctggtgctccaggacgtccggagcagcaggcaggccgaggaatctgtgctgattgacatcttagaggtccgtggagtgaagggagtctttctcgcaaatcagaagattgacggtaaagtgatgacattgataacctataacaaagggagagactgggattacctgcgcccgcctagcatggacatgaacggtaaaccaactaattgtaaaccacccgattgccatttgcacctgcatcttagatgggcagataacccctacgtgtctgggaccgtccacacaaaagataccgccccaggcctcatcatgggggccggaaatttaggcagccagttggtggagtataaggaggagatgtacataacttctgactgtgggcacacctggcggcaggtgtttgaggaggagcaccacatcctttatctggatcacggcggcgtcattgtggccattaaggatacctctatcccgctgaagatcttgaagttttctgtcgatgagggattaacgtggtccacgcacaactttactagcacaagcgttttcgtggacgggctgctgagcgagcccggcgacgagacgctggtgatgacagtgttcgggcacatctctttccgttcagattgggagttggttaaggtggatttccggccttcgttctcccgacagtgtggcgaggaagactattcgtcttgggagctcagcaatctccagggggaccgctgcatcatgggccagcagagatctttcagaaagcgcaagtcaacttcatggtgcatcaagggccgctcattcacatctgcactgacctctcgagtgtgcgagtgccgcgattccgacttcctatgtgattatggcttcgaaagatcctcctctagcgaatcctctacgaataaatgctctgcaaacttctggttcaacccactgagcccccccgatgattgcgctctcggacagacatacacatccagcttgggctaccggaaggtcgtgtcaaatgtgtgcgagggcggcgtggacatgcagcaatcccaggtgcagctacagtgccctctcaccccacctcgcggcctgcaggtgagtattcagggcgaagcagtggctgtacgaccaggggaggatgtcctcttcgttgtgcgacaagaacagggcgacgtcctaaccacaaagtaccaggttgacctgggagacgggtttaaggcaatgtatgtaaaccttaccctgaccggcgaacccattcgtcaccgatatgagagtcctggcatttatagagtcagcgtgcgggccgagaacactgccggccacgacgaggccgtgctgttcgtgcaggtgaactccccgctccaggcattgtatctcgaggttgtcccagtgattggacttaatcaggaggttaaccttactgcggtgctgctccctttaaacccaaatctgacagtcttctattggtggattggccactctctgcagccattgctctccctggataattccgtgacaacaagatttagcgatacaggtgatgttagggtcaccgtccaggcagcctgtggaaattccgttctgcaggactcgagagtgctgagggtgctcgaccagtttcaggtaatgccactccagttcagtaaggaacttgatgcatacaacccgaacactcccgaatggagggaagacgtgggcctggtggtcacccggcttctaagtaaggaaacaagtgttccacaagagctgctcgtcaccgtcgtcaaacctggtctgcctacattggccgacctgtacgtgctcctgccacccccgaggccaacgcggaaacgcagcctgtcatcagataagagactggctgccatccaacaggtgctgaacgcccaaaaaatctcctttttactgaggggcggcgtaagggttttggtggccctgcgtgatactggcactggagcagagcagttagggggaggcggaggttactgggctgtcgtggttctgttcgtaattggattattcgcggcgggcgcattcattctgtacaagtttaaaagaaaaagaccaggacggaccgtgtacgcccagatgcacaacgaaaaagagcaggaaatgacatctcctgtgtctcattcagaggacgtccagggcgcggtgcagggaaaccattcaggagtggtgctgtcaatcaatagccgggagatgcactcctatcttgtctcgtag

SEQ ID NO: 205711 - DNA, 3480 bp, Artificial Sequence
  derived and/or modified sequence
atggcccaccgcggaccgtccagagccagtaaaggccctggccctactgctagggcgcctagcccaggagccccacctccaccacgatccccaagaagccgaccactccttttgctgcttctgctgttgggcgcatgtggggctgctgggaggtccccagaaccgggtcgcctcgggccacacgcccagctaacgcgggttcccaggagccctccagctggcagagctgaacctggtgggggagaggatcgccaggccaggggaaccgagcctggggcacctggcccatcgccaggcccagcccctggcccaggggaagatggggcacccgcagccggttacagaagatgggagagagctgcacccctcgctggcgttgctagccgagcacaggtatctctgatctctacctctttcgtactcaagggggacgccacccacaatcaggccatggtgcactggaccggcgagaattcttctgtgattctcatcctgactaaatactaccatgcagacatgggcaaagttctggagtcctcactctggagatccagtgattttggcacatcctatacaaagctaacgctacaaccaggagtgacaaccgtcattgacaacttctacatctgcccaaccaacaagaggaaggttattcttgtaagcagctctctatcagaccgggaccagtctctatttttgtcggctgacgaaggcgcaacattccagaagcaacctattcctttctttgtagagaccttaatcttccaccccaaggaggaagacaaagttttagcctacacaaaggaatccaaactctatgtatcctcagacctgggaaaaaaatggacactcctacaggaaagggttactaaagatcatgtgttctggtcagtgtctggcgtcgacgccgatccggatttagtgcacgtggaagcccaggatctgggcggtgactttcggtatgtaacatgcgctattcataattgtagtgagaagatgttaacagcccctttcgctggacctatcgaccatggtagcctcaccgtccaggacgactacatcttttttaaagctacatcagccaaccaaacaaaatactatgtctcctatcggaggaacgagtttgttctcatgaaactccctaagtatgcgctgcccaaagacctgcaaattatttccactgacgaatcccaggtctttgtggcggtccaagagtggtaccagatggacacgtataacttgtatcagagcgatccacgaggagttagatacgctctggtcctgcaggatgtgaggtcgagccgacaggcagaggagagtgtgttgatagatatcctggaggtgcggggagtgaaaggcgtgttcctggcaaaccaaaagatcgacggaaaggttatgaccttgatcacatataacaagggccgagattgggattacctcaggcctccctccatggacatgaatgggaaacccacaaactgcaagccgcctgactgtcacctgcacctgcatctgcggtgggccgacaatccatacgtatcgggcaccgtgcacacaaaagacacggcaccgggtttgattatgggcgcaggaaacctggggtctcaattggtcgagtacaaggaggaaatgtatataacatctgactgcggacacacatggagacaagtttttgaggaggagcaccacatcctttacctggaccacggcggtgttattgtcgctattaaggatacttctatccctctgaaaattctgaaattctcggtggacgaagggctgacctggtcaacacacaacttcacgagtactagtgtttttgttgatggcttattgtccgagccaggcgacgagaccctggtcatgacggtgttcggccatatcagctttagatccgactgggaacttgtcaaagtggattttaggccatccttctcacggcagtgtggggaggaagactactcctcatgggagttatctaacctgcagggcgatcgctgcataatgggccagcaaagaagcttcagaaagagaaagtctacatcctggtgtattaagggaaggagcttcacctccgccctgaccagtcgcgtatgcgagtgtagagactcggattttctttgcgactacgggttcgaacggtcgagcagttccgagtcttcgaccaataaatgcagtgccaacttctggttcaacccccttagccccccagatgactgtgctctgggtcagacttacacatcctcactcggttaccgcaaagtggtttctaacgtgtgcgaaggcggagtggatatgcaacagtctcaggtgcagctgcagtgtcccttgacacctcctcgagggcttcaggtgagtatacagggcgaagccgtggcagtaagaccgggtgaggatgtactgttcgtagtccggcaggagcagggggatgttttgacaaccaagtaccaggttgaccttggtgatggcttcaaggctatgtacgtaaatctcactctaaccggcgagcccatccgtcaccgctacgaatcccccggaatctaccgggtgtcagtgcgcgctgaaaacaccgcaggtcatgacgaggcggtcttgttcgtccaggtcaactctccgctgcaagccttgtacctggaagtggtgcctgtaatcgggctgaaccaggaagtcaatttgacagccgtgcttctccctctgaaccccaacctgaccgttttttactggtggatcggtcattcactgcaacccctgctcagcctggataattccgtgacgacaagatttagcgacaccggcgatgttagagtgacagtgcaagcggcatgtgggaattcagtccttcaagatagtagggtgctccgggttctggatcagtttcaggttatgcccctgcagttttccaaggagcttgacgcgtataatccaaatacacctgaatggagggaggacgtcggcctagttgttacccggctgcttagtaaggaaacttccgtcccacaggaactgttggtcactgtggtcaagccaggactgcctactttagcagatctctacgtcctgctcccaccaccccgacctacccgaaagcgcagcctatctagcgataaacgcctagcagctatccagcaggtactgaatgcccagaagatttctttcctgctgagaggcggtgtacgggtgctggtagccttacgagacacaggtacaggagccgaacagctgggaggcggtgggggttattgggcagtggttgttctcttcgtgatcggtctgtttgccgctggcgctttcattctctataagtttaaacgaaaacgccctgggaggactgtgtatgctcaaatgcacaatgaaaaagaacaggaaatgacctccccagtctcccatagcgaagacgtgcagggtgccgtacagggcaaccattctggcgtggtactgtccatcaacagtcgggagatgcacagctacttggtgtcatag

SEQ ID NO: 205712 - DNA, 6152 bp, Artificial Sequence
  derived and/or modified sequence
cctttctctgcgctctcgctcgcgctccccagcgccctcctgctctcccggccgcggtcccctcgtccgcgccgccccgccgccggctccgctgccgcccctggcgaccatggcgcaccgggggccctcgcgcgcctcgaagggccccggccccaccgcccgagccccgagccccggggctccgccgccgccgcgctcgccgcgctcgcggccgctcctgctgctgctgctgctgctgggcgcctgcggggcggcggggcgctcccctgagcccgggcgcctgggtcctcacgcccaactgacccgggtgccgcggagccctcccgcggggcgcgcggagcccggtggcggcgaggaccggcaggcgcgcggcacggagccaggcgccccgggtccgagtcccggtcccgctcctggtcccggcgaggacggcgcccccgccgcgggctaccggcgctgggagcgggcggcgccgctggccggagtggcttcgcgggcgcaggtctcgctcatcagcacgtcgttcgtgctcaagggggacgcgacgcacaaccaggcgatggtgcactggacgggcgagaacagcagcgtgatcttgatcctgacgaagtactaccacgcagacatggggaaggttctggaaagttctctgtggcggtcatcagatttcgggacgtcctacaccaagctcaccctccagcctggtgtcaccaccgtcatcgacaatttctacatctgcccgaccaacaagaggaaggtcatccttgtcagctcctcactcagtgaccgggaccagagcctattcctcagcgcagacgaaggcgccacctttcagaagcagcccattcccttcttcgtggaaactctgattttccaccctaaggaggaggacaaggtcctcgcctacacaaaggagagcaagctctacgtgtcatctgacttggggaaaaagtggacacttctgcaagagcgagtgaccaaagaccacgtgttctggtctgtgtctggggtggacgctgaccctgacttggtccacgtggaagcccaagacctcggtggagattttcggtacgtcacctgcgcaatccacaattgctccgagaagatgctgacagccccattcgcaggccccattgaccacgggtctctgaccgtgcaggacgattacatcttctttaaggcaacatcagcaaaccagacaaaatactacgtctcttatcgtcgaaatgaatttgtcctgatgaagctgccgaagtatgcattgccaaaggatctgcagatcatcagcacggacgagagtcaggtgttcgtggcggtgcaggagtggtaccagatggacacctacaacctgtaccagtcggacccacggggcgtgcgctacgcgctggtgctgcaggacgtgcgcagctcacggcaggcggaggagagcgtgctcatcgacatcctggaggtcagaggggtgaaaggagtcttcctggcaaaccaaaaaattgatgggaaagtgatgacgcttataacctacaacaagggccgcgactgggattacctgaggccacccagcatggacatgaatggaaaaccaaccaactgcaagcctccagactgccacctgcacctgcacctgcgctgggcagacaacccctacgtatcaggcaccgtgcacaccaaggacaccgccccaggcctcatcatgggtgcaggtaacctgggctcacagctggtggaatataaagaagaaatgtacatcacgtcagactgtggtcacacctggcggcaggtgtttgaggaagagcatcacatcctgtacctggaccacggcggcgtgatcgtggccatcaaagacacctccatccctttgaagatcctcaagttcagtgtggacgagggcctcacctggagcacgcacaacttcaccagcacctcggtgtttgtggacgggctgctgagtgagccaggggacgagacgctggtcatgacggtctttggccacatcagcttccgctccgattgggagctggtcaaggtggacttccggccctcattctccaggcagtgcggcgaggaggactacagctcctgggagctctccaacctgcagggcgaccgctgtatcatgggccagcagagaagtttccggaaaagaaagtccacgtcctggtgcatcaaggggaggagcttcacgtcggcgctcacgtcccgcgtgtgcgagtgccgggactcggacttcctgtgcgactacggatttgagcgctcctcctcctcagagtccagcaccaacaagtgctctgccaacttctggtttaacccattgtccccgcctgacgactgtgccctgggccagacctacaccagcagccttgggtaccggaaagtggtgtccaacgtgtgtgagggtggggtggacatgcagcagagtcaggtgcagctgcagtgccccctcacgccgccccggggcctgcaggtcagcattcaaggcgaggcggtggccgtgcggcctggagaggacgtcctgtttgtggtgcggcaggagcagggtgatgtcctgactaccaagtaccaggtagaccttggggacggcttcaaggccatgtacgtgaaccttacactgaccggggagcccatccggcaccgctacgagagccccggcatctaccgcgtgtccgtcagggcagagaacacggcaggccacgatgaggcggtgctctttgtccaggtcaactcccccctgcaggccctctacctggaggtggttcctgtcattggcctcaaccaggaggtgaacctcacagctgtgctgcttcccttgaaccctaacctcaccgtcttctactggtggatcggccacagcctgcagcccctcctttccctggataattctgtgacaacgcggttttcggacacgggcgacgtgcgtgtgacggtgcaggccgcctgtgggaactcggtgctgcaggactccagggtcctccgtgtgctggatcaatttcaagtcatgcctctgcagttttccaaggagctggatgcctacaaccccaacacccctgagtggagggaagacgtgggcctggtggtcacccggctgctctccaaggagaccagcgtccctcaggagcttctggtgactgtggtgaagccggggctgcccactttggccgatctgtacgtgctcctgccccctcccaggcccacaaggaagaggagcctctcgagtgataagaggctcgccgccatccagcaggtgctgaacgcacagaagatcagcttcctcctgcgaggcggagtccgggtcctggtggccctgcgggacacaggcacaggtgctgagcagctgggcggcggtggcggctactgggcggtagtggtgctgtttgtcatcgggctcttcgcagcgggagccttcatcctctacaagttcaaaaggaaacggccaggcaggaccgtgtacgcccaaatgcacaacgagaaggagcaggagatgaccagccctgtgagtcacagtgaggacgtccagggcgctgtccagggcaaccactcaggcgtggtcctgagcatcaactcccgagagatgcacagctacctggtgagctgatgccaccccagcatctgtcttttcacccacggagggcacagaaccaccagcaaagccggcggctggactggcgcccctcagagacctgcggaaagccccctccctgagtcgtcgccacaccaggcgacaggcaccaccccctctgataaatccaagcccgcccaggcccacggggggcccacgggaccccccgggactccccggacatggccctgcccctatgggacaccaggcctgactcaggcaggttctgccccccagaccccacacacggccgccccacgtgctgtcgctcagcccgaggcctgacttctctgggctgaggctggtcgtcctggagccctcccagtacctcgggctgcaagagctgcagacccgttcagacactgcgttgcgggctccttccccgcagaggccggggcctccctgactttgcttcttcactcccacctgtgcggccacccagtccctctgtgggagcccgggtgccaggccctcccaacaccacaccaccctccaggcccccctgccctccggctggaaactgcagctctgtaaatgcctctctaggtagctgctggcggtggtgggggtgtctcactctctgtctttatagccggcggtagccaccggggtggctctgtcagagttccgtactcgggagcccctttccctgagtgcccagggtgtctcctctgcccagaggggcagcagctctccctggttctccccagggcagacggggtagggcgggctcaggacccagtgcccatggttcctcactcctaccagcaagcagcaccatcccgcaggcttctcccacctgatggctgttctcccaccgggtctgggctctggaaggagccagatgcccccagaaaggtgggtggtggagacggcaccagatgtaccagttttctgcagttccttataggcgaagggaaccgggtggaaaccaagctgggagaggctgaggatggcagggctggaagggccatcagcgtgaccctcattttcaagaaggggaaactgaggcccagggaggagagtaactgaaggtcacagcacggtcacagcagaggtggccgaacccagccctctgcgcgccagtgctgtgcggtctccacacccttacggtttcctagaatcagggatgttagtgtaagtctataggaatataggggggtgggggggtcaccttttgccttgaaatgggaagtcagtagccccttcctcctcctccctcctccccctcctctctggcagggatctcagatgaccgtggcctccctctcagagggggagaacgccagagccctggctggtgatgtgctggctgggggtgaatcccaatgagggtccctctcagagcgggagaacgccagagccctggatggtgatgcgctggctgggggtgaatcccaatgagggtccctctcagaaagggagaacgccagagccctggctggtgacatgctggctgggggtgaatccgaatgacagtgcagacgttctcccatccaccatgtctgagcttgggggaattgcctcatttcccctggaaaagaaacatggtccattagaggggaaagcccaggggtgaatcttcacgccccaaacagtgcccggtggggaggaggcacccgctccttgttgagtaaaaccacccatggagactggaacctcatctccctgggtcggggggtgttcaaggccacaggacaaggggagcaccctgggccacacaggcgtggaggtgtccccaccccttccacctgtcccccagacccaaagctctctccccaccctacctgcccacctggggctcctgtgccccctccccactccagaggccaccctacaagttgtcctcaaggtcatcctggagatgggatccaggacgtggggccatgactctctgggaccttgccacagcccccattcccctgcttgcagtctgcaaggacacctttgcagggattcttgtcctgctggccaccccacccacacctgtccctggccagcaggccgcctgcaagcgtcaggcacacagggacagacatggcgagcacagtgcaggcccggggcccacgggcaacatggaaccctgggaactgccctcccccttagctcacagtgcctgcggtagccactctaggtcgttggccttccttgaccactccatttaattctctctgctgtttgggttgggtttttccccttagttatctgtgggtttcctgtattttatgttaatatttctattaagaacatgttgggcatgtggacccaagcacctgggaaggaggtggcatctgagacagcctgatacgttcccgtctgtgcacccatggagatccaggcgtgggcccgtgtctgtccctggttgtaaattcgagggtctgcatatctgatgttcaggtagacctgggcgcctgggaacgaggccatcagctgccatgcacataacaaagagacaatgcattccttcttatttttcctttttaaaaatcgatgaatcatttgtgatgcttttaacaaagattaaatgaatttgatcagc

SEQ ID NO: 205713 - protein, 1907 aa, Artificial Sequence
  derived and/or modified sequence
MEVAWLVYVLGQQPLARQGEGQSRLVPGRGLVLWLPGLPRSSPSWPAVDLAPLAPARPRGPLICHTGHEQAGREPGPGSSTKGPVLHDQDTRCAFLPRPPGPLQTRRYCRHQGRQGSGLGAGPGAGTWAPAPPGVSKPRCPGRARPGEGQQQVTTARPPAINRGARQPRAGAAAAGRGPGAGAWRTGEAAASAGPAVGEGGAMGSRRAPSRGWGAGGRSGAGGDGEDDGPVWIPSPASRSYLLSVRPETSLSSNRLSHPSSGRSTFCSIIAQLTEETQPLFETTLKSRSVSEDSDVRFTCIVTGYPEPEVTWYKDDTELDRYCGLPKYEITHQGNRHTLQLYRCREEDAAIYQASAQNSKGIVSCSGVLEVGTMTEYKIHQRWFAKLKRKAAAKLREIEQSWKHEKAVPGEVDTLRKLSPDRFQRKRRLSGAQAPGPSVPTREPEGGTLAAWQEGETETAQHSGLGLINSFASGEVTTNGEAAPENGEDGEHGLLTYICDAMELGPQRALKEESGAKKKKKDEESKQGLRKPELEKAAQSRRSSENCIPSSDEPDSCGTQGPVGVEQVQTQPRGRAARGPGSSGTDSTRKPASAVGTPDKAQKAPGPGPGQEVYFSLKDMYLENTQAVRPLGEEGPQTLSVRAPGESPKGKAPLRARSEGVPGAPGQPTHSLTPQPTRPFNRKRFAPPKPKGEATTDSKPISSLSQAPECGAQSLGKAPPQASVQVPTPPARRRHGTRDSTLQGQAGHRTPGEVLECQTTTAPTMSASSSSDVASIGVSTSGSQGIIEPMDMETQEDGRTSANQRTGSKKNVQADGKIQVDGRTRGDGTQTAQRTRADRKTQVDAGTQESKRPQSDRSAQKGMMTQGRAETQLETTQAGEKIQEDRKAQADKGTQEDRRMQGEKGMQGEKGTQSEGSAPTAMEGQSEQEVATSLGPPSRTPKLPPTAGPRAPLNIECFVQTPEGSCFPKKPGCLPRSEEAVVTASRNHEQTVLGPLSGNLMLPAQPPHEGSVEQVGGERCRGPQSSGPVEAKQEDSPFQCPKEERPGGVPCMDQGGCPLAGLSQEVPTMPSLPGTGLTASPKAGPCSTPTSQHGSTATFLPSEDQVLMSSAPTLHLGLGTPTQSHPPETMATSSEGACAQVPDVEGRTPGPRSCDPGLIDSLKNYLLLLLKLSSTETSGAGGESQVGAATGGLVPSATLTPTVEVAGLSPRTSRRILERVENNHLVQSAQTLLLSPCTSRRLTGLLDREVQAGRQALAAARGSWGPGPSSLTVPAIVVDEEDPGLASEGASEGEGEVSPEGPGLLGASQESSMAGRLGEAGGQAAPGQGPSAESIAQEPSQEEKFPGEALTGLPAATPEELALGARRKRFLPKVRAAGDGEATTPEERESPTVSPRGPRKSLVPGSPGTPGRERRSPTQGRKASMLEVPRAEEELAAGDLGPSPKAGGLDTEVALDEGKQETLAKPRKAKDLLKAPQVIRKIRVEQFPDASGSLKLWCQFFNILSDSVLTWAKDQRPVGEVGRSAGDEGPAALAIVQASPVDCGVYRCTIHNEHGSASTDFCLSPEVLSGFISREEGEVGEEIEMTPMVFAKGLADSGCWGDKLFGRLVSEELRGGGYGCGLRKASQAKVIYGLEPIFESGRTCIIKVSSLLVFGPSSETSLVGRNYDVTIQGCKIQNMSREYCKIFAAEARAAPGFGEVPEIIPLYLIYRPANNIPYATLEEDLGKPLESYCSREWGCAEAPTASGSSEAMQKCQTFQHWLYQWTNGSFLVTDLAGVDWKMTDVQIATKLRGYQGLKESCFPALLDRFASSHQCNAYCELLGLTPLKGPEAAHPQAKAKGSKSPSAGRKGSQLSPQPQKKGLPSPQGTRKSAPSSKATPQASEPVTTQLLGQPPTQEEGSKAQGMR

SEQ ID NO: 205714 - DNA, 5724 bp, Artificial Sequence
  derived and/or modified sequence
atggaggtggcgtggttggtgtacgtgctagggcagcaacccttagccaggcagggcgaaggccagtcaagactggtgcccggccgaggtctcgtcctgtggttgcctggtctgcctcgctccagccctagctggcccgccgttgacttagccccgctcgcccccgccaggccccgcggacctctcatctgtcatacaggacatgagcaggctggccgcgagccaggccccggcagctctacaaagggtcctgtcctgcacgatcaggacacccggtgtgcattccttcccagaccacccgggcccctgcaaaccaggcggtattgccgtcaccagggaagacaaggctcaggtctgggcgctgggcctggggctggtacttgggcacccgcaccacccggcgtttcgaaacctaggtgccccggccgggcaagaccaggggaaggacaacagcaggtgactacagctcgacccccggccattaaccggggcgcacgccaaccgcgagccggagcagccgcagcgggcaggggtcccggagccggggcatggagaacaggagaggccgctgcctccgcagggcccgcggtcggagaaggcggagctatgggctcccgaagagcaccctcccgtgggtggggggctggtggccggtctggtgccggcggtgatggagaagatgacggacccgtgtggatccctagccctgcaagccgctcttaccttctctccgtgcgacccgagacctcgctctcatccaatcgcctgagtcacccttcatcaggtagatcaacattttgctcaattattgctcagctgaccgaagagacccaacccctcttcgaaactaccctcaagagtaggtcagtgtccgaagacagcgacgtacgatttacttgcatcgtgaccggctatcccgagcctgaggtaacctggtacaaggatgacactgaactggatcgatattgtggacttcccaagtacgaaattacccatcaaggtaatagacacacccttcaattgtacagatgccgagaagaagacgcggccatttaccaagcttcagcacagaatagcaaggggatcgtgtcttgctctggcgttctggaagtgggaactatgacggagtataagatacaccagcggtggtttgcgaagttgaaaaggaaggccgctgccaagctgcgagagatcgaacagtcctggaaacatgaaaaggctgtcccaggggaggtggacactctgagaaaattgtctccggacagattccagcgcaagaggcggctctcaggagcccaagctccaggtccttctgtgcctacccgcgaacccgaaggtggtaccctggccgcttggcaggaaggagagacagaaaccgcgcagcacagtggcctcggcctcatcaactccttcgcctcgggtgaggtgacaaccaatggagaggccgcccctgaaaatggggaagatggagaacacgggctgcttacttatatctgtgacgctatggaactgggcccacagcgcgcactgaaagaagagtcgggagccaaaaagaaaaagaaggacgaagagagtaaacagggactgagaaaaccggagctggaaaaggccgctcagagtcggagatcatcagagaattgcattccatccagcgacgagcccgattcgtgtggaacccagggtcctgtcggggttgagcaggtccagacccaaccgagagggcgagccgccagaggccccggctcgtccggcaccgactccacacgcaagccagcttccgctgtggggaccccggataaagcccagaaagcacccggtccaggcccgggacaggaagtctacttttcactcaaggatatgtatctggaaaatactcaggcagttcgccccctgggagaggagggcccgcagactctgagcgtgagggcccccggcgagtcacctaagggcaaagccccccttcgagccagaagcgaaggagtgccgggcgcccccgggcagccaactcactccctgactcctcagcctacacgtccatttaatagaaagagatttgcaccgcctaagccaaaaggcgaggccacaactgactcaaagcccatctccagtctgtctcaggccccagaatgcggagcccaatccctggggaaagctccaccccaagcatctgtccaggtgcctactccccccgccagacgacgccacgggacacgcgactctactcttcagggacaggccggtcacaggacaccaggagaagtgctcgagtgtcagaccaccacagccccgaccatgtcagccagctcctccagcgacgtggcctcaatcggagtaagtacatccggatctcagggaattattgaacctatggacatggagacacaggaggacggaaggacctcagctaatcagcgaactggcagcaagaagaatgtacaggcagacggcaaaatccaagtcgacggcagaactcggggtgacggaactcagacggcgcagcgtactagggccgatcggaaaacccaggtcgatgcaggcactcaggaaagcaagcgtccccagtcagataggtctgcccagaaaggaatgatgacgcagggaagagccgaaacacaactcgagacaactcaggctggagagaaaattcaggaagacaggaaggctcaggctgacaagggaacacaggaggatcgaaggatgcagggagagaaaggcatgcaaggtgagaagggaacccaatccgaaggcagtgctcctactgcaatggagggccagtcagagcaggaggtggccacctcccttgggcctccttctcggacacctaagctgccccctacggcgggcccgagagctcccctcaacatagagtgttttgtccaaactccggagggatcctgcttccctaaaaaaccaggttgccttccaaggtcagaagaggccgtggttaccgccagccgaaaccatgagcaaaccgtacttggacccctgagcggaaacctcatgttgcctgcacagccccctcacgaaggctcggtggaacaggtgggcggggaacggtgcagggggccacaaagctctggtcctgtggaggccaagcaagaagattcaccttttcagtgcccgaaagaggagcggcccggcggggtgccatgtatggaccagggaggctgtccgctggccggactgagccaggaggttcctacgatgccctccttgcctggaaccggcctgacagcctccccaaaggcaggcccctgctcaacccccactagccaacacggcagcaccgcaaccttcctgccctctgaggatcaggtgctcatgtcaagtgcacctacgctccacctggggctcggaacgccaacacagtcccacccgcctgaaacaatggcaacatcttccgaaggtgcctgcgctcaggtaccagacgtagaaggacgaacccctggacccaggagttgtgatccaggcttaatcgactccctgaagaattacttactgcttcttttaaagctgtcgagtacagagacaagcggggctggcggggaatcacaagtaggtgccgctacgggggggctcgtgccgtcagccacattgactcccactgtcgaagttgcagggctatctcctcggacctcacgcagaatcttagagagagtcgagaacaatcacctcgttcagagcgcgcaaacccttctcctaagtccctgtacttcacggcgccttaccgggttactagatcgggaagtgcaggctggtagacaggcattagcagctgctcgaggctcttggggacctgggcccagctcactgacagtgccagcgatcgtggtagacgaagaggatccaggactggcgtcagagggagcctcagagggcgaaggcgaagtcagtcccgaaggccccgggctcctgggcgcaagccaagagagctccatggctgggagactaggcgaagcgggtggacaagcggcccctggacagggcccttccgcagaatccatagcccaagaaccatcccaagaagagaaattccccggcgaggcactgaccggtctgccagccgccacaccagaagagttggccttgggcgcccgcaggaaacgctttttgcctaaggtgagggcagccggcgacggcgaggcaaccacacccgaagaaagagaatctccaactgtgtccccaaggggcccccgcaagagcctcgtgcctggctcccctggtactcccggccgggaacgccggagccccactcagggacgcaaggcctccatgctcgaggtgcctcgggcagaagaggaactggccgctggtgatttgggccctagcccaaaggccgggggactggacactgaggtggcccttgacgagggaaaacaggaaaccttggccaaaccacgtaaagcaaaagacctcctcaaggcacctcaggtgatccgcaagattagagttgagcaattccccgacgcctccggatctttgaaactgtggtgccagttttttaacattctgtcggacagcgtgttgacctgggccaaagaccagcgccctgttggtgaagttggacgctcagccggtgacgagggccctgcagccttggctatcgtacaggctagccctgtggactgtggggtctacaggtgtaccattcacaatgagcatggcagcgcctccacagatttttgcctcagcccggaggtgctttccggtttcatttctcgtgaagaaggtgaggtcggtgaagagatcgagatgacccccatggtctttgctaaaggccttgctgacagcggctgttggggtgataaactgttcggccgcctggtgagcgaggagctgcggggcggcggttacggttgcggattacgcaaagcaagccaggctaaggtaatttacgggctcgagccaatattcgaatccggccgcacatgcatcatcaaggtgagtagcctgctggtcttcggccccagtagcgagacatctctggtgggtcggaattatgatgtcacaattcaaggctgcaagattcagaatatgagcagagagtattgcaagattttcgccgccgaggcgagagccgcccctgggtttggcgaggtgcctgaaatcatacccctgtacttgatctatagacctgcaaacaatatcccttatgcaacccttgaagaggatctgggaaaacccctggagtcctattgtagccgcgaatgggggtgtgccgaagctccaaccgcgagtggctcttctgaagctatgcagaaatgtcagacgtttcaacactggctataccaatggaccaatgggagtttcctggtgactgatctggcaggcgtcgattggaagatgacagatgtgcagatcgcgactaagctgcggggttatcaaggtctgaaagaatcatgcttccccgcactccttgacaggttcgcctccagccatcagtgtaacgcgtactgtgagctgttggggctgactccactcaagggccctgaagctgcacaccctcaggcgaaggcaaagggaagtaaatcacccagtgcaggaaggaaaggctctcagctgtctccccagccccaaaagaagggcctgcccagcccccagggcactcgtaaatctgctccgtcctccaaagcgacacctcaagcatccgagcccgttaccactcagcttctaggtcagccccctacacaggaagaaggctccaaagcccaaggaatgagatag

SEQ ID NO: 205715 - DNA, 5724 bp, Artificial Sequence
  derived and/or modified sequence
atggaggtggcctggctggtgtatgtgctgggccagcagcccctggcccggcagggcgagggccagagccggctggtgcccggccggggcctggtgctgtggctgcccggcctgcccaggagcagccccagctggccagctgtggacctggcccccctggccccagcccggccccggggccccctcatctgccacacaggccacgagcaggccggccgggagcccggccctggcagcagcaccaagggccctgtgctgcatgaccaggacacccgctgtgccttcctgcccaggcctcctggccccctgcagacccggcgctactgccgccaccagggccggcagggcagcggcctgggcgccggccctggagctggcacctgggccccagcccctcctggggtgtccaagccccgctgccccggccgggcccggcctggagagggccagcagcaggtgaccacagcccggcccccagccatcaacagaggagcccggcagccccgggccggggctgctgctgctggccggggccctggagctggggcctggaggactggagaggccgccgccagcgctggccctgctgtgggggagggcggggccatgggcagccggcgggcccccagccggggctggggcgccggcggccgctctggagctggaggagatggagaagatgatggccctgtgtggatccccagccctgccagccgcagctacctgctgtctgtgcggcctgagaccagcctgagcagcaaccggctgagccaccccagcagcggccgcagcaccttctgcagcatcatcgcccagctgacagaggagacccagcccctgtttgagaccaccctgaagagccgctctgtgtctgaggacagtgatgtgcgcttcacctgcatcgtgacaggctacccagagcctgaggtgacctggtacaaggatgacacagagctggaccgctactgcggcctgcccaagtatgagatcacccaccagggcaacagacacaccctgcagctgtaccgctgccgggaggaggatgctgccatctaccaggccagcgcccagaacagcaagggcatcgtgtcctgcagcggcgtgctggaggtgggcaccatgacagagtacaagatccaccagcgctggtttgccaagctgaagaggaaggccgccgccaagctgcgggagattgagcagagctggaagcatgagaaggctgtgcctggagaggtggacaccctgaggaagctgagcccagaccgcttccagaggaagaggcggctgagcggggcccaggcccctggccccagcgtgcccacccgggagcctgagggcggcaccctggccgcctggcaggagggggagacagaaacagcccagcacagcggcctgggcctcatcaacagctttgccagcggggaggtgaccaccaatggagaggccgccccagaaaatggagaagatggagagcacggcctgctgacctacatctgtgatgccatggagctgggcccccagagggccctgaaggaggagagcggggccaagaagaagaagaaggatgaggagagcaagcagggcctgaggaagccagagctggagaaggccgcccagagcagaagaagcagcgagaactgcatccccagcagtgatgagccagacagctgtggcacccagggccctgtgggcgtggagcaggtgcagacccagccccggggccgggccgcccggggccctggcagcagcggcacagacagcaccaggaagccagccagcgctgtgggcaccccagacaaggcccagaaggcccctggccctggccctggccaggaggtgtacttcagcctgaaggacatgtacctggagaacacccaggccgtgcggcccctgggggaggagggcccccagaccctgtctgtgcgggcccctggagagagccccaagggcaaggcccccctgcgggcccggtctgagggcgtgcctggggcccctggccagcccacccacagcctgaccccccagcccacccggcccttcaacaggaagagatttgccccacccaagcccaagggggaggccaccacagacagcaagcccatcagcagcctgagccaggccccagaatgtggggcccagagcctgggcaaggccccaccccaggcctctgtgcaggtgcccaccccaccagccaggagaagacatggcacccgggacagcaccctgcagggccaggccggccacaggaccccaggagaggtgctggagtgccagaccaccacagcccccaccatgtctgccagcagcagcagtgatgtggccagcattggagtgtccaccagcggcagccagggcatcatcgagcccatggacatggagacccaggaggatggccgcaccagcgccaaccagaggacaggcagcaagaagaatgtgcaggctgatggcaagatccaggtggatggccgcaccagaggagatggcacccagacagcccagaggaccagggctgacaggaagacccaggtggatgctggcacccaggagagcaagaggccccagagcgacagaagtgcccagaagggcatgatgacccagggccgggcagagacccagctggagaccacccaggccggggagaagatccaggaggacaggaaggcccaggccgacaagggcacccaggaggacaggaggatgcagggcgagaagggcatgcagggcgagaagggcacccagagcgagggcagcgcccccacagccatggagggccagagcgagcaggaggtggccaccagcctgggcccccccagcaggacccccaagctgcccccaacagctggcccccgggcccccctgaacatcgagtgctttgtgcagaccccagagggcagctgcttccccaagaagccaggctgcctgcccaggtctgaggaggccgtggtgacagccagcaggaaccacgagcagacagtgctgggccccctgagcggcaacctgatgctgcctgcccagccccctcatgagggctctgtggagcaggtgggcggggagcgctgccggggcccccagagcagcggccctgtggaggccaagcaggaggacagccccttccagtgccccaaggaggagaggcctgggggcgtgccctgcatggaccagggcggctgccccctggccggcctgagccaggaggtgcccaccatgcccagcctgcccggcaccggcctgacagccagccccaaggccggcccctgcagcacccccaccagccagcacggcagcacagccaccttcctgcccagcgaggaccaggtgctgatgagcagcgcccccaccctgcacctgggcctgggcacccccacccagagccaccccccagagaccatggccaccagcagcgagggcgcctgtgcccaggtgcctgatgtggagggccgcaccccaggccccaggagctgtgaccccggcctgattgacagcctgaagaactacctgctgctgctgctgaagctgagcagcacagagaccagcggggccggcggggagagccaggtgggcgccgccaccggcggcctggtgcccagcgccaccctgacccccaccgtggaggtggccggcctgagccccaggaccagccgccgcatcctggagcgggtggagaacaaccacctggtgcagagcgcccagaccctgctgctgagcccctgcaccagccggcggctgaccggcctgctggaccgggaggtgcaggccggccggcaggccctggccgccgcccggggctcctggggccctggccccagcagcctgactgtgcctgccatcgtggtggatgaagaagatcctggcctggccagcgagggcgccagcgagggggagggggaggtgtccccagagggccctggcctgctgggcgccagccaggagagctccatggccggccgcctgggggaggccggcggccaggccgcccctggccagggccccagcgctgagagcatcgcccaggagcccagccaggaggagaagtttcctggagaggccctgaccggcctgcctgctgccaccccagaggagctggccctgggcgcccggaggaagcgcttcctgcccaaggtgcgggctgctggagatggagaggccaccaccccagaggagcgggagagccccaccgtgagcccccggggccccaggaagagcctggtgcccggcagccctggcaccccaggccgggagcggcgcagccccacccagggcaggaaggcctccatgctggaggtgcccagggctgaggaggagctggccgccggggacctgggccccagccccaaggccggcggcctggacacagaggtggccctggatgagggcaagcaggagaccctggccaagcccaggaaggccaaggacctgctgaaggccccccaggtgatcaggaagatccgggtggagcagttcccagatgccagcggcagcctgaagctgtggtgccagttcttcaacatcctgagtgacagcgtgctgacctgggccaaggaccagaggcctgtgggggaggtgggccgctctgctggagatgagggccctgctgccctggccatcgtgcaggccagccctgtggactgtggggtgtaccgctgcaccatccacaatgagcacggcagcgccagcacagacttctgcctgagccctgaggtgctgagcggcttcatcagccgggaggagggggaggtgggggaggagattgagatgacccccatggtgtttgccaagggcctggccgacagcggctgctggggagacaagctgtttggccgcctggtgtctgaggagctgcggggcggcggctacggctgcggcctgaggaaggccagccaggccaaggtgatctacggcctggagcccatctttgagagcggccgcacctgcatcatcaaggtgagcagcctgctggtgtttggccccagcagcgagaccagcctggtgggcagaaattatgatgtgaccatccagggctgcaagatccagaacatgagccgggagtactgcaagatctttgctgctgaggcccgggccgcccctggctttggagaggtgcctgagatcatccccctgtacctgatctacagacctgccaacaacatcccctatgccaccctggaggaggacctgggcaagcccctggagagctactgcagccgggagtggggctgtgccgaggcccccacagccagcggcagcagcgaggccatgcagaagtgccagaccttccagcactggctgtaccagtggaccaacggcagcttcctggtgacagacctggccggcgtggactggaagatgacagatgtgcagatcgccaccaagctgcggggctaccagggcctgaaggagagctgcttccctgccctgctggacagatttgccagcagccaccagtgcaatgcctactgtgagctgctgggcctgacccccctgaagggccctgaggccgcccacccccaggccaaggccaagggcagcaagagccccagcgctggcaggaagggcagccagctgagcccccagccccagaagaagggcctgcccagcccccagggcaccaggaagagcgcccccagcagcaaggccaccccccaggccagcgagcctgtgaccacccagctgctgggccagccccccacccaggaggagggcagcaaggcccagggcatgaggtag

SEQ ID NO: 205716 - DNA, 10917 bp, Artificial Sequence
  derived and/or modified sequence
gtatcaggactcagcccatttccccctctggtgctgagaaatggaggccgaaggagtgatctagaagtgttaattgagcccctaatctatgctagttactgggggtgttgggggagacaggagagagatcccacggggttccggcctcccagggactcaggtcactaatggaggtggcttggcttgtctatgtgctgggccaacagccactggcgaggcaaggcgagggtcagtcacggctggtgccaggaagagggctggttctttggctccctggtctcccgcggtctagcccaagctggccagcggttgacctggctcccctggccccggccaggcctcgtggacccctcatatgccacacgggacatgagcaggccggccgggagccgggtcccgggagctccacgaaggggcctgtcctccatgaccaggacacccgctgcgccttcctcccgaggcctcccgggcctctccagacgcggcgctactgcagacaccagggccgccaagggagcggactcggagccggccctggggcgggcacatgggccccggcgccccccggcgtctccaagccgcgctgcccgggtcgggccaggccaggggagggacagcagcaggtgacgacggcccggccaccggctataaataggggcgcgcgtcagccgcgggcgggagcggcggcggcgggcaggggcccgggggccggggcctggaggacaggcgaggcagcggcgagtgcggggccggcggtcggggagggcggtgccatggggtcgcggagggcccccagccggggctggggcgcgggtgggcggtcgggggcggggggcgacggtgaggacgacggccccgtgtggatccccagcccagccagccggagctacctgctcagcgtgcggcccgagaccagcttatcaagcaaccggttgtctcaccccagctctggaaggagcaccttctgctccatcattgctcagctcacagaggagacccagccgctatttgagaccacgctcaagtcccggtctgtgtccgaggacagcgacgtcaggttcacctgcatcgtcacaggatacccagagccagaggtgacctggtacaaggatgatacggagctggaccgctactgtggcttgccaaaatatgagatcactcatcagggcaaccgccacacactgcagctgtacaggtgtcgagaagaagatgccgccatctaccaggcctctgcccagaacagcaagggcattgtgtcctgctcaggggtcctggaggtgggcaccatgactgagtacaagatccaccagcgctggttcgccaagttgaagcgcaaggctgcggcaaagctgcgcgagatcgagcagagctggaagcacgagaaggcggtgcctggggaggtcgacactctgcgcaagctcagccccgaccgcttccagcgaaagcggcgattgagcggggctcaagcgccgggcccctcggtccctaccagggagcctgagggtgggaccctggcggcttggcaggagggagagactgagactgctcagcactcaggtttgggcctgatcaacagttttgcttctggagaagtgaccaccaacggggaggctgcccccgagaatggagaggacggagagcatggcttgctgacatacatctgtgacgccatggagctggggcctcagagagccctcaaagaggagagtggggccaagaagaaaaagaaagatgaggaatccaagcaaggcctgcggaagccagagttagagaaggcagcccaaagccgccgttcttcagaaaactgcatccccagctcagacgagcctgactcctgtgggactcaggggcccgtgggcgtggagcaggttcagacccagcccagaggcagggctgcacgggggcctgggtcctctggcacagatagtaccaggaagccagcctctgctgtgggcactccagacaaggcccagaaggcccctggcccaggcccaggccaggaagtgtatttctccttgaaggacatgtacctggagaacacccaggcagtcaggcctcttggggaagagggaccccagaccctgagtgtccgggcgcctggggagagtcccaaggggaaggcacccctcagggctagaagcgagggggtgcctggcgctcctggccagcccacacactccttgaccccccagccgactaggcctttcaacagaaagagatttgcccctccaaagcccaaaggagaggccaccactgacagcaagcccatttcttctctgagtcaagctccagaatgcggggcccagagcttaggaaaggccccacctcaggcctctgtgcaggtgccgacgccccctgcccggcggagacatggcacccgggacagcacgttgcaggggcaagcaggccacaggactccaggagaggtcctggaatgccagacaaccacggctcctaccatgtcggccagcagcagctctgatgtagcctccattggggttagcacttccggaagtcaaggtatcattgaacccatggatatggaaacccaggaggatgggagaacatctgctaaccagagaactggaagcaagaagaatgtgcaggcagatgggaagatacaagtggatggaaggaccaggggagatggaacacagacagcccagaggacacgtgcagataggaagacgcaggtggatgctgggacacaagaaagcaagaggccacagtcagacaggagtgcacagaagggcatgatgacacagggaagggcagagacacagctagaaacaacacaggcaggtgagaagatacaggaagacaggaaggcccaggcagataagggcacacaggaagacagaaggatgcagggagagaaggggatgcagggagagaaggggacgcagtcagaggggagcgcgcccacagccatggaaggtcagtctgagcaagaggtggcaaccagcctcggcccaccatccagaacccccaaactcccacctacagcgggtcctagagctcctctgaatattgaatgttttgtacagaccccagaagggtcttgtttcccaaaaaaacctggttgcctgcccagatctgaggaggcagtagtaacagcctccaggaaccatgagcaaactgtgctgggtcccctgtcagggaacctcatgctcccagcacagccgccccatgaggggagtgtggagcaggtgggaggagagagatgccgagggccacagtcatcaggcccagtcgaggccaagcaggaggacagcccgttccagtgccccaaggaggagcggccagggggagtgccgtgtatggatcagggtggctgtcctctagctggcctgagccaggaggtacccacgatgccttctcttcctggaactgggctgacagctagcccaaaggcggggccgtgtagcaccccgacttctcagcacgggagcacagccaccttcctgccctctgaggatcaggtcctgatgagttctgccccaacactgcacctggggctggggacccccactcagagtcacccaccagaaaccatggccaccagcagtgagggggcctgcgcccaggtaccagatgtggaggggcggaccccaggtccccggagctgtgaccctggcctcatagattccctgaagaactacctgcttctgctgctgaagctgtccagcacagagacaagtggagcagggggagagtcccaggtgggggcagccaccggaggtctggtgccctcagccactctgacacccactgtggaagtggctgggcttagtccccggacatcgaggcgcatcctggagcgtgtggagaacaaccacctggtgcagagtgcacagaccctgctgctgagcccctgtacctcccgccgcctcaccggcctcctggaccgtgaggtgcaggctggccgccaggcccttgctgctgcccgaggctcctggggtcctggtcccagctccctcactgtccctgccattgtggtagacgaggaggaccctgggctggcctcagaaggagccagtgagggtgaaggagaggtttcccctgaggggcctggcctcctgggggcctctcaggagagcagcatggctggtcgactgggggaggcgggtgggcaggcagcccctggacaggggccctcagcagagagcatagcccaggagccctcccaagaggagaagttcccaggggaggctctgacaggtctcccggcagctacacctgaggaactggctctaggggcccggaggaagagatttctccctaaggtcagagcagcaggagacggggaggcaaccacacctgaagaaagggagagccccacggtttccccccgggggcccaggaaaagcctggtgcctgggtccccagggactccagggcgggagagacgctcccctacgcagggcagaaaggcgagcatgctggaggtgcctcgggcagaggaggagctggcggcaggagacctgggccccagccccaaggccggcggtctggacacagaggtggccctggatgaaggcaagcaggagacactggccaagcccaggaaagccaaagacctgctgaaagccccacaggtgatccggaagattcgggtggagcagtttcctgatgcctccggtagcctgaagctgtggtgccagtttttcaacattcttagtgactcagtcttgacatgggccaaggatcagcgcccagtgggcgaggtgggcaggagcgcaggggatgaggggccggcggccttggccatcgtgcaggcctcccccgtagactgcggtgtgtatcggtgcaccatccacaatgagcacggctcggcctccaccgacttctgcctcagccctgaggtgttgtcaggattcatctccagagaagaaggtgaagttggagaagagattgagatgacccctatggtgtttgctaagggtctggctgactctggctgctggggggacaagctctttgggcgactggtaagcgaggagctccgagggggtggatatgggtgtggccttcggaaggcctcccaggccaaggtcatctacgggctggaacccatcttcgagtcgggccgcacgtgcatcatcaaggtgtccagcctgcttgtgtttgggcccagcagtgagacttctcttgtgggcagaaactacgacgtcaccatccaggggtgcaagatccagaacatgagtcgggagtactgcaaaatcttcgcagcagaagcccgggccgcgcctggctttggggaggtgcctgagatcatcccactgtatctgatctaccggcctgcaaacaatatcccatatgctaccctggaggaagacctgggcaagcccctggagtcttactgttctcgggaatggggctgtgctgaggctccgacagcatctggcagctctgaggccatgcagaaatgccagaccttccaacactggctgtatcagtggacaaatggcagcttccttgtcacagacttggcaggggttgactggaagatgactgatgtgcagattgctaccaaactccgaggataccagggcctcaaggaaagctgcttccctgccctgctggaccggttcgcctcctcccaccagtgcaatgcctactgtgagctgctggggctgacacctctcaagggcccggaggcggcccacccccaagccaaagccaaaggctctaagagtccatctgctggcaggaaaggctcccagctgagtcctcagccccagaagaaaggcctccctagtcctcagggcacccggaagagtgctccaagttccaaggccacccctcaggcctcagagccagtcaccactcagttgttgggacagcctcccacccaagaggagggctccaaggcccagggcatgcggtagcctccgcagaggctgggggcctccacccagcagcagaccaaccaggaagcagcttgaactggatggagactttccaaatatggaactaactggagaaggtgcacgaaggagacaccacttggggacctctctgagcaggctctcgtgaatcagctcgtcatcagatggctttggtgcatggcacatagcccactggcctcttctggtgccactgtcacccagggctcccgggcctcaagcagtccccacctccaagtgcctggcaacctaggccctccttgaagtttacactttgccactgctggaggctcccctgagtcctctgcatgagttctgcaccccaagcccttgccccagcccagtccagcagcagatgttacaatctgagtgaggacatgcaggccaacttttaccctcctgcatttgcctggccctgatctcgcctgtcctcagggatccagacttcctctgctggtctggcctggtgactctcagggtatcttctccttccagctactttcgctcactgatctcagcttatcctgcaactaaccatccttgagcccagatggggctcagggcccttccagagcctgtcatgtccttgtgcagtggcctttgatgtgtgttcacgctcttcccccttcactcactcgcctgcttcccatgctcccttgtaccccctcgccacatccctgtcttggggcccagctgcagcctgctgcctgcccttcatggctctgcacatggccctttgcttgagggctccccactccctgcccaccaatacccaggtgaggaacagaccctctggcctctcaccccacttcagtgctctcttccccaacttctctcgggctctttgctcatgaggtgagagctggtgtgagggttgtgtcagcagctgtagccagagagaggtgttgactctgagagaccttgcactccatactgaaaggaggtggggtcacagtgaatttcacatcccctctcaaccaggagtggagggctaggtcccttccccatggggagtacacttgggtgttctaggagggatgcagtctatccatgcacttgggtggaggggagtctctgtgcctgggaattaggacccctgctccaaccatcgctcttgatcctggggccccagctctgggtcctcatgtatgggctcccaaggacccagcagcctggatccttccagagcatccctcctggaggcctgggatggggtaggtctgcagctagcctactccctttggaatgcaataaaggcagcattgtgtgccctgcttgccctcatctggtgtggttggaggtctgtggagtcaaggtccccctctcccaggcaggctctctgagggcattctgtagtcccaggcccactggaaaaatgaatctatattttggttcctggaccgaagttcagtcgcagccttctgtggccacagaaagacagcttgtgctgcttgcacaactgagctgctggtgtgtaccccttagcagggtgtctggggacttacgcctttggaattgctcttcattcagaagaggaacacaaaggaagccacccaggaaggaagcacagagctgggggctctggaaacgccctgtgtctctggctacagcaagaccagcccaggagcccaccagcacctgcctctcagctacttgctgaccatttcctgcttctcaagctgcagagaagcttttcattcccacccccacccggaacctccccttgcctaacatttcccctctatggtaacatctctgacttctctacctcctctgtgctcaggtgactccacatcttctgccccagtgtgtccccacctctcccagcctgtatacccagattactttggtgaactgagagctggagtactgttcattcatttattcattcacccactcattcagcagacatatactgagtgctactttatgccagaccctgggctggcagctgtttggaggcaaagatgtatgaggccatctcaggagagactacttgttaggattcttgagttttgaccaacagaaatgaacttggaccaacttaagcaaggaaaaagcgttcatgggaaggatgctgggatagctcacaaaaccaaaagaatagctgaacaattaattggccctgggaagggtgggagctggggcaactacgaggcttgcctcccaggagctgctgcggttggcagatcaacaccaacttgccattggttctagtgggtccccttccactcaagattcaaattccaagtgaaagaacctggcctggagctcagggcttcatagagtgggaggggggcagtcttccaaaagatgcggactcttgccacatggaatggtggagtacggaagggtggaaagggtttggtaggtaaaccctgaagatgcttctaacacacgtgctgttctcccatctcacgtatgacgactctcccacaggtaaccaaaaccacatttctctctgcttagggaattcaagatcatatctaacttcgaattccaggggtaatgacacggcttctattctccaaagtccagtgtcattagggataatctccctctttcagttttatcacaattccattttgaaattctacaacctgtagattaactggtaaaattaaccatattcaaccaaaattgtataacccagcaagaatggaagaatgggtaaagtctacagtccatttctagaactggtcatgagaactcatgtttatgatgatggacttttgatctggtggagggacccaaaccttcagttctgaagctcattagtggtcctacctgtgtgacaggcatttactattggactggcagtcccaggacaaactccaggaatccccccatgtccatctctactcctgccctcttttacgtagcagcaatcatattttcccttgatagggttcatcattctagatactccgatgacttctttataatgagcctgaagtggcctggtggctgcctcagcttccagttcagttgaatagctactacgtctttgaggatgtgctccttgctgggggactaaactctccacgccagcccagtcccaaacctaaacctcgggtatgagaaaagcattgagatctagcaatagcagggccatgtccacactgcgtcctatccctgaaggagaaacagcgccaggtatggttgccggctccaagcgcatgctgcctcctgcaggcctgacccagcctctcggggtgttgtttctggtgccatagttgaattttcaacaaaccatttcaccaccctctcaagacagctgctgctggtttgtgggttcctgacaagatgagtgaatgcctgcccatcaacccgttactattcttttagctgtaaagtgaattctctggttgggtgcagtatgtgaggaggtcacatgatgtttatggcatttgagaattccatggatattgatggcaggagaggcatgatgggttagaaaagcaaatccaaatccagaacaagggcccaaaagggccaagacaaattactgcccctctcagagccacaggtgtagacaggtgaaaacactggacagtgagtgagctacccacacacgacccactggtgccttcagagccttagcctggagcgacagtgtaccgttgataatggaacgcactggccatgccagactttatggctaggcggtcagataacactacgaggggcagcatggccaccaagtgtgccagggccaagtgttcaggctctcccagagcccagtggtgagccagaagggcattttgtacaaggataatggttactttttggccagagcatcacttggctccaaatcctgggttcccgtatcatattttcttgtcaggacttaccgcaagctatgtatggctccgcggtatgccacccatggaaagacacctcatgcaccattgacctgccaggtcacgtggcctgatggcagcgtcggctgcacaaaagactttcccagctgcaatgccttcgcctgctctaggcccaccccaaagctggcagtcttctaggtcagttggtaaatgggttagaacaagatgccccaaagtggcataaattgcatggaattaggccttagtggcgagggattcgacatacagtcatttgtcctacattgtgaaggaaacattctgacctcaaacagatccctcaaccccagaactttatagaaggggcagaccttggcattttcacatgatttatctcccactctgattcacatatgtttgaccaaggcactgggcagctgccaatttcccgtcccttctgtagtcccagatgaatggatacagacctctttggggaaggctgcaaggaaggttcacaacatgcatctaagtgttaaaataagtttttccttcaaaaatacatttgacttcctctccatttaaggtctggaaatcaagtgggagatcttgactttaccttggcacttgagacagaactgttggcccagaagtctttagttaaggtcattactaggccatatcttaggggcgtctggcctttttcattcctgggacccacagctcgaggtctggtttccatgccctatcccttacgatgagcgccctattttgttccttctgtctatctctgttgctgagatcagggagcccacgttcacagcagctctttcaagcagcctcccaggcctagagaggaaaatcagcagagcctcgtgaatgtatttctcgtggcaagaagggagctcatcttctgggtcctgccagagggcagtgagggggttgatgggctgggtgcatgccagggacccaatcaagcatttttatcttctgaaatctttgaattcctgcctttcttggatgtttggtcttttgatataatttagcatgggccaacatttggtccagatttgtattagccaagccctcctaaaatagtaataacagtatctggcgatttgagcttttacgtagaatgtagaatctctggtgagtgaacatatcaataaagacaacctgaaccaaaatta

SEQ ID NO: 205717 - DNA, 5724 bp, Artificial Sequence
  derived and/or modified sequence
atggaggtggcctggctggtgtacgtgctgggccagcagcccctggccaggcagggcgagggccaatcccgccttgttcctggtcgaggtcttgtgctgtggctgcctggtctcccacgaagttcgccatcctggcctgcagtggatctggcccctcttgctcccgcacgccctcgaggaccattgatctgtcacacggggcatgagcaggccggcagggaacctggcccaggttctagcactaagggccctgtattgcatgaccaagacaccaggtgtgctttcctgcccagacctcctgggcctctgcagaccagacggtattgtcgtcaccagggtaggcaggggtcaggcctgggcgcaggacccggcgctgggacttgggctccggcacccccaggggtctctaaaccccggtgccctgggagagctcgaccaggagagggacagcaacaggttacaacagccaggcctccagctattaaccgcggtgcacgccaacctagagcgggagcggcagctgcggggcggggtcccggcgccggtgcctggcggactggtgaagctgcagccagcgccgggcccgccgtgggtgagggcggggctatgggctcaagacgggcaccgtctagagggtggggagcaggagggagatctggggcaggaggcgacggtgaggacgatgggccagtatggatcccatctcccgcctcaaggagctacctgctctctgtcaggcctgaaaccagtcttagcagtaatcggttgagtcacccttctagcgggcggtcgacattctgcagtatcatagctcaactcaccgaggaaactcaacccctgttcgaaaccacattgaagagccggtccgtgtctgaagacagtgacgtcaggttcacatgtatcgtcactggataccccgagcccgaagttacatggtataaggacgacacagagctggacagatattgcgggcttcctaagtatgagattacccaccagggcaataggcataccctacagttatacaggtgccgcgaagaagacgccgcgatttatcaagcgagcgctcagaatagcaaggggatcgtctcctgttccggtgtactggaagtgggtaccatgaccgagtataaaatccaccaacgctggtttgcgaagctgaagagaaaagccgctgctaaactgagggaaattgagcagtcttggaagcatgagaaggctgtgcccggtgaggtggacacattgaggaagctgagtcccgacaggtttcagcgaaagcgccgcctctcgggtgctcaggccccaggtccgagcgttcccactagagaaccagaaggaggtaccttagccgcgtggcaggagggtgaaactgagaccgcccagcatagcggactaggattaattaattcgtttgcttctggcgaggtgactaccaacggggaggccgcgcctgaaaacggcgaggacggagagcacgggcttctcacctatatttgcgacgctatggagttgggaccccaacgggctttgaaggaagaatcgggcgccaaaaaaaagaaaaaggacgaagagtcaaaacagggccttaggaagccggaactggagaaggccgctcagtcacggcgctcttccgaaaactgcatacccagcagtgatgagccagattcttgtggcacccaggggcccgttggggttgaacaagtgcagactcaaccccgaggacgagccgcgagagggcccggctcgtctggtactgatagcacccggaagcccgcaagcgctgtgggcacgcccgacaaagctcagaaagctccaggtccagggccgggccaggaggtgtatttttctttgaaagacatgtacctcgaaaatacacaagccgtgcgtccccttggtgaagagggccctcagaccctctccgtacgggcccctggagagagtcctaaaggaaaggccccgctaagagctaggagcgagggagtgcccggcgccccaggccagccgacacactccctcacccctcagcccacaaggccctttaatcgaaagaggttcgccccccccaagcccaagggtgaggctacaaccgattcgaaacctattagctcgctaagccaggcccctgaatgcggagcgcagagccttggcaaggcgccacctcaggcatcagttcaggtgcccaccccaccagctaggagacggcatggcacgcgggacagcaccctccagggtcaggctggccatcggacgccaggcgaagtcctcgagtgccagactacaactgcacccaccatgagtgcttcctcgagttccgacgtcgcaagtataggcgtctctactagcggaagtcaaggaattattgagcctatggatatggagacccaggaggatgggcggacctcagcgaaccagagaactggctccaagaagaatgtgcaggctgatggtaagatccaggtcgacggtaggacaagaggggatggcacacagactgcgcaaaggaccagggctgaccgaaaaacgcaagtggatgccggcacccaggagagcaaaaggccccagtccgaccgctctgctcagaagggaatgatgactcagggccgtgccgagacacaacttgaaacaacccaggcaggagagaaaattcaagaagatagaaaagctcaagccgacaagggtacccaggaagaccggcgcatgcagggcgagaagggtatgcagggggaaaagggcacgcagtcagagggaagtgcccctacagccatggagggccagagcgagcaggaagtcgctacctccctgggaccaccctctagaacccctaaattaccccccactgctggaccaagagcacctcttaatattgaatgctttgtgcagactcctgaaggctcatgtttcccaaaaaagcccgggtgcctcccaaggtcggaggaggcagtggttacagcttctcgcaatcacgagcaaaccgtcctcgggccgctgagtgggaatctaatgctgcccgcgcaacctccacatgaaggttctgtcgaacaggttggcggagaaaggtgtcgaggtccccagtcgagcgggccagttgaagccaaacaggaagatagtccgttccaatgcccaaaagaagagcgaccaggtggggtgccgtgtatggatcaaggcggatgccccttggcaggcctgagtcaggaagtgcctacaatgccctcactgcctggaaccggacttactgcctctccaaaagcgggtccttgctccacaccaaccagtcagcacggctctacagcaacttttcttccctctgaagaccaggtgcttatgtctagtgcacctaccctgcatctgggcttgggtacccccacacagtcacacccgccagagactatggcaacttcaagcgagggagcctgtgcccaggttccagacgtggaaggacgcactccaggtccccgtagctgtgatccaggactgattgacagcctgaaaaattatttactgttgctgctcaagctctcctccacagagacgagcggagctgggggggaatcacaggtaggtgccgctaccggaggcctggtgccctcagctactctaacacccacggtggaggtcgccggcctgtccccacgcacgtcgaggaggattctggaacgggtggagaataatcacctcgtacagtcggcccaaaccttgctgctgagcccctgtacaagtcgaagacttaccggtctgctggaccgcgaggtccaagcaggccgccaggcactcgcagctgccagggggtcttggggtcctggcccctcgagtctgacagtgcccgcaatcgtcgtggacgaagaggatcccggcctggcgagtgagggggcttctgaaggggagggggaagtctcacccgagggccccggcttgctgggggcctcccaagagtccagcatggcgggaaggctgggggaggccggcggccaggcggcccccggtcaggggccgtctgccgaaagtattgctcaggagccttcccaagaggagaagtttcctggagaagcgctgactggactccctgcagcaacccccgaggaactggctttgggagccagaagaaaaaggttcctgccgaaagtcagggccgccggcgacggagaagctacgactccagaagagagggagtccccgactgtctccccccgcggccctcggaaatccttggtcccaggaagtccgggaactccggggcgagagaggagaagtcccacccagggtcggaaagcctccatgcttgaggtcccaagagcggaagaggaactagcagcaggcgacctcggcccaagtcctaaggccggaggcttggataccgaagtcgctctggacgaaggcaagcaagagaccttggcgaagcctcggaaggcgaaggacctgctgaaggccccacaagtgatcagaaagatcagggttgagcagttcccggatgcatctggttcactgaaactgtggtgccaattttttaacattctaagcgattctgtgttaacatgggctaaagatcagaggcccgtaggcgaagtcggaaggtccgctggcgacgagggacctgcggctctggcaattgtccaggcatcccctgtcgattgcggggtgtatcgctgtactatccacaatgaacacggcagtgcatcgactgacttttgccttagccccgaggtgttgtctgggttcatttctcgagaggagggcgaggtgggagaggaaattgaaatgactcctatggtgttcgctaaagggttggccgattcaggatgctggggtgataagctgtttggacgtctcgttagcgaagagctgcgtggaggtgggtatggatgtggtcttaggaaagctagtcaggccaaggtcatctatggacttgagcccatttttgagagtggcagaacctgcatcatcaaagttagcagcctccttgtgttcggcccgtccagcgagacctccctcgtggggcgaaattacgacgtgacaatacaagggtgcaagatacagaacatgtcaagagagtactgtaagatctttgccgctgaggctagggccgcgccaggttttggcgaggttcctgagatcattcctttatacctcatctatcggccagctaataacattccctatgctactctggaggaagatttggggaagcctcttgaaagttactgcagccgggaatggggttgcgctgaagcgcccactgcctcagggagctccgaggccatgcaaaaatgccaaactttccaacactggctttatcagtggacaaatgggagtttcttagtgaccgacctggctggggtggactggaaaatgactgacgttcagattgccaccaagctccgggggtatcagggccttaaagaatcctgcttcccagcgttgttggaccggttcgcatctagccatcagtgtaatgcttattgcgagcttctaggcctgacaccgctgaagggcccggaagcagcccacccgcaggcaaaagctaaagggtctaaatctccgtcagctggacgcaaggggtcccagctgagtccccagccccagaagaaagggctgccatctccccaaggaacaagaaaatctgcaccctctagcaaggcaacccctcaagcatctgagcctgtaaccactcagctgctgggccagcctcccacccaggaagagggctctaaagcccagggaatgcgctag

SEQ ID NO: 205718 - DNA, 5724 bp, Artificial Sequence
  derived and/or modified sequence
atggaagtcgcctggctggtatacgtgctgggacagcagccgctggctaggcagggtgaaggacagtcaaggctggtgccagggagagggttagtgctatggctgccaggcctgccgaggagttcaccgtcctggcccgcagtcgatttggctcccttggccccagccagacccaggggacctctgatttgccacactggccacgagcaggccggtcgcgagcccggtcctggctcctctaccaaaggacctgtcctccacgatcaggatactagatgtgcgtttctacccagaccaccagggccactacaaaccagacggtactgtcgacaccagggtcggcagggatctggtttaggtgctggcccaggcgcaggcacatgggcaccagccccacccggtgtgagcaagcctagatgcccaggaagggcacgtccaggcgagggacagcagcaggtaacaaccgcgagaccccctgccatcaacagaggggctcgccagccacgtgcaggagctgcagcagccggacgaggccctggggctggggcatggaggaccggagaagctgccgctagcgccggacccgctgtcggagagggcggtgcaatggggtctagaagagcaccgagccgtgggtggggtgctgggggacgctcaggggctggcggtgacggcgaagacgacgggccagtctggatccctagcccagcatctcgcagctacctcctcagtgtcagacctgaaaccagcttgagtagtaacagactatctcaccctagtagtggaagaagcactttctgttccattatagctcaactgaccgaggagactcaaccactctttgagacaacattaaaatccagatcagtatcagaggacagtgacgtaaggtttacttgcatcgtcacaggatacccggaaccggaagttacatggtataaggacgataccgagctcgaccggtactgtggactgccaaagtatgaaattacacaccaggggaacagacatacactacagttgtatcgctgtagggaggaagacgctgcaatctatcaagcctcagctcagaattcaaaaggcatcgtctcttgttcaggcgtgcttgaagtgggcactatgaccgagtacaaaatccaccagcggtggttcgctaagttgaaaagaaaggccgcagccaagttaagggagatcgaacaaagttggaagcatgagaaagccgtcccaggtgaggtggacacactgcgtaaactcagtcctgatcgtttccaacggaagaggaggctgtccggtgcccaagccccaggcccttctgtgccgactcgggagcctgaggggggtacactggccgcttggcaagagggcgagacggaaaccgcgcagcacagtggtttgggacttatcaattccttcgcgtcaggggaggtgactacgaatggcgaagctgctcctgagaatggcgaagatggagagcatggcctgctcacatacatttgtgatgccatggagttggggcctcagcgcgcactcaaggaagagagtggggctaaaaaaaaaaagaaagatgaagagtctaaacagggattgagaaagcctgaactcgagaaggctgcccaatctcgacgcagttcggaaaattgcatcccttcatccgacgaacctgactcttgcgggacccagggtcccgtgggtgtggagcaggtccaaactcaacctcgcggacgcgctgctagaggccctggctcttccgggacagattcgactcggaaacccgcatcagcagttggcacgccagacaaagcccaaaaggccccaggcccaggcccaggccaggaagtgtacttttctcttaaggacatgtacctcgaaaatactcaggcagtccgccctctcggagaggaaggccctcagactttgagtgtccgtgccccaggagaatctcctaagggcaaggccccattacgcgctaggtccgagggggtgcccggtgcaccaggacagccaacacacagcctcaccccccaacctactagaccattcaaccgaaaacgtttcgctcctcccaaacccaaaggggaggctacaacggatagcaagccaatcagctctctatctcaggcgccagagtgcggggctcagagtcttgggaaagcccctccccaggcctctgtacaggtcccaacgcctcccgctcgacgcagacatggcacaagggacagcaccctccagggtcaggcgggacatagaaccccaggggaagtgctagagtgtcaaaccaccaccgcgcctaccatgtcagcctccagttctagcgatgttgcatcgattggcgtatccacatctgggtctcagggaattatcgagcccatggacatggagacccaggaggatggcaggacaagtgcgaatcaaaggacaggctcaaaaaaaaacgtgcaagcggacggcaaaattcaggtggacggtaggacgcggggagacgggacccagaccgcacagcggactcgggcagaccggaaaactcaggtcgatgcgggaacacaggagtcaaagagacctcaatcagatcgttccgcccagaagggtatgatgacccaggggagggccgaaactcagttggaaactactcaggcgggagaaaagatccaggaagatcgcaaggcccaggccgacaaggggacccaggaggaccggaggatgcaaggggaaaaggggatgcaaggggagaaaggaacgcagtctgaggggtcagcccctacagcaatggaaggccaatctgaacaggaagttgcgactagcctcggccctccgtctagaactccaaaactcccccctaccgccggaccaagggcccctttgaacatcgagtgctttgtccagaccccagagggcagttgttttccaaaaaagcctgggtgtctgcctcgtagtgaggaggcggtggtgaccgcatcgcggaatcacgaacaaacggtactggggccactgtcaggtaacttaatgctgccagcccaacctccccatgaaggctcggttgaacaggtagggggagagcgttgccgtgggcctcagagcagtggccctgtcgaggcaaagcaggaagattccccatttcagtgccccaaggaggagcggcctggaggcgtaccatgtatggaccagggagggtgcccattggcagggctttctcaggaagtgcccaccatgcctagcctcccgggtactgggctcaccgcgagccctaaagcagggccatgttcaacaccaaccagtcagcacggctcaaccgccactttccttccatccgaagaccaggtgctcatgagctctgctcctacgttacacctggggctgggcactcccacccagagccaccctcctgagaccatggcaacgagttctgaaggggcatgtgctcaggtgcctgacgtggaaggcaggacgccaggccctcgttcttgcgatcctggtcttatcgatagcctgaagaactaccttttactgctgcttaagttatcaagtactgagactagcggtgccggaggtgaaagtcaggtcggggctgctacaggcggtctggtgccttctgccaccctgactcctaccgtagaagtagccggtctgagtccgagaacctccaggaggatcctggaacgcgtagaaaataatcacctggtgcagtctgctcagactctgctgctctcgccctgcacatccaggcgattgaccgggctacttgatcgagaagtccaagctggccgacaagctctggcggcagccaggggctcatggggcccaggaccttctagtctcacagtcccagctattgtggttgatgaagaggatcccggacttgcatctgaaggggcttccgaaggagagggagaagtctcgccggaaggcccagggctcctgggggcatcccaggaaagttcaatggctggcaggttgggcgaagccggaggccaggctgcacccggtcaggggcctagtgccgaatctatagcacaggaaccgtcacaagaggagaaattccctggcgaggcgctgactggtcttccggcagctactccggaggagctggccctgggagcgagacggaagcgctttttacccaaggtgcgcgctgcgggagacggggaggcaaccacaccggaagagcgcgaatccccaacggttagtcctcggggacctcgcaaaagcctcgtccctggaagcccagggacaccaggccgagaacgccgaagtcccacgcagggcaggaaagcttccatgttggaggttccgagggcagaggaagagttagctgctggagatcttgggccttctcccaaagcaggcggactggatactgaggtggccctggacgaaggaaagcaggagactctggctaagcccaggaaggcgaaggatctcctgaaggcaccacaggtgatacggaaaatccgggtggagcaatttcccgatgccagcggttccttaaaactgtggtgtcaattctttaatatcctgtcagattcagtgttgacatgggccaaggaccaaagacctgttggtgaggtaggacggagcgcaggagatgagggtcccgcagctttggccatcgtgcaggccagccccgtcgactgtggagtgtataggtgcactatacacaatgagcacggatccgcttccacagatttttgtctcagccctgaagttttgtcgggattcatctcaagagaggaaggcgaagtcggagaagaaatcgagatgacacccatggtattcgctaaagggcttgctgattcagggtgttggggtgataaactgttcgggcgtctggtctcagaggagttgcggggtggaggttatggctgtggactacggaaagcttctcaggcaaaggttatttatggcttagaaccaatcttcgagtcaggcagaacctgtattataaaagtcagttccttactggtctttgggccttcttctgagacaagcctggtaggcaggaactatgacgtaacgattcagggatgtaaaatacaaaacatgagccgggaatattgcaagatttttgcagcggaggccagggccgcacctggctttggggaagtaccagagattattccattatacctgatttatcggccagccaataacatcccgtatgctactctagaagaggatcttgggaagcccctggaatcatactgcagccgggagtggggatgcgccgaggcccctacagcctccggctctagtgaggccatgcaaaaatgccaaacattccagcattggctttaccagtggactaacggctcctttctggtgacagacttagccggtgtagattggaagatgacggacgtgcagatcgccacgaagctgcgtggctaccaggggcttaaggagtcctgtttcccagctctgctggaccggtttgctagcagccaccagtgtaacgcctattgcgaacttctcggattgacccctctgaagggacctgaggctgcacacccgcaagctaaggcaaaaggcagcaagtcgccctccgccggtaggaaaggaagccaattatctccacaacctcagaaaaagggactccctagcccccaggggactagaaaatcagccccatcatccaaggccacccctcaggcaagtgaacctgtgacaactcaattgctgggccagccacccactcaggaagaaggctctaaagcccaaggaatgagatac

SEQ ID NO: 205719 - DNA, 5724 bp, Artificial Sequence
  derived and/or modified sequence
atggaggtggcctggctggtgtacgtgctgggccagcagcccctggccagacagggcgagggccagagcagactggtgcccggcagaggcctggtgctgtggctgcccggcctgcccagaagcagccccagctggcccgccgtggacctggcccccctggcccccgccagacccagaggccccctgatctgccacaccggccacgagcaggccggcagagagcccggccccggcagcagcaccaagggccccgtgctgcacgaccaggacaccagatgcgccttcctgcccagaccccccggccccctgcagaccagaagatactgcagacaccagggcagacagggcagcggcctgggcgccggccccggcgccggcacctgggcccccgccccccccggcgtgagcaagcccagatgccccggcagagccagacccggcgagggccagcagcaggtgaccaccgccagaccccccgccatcaacagaggcgccagacagcccagagccggcgccgccgccgccggcagaggccccggcgccggcgcctggagaaccggcgaggccgccgccagcgccggccccgccgtgggcgagggcggcgccatgggcagcagaagagcccccagcagaggctggggcgccggcggcagaagcggcgccggcggcgacggcgaggacgacggccccgtgtggatccccagccccgccagcagaagctacctgctgagcgtgagacccgagaccagcctgagcagcaacagactgagccaccccagcagcggcagaagcaccttctgcagcatcatcgcccagctgaccgaggagacccagcccctgttcgagaccaccctgaagagcagaagcgtgagcgaggacagcgacgtgagattcacctgcatcgtgaccggctaccccgagcccgaggtgacctggtacaaggacgacaccgagctggacagatactgcggcctgcccaagtacgagatcacccaccagggcaacagacacaccctgcagctgtacagatgcagagaggaggacgccgccatctaccaggccagcgcccagaacagcaagggcatcgtgagctgcagcggcgtgctggaggtgggcaccatgaccgagtacaagatccaccagagatggttcgccaagctgaagagaaaggccgccgccaagctgagagagatcgagcagagctggaagcacgagaaggccgtgcccggcgaggtggacaccctgagaaagctgagccccgacagattccagagaaagagaagactgagcggcgcccaggcccccggccccagcgtgcccaccagagagcccgagggcggcaccctggccgcctggcaggagggcgagaccgagaccgcccagcacagcggcctgggcctgatcaacagcttcgccagcggcgaggtgaccaccaacggcgaggccgcccccgagaacggcgaggacggcgagcacggcctgctgacctacatctgcgacgccatggagctgggcccccagagagccctgaaggaggagagcggcgccaagaagaagaagaaggacgaggagagcaagcagggcctgagaaagcccgagctggagaaggccgcccagagcagaagaagcagcgagaactgcatccccagcagcgacgagcccgacagctgcggcacccagggccccgtgggcgtggagcaggtgcagacccagcccagaggcagagccgccagaggccccggcagcagcggcaccgacagcaccagaaagcccgccagcgccgtgggcacccccgacaaggcccagaaggcccccggccccggccccggccaggaggtgtacttcagcctgaaggacatgtacctggagaacacccaggccgtgagacccctgggcgaggagggcccccagaccctgagcgtgagagcccccggcgagagccccaagggcaaggcccccctgagagccagaagcgagggcgtgcccggcgcccccggccagcccacccacagcctgaccccccagcccaccagacccttcaacagaaagagattcgccccccccaagcccaagggcgaggccaccaccgacagcaagcccatcagcagcctgagccaggcccccgagtgcggcgcccagagcctgggcaaggcccccccccaggccagcgtgcaggtgcccaccccccccgccagaagaagacacggcaccagagacagcaccctgcagggccaggccggccacagaacccccggcgaggtgctggagtgccagaccaccaccgcccccaccatgagcgccagcagcagcagcgacgtggccagcatcggcgtgagcaccagcggcagccagggcatcatcgagcccatggacatggagacccaggaggacggcagaaccagcgccaaccagagaaccggcagcaagaagaacgtgcaggccgacggcaagatccaggtggacggcagaaccagaggcgacggcacccagaccgcccagagaaccagagccgacagaaagacccaggtggacgccggcacccaggagagcaagagaccccagagcgacagaagcgcccagaagggcatgatgacccagggcagagccgagacccagctggagaccacccaggccggcgagaagatccaggaggacagaaaggcccaggccgacaagggcacccaggaggacagaagaatgcagggcgagaagggcatgcagggcgagaagggcacccagagcgagggcagcgcccccaccgccatggagggccagagcgagcaggaggtggccaccagcctgggcccccccagcagaacccccaagctgccccccaccgccggccccagagcccccctgaacatcgagtgcttcgtgcagacccccgagggcagctgcttccccaagaagcccggctgcctgcccagaagcgaggaggccgtggtgaccgccagcagaaaccacgagcagaccgtgctgggccccctgagcggcaacctgatgctgcccgcccagcccccccacgagggcagcgtggagcaggtgggcggcgagagatgcagaggcccccagagcagcggccccgtggaggccaagcaggaggacagccccttccagtgccccaaggaggagagacccggcggcgtgccctgcatggaccagggcggctgccccctggccggcctgagccaggaggtgcccaccatgcccagcctgcccggcaccggcctgaccgccagccccaaggccggcccctgcagcacccccaccagccagcacggcagcaccgccaccttcctgcccagcgaggaccaggtgctgatgagcagcgcccccaccctgcacctgggcctgggcacccccacccagagccacccccccgagaccatggccaccagcagcgagggcgcctgcgcccaggtgcccgacgtggagggcagaacccccggccccagaagctgcgaccccggcctgatcgacagcctgaagaactacctgctgctgctgctgaagctgagcagcaccgagaccagcggcgccggcggcgagagccaggtgggcgccgccaccggcggcctggtgcccagcgccaccctgacccccaccgtggaggtggccggcctgagccccagaaccagcagaagaatcctggagagagtggagaacaaccacctggtgcagagcgcccagaccctgctgctgagcccctgcaccagcagaagactgaccggcctgctggacagagaggtgcaggccggcagacaggccctggccgccgccagaggcagctggggccccggccccagcagcctgaccgtgcccgccatcgtggtggacgaggaggaccccggcctggccagcgagggcgccagcgagggcgagggcgaggtgagccccgagggccccggcctgctgggcgccagccaggagagcagcatggccggcagactgggcgaggccggcggccaggccgcccccggccagggccccagcgccgagagcatcgcccaggagcccagccaggaggagaagttccccggcgaggccctgaccggcctgcccgccgccacccccgaggagctggccctgggcgccagaagaaagagattcctgcccaaggtgagagccgccggcgacggcgaggccaccacccccgaggagagagagagccccaccgtgagccccagaggccccagaaagagcctggtgcccggcagccccggcacccccggcagagagagaagaagccccacccagggcagaaaggccagcatgctggaggtgcccagagccgaggaggagctggccgccggcgacctgggccccagccccaaggccggcggcctggacaccgaggtggccctggacgagggcaagcaggagaccctggccaagcccagaaaggccaaggacctgctgaaggccccccaggtgatcagaaagatcagagtggagcagttccccgacgccagcggcagcctgaagctgtggtgccagttcttcaacatcctgagcgacagcgtgctgacctgggccaaggaccagagacccgtgggcgaggtgggcagaagcgccggcgacgagggccccgccgccctggccatcgtgcaggccagccccgtggactgcggcgtgtacagatgcaccatccacaacgagcacggcagcgccagcaccgacttctgcctgagccccgaggtgctgagcggcttcatcagcagagaggagggcgaggtgggcgaggagatcgagatgacccccatggtgttcgccaagggcctggccgacagcggctgctggggcgacaagctgttcggcagactggtgagcgaggagctgagaggcggcggctacggctgcggcctgagaaaggccagccaggccaaggtgatctacggcctggagcccatcttcgagagcggcagaacctgcatcatcaaggtgagcagcctgctggtgttcggccccagcagcgagaccagcctggtgggcagaaactacgacgtgaccatccagggctgcaagatccagaacatgagcagagagtactgcaagatcttcgccgccgaggccagagccgcccccggcttcggcgaggtgcccgagatcatccccctgtacctgatctacagacccgccaacaacatcccctacgccaccctggaggaggacctgggcaagcccctggagagctactgcagcagagagtggggctgcgccgaggcccccaccgccagcggcagcagcgaggccatgcagaagtgccagaccttccagcactggctgtaccagtggaccaacggcagcttcctggtgaccgacctggccggcgtggactggaagatgaccgacgtgcagatcgccaccaagctgagaggctaccagggcctgaaggagagctgcttccccgccctgctggacagattcgccagcagccaccagtgcaacgcctactgcgagctgctgggcctgacccccctgaagggccccgaggccgcccacccccaggccaaggccaagggcagcaagagccccagcgccggcagaaagggcagccagctgagcccccagccccagaagaagggcctgcccagcccccagggcaccagaaagagcgcccccagcagcaaggccaccccccaggccagcgagcccgtgaccacccagctgctgggccagccccccacccaggaggagggcagcaaggcccagggcatgagatag

SEQ ID NO: 205720 - protein, 1170 aa, Artificial Sequence
  derived and/or modified sequence
MFFYLSKKISIPNNVKLQCVSWNKEQGFIACGGEDGLLKVLKLETQTDDAKLRGLAAPSNLSMNQTLEGHSGSVQVVTWNEQYQKLTTSDENGLIIVWMLYKGSWIEEMINNRNKSVVRSMSWNADGQKICIVYEDGAVIVGSVDGNRIWGKDLKGIQLSHVTWSADSKVLLFGMANGEIHIYDNQGNFMIKMKLSCLVNVTGAISIAGIHWYHGTEGYVEPDCPCLAVCFDNGRCQIMRHENDQNPVLIDTGMYVVGIQWNHMGSVLAVAGFQKAAMQDKDVNIVQFYTPFGEHLGTLKVPGKEISALSWEGGGLKIALAVDSFIYFANIRPNYKWGYCSNTVVYAYTRPDRPEYCVVFWDTKNNEKYVKYVKGLISITTCGDFCILATKADENHPQFVLVLCNSIGTPLDPKYIDIVPLFVAMTKTHVIAASKEAFYTWQYRVAKKLTALEINQITRSRKEGRERIYHVDDTPSGSMDGVLDYSKTIQGTRDPICAITASDKILIVGRESGTIQRYSLPNVGLIQKYSLNCRAYQLSLNCNSSRLAIIDISGVLTFFDLDARVTDSTGQQVVGELLKLERRDVWDMKWAKDNPDLFAMMEKTRMYVFRNLDPEEPIQTSGYICNFEDLEIKSVLLDEILKDPEHPNKDYLINFEIRSLRDSRALIEKVGIKDASQFIEDNPHPRLWRLLAEAALQKLDLYTAEQAFVRCKDYQGIKFVKRLGKLLSESMKQAEVVGYFGRFEEAERTYLEMDRRDLAIGLRLKLGDWFRVLQLLKTGSGDADDSLLEQANNAIGDYFADRQKWLNAVQYYVQGRNQERLAECYYMLEDYEGLENLAISLPENHKLLPEIAQMFVRVGMCEQAVTAFLKCSQPKAAVDTCVHLNQWNKAVELAKNHSMKEIGSLLARYASHLLEKNKTLDAIELYRKANYFFDAAKLMFKIADEEAKKGSKPLRVKKLYVLSALLIEQYHEQMKNAQRGKVKGKSSEATSALAGLLEEEVLSTTDRFTDNAWRGAEAYHFFILAQRQLYEGCVDTALKTALHLKDYEDIIPPVEIYSLLALCACASRAFGTCSKAFIKLKSLETLSSEQKQQYEDLALEIFTKHTSKDNRKPELDSLMEGGEGKLPTCVATGSPITEYQFWMCSVCKHGVLAQEISHYSFCPLCHSPVG

SEQ ID NO: 205721 - DNA, 3513 bp, Artificial Sequence
  derived and/or modified sequence
atgttcttctacctgagcaagaagatcagcatccccaacaacgtgaagctgcagtgcgtgagctggaacaaggagcagggcttcatcgcctgcggcggcgaggacggcctgctgaaggtgctgaagctggagacccagaccgacgacgccaagctgagaggcctggccgcccccagcaacctgagcatgaaccagaccctggagggccacagcggcagcgtgcaggtggtgacctggaacgagcagtaccagaagctgaccaccagcgacgagaacggcctgatcatcgtgtggatgctgtacaagggcagctggatcgaggagatgatcaacaacagaaacaagagcgtggtgagaagcatgagctggaacgccgacggccagaagatctgcatcgtgtacgaggacggcgccgtgatcgtgggcagcgtggacggcaacagaatctggggcaaggacctgaagggcatccagctgagccacgtgacctggagcgccgacagcaaggtgctgctgttcggcatggccaacggcgagatccacatctacgacaaccagggcaacttcatgatcaagatgaagctgagctgcctggtgaacgtgaccggcgccatcagcatcgccggcatccactggtaccacggcaccgagggctacgtggagcccgactgcccctgcctggccgtgtgcttcgacaacggcagatgccagatcatgagacacgagaacgaccagaaccccgtgctgatcgacaccggcatgtacgtggtgggcatccagtggaaccacatgggcagcgtgctggccgtggccggcttccagaaggccgccatgcaggacaaggacgtgaacatcgtgcagttctacacccccttcggcgagcacctgggcaccctgaaggtgcccggcaaggagatcagcgccctgagctgggagggcggcggcctgaagatcgccctggccgtggacagcttcatctacttcgccaacatcagacccaactacaagtggggctactgcagcaacaccgtggtgtacgcctacaccagacccgacagacccgagtactgcgtggtgttctgggacaccaagaacaacgagaagtacgtgaagtacgtgaagggcctgatcagcatcaccacctgcggcgacttctgcatcctggccaccaaggccgacgagaaccacccccagttcgtgctggtgctgtgcaacagcatcggcacccccctggaccccaagtacatcgacatcgtgcccctgttcgtggccatgaccaagacccacgtgatcgccgccagcaaggaggccttctacacctggcagtacagagtggccaagaagctgaccgccctggagatcaaccagatcaccagaagcagaaaggagggcagagagagaatctaccacgtggacgacacccccagcggcagcatggacggcgtgctggactacagcaagaccatccagggcaccagagaccccatctgcgccatcaccgccagcgacaagatcctgatcgtgggcagagagagcggcaccatccagagatacagcctgcccaacgtgggcctgatccagaagtacagcctgaactgcagagcctaccagctgagcctgaactgcaacagcagcagactggccatcatcgacatcagcggcgtgctgaccttcttcgacctggacgccagagtgaccgacagcaccggccagcaggtggtgggcgagctgctgaagctggagagaagagacgtgtgggacatgaagtgggccaaggacaaccccgacctgttcgccatgatggagaagaccagaatgtacgtgttcagaaacctggaccccgaggagcccatccagaccagcggctacatctgcaacttcgaggacctggagatcaagagcgtgctgctggacgagatcctgaaggaccccgagcaccccaacaaggactacctgatcaacttcgagatcagaagcctgagagacagcagagccctgatcgagaaggtgggcatcaaggacgccagccagttcatcgaggacaacccccaccccagactgtggagactgctggccgaggccgccctgcagaagctggacctgtacaccgccgagcaggccttcgtgagatgcaaggactaccagggcatcaagttcgtgaagagactgggcaagctgctgagcgagagcatgaagcaggccgaggtggtgggctacttcggcagattcgaggaggccgagagaacctacctggagatggacagaagagacctggccatcggcctgagactgaagctgggcgactggttcagagtgctgcagctgctgaagaccggcagcggcgacgccgacgacagcctgctggagcaggccaacaacgccatcggcgactacttcgccgacagacagaagtggctgaacgccgtgcagtactacgtgcagggcagaaaccaggagagactggccgagtgctactacatgctggaggactacgagggcctggagaacctggccatcagcctgcccgagaaccacaagctgctgcccgagatcgcccagatgttcgtgagagtgggcatgtgcgagcaggccgtgaccgccttcctgaagtgcagccagcccaaggccgccgtggacacctgcgtgcacctgaaccagtggaacaaggccgtggagctggccaagaaccacagcatgaaggagatcggcagcctgctggccagatacgccagccacctgctggagaagaacaagaccctggacgccatcgagctgtacagaaaggccaactacttcttcgacgccgccaagctgatgttcaagatcgccgacgaggaggccaagaagggcagcaagcccctgagagtgaagaagctgtacgtgctgagcgccctgctgatcgagcagtaccacgagcagatgaagaacgcccagagaggcaaggtgaagggcaagagcagcgaggccaccagcgccctggccggcctgctggaggaggaggtgctgagcaccaccgacagattcaccgacaacgcctggagaggcgccgaggcctaccacttcttcatcctggcccagagacagctgtacgagggctgcgtggacaccgccctgaagaccgccctgcacctgaaggactacgaggacatcatcccccccgtggagatctacagcctgctggccctgtgcgcctgcgccagcagagccttcggcacctgcagcaaggccttcatcaagctgaagagcctggagaccctgagcagcgagcagaagcagcagtacgaggacctggccctggagatcttcaccaagcacaccagcaaggacaacagaaagcccgagctggacagcctgatggagggcggcgagggcaagctgcccacctgcgtggccaccggcagccccatcaccgagtaccagttctggatgtgcagcgtgtgcaagcacggcgtgctggcccaggagatcagccactacagcttctgccccctgtgccacagccccgtgggctag

SEQ ID NO: 205722 - DNA, 3513 bp, Artificial Sequence
  derived and/or modified sequence
atgttcttctatctatctaaaaaaatatcgatcccaaacaacgtgaaactccagtgcgtatcttggaataaggaacagggtttcattgcctgcggtggtgaagacgggctgctcaaagtactgaagctggagactcagacggatgacgctaagctcagaggactagcggcaccatcgaatttgagtatgaaccagactttagaaggccatagcggctctgtgcaagtggttacctggaacgaacaataccagaagttgactacgagcgacgaaaatgggctaattattgtttggatgctgtacaaaggctcatggatcgaggaaatgatcaacaaccgcaataaatctgtggtgagatcaatgtcgtggaacgctgacggacaaaaaatttgtatcgtgtatgaggatggagctgtcatcgtgggatcagtcgatggcaaccggatctggggcaaagatttgaaaggaattcaactgtctcacgtcacatggtcagccgactccaaagttttgctttttgggatggctaatggagagattcatatttatgataatcaaggaaacttcatgattaaaatgaaacttagttgtcttgtcaatgtaactggggccattagtattgcaggaatacactggtaccacgggaccgagggctacgtagagccagactgtccttgcctggccgtatgcttcgacaacggacgctgccagattatgcgccacgagaacgaccagaaccccgtgcttatcgacacaggaatgtatgttgtgggtatccagtggaatcatatgggcagtgtgctcgccgttgccggattccagaaggccgcaatgcaggacaaggacgtaaatatagttcagttctataccccgtttggagaacacctgggaacactcaaggtcccggggaaggaaataagcgccctgagctgggagggaggcggcctcaaaatagccctagccgttgacagtttcatctacttcgccaacattcgtccaaactacaaatgggggtattgttccaataccgtagtctacgcatacactcggcccgatcggcctgaatattgcgtggtgttctgggatactaaaaataacgagaagtacgtgaaatacgtgaaggggttgattagtataaccacttgtggagacttctgcatcctcgccactaaagccgacgaaaatcacccccaattcgtgctggtgctttgtaacagcattgggacccccctggatcctaagtacatagacatcgtaccgctgttcgtggcaatgactaaaactcatgtgatcgcagcgtccaaagaggccttctacacatggcagtacagagtcgcaaaaaagcttaccgctctggagattaatcaaattacacgaagcagaaaagaggggcgggagagaatttatcacgtagacgataccccgagtggatccatggacggagttctggattactccaagacaatccagggcacgagagaccccatttgcgccattactgcaagtgataagattctgattgttggaagggagtctgggactatccagcggtactctctgcctaatgttgggctcattcagaagtattctctgaactgtcgcgcctatcagctgtctcttaactgtaattcttccaggctggctatcatcgacatttcaggtgtgctgaccttttttgatttggatgcccgcgtgactgactcgaccggacagcaggtagttggcgaacttcttaaactcgaacggagggacgtgtgggacatgaaatgggctaaggataaccctgacctttttgccatgatggaaaaaactcgaatgtacgttttcagaaatctcgatccggaggagcctatccagacttctggctacatctgcaacttcgaggacttagagattaagagcgtcttacttgatgaaattctgaaggacccagaacaccctaataaggactacctgatcaactttgagatcaggagcctgagagatagccgagcgctcattgagaaggtcgggatcaaggacgcctcccagttcatcgaggataaccctcatcctagactgtggcgactacttgcagaggccgctctgcagaagctggacctctatacagccgagcaggccttcgttaggtgtaaggactaccagggtataaaattcgtcaaaagactgggcaaactcctcagcgagtcaatgaagcaggccgaggtagtgggatactttggccgctttgaggaggccgagagaacctatctggaaatggataggcgggacctggccatcggtttgcgccttaagctgggcgattggtttagggtactgcagctgctcaagacaggctcaggggacgccgacgatagtctgctcgagcaagcaaacaatgccatcggcgattatttcgccgataggcaaaaatggttgaatgcagttcagtactatgtgcagggtaggaatcaggagcgcttggctgagtgttattatatgttggaggactacgaaggcctagaaaacctggcaatctcactgcccgaaaaccacaaactgctgcctgagattgcacaaatgtttgtgcgcgtcggaatgtgcgagcaggctgtgaccgcattcctcaagtgcagccagccaaaggccgcagtcgatacgtgcgtacatctgaatcaatggaacaaagcagtggaattagccaagaaccactctatgaaagagattggcagtctgctcgcgaggtatgcaagccatttgctggagaagaataaaacacttgatgctattgaactgtaccgcaaggcaaactacttctttgatgccgccaaactcatgttcaagatcgccgacgaagaagccaagaagggatccaaacccctgagagttaagaaactgtatgtattgtctgctcttctgatagagcaatatcacgagcaaatgaagaacgcccagcgcggtaaagtgaaagggaaatcttctgaagcgacctcagcactggctggtctgctagaggaagaggtgttgagtaccaccgatcgattcactgacaacgcctggcgcggggctgaggcataccacttctttatcctggctcagaggcaactatatgaggggtgcgtggatacagctttaaaaacagccctgcatttgaaagactatgaggatataatccctcctgtggagatttatagcctcctcgctctctgcgcttgcgcgagtcgggcttttggcacttgctccaaagcgttcatcaaactcaagtcccttgagactctttcatctgaacaaaagcagcaatacgaggatctggccctggagattttcacaaagcacacaagcaaagataatcgcaagcccgagctggacagtttaatggaaggcggggaaggtaagctacctacctgtgtggcaactgggtcccccatcactgagtaccagttttggatgtgttcggtttgtaagcatggcgtcctcgctcaggagatttcgcactattcattctgtcctctctgccattctcccgttgggtag

SEQ ID NO: 205723 - DNA, 3513 bp, Artificial Sequence
  derived and/or modified sequence
atgttcttctacctgagcaagaagatcagcatccccaacaacgtgaagctgcagtgtgtgtcctggaacaaggagcagggcttcatcgcctgtggcggggaggatggcctgctgaaggtgctgaagctggagacccagacagatgatgccaagctgcggggcctggccgcccccagcaacctgtccatgaaccagaccctggagggccacagcggctctgtgcaggtggtgacctggaatgagcagtaccagaagctgaccaccagtgatgaaaatggcctcatcatcgtgtggatgctgtacaagggctcctggattgaggagatgatcaacaacagaaacaagtctgtggtgcgctccatgtcctggaatgctgatggccagaagatctgcatcgtgtatgaagatggagctgtgattgtgggctctgtggatggcaaccgcatctggggcaaggacctgaagggcatccagctgagccacgtgacctggagcgctgacagcaaggtgctgctgtttggcatggccaatggagagatccacatctatgacaaccagggcaacttcatgatcaagatgaagctgagctgcctggtgaatgtgactggagccatcagcattgctggcatccactggtaccacggcacagagggctacgtggagccagactgcccctgcctggccgtgtgctttgacaatggccgctgccagatcatgagacatgaaaatgaccagaaccctgtgctgattgacaccggcatgtatgtggtgggcatccagtggaaccacatgggctctgtgctggccgtggccggcttccagaaggccgccatgcaggacaaggatgtgaacatcgtgcagttctacaccccatttggagagcacctgggcaccctgaaggtgcctgggaaggagatcagcgccctgtcctgggagggcggcggcctgaagatcgccctggccgtggacagcttcatctactttgccaacatccggcccaactacaagtggggctactgcagcaacacagtggtgtatgcctacaccaggccagacaggcctgagtactgtgtggtgttctgggacaccaagaacaatgagaagtatgtgaagtatgtgaagggcctcatcagcatcaccacctgtggggacttctgcatcctggccaccaaggcagatgagaaccacccccagtttgtgctggtgctgtgcaacagcatcggcacccccctggaccccaagtacatcgacatcgtgcccctgtttgtggccatgaccaagacccacgtgattgctgccagcaaggaggccttctacacctggcagtacagagtggccaagaagctgacagccctggagatcaaccagatcaccaggagcaggaaggagggccgggagcgcatctaccacgtggatgacacccccagcggctccatggatggagtgctggactacagcaagaccatccagggcacccgggaccccatctgtgccatcacagccagtgacaagatcctgattgtgggccgggagagcggcaccatccagcgctacagcctgcccaacgtgggcctcatccagaagtacagcctgaactgccgggcctaccagctgagcctgaactgcaacagcagccggctggccatcatcgacatctctggagtgctgaccttctttgacctggatgcccgggtgacagacagcacaggccagcaggtggtgggggagctgctgaagctggagaggagagatgtgtgggacatgaagtgggccaaggacaacccagacctgtttgccatgatggagaagaccaggatgtatgtgttcaggaacctggaccctgaggagcccatccagaccagcggctacatctgcaactttgaggacctggagatcaagtctgtgctgctggatgagatcctgaaggaccctgagcaccccaacaaggactacctgatcaactttgagatccgcagcctgcgggacagccgggccctgattgagaaggtgggcatcaaggatgccagccagttcatcgaggacaacccccacccccggctgtggaggctgctggccgaggccgccctgcagaagctggacctgtacacagctgagcaggcctttgtgcgctgcaaggactaccagggcatcaagtttgtgaagaggctgggcaagctgctgtctgagagcatgaagcaggccgaggtggtgggctacttcggccgctttgaggaggccgagaggacctacctggagatggacagaagagacctggccatcggcctgcggctgaagctgggggactggttccgggtgctgcagctgctgaagacaggcagcggagatgctgatgacagcctgctggagcaggccaacaatgccatcggggactactttgctgaccggcagaagtggctgaatgctgtgcagtactacgtgcagggcaggaaccaggagcggctggccgagtgctactacatgctggaggactatgagggcctggagaacctggccatcagcctgcctgagaaccacaagctgctgcctgagatcgcccagatgtttgtgcgggtgggcatgtgtgagcaggccgtgacagccttcctgaagtgcagccagcccaaggctgctgtggacacctgtgtgcacctgaaccagtggaacaaggctgtggagctggccaagaaccacagcatgaaggagatcggcagcctgctggcccgctatgccagccacctgctggagaagaacaagaccctggatgccatcgagctgtacaggaaggccaactacttctttgatgctgccaagctgatgttcaagattgctgatgaggaggccaagaagggcagcaagcccctgcgggtgaagaagctgtatgtgctgagcgccctgctgattgagcagtaccacgagcagatgaagaatgcccagaggggcaaggtgaagggcaagagcagcgaggccaccagcgccctggccggcctgctggaggaggaggtgctgagcaccacagaccgcttcacagacaatgcctggagaggagctgaggcctaccacttcttcatcctggcccagaggcagctgtatgagggctgtgtggacacagccctgaagacagccctgcacctgaaggactatgaggacatcatcccccctgtggagatctacagcctgctggccctgtgtgcctgtgccagccgggccttcggcacctgcagcaaggccttcatcaagctgaagagcctggagaccctgagcagcgagcagaagcagcagtatgaggacctggccctggagatcttcaccaagcacaccagcaaggacaacaggaagccagagctggacagcctgatggagggcggggagggcaagctgcccacctgtgtggccaccggcagccccatcacagagtaccagttctggatgtgcagcgtgtgcaagcatggagtgctggcccaggagatcagccactacagcttctgccccctgtgccacagccctgtgggctag

SEQ ID NO: 205724 - DNA, 3513 bp, Artificial Sequence
  derived and/or modified sequence
atgttcttctacctgagcaagaagatcagcatccccaacaacgtgaaactgcaatgcgtcagttggaataaggaacagggcttcatcgcttgcgggggggaagatggactgttaaaggttctcaaactcgagacacaaactgacgatgcaaaactgcgcgggctggcagctccctccaacctctctatgaaccagaccctggaggggcattccggaagtgtacaagtggttacatggaacgagcagtaccagaagctcaccactagcgatgagaacggcttgataatcgtatggatgctctacaaaggatcttggattgaagaaatgataaataatcgcaataagtcagtcgtgaggtcgatgagctggaacgccgatggccagaagatctgtatagtgtacgaagacggcgcagtcatcgtcggttccgttgatggaaataggatctgggggaaagatctgaaagggattcagctgtctcatgtgacctggtctgccgactcaaaggtgctccttttcggtatggccaatggcgagattcacatctatgacaatcaggggaattttatgattaagatgaaattgtcttgccttgtgaacgtgaccggcgccatcagtattgccggcatccactggtaccatggtaccgagggatatgtggagcctgactgcccctgtctggctgtgtgcttcgacaatgggaggtgccagattatgcggcacgagaatgaccaaaaccccgtgctgattgacactggtatgtatgttgttggcattcagtggaatcacatgggttctgtactcgccgttgccggttttcagaaggccgctatgcaagacaaggatgttaacattgtgcagttctatactccatttggagagcacctgggaactttaaaggtgccaggcaaggaaatctcagccctgagctgggaaggaggtggcctgaagattgcactcgctgtggactcattcatctattttgcgaatatcaggcccaactataaatggggctactgtagtaatacggtggtgtacgcctatacaaggccggatcgcccggagtattgtgtggttttctgggacacaaagaataatgagaagtacgtgaaatatgtcaaggggctgatcagtatcacgacctgtggggacttctgtatacttgctaccaaggcggatgagaatcatccccagttcgttctggtgctctgtaacagtatcggcactccactcgacccgaaatatatagatattgtgccactgttcgttgccatgaccaaaactcacgtcatcgctgccagtaaggaggctttttatacatggcaatatagagtggccaaaaagctgacagcccttgaaatcaaccagatcacgagaagcaggaaagaaggcagagaaagaatttaccacgtagacgatactccttcggggtcaatggacggggtcctcgactacagcaagacaattcaaggaactcgcgacccaatctgcgctattactgcatccgacaaaatactgatagtcggacgagaaagtgggactatccaacgatacagtttgccgaatgttggccttatccagaaatatagtctcaactgcagggcttaccagctttcgcttaattgcaactcgagccggctggcaatcattgacattagcggtgtactgacgttttttgaccttgatgcacgcgtcactgactcaaccggccaacaggtcgtgggcgagctgctgaaactcgagcggagggatgtttgggatatgaaatgggcaaaagataaccccgatcttttcgcaatgatggaaaaaacccgcatgtatgttttccgtaatctcgatccagaagagcctattcagacttctggttatatttgtaattttgaagaccttgagatcaaatcggttctgctggatgagatcctgaaagatccggagcaccctaacaaggattacctcatcaattttgaaatccggtcattaagagactcccgagcgctcatcgagaaggtaggaataaaggacgcatcccagtttatcgaagataaccctcacccgcggctgtggcggcttctagcggaagccgccttacaaaaactggatttatacacagcagagcaggcgttcgtccgatgtaaagactatcaagggatcaagtttgtcaaacggttaggcaaattgctgtccgagagtatgaagcaggccgaggtcgtaggttactttggcaggttcgaagaagccgaacggacttacctcgaaatggatcgtagagacctggcaatcgggctaaggctgaagctcggcgattggtttcgggtgctgcagctgctcaagacaggttcaggtgatgccgacgactccctgctggagcaggctaataacgcaattggcgattactttgccgacagacaaaagtggctgaacgcggtacaatattatgtgcaaggaaggaatcaggaacgcctggctgaatgttattacatgctggaagactatgaggggttagaaaacttggcaatcagtcttccagagaaccacaagcttcttcctgaaattgcacagatgtttgtaagggtggggatgtgcgagcaggctgtaactgcttttctgaagtgttcacagccgaaggctgccgtcgatacctgtgtgcacctgaaccagtggaacaaggccgttgagctagccaaaaaccacagtatgaaagagatcggcagccttcttgcacgctacgccagccacctgctggaaaagaacaaaacattggatgcaatagagctgtaccgaaaagcaaactacttttttgatgccgccaaacttatgttcaagatcgccgatgaggaggccaaaaagggctcgaagccgctaagggtaaaaaagctttacgtgttgtctgccctcctcatagaacagtatcatgaacagatgaagaacgctcaacgaggcaaagtgaagggcaaatctagcgaagccacaagcgcacttgctggactacttgaggaagaggtcttgtccacgaccgacaggtttaccgataacgcctggagaggcgcggaggcatatcattttttcatcctcgcccaaagacagctgtacgaaggttgtgttgacactgcactgaagactgcactgcacttgaaggactacgaggacataattccgcccgttgaaatctacagcctccttgcattgtgcgcttgcgcttctcgggcattcggcacttgcagcaaggctttcattaagcttaagtctctggagacactcagtagcgagcaaaaacagcaatacgaggatcttgccttggagatctttacaaagcataccagcaaggacaatcggaagcccgagctggatagtctgatggaaggaggtgaaggcaagctgcccacatgtgtagccactggttcccctattacagagtaccagttttggatgtgcagcgtgtgcaagcatggggtcctggcccaggagatctcccactattccttttgtcccttgtgtcactcccccgtgggatag

SEQ ID NO: 205725 - DNA, 3513 bp, Artificial Sequence
  derived and/or modified sequence
atgttcttttatctctctaaaaaaatcagcattccaaataacgtaaaattgcagtgtgtctcctggaataaggagcagggctttattgcctgcggaggtgaggatggattgctgaaagtgctaaagctggagacccaaaccgacgacgctaagctacggggactcgcggctccatctaatctctcaatgaatcagaccctcgagggacactccggctctgtccaggtggtgacctggaacgagcagtaccaaaagctgaccacctctgacgaaaatggccttattattgtttggatgctctacaagggaagctggatcgaagagatgatcaataacagaaacaaaagcgtcgtgaggtccatgtcctggaacgcagatgggcaaaagatttgcatcgtatacgaagatggagcagtgatcgttggtagtgtcgatggaaacaggatttggggcaaagatttaaagggcatccagctttcgcacgtcacatggtccgctgactcaaaggtactactgttcggcatggccaatggcgagatccacatctacgacaatcagggcaacttcatgatcaagatgaagctctcctgcctggtgaatgtgaccggagcgatatccatcgccggaattcattggtaccatgggaccgagggatatgtggagcctgactgcccctgtctggcagtgtgcttcgacaatgggcgatgtcagataatgcgacatgaaaatgatcagaatccagtgctgattgacacaggcatgtacgtggtcggtattcaatggaatcatatgggctcggtgctggcagttgccggattccagaaagctgcaatgcaggacaaagacgtgaacattgtccagttctacacacccttcggggaacatttggggacattaaaagtgcctgggaaggagattagcgcactgtcatgggagggtggcggtctgaagattgccctcgccgttgacagcttcatctatttcgctaacatccgaccaaactacaaatggggttactgctctaacactgtagtgtacgcctatactcgcccagaccgtcccgaatattgcgtggtcttctgggataccaagaataatgagaagtatgtcaagtacgtgaaggggctgatcagcataacaacatgcggggatttctgcattctcgccaccaaggcggatgagaaccacccccaattcgtcctggtgctgtgtaactcgattgggactccactcgacccaaaatatatcgatattgtgcccctctttgtagccatgacgaagacccacgtcatcgccgcatcaaaggaggccttttacacttggcagtacagagtagcgaaaaaactcactgcactggagattaaccagatcactaggtcccgcaaagaggggcgagagcggatctaccatgtggacgacaccccttcagggagcatggacggggtgctggattatagcaagacgatacaaggcacacgtgaccctatctgcgctatcaccgcttccgataagatactcatagtcgggagagaatccggaaccatccagagatactctctacctaacgtaggcctaattcagaagtattccctgaattgtagagcttatcagttgagcctgaattgcaactcatctcgcctggctattatagatataagtggagtgctcacattcttcgacttagatgccagagtgactgatagtaccggccagcaggtggtaggggaactgcttaaactcgaacggagagatgtctgggacatgaaatgggccaaggacaacccggatctgttcgccatgatggaaaagacccgcatgtatgtcttccggaatttggacccagaggaaccaatccagacatccggctacatctgtaattttgaagaccttgaaatcaaatcagtgctgttagatgagattctaaaggacccagaacaccctaataaagattatctgatcaacttcgaaatcaggagcttacgagatagtcgggctctaattgaaaaggtgggaatcaaggatgccagtcagttcattgaggacaatccccatccgaggctctggcggctgctcgccgaggctgctctgcagaagctcgacctttacacagcagagcaagcatttgttcgatgcaaagactatcaggggattaagtttgtcaagcgtctgggaaagctgctcagtgagagcatgaagcaggccgaagtggtcgggtacttcgggaggttcgaggaagcagaacggacctatttggagatggaccggcgtgacctggcaatcggactgaggctgaagctcggcgactggttccgagtactccagctgttgaagacaggttccggggacgccgatgactcactactagaacaggccaataatgcgattggcgactacttcgccgataggcagaagtggttaaacgctgtgcagtactacgtgcaaggcagaaatcaagagagactcgccgagtgttactacatgttagaagactacgaggggcttgagaacttggccatttctcttcctgagaatcataagctactgccagagatcgcgcagatgtttgtacgggtgggcatgtgcgagcaggccgtcaccgctttcctgaaatgttctcagcctaaggcggctgttgacacttgcgtgcacttgaaccagtggaacaaggccgtcgagttagcaaaaaaccattcaatgaaggagatcggaagtctactcgccagatacgcaagtcacttactggagaagaacaaaacacttgatgcaattgagctgtatagaaaggctaactacttctttgacgcagctaagctgatgtttaaaatcgccgatgaagaggccaaaaaaggttctaagcctctgcgggtgaagaagctttatgtgcttagcgccctgctcatcgagcagtaccacgaacagatgaaaaatgctcagaggggcaaggtgaagggaaaatcttcagaagctacctcagctcttgctgggctactagaagaagaggtgctgtccaccaccgatcggttcaccgacaacgcctggcgcggagccgaggcctaccacttctttattcttgcccaacgtcagctgtatgaggggtgcgtcgacacggccctcaagacagcgctgcacctaaaggattacgaggatatcatccctcccgttgagatttatagcttattggccctttgcgcttgtgcctcccgggctttcggcacctgttccaaggcctttatcaagcttaaatcactggagaccctcagctcagagcaaaaacagcagtatgaagaccttgcactcgagatattcactaaacacacaagtaaggataatcggaagccagagcttgattctctgatggagggcggagaagggaagctccctacttgcgtggccaccgggtcgccgattacagagtaccagttctggatgtgctctgtctgcaagcatggagtgctggcacaagagatttcccattactcattctgccctctgtgtcactctcctgtgggatag

SEQ ID NO: 205726 - DNA, 6918 bp, Artificial Sequence
  derived and/or modified sequence
agggcgacgggagctttccggagctgctggtactcccgattggagacgtagaaccgttacttgtcgagggccttagcggccgccgtgaccctctcggggatcccacgatgttcttctacctgagcaagaaaatttccattcccaataacgtgaagctgcagtgtgtatcctggaacaaggaacaagggttcatagcatgcggtggtgaagatggattactgaaagttttgaaattagagacgcagacagatgatgcaaaattgaggggccttgcagcccccagtaacctttctatgaatcagactcttgaaggtcatagtggttctgttcaagttgtaacatggaatgagcagtatcagaagttgactaccagtgatgaaaacgggcttatcattgtgtggatgttatataaaggctcttggattgaggagatgatcaacaatcgaaataaatcagttgttcgcagtatgagctggaatgctgacggacagaagatctgcattgtatatgaagatggggctgtgatagttggttcagtggatggcaatcgtatttggggaaaagacctgaagggtatacagctatcccatgtaacatggtctgcggacagtaaagtcttactttttggaatggcaaatggggaaatacacatttacgataatcaaggaaattttatgataaaaatgaaactgagttgtttggtgaatgtcactggagctatcagcattgctggaattcattggtaccatggcacagaaggctacgtggagcctgattgcccttgccttgctgtttgctttgataatggaagatgccaaataatgagacatgagaatgaccaaaatcccgttttgattgacactggcatgtacgtagtaggcatccagtggaaccacatgggcagcgtgttagctgtggcaggcttccagaaggcagccatgcaggacaaagatgtgaacattgtgcagttttacactccgtttggtgagcatctgggtactttgaaagttcctggaaaggaaatatctgcactatcttgggaaggaggtggactgaaaattgcactagctgttgattcctttatatattttgcaaacattcgacctaattataagtggggttattgctcaaacactgtagtttatgcatataccagacctgatcgtccagaatattgtgttgtcttctgggatacgaaaaacaatgaaaaatatgttaaatatgtgaagggtctcatttctattactacctgtggagatttctgcattttggctacaaaagctgatgaaaatcatcctcagtttgtactagttctttgtaattctattggtacacccttggatcccaaatacattgatattgtaccattgtttgttgcaatgaccaaaacccatgtgatagcagcctcgaaagaagcattttatacctggcaatatcgtgtggcaaagaagctcacagcattggaaattaatcagatcacacggtctcgaaaagaagggagagaaagaatttatcatgttgatgataccccttctggatcaatggatggtgtgcttgattatagtaaaaccattcaaggcacaagggatccaatttgtgccataactgcatcagataagatattgattgtgggtcgtgaatctggcaccattcagagatacagtctacctaatgttggtttgattcaaaaatattcccttaattgtcgagcctaccagttatccttgaattgcaactctagccgtcttgctatcatagacatctcaggagttctgactttctttgacttggatgctcgagtaacggacagtacgggacagcaagtagttggagagttgttaaaattggaacgaagagatgtctgggatatgaagtgggccaaagataatcctgatttgtttgcaatgatggagaagacaagaatgtatgttttcagaaacttggatcctgaggaacccattcagacctctggatatatttgtaattttgaggatttagaaattaaatctgttcttttggatgagatattaaaggatccagaacatccaaacaaggattacctaattaactttgagattcggtctctgcgagatagccgagcactgattgagaaggttggaattaaagatgcatctcagttcatagaggacaatccacacccccgactttggcgcctactggctgaagcagctcttcagaaactggatctatacactgcagagcaagcatttgtgcgctgcaaagattaccaaggcattaagtttgtgaagcgcttgggcaaactactgagtgagtcaatgaaacaggctgaagttgttggctacttcggcaggtttgaagaggctgaaagaacgtatctcgagatggacagaagggatcttgctattggcctccggctgaaattgggggattggtttagagtactccagctcctgaaaactggatctggtgatgcagatgacagtctcctggaacaagccaacaatgccattggagactactttgctgatcgacaaaagtggttgaatgctgtacaatattatgtacaaggacggaaccaggaacgcttagctgaatgttactatatgttagaggattatgaagggttagagaaccttgccatttcacttccagaaaaccacaagttacttccagaaatagcacaaatgtttgtcagagttggaatgtgtgaacaagcagtgactgcatttttgaaatgtagtcaaccaaaggcagcagtagatacctgcgtacatctcaaccaatggaacaaagctgttgaattggctaaaaatcatagtatgaaagaaattggatctctgttagctaggtatgcatctcatttactggaaaagaataaaactcttgatgccatagaactctatcggaaagccaattacttttttgatgcagctaaactgatgtttaagattgcagatgaagaggcaaagaaaggaagtaaacctttacgtgtcaagaagctctatgtactgtcagccttacttatagagcaataccatgaacagatgaagaatgcccagcgaggaaaagttaaaggaaaaagttcagaggccacttctgccttggctggtttgctggaagaagaagttctgtctacaacagatcgtttcacagataatgcatggagaggggcagaggcttaccacttctttatacttgcacagaggcagctctatgagggatgtgtggacactgcactgaagacagctcttcacctgaaagactatgaagacatcatccctcctgtggagatctactctctgctagcactctgcgcatgcgccagcagagcctttgggacttgttcaaaagctttcattaaacttaaatctttagagaccctcagttcagaacagaaacagcagtatgaagaccttgctttagaaatcttcaccaaacatacttcaaaagataacagaaaacctgaattggacagccttatggaaggtggagaagggaaactgccaacatgcgttgccacaggaagcccaatcactgagtatcaattctggatgtgcagtgtatgcaaacacggtgtccttgctcaggaaataagccactacagcttctgccccttatgccatagtccagtgggataaaggaatgataaactgtatataactgtaaaatatatgtagcatatatacatggctatatgctgtatatgtaataaggtttatttctgtgagttttgtatgaaaatcagcctcattatttatagttgaatttttgcacaaaatatatgttaataaaataatttttatggcaatacaactgtgaaataataaggccgattttcatataaatgtatgaaaatcaaccatgttttctctcaccctctctcttttgtttatcttgtttttggttacatgataccatggaaatattccaaataaatttttttctcacagtgtcaaggtaactgaattcattaaaaaatcttgaagggagtagggagtgggggaagcatgggagtggggcaaagttgaatttagagaatttttataacccatgttacaaggaagttaaacaattgtaataatgaaatgagctttctctatagccatatttaattaaataagtgtcgaatgtcttctttattgtattttcagaagtgaggcgatggcattttaagacattttttacaatctgaattgtttctaatagccctattcttctattttaaaacctgtccttttagtctcatttaagagatggcatttggaatttacactttcatatgattgtgcagaaaacttgcctctatttataatgaagataacttaaacagaaatatccattttgtagttatagcttctgttgaaacattgtcactaagttggaccgtttatttacacaagtattgttgagggagtgattttttcttgatatgcgtctgttttcatttattattaatttgaaagataaacagttgtgatccataatggatcatttcttatgtcttttacatagctaataatgttctctgtttatttctcatgaattcccattttgtggctaaagaccagacctttgcactatttcatcaagattattttattgaggtttggcttacatatagtagaggcaatacatagagatacgcaactttgtttttgcagctacaatacactttctcaatctcatatgtttttgtcttgtagagacagagacaagttcagcatgttgcagattgggaatagtgagctatgagaagagatttagagcctagatgagcttaggatagagagtgggctcattggcctaaataaaaagagaagaccagaagtctttgaggtctctgtctctattcatgcgcctcgtggaaaattaccttggtacaatggtagcctctaaatagactgcctcgcaagctattccagaggtcatggaacagaaagccttataaaccaaataaaaattctcaaaatacattggtttattgaaccaatttgcaatacacagtgaggaacaaggagaaagcaatgatagattaacactgttagtgtaacgtgccagtggagtggaaagaccgcaacacctgaatcctgggttttgtaatgtttttatgtcctgactcacattctgtcacatacgctttcccctaatagtcgggttacaaaaaggaccagagtggccgcttgagccagatgactcaatcagatgaaatgtgcctgaggccaacgatgtacacttgctctatagaagggtgtcaggggcaagtacacttcaccacagcaatagcttgcctattagtctgctgagcagtcatgaattttattgtatttcttgggtaaggacaggccagaatgagtgtcaccagtgggtaattgaatcaacttctcacacatactgaaggctttatatgtctcatgcatacttagtgtatcatgaatatttggtatctttgtggcttttcatatttttagtgcttcatgaatatttggtatctcttgctcctttctatctgtggtcacacatacacgctctattaactttgcctaataagtctcctaggttactaacttacttacctaaatgtaacacaatgaattccagctttctcatttgttctataccagaatgggaaatttccccaaatcagaaaatcacatcctaacaaagaagtctgtctaagacagtacatctcctgttgaacttgcatctttccacaggactttctgtttttagggatgagactattctctgcttcatcaaggaaagagaaatgttcagggttgtagggatggcacacttattagttctgcctgtctgaaaggttcctgcaggacagtttggtcagagctgcaattcttagtccatggtctaatgcttgagtatctcttctttccctttcctgtctcaggaatcagctgagaattcattcgattgtcatgcctctagccccttactgtgatttgttggttgcactttcatttgctttagttctagaatcacctgttgactcctcagacttcacctaactttggaaactctcttttggaggcttctcatttccccctaattctgtgctgcctgagccctagaattttcccaccaacgaattattccaggtagatcctaagttgctggatctagttgatatttaaacaatatctagttgatatttctcattcagttggatccagaaaccagtatctctaaaaacaacctctcataccttgtggacctaattttgtgtgcgtgtgtgtgtgcgcgcatatgtatatagacaggcacatcttttttacttttgtaaaagcttatgcctctttggtatctatatctgtgaaagttttaatgatctgccataatgtcttggggacctttgtcttctgtgtaaatggtactagagaaaacacctatattatgagtcaatctagttggttttattcgacatgaaggaaatttccagataacaacactaacaaactctcccttgactagggggacaaagaaaagcaaaactgaccataaaaaacaattacctggtgagaagttgcataaacagaattaggtagtatattgaagacagcatcattaaacagttatgttgttctccttgcaaaaaacatgtactgacttcccgttgagtaatgccaagttgttttttttattataaaacttgcccttcattacatgtttcaaagtggtgtggtgggccaaaatattgaaatgatggaactgactgataaagctgtacaaataagcagtgtgcctaacaagcaacacagtaatgttgacatgcttaattcacaaatgctaatttcattataaattgttttgctaaaatacactttgaaactatttttctgtattccaagagctgagatcttagattttatgtagtattaagtgaaaaaatacgaaaataataaacattgaagaaaaaaataa

SEQ ID NO: 205727 - DNA, 2788 bp, Artificial Sequence
  derived and/or modified sequence
agggtatacagctatcccatgtaacatggtctgcggacagtaaagtcttactttttggaatggcaaatggggaaatacacatttacgataatcaaggaaattttatgataaaaatgaaactgagttgtttggtgaatgtcactggagctatcagcattgctggaattcattggtaccatggcacagaaggctacgtggagcctgattgcccttgccttgctgtttgctttgataatggaagatgccaaataatgagacatgagaatgaccaaaatcccgttttgattgacactggcatgtacgtagtaggcatccagtggaaccacatgggcagcgtgttagctgtggcaggcttccagaaggcagccatgcaggacaaagatgtgaacattgtgcagttttacactccgtttggtgagcatctgggtactttgaaagttcctggaaaggaaatatctgcactatcttgggaaggaggtggactgaaaattgcactagctgttgattcctttatatattttgcaaacattcgacctaattataagtggggttattgctcaaacactgtagtttatgcatataccagacctgatcgtccagaatattgtgttgtcttctgggatacgaaaaacaatgaaaaatatgttaaatatgtgaagggtctcatttctattactacctgtggagatttctgcattttggctacaaaagctgatgaaaatcatcctcagtaccattgtttgttgcaatgaccaaaacccatgtgatagcagcctcgaaagaagcattttatacctggcaatatcgtgtggcaaagaagctcacagcattggaaattaatcagatcacacggtctcgaaaagaagggagagaaagaatttatcatgttgatgataccccttctggatcaatggatggtgtgcttgattatagtaaaaccattcaaggcacaagggatccaatttgtgccataactgcatcagataagatattgattgtgggtcgtgaatctggcaccattcagagatacagtctacctaatgttggtttgattcaaaaatattcccttaattgtcgagcctaccagttatccttgaattgcaactctagccgtcttgctatcatagacatctcaggagttctgactttctttgacttggatgctcgagtaacggacagtacgggacagcaagtagttggagagttgttaaaattggaacgaagagatgtctgggatatgaagtgggccaaagataatcctgatttgtttgcaatgatggagaagacaagaatgtatgttttcagaaacttggatcctgaggaacccattcagacctctggatatatttgtaattttgaggatttagaaattaaatctgttcttttggatgagatattaaaggatccagaacatccaaacaaggattacctaattaactttgagattcggtctctgcgagatagccgagcactgattgagaaggttggaattaaagatgcatctcagttcatagaggacaatccacacccccgactttggcgcctactggctgaagcagctcttcagaaactggatctatacactgcagagcaagcatttgtgcgctgcaaagattaccaaggcattaagtttgtgaagcgcttgggcaaactactgagtgagtcaatgaaacaggctgaagttgttggctacttcggcaggtttgaagaggctgaaagaacgtatctcgagatggacagaagggatcttgctattggcctccggctgaaattgggggattggtttagagtactccagctcctgaaaactggatctggtgatgcagatgacagtctcctggaacaagccaacaatgccattggagactactttgctgatcgacaaaagtggttgaatgctgtacaatattatgtacaaggacggaaccaggaacgcttagctgaatgttactatatgttagaggattatgaagggttagagaaccttgccatttcacttccagaaaaccacaagttacttccaattgcagatgaagaggcaaagaaaggaagtaaacctttacgtgtcaagaagctctatgtactgtcagccttacttatagagcaataccatgaacagatgaagaatgcccagcgaggaaaagttaaaggaaaaagttcagaggccacttctgccttggctggtttgctggaagaagaagttctgtctacaacagatcgtttcacagataatgcatggagaggggcagaggcttaccacttctttatacttgcacagaggcagctctatgagggatgtgtggacactgcactgaagacagtggagaagggaaactgccaacatgcgttgccacaggaagcccaatcactgagtatcaattctggatgtgcagtgtatgcaaacacggtgtccttgctcaggaaataagccactacagcttctgccccttatgccatagtccagtgggataaaggaatgataaactgtatataactgtaaaatatatgtagcatatatacatggctatatgctgtatatgtaataaggtttatttctgtgagttttgtatgaaaatcagcctcattatttatagttgaatttttgcacaaaatatatgttaataaaataatttttatggcaatacaactgtgaaataataaggccgattttcatataaatgtatgaaaatcaaccatgttttctctcaccctctctcttttgtttatcttgtttttggttacatgataccatggaaatattccaaataaatttttttctcacagtgtc

SEQ ID NO: 205728 - DNA, 1416 bp, Artificial Sequence
  derived and/or modified sequence
atgaagggcaactacgagagcctgatcagcatggactacgccatcaaccagcccgacgtgctgagccagatccagcccgagggcgagcacaacaccgaggaccaggccggccccgaggagagcgagatccccaccgaccccagcgaggagcccggcatcagcaccagcgacatcctgagctggatcaagcaggaggaggagccccaggtgggcgccccccccgagagcaaggagagcgacgtgtacaagagcacctacgccgacgaggagctggtgatcaaggccgagggcctggccagaagcagcctgtgccccgaggtgcccgtgcccttcagcagcccccccgccgccgccaaggacgccttcagcgacgtggccttcaagagccagcagagcaccagcatgacccccttcggcagacccgccaccgacctgcccgaggccagcgagggccaggtgaccttcacccagctgggcagctaccccctgcccccccccgtgggcgagcaggtgttcagctgccaccactgcggcaagaacctgagccaggacatgctgctgacccaccagtgcagccacgccaccgagcaccccctgccctgcgcccagtgccccaagcacttcaccccccaggccgacctgagcagcaccagccaggaccacgccagcgagaccccccccacctgcccccactgcgccagaaccttcacccaccccagcagactgacctaccacctgagagtgcacaacagcaccgagagacccttcccctgccccgactgccccaagagattcgccgaccaggccagactgaccagccacagaagagcccacgccagcgagagacccttcagatgcgcccagtgcggcagaagcttcagcctgaagatcagcctgctgctgcaccagagaggccacgcccaggagagacccttcagctgcccccagtgcggcatcgacttcaacggccacagcgccctgatcagacaccagatgatccacaccggcgagagaccctacccctgcaccgactgcagcaagagcttcatgagaaaggagcacctgctgaaccacagaagactgcacaccggcgagagacccttcagctgcccccactgcggcaagagcttcatcagaaagcaccacctgatgaagcaccagagaatccacaccggcgagagaccctacccctgcagctactgcggcagaagcttcagatacaagcagaccctgaaggaccacctgagaagcggccacaacggcggctgcggcggcgacagcgaccccagcggccagccccccaacccccccggccccctgatcaccggcctggagaccagcggcctgggcgtgaacaccgagggcctggagaccaaccagtggtacggcgagggcagcggcggcggcgtgctgtag

SEQ ID NO: 205729 - DNA, 1416 bp, Artificial Sequence
  derived and/or modified sequence
atgaaagggaactatgaatcactgatcagtatggactatgccattaatcagcccgacgtgctgtcacagatccagccagagggcgagcacaatacggaggaccaggccggtcctgaggaatctgaaatccccactgatccatcggaggaaccaggcatctccacctcggacatactgagctggatcaagcaagaagaagagccgcaagtgggagcaccacccgagtcgaaagagtccgacgtgtacaagtctacctacgccgatgaggaactggtaattaaggctgaggggctggcccgcagtagcctgtgtccagaggttccagtacccttctctagcccgcccgccgctgctaaagatgccttcagcgacgtcgcctttaaatctcaacagtctacaagcatgacaccctttggccggccggcaaccgatctcccggaagcttccgaaggtcaggtcacctttacacagctagggtcatacccattacctccaccagtcggagagcaggtcttttcctgccaccattgtggcaagaacctgtctcaggacatgctgctgacgcatcaatgctcgcatgctaccgagcatccgcttccttgcgcacaatgccctaaacattttaccccccaggcagacctctcctccacctcacaggatcatgcttccgagaccccacccacctgccctcactgcgctcggacgtttactcacccttctcgcttgacctaccatctcagggttcacaacagtaccgaacgccccttcccctgccctgactgtcccaaacggttcgctgaccaagcccgactaacttcgcaccggcgcgcccacgccagcgaaaggccattcaggtgcgcccagtgcggccgctccttctctcttaagatctcgctgctcctgcatcagagaggccatgctcaagagagaccattctcttgcccacaatgcgggattgacttcaacggccactcagctctgatcagacaccagatgatacacactggcgagcgcccatacccttgtaccgattgttctaaaagtttcatgagaaaagaacatctcttgaatcacaggcggttgcacaccggcgagcgccctttttcctgtcctcattgcggaaagtcctttatacgaaaacaccaccttatgaaacatcagcgtattcacaccggtgagagaccatatccttgttcttactgtggtcgaagttttagatataaacagacactaaaggaccatcttagatccggccataatggcggttgtggtggggacagcgacccaagtggacaacccccaaaccctcccggtcccctcattaccggcctcgagacatctggcttaggggtcaatacagaggggctagagaccaatcagtggtatggggaggggagtggcggaggcgtcctctag

SEQ ID NO: 205730 - DNA, 1416 bp, Artificial Sequence
  derived and/or modified sequence
atgaaaggaaactacgagtcgttaattagcatggattatgccatcaaccagcccgatgtgctttcccagattcagcctgaaggggagcacaataccgaggaccaagctggtcccgaggaatcagagattcccaccgacccctccgaggagcccggaataagcacttctgacatactctcttggattaagcaggaagaggagccacaggtgggagcgcctcccgagagcaaagagtctgacgtgtacaagtctacttacgccgacgaagaattggtgattaaagcagaaggactggccaggtcctcattatgccccgaggttcctgtcccgttctcaagtccgcctgccgctgcgaaagacgccttttcagacgtagcctttaagtcccagcagagcacttccatgacaccttttggtagacccgctaccgacctccctgaagcatccgaaggtcaagtaaccttcactcaactggggagctatcctctcccaccccccgtgggcgaacaagtgttcagctgccaccactgcggaaaaaacttgagtcaggacatgcttctgacgcatcagtgttcacatgcgacagaacacccactaccttgtgcgcagtgtcctaaacatttcaccccgcaggctgatctgtcatccacatcacaagaccacgcatccgagaccccccctacctgtcctcattgcgccagaacctttacacacccttcccggttaacataccatctgcgcgtgcacaactcaactgagcggccatttccatgtcccgattgtcctaaaagatttgcagaccaagccagactaactagtcatagacgggctcacgccagtgagagaccgttcagatgcgctcagtgcggacgctccttcagtcttaagatctctttgctgctccatcaaagagggcatgcacaggaaaggcccttcagctgcccccaatgcggaatcgattttaatggccacagcgctctgatacggcaccagatgattcacaccggcgagaggccttatccgtgtacggattgtagtaagtcctttatgcggaaggagcatttactgaaccataggcgccttcacaccggggagcgcccattttcctgcccacactgcggcaagtctttcatccgcaaacaccacttaatgaaacaccagagaattcacaccggtgagcgcccttatccctgtagctactgtggtaggtcctttaggtacaagcagaccttaaaagatcacttgcgaagcgggcataacggagggtgtgggggggattctgatccttctgggcagccccccaaccccccagggcctcttatcaccggactggagacctctgggctgggcgtaaacacggaagggttagagaccaatcagtggtatggcgagggttcgggcggaggagtattgtag

SEQ ID NO: 205731 - DNA, 1416 bp, Artificial Sequence
  derived and/or modified sequence
atgaaaggaaattatgaaagcctcatctccatggactatgccattaaccagcctgatgtgctgagtcagatacagcccgaaggcgagcacaacacagaggaccaggctgggcccgaagagtccgaaatccccacagaccctagcgaggagcccgggattagtacaagcgatatcttaagctggatcaaacaggaggaggaaccccaggttggcgcgcctccagagtccaaagagagcgatgtgtacaagtccacctatgctgacgaagaactcgtcattaaggccgaagggctggcaagatcttcgttgtgcccagaagttccagtccccttctcatccccaccagccgccgctaaagacgcgttctctgacgtggcctttaaatcccagcagagcacctcaatgactccattcggacggcccgccaccgacctgcccgaggcctccgaaggccaggtcaccttcacccaactcggaagttatcctcttccacccccagtgggggaacaagtgtttagttgccaccattgcggaaagaatctttcccaggatatgcttctgacccaccaatgttcacacgctaccgaacaccctcttccctgcgcacagtgccctaagcatttcactcctcaggcagatctgtcctctacctcccaggatcacgcatctgagacaccacccacttgtccccattgcgctagaaccttcacccacccttctcgcctgacttatcacctccgggtccataattctacagagcgccctttcccctgtccagactgccctaaaagattcgctgaccaggcccgcctcacttctcaccggcgagcgcacgcgtccgagcgaccattccggtgtgctcagtgtgggagatcattctccctcaagatctcgttactcctacatcaacggggacacgcacaggagaggcccttctcatgcccccagtgtggcatcgactttaatggtcactcggcactcataagacaccagatgatccacactggggaacgcccatacccatgcacggactgcagtaagtcgtttatgaggaaagaacacctgctcaatcacaggcgtctccatacgggggaaagacctttttcctgtcctcattgcggaaagtcattcattagaaaacatcatcttatgaagcaccagcgtattcatacaggggagcggccctatccctgctcctactgtggtaggtcttttagatacaaacagacgctcaaggaccacctgcggagcgggcataacggtggatgcggcggtgacagtgaccctagcggacagccccccaacccacctggaccacttataacaggcttggaaaccagtggtcttggggtgaatactgagggcctggagactaatcagtggtatggcgaaggaagtggaggcggtgtactgtag

SEQ ID NO: 205732 - DNA, 1416 bp, Artificial Sequence
  derived and/or modified sequence
atgaagggaaactatgagagcttgattagtatggactacgcgatcaaccagcctgatgtgctgagtcagatacagcccgaaggcgagcacaataccgaggatcaggccggacctgaggagagtgaaatccccactgaccccagtgaggaacccgggatctcgacatcggacatcctttcatggatcaagcaggaggaggagcctcaggtgggcgcgcctcctgagtcaaaggaatcagatgtatataagagtacctatgctgacgaagagctagtaatcaaggctgagggtctcgcccggtcgagcctctgccccgaggtccccgtccccttttcatcccccccagccgccgccaaagatgccttcagcgacgtcgccttcaaaagtcagcagtcaactagcatgaccccctttggaaggcccgctaccgacctgcccgaggccagcgagggccaggttactttcacccagttggggagttacccactgccgcctcctgtcggcgagcaggttttctcgtgccaccattgtggcaaaaatctctcacaagacatgctactgacacatcagtgctctcatgctacagagcacccactcccctgtgctcagtgtcccaaacatttcacccctcaggccgacctgtccagcaccagccaggaccatgcaagcgagacaccgccaacctgcccacattgcgctaggaccttcacacacccctccaggctgacatatcacctgcgagtgcataacagcaccgagcgccccttcccatgtccagactgccccaagcgattcgccgaccaagcaaggttgacaagccatagacgggctcatgctagtgagcgcccctttcgttgcgcccagtgtggcaggagctttagcctgaaaatatctctcctgctccaccagcgggggcatgctcaggaacggccgttcagctgcccacagtgtgggattgacttcaacggacactccgctttaattcgccaccagatgatacacaccggtgaacggccatatccctgcacagactgctcaaagtctttcatgagaaaggagcatctgctgaaccaccgacgactgcacactggtgaacggcccttttcttgtccgcactgcgggaagagcttcattcgaaagcaccatctcatgaagcaccagcggatccacacaggggaaaggccctacccgtgttcttactgtggaagaagctttcggtataagcagacacttaaagaccatctgaggtctggtcacaacggcggctgtgggggcgatagcgacccaagtgggcagccgccaaatcctcccggccctctgattacagggctcgagacgtccggcctgggcgtcaatactgaagggcttgaaacaaaccagtggtacggagaggggtccggagggggcgtcctttag

SEQ ID NO: 205733 - DNA, 1416 bp, Artificial Sequence
  derived and/or modified sequence
atgaaagggaactacgagtccttgatttccatggattatgccattaatcaaccagacgtcctgtcacagattcagcccgagggagaacacaacacagaagatcaagctggtcctgaagagtctgagataccgactgatcccagcgaggagcccggcatatccacttcggacatcctgtcctggattaaacaggaagaggaaccccaggtcggcgccccccccgagagtaaagaaagcgatgtgtataagagtacctacgcagatgaagagctcgttatcaaagccgagggattagcaaggagcagtctctgtcccgaggtccctgtgcctttttcctcaccgccagccgccgcgaaggacgccttcagtgatgtcgctttcaagtcacaacagtctaccagcatgacaccattcggtcgcccggcaaccgatttgcccgaggccagtgaggggcaagtgacattcactcagctcggtagctatccactaccgcctcccgtgggagaacaggtgttttcctgtcaccactgtggtaagaacctcagtcaggatatgctgttgactcaccagtgctctcacgccaccgagcacccccttccctgcgctcagtgtcctaagcacttcacaccccaggccgatttgtccagcacgagccaggaccacgccagtgaaacccccccaacttgcccacattgtgcaagaacgtttacgcatccgagccgcttgacctatcacctgcgagtgcacaactcaacggagcgcccttttccatgtcctgactgcccaaagcgcttcgctgaccaggcgcgcctgactagccacaggcgggcccacgcaagcgagcggccattcagatgtgcacagtgtggccgttcatttagtttaaagatctccctgcttctccaccaacggggccacgcccaggagagaccatttagctgcccacagtgcggcatcgacttcaacggccattcagccctgatccgccatcagatgatccacaccggagagaggccatacccatgcaccgattgctccaaaagtttcatgcggaaagaacacctcctgaatcatcgccggttgcacactggcgagcgacccttcagctgcccacattgcgggaagtccttcatcaggaagcaccatcttatgaagcaccaacgcatacacactggggaacggccctacccatgcagttattgcggtcgaagcttccgctacaagcaaacactcaaggatcatttacgctccggccataacggtggttgtggcggagactcggatccgtccggccagccccctaatcctccgggaccccttataactggactggaaacgagcggccttggggtgaatacagaaggcctggagaccaatcagtggtatggggaaggatccggaggtggtgtcttgtag

SEQ ID NO: 205734 - DNA, 1416 bp, Artificial Sequence
  derived and/or modified sequence
atgaagggcaactatgagagcctcatctccatggactatgccatcaaccagccagatgtgctgagccagatccagcctgagggggagcacaacacagaggaccaggccggccctgaggagagcgagatccccacagaccccagcgaggagcccggcatcagcaccagtgacatcctgtcctggatcaagcaggaggaggagccccaggtgggcgcccctcctgagagcaaggagagtgatgtgtacaagagcacctatgcagatgaggagctggtgatcaaggccgagggcctggcccggagcagcctgtgcccagaggtgcctgtgcccttcagcagccccccagctgctgccaaggatgccttcagtgatgtggccttcaagagccagcagagcacctccatgacccccttcggccgcccagccacagacctgcctgaggccagcgagggccaggtgaccttcacccagctgggcagctaccccctgcccccacctgtgggggagcaggtgttcagctgccaccactgcggcaagaacctgagccaggacatgctgctgacccaccagtgcagccacgccacagagcaccccctgccctgtgcccagtgccccaagcacttcaccccccaggccgacctgagcagcaccagccaggaccacgccagcgagaccccacccacctgcccccactgtgcccggaccttcacccaccccagccggctgacctaccacctgcgggtgcacaacagcacagagcggcccttcccctgcccagactgccccaagagatttgctgaccaggcccggctgaccagccacagaagagcccacgccagcgagcggcccttccgctgtgcccagtgtggccgctccttcagcctgaagatcagcctgctgctgcaccagaggggccacgcccaggagcggcccttcagctgcccccagtgtggcatcgacttcaacggccacagcgccctgatccgccaccagatgatccacactggagagcggccctacccctgcacagactgcagcaagagcttcatgaggaaggagcacctgctgaaccaccggcggctgcacactggagagcggcccttcagctgcccccactgcggcaagagcttcatcaggaagcaccacctgatgaagcaccagaggatccacactggagagcggccctacccctgcagctactgcggccgctccttccgctacaagcagaccctgaaggaccacctgcggagcggccacaacggcggctgcggcggggacagcgaccccagcggccagccccccaaccccccaggccccctcatcaccggcctggagaccagcggcctgggcgtgaacacagagggcctggagaccaaccagtggtacggggagggcagcggcggcggcgtgctgtag

SEQ ID NO: 205735 - DNA, 1416 bp, Artificial Sequence
  derived and/or modified sequence
atgaagggcaactacgagagcctgatcagcatggactacgccatcaatcaaccggatgtcctgagtcagatacagccggagggcgagcacaacaccgaagaccaggcagggccagaagagtctgaaattcctactgacccaagcgaagagccagggatctctacttctgacattctaagctggatcaagcaggaggaggaaccacaggtgggagcaccacctgagtctaaagaatcagacgtatataaatcaacgtatgcagatgaggaactcgtgataaaagctgagggtttggccagatcatccctctgcccagaagttcccgtgccgttcagtagccctccagccgctgccaaggatgcattcagcgatgttgcattcaaatcgcagcagagtacctcgatgacaccctttggaagacccgctaccgatcttcctgaagcttctgagggtcaggtgactttcacccagttaggtagttaccccctacccccccctgtcggggaacaggtattttcttgccaccattgtgggaaaaacctatcccaggacatgcttctcacacaccagtgctctcacgctacagagcaccccctgccctgtgcgcagtgtccaaagcactttacgccacaagcagatctgtcttccacttcccaggatcatgcatcagaaacaccgcccacatgccctcattgtgctcgcactttcacgcatccatcgcgactcacgtaccatttacgcgttcacaatagtaccgaacgaccattcccatgccccgattgtcctaagaggttcgctgaccaggccagactgaccagccaccggagggcccatgcctccgaacggccattccgctgtgcacagtgtggcaggagcttctcacttaagatatcactcttactccaccagagagggcacgcccaagagcgcccgttcagctgtcctcagtgcgggattgattttaatgggcactccgccctgataaggcatcagatgatccacacgggagagcgtccgtacccttgcacagactgcagtaagagctttatgaggaaggaacacttactgaaccataggcgcctccacacgggagaacgcccattttcctgtccccattgtggcaagtcctttatccggaagcaccacctcatgaaacatcaaagaattcacaccggagaacggccttacccatgctcttactgcggtcgctccttcaggtacaagcagacgctgaaagatcatctgcggtcaggacacaacggggggtgcggtggcgattccgatccctccggacagcctcccaacccgcccggcccacttataactggtttggaaacctcagggcttggcgtgaacactgaggggttagaaacgaaccagtggtatggcgaaggaagcggagggggcgttctgtag

SEQ ID NO: 205736 - DNA, 1416 bp, Artificial Sequence
  derived and/or modified sequence
atgaagggcaactacgagagcctgatcagcatggactacgccatcaatcaaccggatgtgctctctcagatccagccagagggcgagcataataccgaggatcaggcaggccccgaggagtctgaaatccctaccgacccctctgaggaaccagggataagcacatcggacatcctatcttggatcaagcaggaggaagagccccaggtgggcgccccaccagagtctaaggagagcgacgtgtacaagtctacatatgccgatgaggaattggtgatcaaagccgaggggctcgcacgtagcagcttatgtccggaggtgccggtgccttttagctccccgcctgctgctgcaaaggacgctttttcagatgtcgcattcaagtctcaacagagtacttccatgacgccttttggacggcctgctaccgatctgcctgaagcctccgagggacaggtcacattcacccaactcggctcctaccccctgcctcctccggtcggggaacaagtgttctcttgccaccattgcgggaagaatctgtctcaggacatgctgttgacgcaccaatgttctcatgctaccgagcaccccctcccatgcgctcagtgccccaagcactttaccccccaggcagatctgtcaagcacttcgcaggatcacgcctctgaaacgccccccacatgcccccattgcgcgcgaacgtttacacatccctcccgcctcacatatcatttgagagtgcataattcaactgaaaggcctttcccttgcccagactgtccgaaacgcttcgctgaccaagcaaggttgaccagtcacagacgggcccatgcgagcgaacgacctttccggtgcgcacagtgcggacgttctttttcactaaagatctctcttcttcttcaccagaggggccacgcgcaggagcggcccttcagctgcccacagtgtggaatagactttaacgggcatagcgctctgatccgtcatcaaatgatacacacaggcgagcggccgtacccctgcacagattgtagcaagagcttcatgagaaaagaacatttattaaatcataggcggctccacactggagaacgcccctttagctgtccacattgtggaaaaagcttcataaggaaacaccacttaatgaagcaccaacggatccacacaggcgagaggccatacccctgttcctactgtggacgtagtttcagatacaaacaaactcttaaagaccacttgcggtctggtcataacggtggatgcgggggcgacagtgacccctctgggcagccccctaatcctcccggtcctcttatcacaggcctggaaacgtctgggttaggcgtgaacaccgaggggctagagactaaccaatggtacggcgaaggcagtggggggggggtcctgtag

SEQ ID NO: 205737 - DNA, 1416 bp, Artificial Sequence
  derived and/or modified sequence
atgaagggcaactacgagagcctgatcagcatggactacgccatcaatcagcccgacgtgctctctcagatccagcccgaaggagagcacaacacagaggaccaggcgggacccgaggagtcagaaatccccactgatccctctgaagagccaggtatttctacgagtgacatcctgtcctggattaagcaggaggaggagcctcaggtcggggctccccctgagtccaaagaaagcgacgtgtataaaagcacatatgccgatgaggagcttgtgatcaaggctgaagggttagccagaagtagcctgtgtcccgaggtccctgtcccattctctagccctcctgcagcggcaaaggatgccttttcagatgtggcattcaaatcacagcagagcacctctatgacaccatttggtagacctgctaccgaccttccagaggcatctgagggtcaggttacctttactcagttaggttcctacccactccccccccccgttggtgagcaggtgttctcatgccaccactgtggcaagaatctgtcacaggacatgttgctgactcaccagtgcagccacgcaaccgaacatccgttaccctgtgcacagtgccctaaacacttcacacctcaagccgacttgtctagtacctctcaagaccatgctagtgaaaccccaccgacttgtccccactgcgctcgcaccttcactcacccttcccgattgacctatcatctgagagtgcacaattccaccgaaaggccattcccttgtccagactgtcctaaaagattcgccgaccaggctaggcttacatcccatcgtagggctcacgcgagcgagagaccatttcgatgtgcccagtgtggacggtcgttctccttgaagatttcacttttgttacatcagaggggacacgcgcaagagaggccattctcttgtccccagtgtggaatcgacttcaatggccacagcgctctgatacgccaccagatgattcatactggcgaacggccgtatccctgtaccgactgttcaaaatctttcatgcgcaaggaacacctgcttaaccaccgccgcctgcacacaggagagcgtcccttttcctgtcctcactgcggcaaatccttcattaggaaacatcatctcatgaaacaccaaagaattcatactggggagagaccctatccatgtagctactgcggtaggtctttcagatacaagcagactcttaaggatcacctgagaagcgggcacaatgggggctgcggtggtgattccgacccttccgggcagccgccaaatcccccgggacctctgatcacagggctggagacaagcggactcggcgtaaatacagagggtttagagaccaatcagtggtatggggaggggagtggtggcggtgtgctgtag

SEQ ID NO: 205738 - DNA, 1416 bp, Artificial Sequence
  derived and/or modified sequence
atgaagggcaactacgagagcctgatcagcatggactacgccatcaaccagcctgacgtgctcagtcagattcagcctgagggcgagcacaacactgaagatcaggctggccccgaagagagtgaaatccccacagacccatccgaggagcctggcattagcacatcagacatcctctcatggattaagcaggaggaggagcctcaagtgggtgcacctccagaatcaaaggagagcgatgtgtataaaagtacctacgcggatgaggagctggtaataaaggcggaaggactggcccgatcgtcactgtgtcctgaggtccccgtaccgttttccagtccgcccgccgctgccaaagatgctttcagtgatgtggctttcaaaagccagcaatctacaagtatgacacctttcggccgacccgctactgatctgcccgaagcctccgaaggccaggtgacgtttacccagctgggtagctaccctctcccccccccggtaggggagcaggtgttctcctgccaccactgtggaaaaaacctttctcaggatatgctgttgactcaccagtgttcacatgccaccgagcatccccttccatgtgcccagtgcccaaaacactttacgccgcaggcagacctgtcctctacgtcgcaggaccatgccagcgaaaccccacccacatgtccgcactgcgcgcgcacatttacacatccgagccgattgacttatcaccttcgagtgcacaattctaccgagcgcccttttccctgccctgattgtcctaagaggtttgctgaccaggcacgcctcacatcgcatagacgggcccatgcgagcgagaggccttttcgctgcgctcagtgtggcagatccttcagccttaaaatctcactgcttctacaccagcgcggccacgctcaggaacggccattttcctgccctcaatgcgggattgattttaacggccactctgcattgattcggcaccagatgattcacaccggcgaacgaccgtacccgtgcacggactgctccaaatcattcatgcgcaaagaacatctgctgaatcatagaagattgcacaccggcgaaaggcctttctcttgtccacactgcgggaaaagttttatccgcaagcatcacctaatgaaacatcaaagaatccatactggggagcgaccatacccctgctcctattgtggacgctctttcaggtacaagcagacccttaaggaccatctgcgtagtgggcataacgggggatgtggaggggacagtgatccctctggccagcctccaaatccccccggccctcttattactggcctggaaacttcaggactcggggtgaatacagagggactagaaacaaaccagtggtacggtgaggggtcaggaggcggagttctgtag

SEQ ID NO: 205739 - DNA, 1416 bp, Artificial Sequence
  derived and/or modified sequence
atgaagggcaactacgagagcctgatcagcatggactacgccatcaaccagccggacgtcctgtcccaaatccagccggagggtgagcataatactgaagaccaagcaggcccagaggaaagtgaaatcccgactgatccgagcgaagagccaggaatctccacttccgatattctgagttggatcaagcaggaagaagaaccccaagtaggcgcaccccccgagagtaaggagagtgatgtatataagagtacgtatgcagacgaagagttggtcattaaagccgaggggttagccagaagctcactctgcccagaagtgcctgtgcctttcagctctcctcccgcagctgctaaagacgctttcagcgacgtcgcatttaaatctcagcagtccacatcaatgactccctttggccggcctgctactgatctccccgaggcctcggaaggccaggtgacattcacgcagttgggatcctaccccctgcccccgcctgtcggggagcaggtcttcagttgccaccactgtgggaagaatctgagccaagacatgctactcactcatcagtgcagtcacgcaactgagcacccgctgccttgtgctcagtgtcccaaacacttcacgccacaggctgatttgtcttctacatcccaggatcacgcctcggagacccccccaacctgcccacactgtgcacgcaccttcacacatccaagccgactgacatatcatctgagagtgcacaactctactgagcgacctttcccgtgtccagactgccccaaaaggttcgccgatcaggcaaggcttacctcccaccgaagggcacacgcctccgagaggccattcagatgcgctcaatgcggcagatctttctccttgaaaatctcactgttgttacaccaaaggggacatgcccaagaaaggcccttctcatgtcctcaatgtggcatagacttcaacggtcacagcgccctcatccgccatcagatgattcataccggagagcgcccttacccctgcactgattgctccaaatccttcatgaggaaagagcatctactcaaccaccggcggctgcatacgggggaaagaccgttcagctgtccccattgcggtaagagtttcatccggaagcaccatttaatgaagcaccagaggattcacactggagaaagaccctacccttgtagctactgcggacgatccttccgttataagcagacactcaaagatcacctgcgttcaggtcacaatggtggctgcgggggggactctgatccatctggccaaccacccaatccacctgggccattgattactgggctggaaaccagcgggttgggagttaacaccgaaggcctggaaaccaatcagtggtacggagaaggttctggcggaggggtcttatag

SEQ ID NO: 205740 - DNA, 1416 bp, Artificial Sequence
  derived and/or modified sequence
atgaaggggaattatgaatctctgatctctatggattatgccatcaatcagcccgatgtgctctcgcaaattcaacccgaaggagaacacaataccgaagatcaggccggacctgaggaatccgagatccctactgacccctctgaggagcctgggattagcaccagcgacatcttaagttggattaagcaggaggaggaacctcaggtcggggctccccctgaaagtaaagagtctgacgtatacaaatccacttatgcagacgaagaactggtgataaaagccgaagggctggccaggagtagcttatgtccagaggtccctgtgcccttcagctctccccctgcagccgcaaaggacgcattcagtgatgtcgccttcaagagtcagcagtccacctcaatgaccccattcggacggccagcgacagatctgccagaggctagcgagggccaggtgacattcactcagctgggatcataccccctgcccccacccgtcggggaacaggttttttcatgtcaccattgcggtaagaatctgagccaggatatgttgttgactcaccaatgctcccacgctactgaacatcctttgccatgcgcacagtgcccaaaacacttcactccacaagcagatctgtccagcacttctcaggaccacgcttccgagactcctcccacttgtccacattgcgcacggacatttacacacccttcgcggttgacataccatttgagagtgcataatagcacagaaagaccctttccatgtccagactgcccgaagagatttgcagatcaggccagactcacctcacacaggagagcccacgcctcagagcggccttttcgatgtgcacaatgcggcaggagcttttccctcaaaatttccctcctcctgcatcagaggggccatgctcaagagagacctttctcttgtcctcaatgtggtatcgatttcaatggccactccgctctcattcgccaccagatgatccacaccggggagaggccatatccctgcaccgattgcagcaagtcatttatgcggaaagagcatctactgaaccataggaggctgcacaccggcgaacgcccattcagctgcccgcactgtggcaagagtttcattcgaaagcaccacctgatgaagcaccagaggattcatactggggaaagaccatatccttgttcatattgtgggagaagctttcgttacaagcaaactctgaaagatcatctcaggtccggacataatggagggtgcggtggggattccgacccctctggccaaccgcctaatcctccaggtccactgattacgggattggaaacttccggattaggggtcaatacagagggcctggaaacaaatcaatggtacggcgaggggtcggggggaggcgttctttag

SEQ ID NO: 205741 - DNA, 1416 bp, Artificial Sequence
  derived and/or modified sequence
atgaaaggcaactatgaatcactcatctctatggactatgctattaaccagccggacgtacttagccagatccagcccgaaggggagcacaacactgaagaccaggcagggccagaggaatcggagattcccaccgacccctcagaggagcccggtatctccacgtctgatatcctatcttggataaagcaggaggaggagccccaagtcggtgcgccacccgaatcgaaagagtcagatgtttacaaatctacatacgccgacgaagaattggtgattaaggcagagggactggccagatccagtctgtgtcctgaagtccccgtgccgttttcaagcccaccagcagcggctaaggacgccttctctgatgtggcattcaagagccagcaaagtaccagcatgacaccctttggccgacccgcaacagacctccctgaagcatccgaaggccaggtgacattcactcaactggggagctacccgctcccaccccctgtgggagagcaggtgttcagctgccaccattgtggcaagaatctgtcccaggacatgcttctcacacatcagtgctcccacgctaccgagcaccctctaccgtgtgcccaatgtcctaaacactttaccccccaggccgatctgtccagtacttcgcaagatcacgccagcgagacacctccgacgtgcccccactgtgcgcgaacgtttacgcatccctcacgacttacttatcatctgcgcgtgcataactcaacggagagacccttcccatgccctgattgccccaagcgttttgctgaccaggcccgtctgactagccaccgacgcgcacacgcatccgagagaccctttcggtgcgcgcaatgcggacggtccttttctctgaagatctctttactgcttcaccagcggggtcacgcccaggaacggcctttctcttgccctcagtgtggaattgactttaatggccactctgctcttattcggcatcaaatgatccacacaggcgagcggccatacccttgtaccgactgcagcaagagctttatgaggaaagagcatctgctcaatcatcgcagactgcacacaggcgaaaggccattctcctgtccccactgcggcaagagctttataagaaagcaccacttgatgaagcatcagcggatacatactggcgaacggccttacccatgctcctactgcgggcgttcgttccggtataaacagaccttaaaagatcatctccgcagtggtcataacggcggatgcggaggcgatagcgacccttcgggacagcccccaaatccacccggtccactcataacagggttggagacgagcggcctgggcgtcaatacagaggggttggaaactaaccagtggtatggtgaaggctcaggcggtggtgtactgtag

SEQ ID NO: 205742 - DNA, 1416 bp, Artificial Sequence
  derived and/or modified sequence
atgaagggcaattacgaaagtttaatcagcatggattacgcaattaatcagcctgatgtcctgtcccaaattcagcccgaaggcgaacacaatacagaggatcaggctggtcccgaggaaagcgagatcccgaccgatccttctgaagaacccggaatcagcacaagcgacatactgtcctggatcaagcaggaagaggaacctcaggtaggcgcaccaccagaatctaaggagagcgatgtctataaaagcacctacgctgatgaagagctcgtgatcaaggcagaaggcctggccagatctagcctgtgtccagaggtgccagtgcccttctcgagcccccctgccgctgccaaagacgccttctctgacgtggcattcaagtcgcagcagtctacaagcatgactccctttggcagacccgctaccgacctacctgaagcatccgagggacaagtaacgttcacacagctcgggtcttatcctctaccacccccagttggcgagcaggtgtttagctgccaccattgtggtaaaaacctgagtcaagatatgctgctgacccaccaatgcagccatgctacagaacatcctctcccttgcgctcagtgccctaagcacttcaccccccaggcggacttaagttctacaagccaagaccacgcttcagagacacctcccacatgtccccattgtgccagaacattcactcatcccagcagactgacctatcatcttcgggtccacaacagcacggagagacccttcccctgtcccgattgtcctaaacgctttgcggatcaagcaaggctgacatcccacagacgggctcacgcatccgaacgcccatttcgctgtgcccagtgtggcaggagcttttcattaaaaattagcttgctgctgcaccagagggggcatgcgcaggagcggccattctcatgtcctcaatgtgggatcgactttaacggccattccgccctcatccggcaccagatgatacataccggcgagcggccatacccgtgcactgactgcagcaagtcattcatgcgcaaggagcatttgctgaaccaccgcaggttgcacaccggtgagcgaccttttagctgtccacattgtggcaaatcctttatcagaaaacatcacctgatgaaacaccagcgaattcacactggggagcgaccttacccatgttcctactgcggccgtagcttcagatacaagcagaccttaaaggatcatcttcgatcaggacacaacggtgggtgcgggggagattctgacccatcaggtcaaccacccaacccgccaggtccactgatcactggcctggaaacttcaggtctaggggtcaacacggaagggctcgagacgaaccaatggtatggagagggatctggcggtggcgtgctgtag

SEQ ID NO: 205743 - DNA, 1416 bp, Artificial Sequence
  derived and/or modified sequence
atgaaggggaactacgaaagtctcatcagcatggattacgctatcaaccagccggacgtgctctctcagattcaacctgaaggagagcacaatactgaggatcaggctggtcctgaggaatcagaaatcccaacggatccttccgaagaacccggaatttctacttcagatattctatcatggattaaacaggaggaggaaccacaggtgggagccccaccagagagcaaagagtctgatgtgtacaaatccacctacgcggatgaggaactagtcattaaggcagagggtctggcacgttcttcgctctgccctgaggtgcctgtacctttttcatcgccaccagccgcagcgaaagacgctttttcagacgtggcttttaaatcacagcagtctactagcatgacaccctttggaagaccggcaaccgacctgcctgaagctagcgaagggcaggtcacattcacccaattgggttcctatcctttacccccaccagtgggggagcaggtgttttcctgccaccactgtgggaagaacctatcccaggatatgttactgacccaccagtgctcgcatgcaactgaacatcctctaccctgcgcgcagtgtcctaaacactttactcctcaggctgatctgagttctaccagccaagatcacgcttccgaaaccccacccacgtgcccccactgtgctagaaccttcacccatccctcacggctgacgtaccatctccgggtgcacaattctacagagagaccattcccttgccccgattgccccaaacggtttgcagaccaggccaggctgacatcacatcgacgcgctcatgcatccgagaggccttttcggtgcgcccagtgcggcaggtcgttctccctgaaaattagtctgctgctgcatcaacggggtcacgcgcaagagcgcccattttcttgcccccaatgcggcatcgacttcaacggacatagtgcactgatccgccaccagatgatccacacaggcgaaaggccgtacccctgtacggactgttctaagtccttcatgcggaaggagcatctgctcaaccataggcgactccacacaggagagagaccgttctcctgccctcattgcggcaagagctttatcaggaaacatcacctgatgaaacaccagagaatccacactggtgagcgcccatacccttgtagttattgcggaaggtcgtttcgatataaacagaccctcaaagatcacctgaggagcgggcacaatggtggttgcggcggagatagcgatccttccggccaacctcctaatcccccaggtcccctaataaccgggctggagacttctggcctgggcgtcaatactgaaggcctggagaccaatcagtggtacggagagggcagtggtgggggagttttgtag

SEQ ID NO: 205744 - DNA, 1416 bp, Artificial Sequence
  derived and/or modified sequence
atgaagggtaattacgagtctttgatttcaatggattacgcaattaaccagcccgatgttctatctcagatccagcccgagggcgagcataacacagaggaccaggccggacccgaggaatccgagataccaaccgatcccagcgaagaacctgggatatctacgtccgatatcctctcctggatcaagcaggaagaggaaccacaggtaggcgctccacctgagagcaaagaatctgatgtctataaatctacatatgcagacgaagagttagtaatcaaggctgagggactcgctaggtcgtctctatgtcccgaagtgcccgtgcccttcagtagcccccctgccgcagccaaggatgccttttccgacgtggccttcaagtcacagcagtcgacgtcgatgacaccattcggacgccctgcgacagatctgcccgaggcctctgaggggcaggtgacctttacccaactgggctcatacccacttccccctcccgtaggcgagcaagtcttttcctgccaccattgtggaaaaaacctgtcccaagatatgctcctgactcaccagtgctcgcatgccacagagcaccctctcccttgcgcgcagtgtcccaaacactttacccctcaggcagatctgtcaagtacctcacaggatcacgcttcggagacaccccctacatgtccccactgcgccaggacgttcacccaccccagccgtctgacctaccatctccgggtgcataactcaacagagcggccatttccatgccccgactgccccaagcgttttgccgatcaggcccgtttgactagccaccggcgtgcacacgccagtgaaagaccattccggtgcgcgcagtgcgggaggagcttttccctgaagatttccctgttactacaccagcgtgggcatgcgcaggaaagacctttttcgtgtcctcagtgtggtatcgattttaacggacacagcgcccttattagacaccagatgattcacacaggcgagcgcccttacccctgcaccgattgttccaagtctttcatgcgcaaagaacacttgttgaatcacagaaggctgcacaccggtgagcggccattctcctgccctcattgtggtaagagctttatcagaaagcaccatctgatgaagcatcagcgaatccatacgggagagcgaccttacccctgttcctactgcggcaggagttttagatacaagcagacactgaaagatcacctgcggagcgggcacaacggagggtgtggtggtgatagcgatccctccggccagcccccaaatccccctggaccactgattaccgggctggagacctcagggcttggggtgaacactgaaggcctagagacaaatcagtggtatggggaggggtctgggggaggggtgctgtag

SEQ ID NO: 205745 - protein, 505 aa, Artificial Sequence
  derived and/or modified sequence
MSAEEMVQIRLEDRCYPVSKRKLIEQSDYFRALYRSGMREALSQEAGGPEVQQLRGLSAPGLRLVLDFINAGGAREGWLLGPRGEKGGGVDEDEEMDEVSLLSELVEAASFLQVTSLLQLLLSQVRLNNCLEMYRLAQVYGLPDLQEACLRFMVVHFHEVLCKPQFHLLGSPPQAPGDVSLKQRLREARMTGTPVLVALGDFLGGPLAPHPYQGEPPSMLRYEEMTERWFPLANNLPPDLVNVRGYGSAILDNYLFIVGGYRITSQEISAAHSYNPSTNEWLQVASMNQKRSNFKLVAVNSKLYAIGGQAVSNVECYNPEQDAWNFVAPLPNPLAEFSACECKGKIYVIGGYTTRDRNMNILQYCPSSDMWTLFETCDVHIRKQQMVSVEETIYIVGGCLHELGPNRRSSQSEDMLTVQSYNTVTRQWLYLKENTSKSGLNLTCALHNDGIYIMSRDVTLSTSLEHRVFLKYNIFSDSWEAFRRFPAFGHNLLVSSLYLPNKAET

SEQ ID NO: 205746 - DNA, 1518 bp, Artificial Sequence
  derived and/or modified sequence
atgagcgccgaggagatggtgcagatcagactggaggacagatgctaccccgtgagcaagagaaagctgatcgagcagagcgactacttcagagccctgtacagaagcggcatgagagaggccctgagccaggaggccggcggccccgaggtgcagcagctgagaggcctgagcgcccccggcctgagactggtgctggacttcatcaacgccggcggcgccagagagggctggctgctgggccccagaggcgagaagggcggcggcgtggacgaggacgaggagatggacgaggtgagcctgctgagcgagctggtggaggccgccagcttcctgcaggtgaccagcctgctgcagctgctgctgagccaggtgagactgaacaactgcctggagatgtacagactggcccaggtgtacggcctgcccgacctgcaggaggcctgcctgagattcatggtggtgcacttccacgaggtgctgtgcaagccccagttccacctgctgggcagccccccccaggcccccggcgacgtgagcctgaagcagagactgagagaggccagaatgaccggcacccccgtgctggtggccctgggcgacttcctgggcggccccctggccccccacccctaccagggcgagccccccagcatgctgagatacgaggagatgaccgagagatggttccccctggccaacaacctgccccccgacctggtgaacgtgagaggctacggcagcgccatcctggacaactacctgttcatcgtgggcggctacagaatcaccagccaggagatcagcgccgcccacagctacaaccccagcaccaacgagtggctgcaggtggccagcatgaaccagaagagaagcaacttcaagctggtggccgtgaacagcaagctgtacgccatcggcggccaggccgtgagcaacgtggagtgctacaaccccgagcaggacgcctggaacttcgtggcccccctgcccaaccccctggccgagttcagcgcctgcgagtgcaagggcaagatctacgtgatcggcggctacaccaccagagacagaaacatgaacatcctgcagtactgccccagcagcgacatgtggaccctgttcgagacctgcgacgtgcacatcagaaagcagcagatggtgagcgtggaggagaccatctacatcgtgggcggctgcctgcacgagctgggccccaacagaagaagcagccagagcgaggacatgctgaccgtgcagagctacaacaccgtgaccagacagtggctgtacctgaaggagaacaccagcaagagcggcctgaacctgacctgcgccctgcacaacgacggcatctacatcatgagcagagacgtgaccctgagcaccagcctggagcacagagtgttcctgaagtacaacatcttcagcgacagctgggaggccttcagaagattccccgccttcggccacaacctgctggtgagcagcctgtacctgcccaacaaggccgagacctag

SEQ ID NO: 205747 - DNA, 1518 bp, Artificial Sequence
  derived and/or modified sequence
atgtctgcagaggaaatggtgcaaataagactcgaggatagatgctacccagtaagcaaaagaaaactgatagaacagagtgactactttagggcactctaccggtccggcatgagagaggccctgagccaagaggccggaggccccgaggtgcagcagctgcgggggcttagcgcacccggcctgagactggtgctagattttataaatgctggcggcgcacgcgagggatggctcttagggccccggggagagaagggtggcggagtggatgaggacgaagagatggatgaagtctcactgttgagcgagctggtcgaggcagcatcttttctgcaagtgacgagcttgctgcaactgctgctctctcaggtgcgcctgaacaattgcttggaaatgtatcgcctggctcaggtttacggactcccagaccttcaggaagcctgtctacgcttcatggtcgtacacttccacgaggtcctctgcaaacctcaatttcacctgctgggctcccctccacaggctcctggagacgtctctcttaagcaaaggctgcgcgaagctcgaatgaccggcacccccgttcttgtcgctttaggggattttcttggcgggccattggcacctcatccataccagggcgaacccccttccatgttgaggtacgaagagatgacagagaggtggttcccattggcaaacaacctgccaccagacctagtcaacgtcagaggctacggctccgccatcctagataattacctgttcattgtgggcggttatcggattacttcacaggaaattagtgctgcgcatagctataatcctagcacaaatgagtggcttcaggttgcctcaatgaatcagaaaaggtcaaacttcaagctggtagctgtcaactcgaagctgtatgctattggggggcaggcagtgagcaatgtggaatgttataatcctgagcaggacgcgtggaattttgtcgccccgctcccgaatcctctggccgaattcagtgcctgcgaatgcaagggcaaaatatacgtgatcggcgggtacactaccagagatagaaacatgaatatcttgcagtactgtccatcctctgacatgtggaccttgtttgagacttgcgatgtacacattcgcaagcagcagatggtctctgtggaggagactatctatattgtcggcggatgcctccacgagctcggccctaatcgccgatcaagccaatcagaggacatgctcacagtgcagagctacaataccgtgactaggcagtggctgtatctcaaagaaaacacatccaagtccggactcaacttgacatgcgccctccacaacgacggcatttacataatgagtcgcgatgtgaccctgagtacctcccttgagcacagagtgtttctgaaatataatatttttagtgatagttgggaagcatttcggcggttcccggcttttggtcacaatctgctggtctcaagcctgtatctgccaaacaaagctgaaacttag

SEQ ID NO: 205748 - DNA, 1518 bp, Artificial Sequence
  derived and/or modified sequence
atgtctgctgaggagatggtgcagatccggctggaggaccgctgctaccctgtgtccaagaggaagctgattgagcagagcgactacttccgggccctgtaccgcagcggcatgagggaggccctgagccaggaggccggcggccctgaggtgcagcagctgcggggcctgagcgcccctggcctgcggctggtgctggacttcatcaatgccggcggggcccgggagggctggctgctgggccccagaggagagaagggcggcggcgtggatgaagatgaggagatggatgaggtgtccctgctgtctgagctggtggaggccgccagcttcctgcaggtgaccagcctgctgcagctgctgctgagccaggtgcggctgaacaactgcctggagatgtaccgcctggcccaggtgtatggcctgcctgacctgcaggaggcctgcctgcgcttcatggtggtgcacttccacgaggtgctgtgcaagccccagttccacctgctgggcagccccccccaggcccctggagatgtgtccctgaagcagaggctgcgggaggccaggatgacaggcacccctgtgctggtggccctgggggacttcctgggcggccccctggccccccacccctaccagggcgagccccccagcatgctgcgctatgaggagatgacagagcgctggttccccctggccaacaacctgcccccagacctggtgaatgtgcggggctacggcagcgccatcctggacaactacctgttcatcgtgggcggctaccgcatcaccagccaggagatctctgctgcccacagctacaaccccagcaccaatgagtggctgcaggtggcctccatgaaccagaagaggagcaacttcaagctggtggccgtgaacagcaagctgtatgccatcggcggccaggccgtgtccaatgtggagtgctacaaccctgagcaggatgcctggaactttgtggcccccctgcccaaccccctggccgagttcagcgcctgtgaatgtaaaggcaagatctacgtgattggaggctacaccacccgggacaggaacatgaacatcctgcagtactgccccagcagtgacatgtggaccctgtttgagacctgtgatgtgcacatcaggaagcagcagatggtgtctgtggaggagaccatctacatcgtgggcggctgcctgcacgagctgggccccaacagaagaagcagccagagcgaggacatgctgactgtgcagagctacaacacagtgacccggcagtggctgtacctgaaggagaacaccagcaagagcggcctgaacctgacctgtgccctgcacaatgatggcatctacatcatgagcagagatgtgaccctgagcaccagcctggagcacagggtcttcctgaagtacaacatcttcagtgacagctgggaggccttccgccgcttccctgccttcggccacaacctgctggtgagcagcctgtacctgcccaacaaggccgagacctag

SEQ ID NO: 205749 - DNA, 6703 bp, Artificial Sequence
  derived and/or modified sequence
ctggctgggagctggaattcccttcccgcctggcgccgcccgggagagcccgcgcgaggacgcccgccgcgctccgccggcccttttttggcgctgagggaaaggagaagggcagggccgccgcctcgcgggagcgggccccgggaggaggggccgccggagaggccgggcgagcgcgggcggccctcacctcgccgctcctcccgggccgccatccctcggcgccccgcccggaaccggcgcgcgcgtaggggctgggaggccggcgcgcagatctggcggtgagcgctgccgccccggggcccccagccatgtcggccgaggagatggtgcagatccgcctggaggaccgctgctacccggtgagcaagaggaagctcatcgagcagagcgactacttccgcgccctctaccgctccggcatgcgcgaggccctgagccaggaggccggcggcccggaggtgcagcagctgcgcggcctcagcgcgccgggcctgcggctggtgctggacttcatcaacgccggcggggcccgcgaaggctggctcctgggcccgcgcggggaaaagggcggcggggtggacgaggacgaggagatggatgaggtgagcctgctgtccgagctggtggaggcggcctccttcctgcaggtcacgtccctgctgcagctgctgctgtcccaggtgcggctcaataactgcctggagatgtaccgcctggcgcaggtgtacgggctgcccgacctgcaggaggcctgcctgcgcttcatggtcgtccacttccacgaggtgctgtgcaagccccagttccacctcctggggtctcctccccaagctccaggggatgtcagcctgaagcagaggctgagggaggcccggatgactgggactcctgtcctcgtggccctcggggacttcctggggggacccctggcccctcacccctaccagggggagcccccgtccatgctcaggtacgaggagatgactgagcgttggttcccgctggccaacaaccttcctcccgacctggtcaatgtcaggggctatgggtctgccatcctggacaactacctcttcatagtgggcgggtacaggatcactagccaggagatctccgctgcgcattcctacaaccccagcaccaacgagtggctccaggtggcctccatgaaccagaagaggtctaacttcaaacttgtggctgttaattcaaaactctatgccatcggagggcaggccgtttctaacgttgagtgttacaaccccgagcaggatgcgtggaattttgtggcgcccttacccaatcctctggctgagttctctgcctgtgagtgtaagggaaaaatttatgtcattggaggatacactaccagagaccggaacatgaacattttgcagtactgcccctcttccgacatgtggacgctctttgaaacatgtgacgtccacattcgcaagcagcagatggtgtctgtggaagagaccatctacatcgtgggggggtgtctccacgagctggggcccaaccgcaggagcagccagagcgaggacatgctcaccgtgcagtcctacaacaccgtcacccgccagtggctctacctcaaggagaacacgtccaaatcgggtcttaacttgacttgtgcgctccataacgacggcatctacatcatgagcagagacgtcaccctgtcgaccagcttggaacaccgagtgttcctcaagtacaacatcttttcagatagttgggaagcatttcggcgttttccagcttttggacataacttgctggtttcttctctttatctgcccaataaagcagaaacatgactgaattgaattggtagatgaaaaaaacctggttcaagttttttttaaaatgtggtgtcccattccaagggagaccaattcctaaagggtaaagaagggttaaagtaggtcacatatatacagtagcagctgtaaataagcttacttgaactaattacttgaaaactggtggaaaaaagagaccaactttgttattttttaaattattgatttttaaattatgggagcaaatccatctccaaacatgatactcttgggccaatgacggatcatcaaaatgtagattcattgtgtctgtgtggtaaagggccaaagtcaataattgggacaaatggtaaagatgattttaaaatctgttgtatttaggtcccttgacatatcattagcaccttaagtgagaggttttctttttcttatcagtgtccttgacaagcattcatattaacatattcattctctcttctccatcacccatacccacacatacatctagtatgtttagggttctgtgttcagatattttgtttgcacactactttttaggaaacttataatgatggagccctacagtgaatccttaccagtgttcagtcctccccaaaacttgcataaaaatattcttagctatttttccagccttttttgcagttacaaatgctggataaatagactgataaaacctcttattttatttatgtggcaggttgcatatttatgtggacacataggttgcactgctaggcattctgtattgttttaaagaggatatattatttagaaaaatggacatatgaatattattaaaaattgagtcttaaatttaaatgggaagggaagaaaacaccaaataagaaaaaaatttgcctttaagagttacttttgttgaatgtatttgacttagttcttattttaaggctaaaaaaactttgtcatatttaagtcggcagctttctaatttaatcttagctttgtaattcatgttttgcttttgtggactaaggtaaggacagcatttaaatatttgtgctggagtgaggggaagaagctgttacagaagtggaatggtttctggtggtatttctgaagttaggtaaagtgctttacttgccttggttgttaattgaaatagaattcagctcaagcagttgttttcagtgagtgagttaacaataaaagcttctgccaatcatagatcaacattcctcaaaaatacatacactcatacttatggaaattttattttgattgaaaacactctgaaattatctgatattttgtaatggcatcagttaaactgtgagctggattccatctttctgcagtaacagcgggcagaaccatttcagttagcatgtgcctcactttaagaaagtcctgtaggggaaaaaaaaaactgtcagagcgaattcatgcattcaacaaacacttatgagtgcctggagtatgccgtccactgtgcagatgtaggacaggggctaatcacttagagttcttcagtttattagaggagtgactacaggttttctttacaaccatggcctctagtatacttaaaataagcgtccagttataaaaagcctatttgcacaactttttgggaatacttctattaactaaaatgaggtaagccattattttggacatagaaacagatctttgtatcttgtcaccaaataatcttacctctagtctacttacaactttgtaagggtttctaagctatgcccatttattcccaaatattaagcccttaaaaaaataaaacctctgaaccaaaatcttcccaggaatagtacttaatagattttaatgttaatttatattcattgtagaattgaatttccagtgacctgtaatttcattacatatattttaaaatctatttattttagatggtgttaacttttcgttgctgaagagcttaactttttaaaggctttgtcctatacatttagaagatgagtcagttgaattagtactggacaaacagttggagattagtttgcaaataagcatatcatatcaaatacaatattccagccaaccagttaattctcttcctggttacattcattgggtctatttgcctaatgttgacaattagattcttggaccaagtgagggtgtactctgatccacaaagctcttttataaaccaggtttgaggttgtgtgtgtgtgtgggggtgtgtgtgtgtgtgtgtgtgtatgtttgcatattatagctctctttaagacagacatctaaaaagattttggttattctgggctgccagcagtacgtgggaaaggtggaatgtgcaataggaacagatctgtgcattttgtgacatcgtccttcctgctgtgcacatcagctgtgatgacattttgagggtagttttaatttagctcggttctcttgttggtgccagtattacattgaagactacctatgatagaggcaatgttgctttgaaaatctcccttcaggcggaggttgcagtgagccgagattgtgccattgcactccagcctgggcgacagtgcaagactctgtctccaaaaaaaaaaaaagaaaaaagaaaatcccccttcatcccccaggactgtcctttactctttgatagtatccctctattttcttcccaattctctaaatgctttatcattttttcctgagatgcttctgagggatgctgacctcccactatggggaaaagggttgcttggaggacctggggtggcagccccccgaccagaagcaccctattttatagatagcagtctgaatggtagagagtcctgtgtgtgggttgttagaaggttggttcttcctgttattctctctggctttcctttcaacccacttattttcagaggcctctccccttagcatcctttaaaaggttttctgatgaatgtgtgaaagagttgattatttcaacagtattggttaagtcacaacgacgaagtgctgagaaggttatgggtaccaggaagaaacaaacagaagtcttaagattagaatgagaaccaaagagaatttaaccctgccatttttttttttttaacaccaagatcctaagtaattccaaatgccttagatatcaatgaaagctacacaccattgagatgggcaaaattctttctctacaaagggagtaatcaagtaaatacctgttctctttcaatggactgttgcctattgagcattgtggatgatgtgttttcagatttccaggtgaagttctgaccctacctgtttggccaaagacgtaaattgagaggaaaggccttggtcttcctgatcaaccagcatttaacgaacagtggcttaatgcagatcactcaagaggcagcatagcaatgtaaaaggaatataagtaggtgttggatgcctttttcctagaccaggaatggggaatatataacacctgtgccaccgctcttttaaggaggcattatgaatgagtgcagcattcctgtcctctgtgccaggatttggtcttagaatccatgtcagattggtgcttccagacatctattcccagtccatcagagtgaaatgaaggctatttgccatccctgccttagacagaggagtgaaagaattaagtgggtagacaccaaccaaaatgactttgaaagcagtgagctgattgagctccagttctgtggttaccagaaatactgagtgtctgtcatgtgcaagacaatgctaagaacagaatacagacataaataagtcacggcccatgaccttgaagagcttacggccttataaagaggttcactgtaattgtcttcaccagggcgtccttctcaaagatgcccacttttgtctggcacattggggctcggtggtctggtggtcccttcggtcttggccctgtccgtcctttgtttttgtgatttactaacaatcatcacgaaccagttttgtttttcttttaaatttgaacatcacatcttgtgttttagttttttgctctatgatttttttctcactgcttttcagtcttctctgtacttcatttttgtgaaaaagtgaaaatcacatataatctttatttaaaaatgctcaccaagcactgcagactttggagttagggattcagcagcttgttccagtgaaaaggaggagtgaagctggggaagttagtatctaagaggggcaagctgattgcatgtgcatttatacctatgcctttaaaacattcccataaaaagtattaataaagaaatttccattccacactagtactgatgaaaaggtggttgattttgccttgtgataattatcaaaggatagtttttcatccttagattttattcacatgagagattttttttattttctctgttgacttaggaacacatcataaattcacaccaactgacacgttgctgacgtctgtacttgacataaccatttttattcatacaggaagcattaaatataaaagatggtcagttttgaagagcaaagggtgctgaaatgacttgtacggttggctggtgctttctcaaatggattgccatagttcattactagtaaagaaaaggaaaatgtgatttacgttgtcatttttcctattaaaaaaaacccttaagaatggggcacttgagctgtccctgcaatgttttcatatctagtagtcattttagggaaagtgataatctgtagaatgaatagttatgttttgatatgactgatactttctttgttaaaaggttgtattaagtcttcaatttcaagtctagcttaaaagtgtaaacattatgtgattcatttgaatacaagaatgcctatgaaatacccactataacagcattccttttgtgtttagaactatagaagaaaatgtcttcaaataaagtagttttcagtca

SEQ ID NO: 205750 - DNA, 1518 bp, Artificial Sequence
  derived and/or modified sequence
atgagcgccgaggagatggtgcagatccggctggaggaccggtgctatccggtgtcaaaaaggaaactgattgagcagtcagactacttcagagcactgtataggtccgggatgcgtgaagccctgtctcaggaagctggcggtcccgaagttcagcagctgagagggttgtcagctcctggattaagactggtcctagattttatcaacgctgggggagcacgagagggatggctcctcggccctcgaggagagaaaggaggtggagttgatgaagatgaagagatggatgaggtgtcgctgctgtccgaattagtcgaggccgcgtcatttctgcaggtgacatcgctgttgcagttgctgctgtcacaggtgcgcctgaataattgtttggaaatgtacagactggctcaggtgtatgggcttccagatctccaggaggcttgcctgcggtttatggtcgtgcatttccatgaggtcctctgcaaacctcagtttcatcttcttgggtcaccccctcaggccccaggcgatgtcagccttaagcagcgcctgcgagaggcaagaatgaccggaacccctgtgctggttgccctcggagacttcctaggcggcccattggcccctcacccatatcagggggagcccccttcaatgctccggtacgaagagatgactgagagatggttccccttggcaaacaacctgcccccggacttggttaacgttcgaggctatggaagtgcaatcttggacaactacctctttatcgtgggtggctatcgcattacctctcaagagataagcgctgcccacagctacaatccttcaaccaacgagtggctgcaggtggcatctatgaaccaaaaaaggtcaaatttcaaactcgtggcagtcaactctaagctgtacgccattggtggccaggccgtgtctaatgtcgagtgctataaccccgagcaagatgcctggaacttcgtggcgcctctaccaaaccctcttgcagagtttagtgcctgcgaatgtaagggcaagatctacgtcatcggtggctatacaacacgcgacaggaacatgaatattctgcagtactgcccttcaagtgatatgtggaccctctttgagacatgtgatgtgcacattcggaagcagcagatggtctcggtcgaggaaactatatacatcgtcgggggctgcctccacgaactggggcctaataggagaagctcacaaagcgaagatatgcttacagtccaaagttataatacagttaccagacagtggctgtaccttaaggaaaacaccagcaaatcaggactgaacttgacatgcgctctgcacaacgacgggatttacatcatgtccagagacgttacactctccacatccctggagcatcgagtgttcctcaaatacaatattttctcagattcctgggaggccttcagacggttcccagcattcgggcataatttgctggttagcagcctctacctccccaacaaggccgagacgtag

SEQ ID NO: 205751 - DNA, 1518 bp, Artificial Sequence
  derived and/or modified sequence
atgtccgccgaggaaatggtgcagatcagactggaggacagatgctatccagtctctaagcgaaaactgatagaacagagtgattactttcgcgcactgtatcgctccggaatgcgggaggcccttagtcaggaggctggaggacctgaagtgcagcagttgaggggcctgagcgcccctggcttgaggttggtactggacttcattaatgccggtggcgctcgagaaggctggttgttgggccctcggggagagaaggggggtggcgtcgatgaggatgaggaaatggacgaagtcagcctcctcagtgaattggtggaagcagcctccttcctgcaagtgacctccctgctccagctgttgctctcccaagtaagactaaacaattgtctcgagatgtacagactggcacaagtgtatggcctgcctgacctccaggaggcttgtttgaggtttatggttgttcacttccacgaagtgctgtgtaaaccacagttccaccttctcggctctcccccacaagctccaggcgatgtgtcactcaaacagcgcctgagggaggccaggatgacagggacccccgtgctggtggctctaggtgatttcttagggggtccattagcccctcacccttaccagggagagcccccaagtatgcttaggtacgaagagatgaccgagcggtggttccctctcgcaaacaacctgccgccagatctggttaacgtgagagggtacggctcggccattctcgataattatctgttcatcgtcggcggatatcgaataacgagccaggaaatttcagcggcacactcctacaatcctagcacgaacgagtggctccaagtcgctagtatgaaccaaaaacggtcgaactttaaactggttgccgtgaatagcaaactgtacgccataggcggacaagctgtgtcaaatgtcgaatgctacaacccagagcaggacgcctggaactttgttgccccacttcccaacccattggcagaattcagcgcctgtgaatgtaagggtaagatctacgtcattggtggatacaccactcgggacaggaatatgaacatcctccagtactgccccagctccgacatgtggactcttttcgaaacctgcgacgtgcatataagaaaacagcagatggtgtccgtcgaggaaaccatctacatagtaggagggtgcttgcacgaactggggccaaatcgacgttccagtcagtccgaagacatgctgaccgtgcaatcttataatacggtgacacgacaatggctgtacctgaaggagaacacgtctaaatcgggtctaaatctgacatgcgccctgcacaacgacgggatctacataatgtcccgggacgtaaccctgtcaacttcactagaacaccgtgtatttttaaaatataatatattctctgactcttgggaggcttttagacgctttcctgcctttggccacaatttgctcgttagctctctctatttgcctaacaaagcagagacatag

SEQ ID NO: 205752 - protein, 425 aa, Artificial Sequence
  derived and/or modified sequence
MAPITTSREEFDEIPTVVGIFSAFGLVFTVSLFAWICCQRKSSKSNKTPPYKFVHVLKGVDIYPENLNSKKKFGADDKNEVKNKPAVPKNSLHLDLEKRDLNGNFPKTNLKPGSPSDLENATPKLFLEGEKESVSPESLKSSTSLTSEEKQEKLGTLFFSLEYNFERKAFVVNIKEARGLPAMDEQSMTSDPYIKMTILPEKKHKVKTRVLRKTLDPAFDETFTFYGIPYTQIQELALHFTILSFDRFSRDDIIGEVLIPLSGIELSEGKMLMNREIIKRNVRKSSGRGELLISLCYQSTTNTLTVVVLKARHLPKSDVSGLSDPYVKVNLYHAKKRISKKKTHVKKCTPNAVFNELFVFDIPCEGLEDISVEFLVLDSERGSRNEVIGQLVLGAAAEGTGGEHWKEICDYPRRQIAKWHVLCDG

SEQ ID NO: 205753 - protein, 230 aa, Artificial Sequence
  derived and/or modified sequence
MDLLSEKKHKVKTRVLRKTLDPAFDETFTFYGIPYTQIQELALHFTILSFDRFSRDDIIGEVLIPLSGIELSEGKMLMNREIIKRNVRKSSGRGELLISLCYQSTTNTLTVVVLKARHLPKSDVSGLSDPYVKVNLYHAKKRISKKKTHVKKCTPNAVFNELFVFDIPCEGLEDISVEFLVLDSERGSRNEVIGQLVLGAAAEGTGGEHWKEICDYPRRQIAKWHVLCDG

SEQ ID NO: 205754 - DNA, 1278 bp, Artificial Sequence
  derived and/or modified sequence
atggcccccatcaccaccagcagagaggagttcgacgagatccccaccgtggtgggcatcttcagcgccttcggcctggtgttcaccgtgagcctgttcgcctggatctgctgccagagaaagagcagcaagagcaacaagacccccccctacaagttcgtgcacgtgctgaagggcgtggacatctaccccgagaacctgaacagcaagaagaagttcggcgccgacgacaagaacgaggtgaagaacaagcccgccgtgcccaagaacagcctgcacctggacctggagaagagagacctgaacggcaacttccccaagaccaacctgaagcccggcagccccagcgacctggagaacgccacccccaagctgttcctggagggcgagaaggagagcgtgagccccgagagcctgaagagcagcaccagcctgaccagcgaggagaagcaggagaagctgggcaccctgttcttcagcctggagtacaacttcgagagaaaggccttcgtggtgaacatcaaggaggccagaggcctgcccgccatggacgagcagagcatgaccagcgacccctacatcaagatgaccatcctgcccgagaagaagcacaaggtgaagaccagagtgctgagaaagaccctggaccccgccttcgacgagaccttcaccttctacggcatcccctacacccagatccaggagctggccctgcacttcaccatcctgagcttcgacagattcagcagagacgacatcatcggcgaggtgctgatccccctgagcggcatcgagctgagcgagggcaagatgctgatgaacagagagatcatcaagagaaacgtgagaaagagcagcggcagaggcgagctgctgatcagcctgtgctaccagagcaccaccaacaccctgaccgtggtggtgctgaaggccagacacctgcccaagagcgacgtgagcggcctgagcgacccctacgtgaaggtgaacctgtaccacgccaagaagagaatcagcaagaagaagacccacgtgaagaagtgcacccccaacgccgtgttcaacgagctgttcgtgttcgacatcccctgcgagggcctggaggacatcagcgtggagttcctggtgctggacagcgagagaggcagcagaaacgaggtgatcggccagctggtgctgggcgccgccgccgagggcaccggcggcgagcactggaaggagatctgcgactaccccagaagacagatcgccaagtggcacgtgctgtgcgacggctag

SEQ ID NO: 205755 - DNA, 693 bp, Artificial Sequence
  derived and/or modified sequence
atggacctgctgagcgagaagaagcacaaggtgaagaccagagtgctgagaaagaccctggaccccgccttcgacgagaccttcaccttctacggcatcccctacacccagatccaggagctggccctgcacttcaccatcctgagcttcgacagattcagcagagacgacatcatcggcgaggtgctgatccccctgagcggcatcgagctgagcgagggcaagatgctgatgaacagagagatcatcaagagaaacgtgagaaagagcagcggcagaggcgagctgctgatcagcctgtgctaccagagcaccaccaacaccctgaccgtggtggtgctgaaggccagacacctgcccaagagcgacgtgagcggcctgagcgacccctacgtgaaggtgaacctgtaccacgccaagaagagaatcagcaagaagaagacccacgtgaagaagtgcacccccaacgccgtgttcaacgagctgttcgtgttcgacatcccctgcgagggcctggaggacatcagcgtggagttcctggtgctggacagcgagagaggcagcagaaacgaggtgatcggccagctggtgctgggcgccgccgccgagggcaccggcggcgagcactggaaggagatctgcgactaccccagaagacagatcgccaagtggcacgtgctgtgcgacggctag

SEQ ID NO: 205756 - DNA, 1278 bp, Artificial Sequence
  derived and/or modified sequence
atggctccaataaccacaagccgcgaagaatttgatgagattcccacagtggtgggtattttctcagccttcggacttgtctttactgtatccctgttcgcctggatttgctgccagagaaaatcgagtaagtccaacaagactccgccatataaattcgttcacgtattaaaaggagtcgatatctacccagaaaatttaaactcaaaaaagaagtttggggccgacgacaagaacgaggtgaagaataaacctgccgttcccaagaatagcctgcacttagacctcgaaaagagagacctgaatgggaactttcccaagacaaatctgaagccagggtccccttctgacctagagaatgcaacgcctaaactcttcctggagggagaaaaagaatcagtgtcacctgaaagcctaaagagtagtaccagcctgactagtgaagagaagcaggagaagttgggcactctctttttcagtctggagtacaattttgaacgcaaagcttttgtggtcaacatcaaagaggccagggggcttcctgctatggacgagcaaagtatgacatctgacccatatattaagatgacaattctgcctgaaaaaaaacataaggtcaagactagagtgctccgcaaaaccctcgatccagcttttgacgaaactttcacattctacggtattccgtacactcaaatccaggaactggcgcttcacttcactattctcagctttgatagattcagcagggacgatataatcggagaggtgcttattcctctatccgggatagaacttagtgagggcaagatgctgatgaatagagagattattaagcgaaacgtacgcaagtcctcaggaaggggtgagctgctcatatcactgtgctaccaatctaccacaaatacattgaccgtggtagtgttgaaagccaggcacctgcccaaatctgacgtaagcggtctatcagacccctacgtgaaagtcaacctgtaccatgccaaaaagcgaataagtaaaaagaaaacccatgtcaaaaaatgtacacctaacgcagtcttcaacgaactctttgtttttgacattccctgcgaggggttagaggatatatctgtggaattcttggtgctcgactctgagaggggcagtagaaatgaggttataggccaactcgtgttgggcgccgcagctgagggaacgggcggcgagcattggaaggaaatctgcgactaccctaggcggcagatagcaaaatggcacgtactgtgcgacggctag

SEQ ID NO: 205757 - DNA, 693 bp, Artificial Sequence
  derived and/or modified sequence
atggatctgctgagcgagaagaagcataaggtgaagacgcgggtgctgcgaaaaacgctggacccagcctttgacgagaccttcacattttatggcatcccatacactcagatccaagaactagccctgcactttaccatactctcgtttgatcggttcagtcgggacgacatcattggcgaagttttgatccccctgtctgggattgagctgagtgaaggcaaaatgctgatgaacagggagattattaagcgtaatgtcaggaaatctagcggcagaggtgagctcctgattagcctgtgttatcagtccaccactaatacactcaccgtggtggtgctgaaagctcgccaccttcccaagtccgacgtgtctgggttgtctgatccctacgttaaagtcaatttgtaccatgccaaaaagagaatttccaagaaaaaaacacacgtgaaaaagtgcacccccaacgcagtgttcaatgaactgtttgtctttgatatcccgtgcgagggtttagaagacatcagtgtcgagttcctggtcctggatagtgagagaggatccaggaacgaagtgatcggacagctcgtgctcggcgcggcagcagaaggtaccggaggggaacactggaaggaaatctgtgattaccctcgacggcagattgccaagtggcacgtcctctgcgacggttag

SEQ ID NO: 205758 - DNA, 1278 bp, Artificial Sequence
  derived and/or modified sequence
atggcccccatcaccaccagccgggaggagtttgatgagatccccaccgtggtgggcatcttcagcgccttcggcctggtgttcaccgtgtccctgtttgcctggatctgctgccagaggaagagcagcaagagcaacaagaccccaccctacaagtttgtgcacgtgctgaagggcgtggacatctacccagagaacctgaacagcaagaagaagtttggagcagatgacaagaatgaggtgaagaacaagccagctgtgcccaagaacagcctgcacctggacctggagaagagggacctgaatggaaacttccccaagaccaacctgaagccaggcagccccagcgacctggagaatgccacccccaagctgttcctggagggggagaaggagagcgtgtccccagagagcctgaagagcagcaccagcctgaccagcgaggagaagcaggagaagctgggcaccctcttcttcagcctggagtacaactttgagaggaaggcctttgtggtgaacatcaaggaggcccggggcctgcctgccatggatgagcagagcatgaccagtgacccctacatcaagatgaccatcctgcctgagaagaagcacaaggtgaagaccagggtgctgaggaagaccctggaccctgcctttgatgagaccttcaccttctacggcatcccctacacccagatccaggagctggccctgcacttcaccatcctgagctttgaccgcttcagcagagatgacatcatcggggaggtgctgatccccctgagcggcatcgagctgtctgagggcaagatgctgatgaaccgggagatcatcaagagaaatgtgaggaagagcagcggccgcggggagctgctgatcagcctgtgctaccagagcaccaccaacaccctgactgtggtggtgctgaaggcccggcacctgcccaagagtgatgtgtctggcctgagtgacccctacgtgaaggtgaacctgtaccacgccaagaagaggatcagcaagaagaagacccacgtgaagaagtgcaccccaaatgctgtgttcaatgagctgtttgtgtttgacatcccctgtgagggcctggaggacatctctgtggagttcctggtgctggacagcgagcggggcagcagaaatgaagtcatcggccagctggtgctgggcgctgctgctgagggcaccggcggggagcactggaaggagatctgtgactacccccggcggcagatcgccaagtggcacgtgctgtgtgatggatag

SEQ ID NO: 205759 - DNA, 693 bp, Artificial Sequence
  derived and/or modified sequence
atggacctgctgtctgagaagaagcacaaggtgaagaccagggtgctgaggaagaccctggaccctgcctttgatgagaccttcaccttctacggcatcccctacacccagatccaggagctggccctgcacttcaccatcctgagctttgaccgcttcagcagagatgacatcattggagaggtgctgatccccctgtctggaattgagctgtctgagggcaagatgctgatgaaccgggagatcatcaagagaaatgtgaggaagagcagcggccgcggggagctgctgatcagcctgtgctaccagagcaccaccaacaccctgactgtggtggtgctgaaggcccggcacctgcccaagagtgatgtgtctggcctgagtgacccctacgtgaaggtgaacctgtaccacgccaagaagaggatcagcaagaagaagacccacgtgaagaagtgcaccccaaatgctgtgttcaatgagctgtttgtgtttgacatcccctgtgagggcctggaggacatctctgtggagttcctggtgctggacagcgagcggggcagcagaaatgaggtgattggccagctggtgctgggcgctgctgctgagggcactggaggagagcactggaaggagatctgtgactacccccggcggcagatcgccaagtggcacgtgctgtgtgatggatag

SEQ ID NO: 205760 - DNA, 1278 bp, Artificial Sequence
  derived and/or modified sequence
atggcccccatcaccaccagccgggaggagttcgacgagatccccacggtggttggcatcttcagtgcctttggcctggtgttcactgtgtctttatttgcttggatctgttgtcagagaaaatcctccaaatcgaacaagacccccccatataaattcgtgcatgtcctcaagggcgttgacatttatccggaaaacctcaatagcaagaagaagtttggggcagacgataaaaatgaagtgaaaaacaaacctgcagtgccaaaaaatagtctacatttagatctggagaaacgcgatctgaacgggaatttccccaagaccaacctgaagccagggtcgccctctgatttagagaatgcaacgcccaaattgttcctcgaaggagaaaaggagtctgtgtcccctgagtctttgaagtcctctacaagcctcacgtctgaagagaaacaggaaaagttggggactttgttctttagccttgagtacaactttgaaagaaaggcattcgtcgtcaacattaaagaggcacggggccttcctgccatggacgagcagagtatgacaagcgatccctacattaagatgacaattctacccgagaaaaagcacaaagtgaagaccagggtcctgaggaaaacgcttgatcctgctttcgatgaaacattcactttttatggtatcccttatactcagattcaagagctcgccttgcatttcaccatcctgtcctttgaccgtttctccagagatgatatcattggcgaggtattgatacctctgagcggtattgagctcagtgagggtaagatgttaatgaaccgcgagataatcaaacgaaacgtccggaagagttctggccggggagaactcctcataagcctgtgctatcagtccaccaccaataccctgaccgtcgtggtgctaaaagcccggcatctgcccaaatctgacgttagtggccttagcgacccgtacgtgaaggttaacctttaccatgccaaaaagcgcatctcaaagaaaaaaacgcacgtgaaaaagtgcactccaaacgccgtgtttaacgaactgttcgttttcgatattccgtgcgaaggactggaagacatcagtgtggagttcctggtactcgattcggagcgtggttcacgcaatgaagttatcggacagctggttctaggagccgctgccgaaggaacagggggcgaacattggaaagagatttgcgactacccgcggcggcagatcgccaaatggcatgtcttatgtgacggttag

SEQ ID NO: 205761 - DNA, 693 bp, Artificial Sequence
  derived and/or modified sequence
atggacctgctgagcgagaagaagcacaaggtgaagacccgggtgctgagaaaaaccttggaccctgcatttgacgagacctttaccttctatggcattccctatacccagatacaagaactcgccctccactttactatcctttcgttcgatcgattttccagggatgatattatcggtgaggtcctgattcctctctcaggtattgagctgtcagagggcaagatgcttatgaatagggaaattataaagcgcaacgtcaggaagtcctccgggcgcggcgaattgttgatttcgctgtgctatcagagcacaacaaacacgttgactgttgttgttttgaaggcgaggcacctgccaaagtccgatgttagcggattgtccgacccatacgtcaaagttaacttgtatcacgcgaaaaagagaatttcaaagaaaaaaacccatgtgaagaagtgtactccgaacgccgtgttcaacgagctgttcgtattcgacattccttgcgaaggcctggaagacatcagtgtggagtttttggtgctggacagcgaacgcggcagtcggaatgaggtgattggtcaattagtactgggagccgcagccgaaggtactggaggagagcattggaaggagatctgcgactatcctcggcgccagattgctaaatggcacgtgttatgcgacggatag

SEQ ID NO: 205762 - DNA, 1278 bp, Artificial Sequence
  derived and/or modified sequence
atggctcctattaccaccagtagagaagagttcgatgaaattcctacagtcgttggcatctttagcgccttcggattggtatttaccgtgagcctgtttgcctggatctgttgccaacgaaagagctctaagtcaaacaaaactcctccttataagttcgttcacgtcctgaaaggggtggacatctaccctgaaaatctgaactctaaaaaaaaattcggcgctgacgataaaaatgaagtgaaaaacaaaccggctgtcccgaaaaactccctgcaccttgatctagaaaagagggacctgaacggaaatttcccaaaaaccaacctgaagccaggatcgccttcagacctggaaaatgccacacccaagctttttctggaaggcgaaaaggagtccgtgtctcctgaatccctgaagagtagtacctcccttacctcagaggaaaagcaagaaaagctggggaccctgtttttcagtctggagtataatttcgagcgcaaagccttcgttgtcaacatcaaggaagccaggggtctgcccgcaatggacgagcagtctatgacatctgacccctatattaagatgaccatcctaccggagaagaagcacaaagtcaagactcgggtcctgaggaaaacactggatcccgcttttgacgagacctttactttctacggcataccatacactcagattcaggagctggcccttcactttacaattctatcctttgaccgcttcagccgtgatgatatcattggcgaggtcctgatccccctaagcggaattgagctgtctgagggaaaaatgttgatgaatcgcgagattattaaaaggaacgtccggaaaagtagcggtagaggtgaactgctgatatccttatgctatcagtcgaccaccaatactttaactgtggtcgtgctcaaagccaggcacctgcccaaaagtgatgttagcggtctctcagatccttacgtcaaagtcaatctttaccacgcgaagaagaggattagcaagaaaaaaacacacgtgaaaaagtgtacaccaaacgctgtgttcaatgaattgtttgtgttcgacatcccctgtgagggcctcgaagatataagcgttgagtttctggtactggactctgaaagaggtagcagaaatgaggtgatcggccaactggtgctcggagccgcagccgagggtacaggtggggagcactggaaggagatttgtgactatcctagaagacagattgccaaatggcacgtgctttgcgacgggtag

SEQ ID NO: 205763 - DNA, 693 bp, Artificial Sequence
  derived and/or modified sequence
atggatctcctttctgaaaagaagcacaaggtcaaaacacgtgttctgaggaagaccttggatcctgcctttgacgagacgtttaccttttacggaattccttacacccagatacaggagctggcgcttcatttcactattctttcttttgataggttctcccgagatgacatcatcggtgaagtgttgatcccgctgtccggcatcgagttaagcgaaggaaaaatgttaatgaacagggagataatcaagcggaacgtgcggaaaagcagcggtagaggagaactattgatcagtctgtgctaccagtcaactacaaataccctaacagtggttgtgctcaaagcacgccatctcccaaagagtgacgtctcaggcctgagcgatccttatgtgaaggtaaatctttaccacgccaaaaagcgcatttccaagaagaagacacatgtgaagaagtgtacgccaaacgctgtctttaacgaactgttcgtgtttgacattccgtgcgagggattggaggacatatctgtcgagttcctggtgctggattctgaaaggggttctaggaacgaggtgattggacagttggttctgggggctgccgctgaaggcaccggtggagaacactggaaagagatctgtgactacccccgacgacagatcgctaagtggcacgtcctctgcgatggatag

SEQ ID NO: 205764 - DNA, 4094 bp, Artificial Sequence
  derived and/or modified sequence
gatgagcatgtgttgaatcctcaagagaggagggaggaagcaagaaggaaagcttgaagggaggaggggaggggggcaggtgctgatttcagccctgtagcgtcaggattgcgtcaattcgggttccagccacgtctggagtctcggagacgagcttctcagaagagccaaaacaggaaccgaggtggcaaatcactgtgcgagggcgagtggacctccctctttgcctcctccctgttccaggagctggtgccctgggctctgcgctgttgttttcagcgctccgaaagccggcgcttgagatccaggcaagtgaatccagccaggcagttttcccttcagcacctcggacagaacacgcagtaaaaaatggctccgatcaccaccagccgggaagaatttgatgaaatccccacagtggtggggatcttcagtgcatttggcctggtcttcacagtctctctctttgcatggatctgctgtcagagaaaatcatccaagtctaacaagactcctccatacaagtttgtgcatgtgcttaagggagttgatatttaccctgaaaacctaaatagcaaaaagaagtttggagcagatgataaaaatgaagtaaagaataagccagctgtgccaaagaattcattgcatctggatcttgaaaagagagatctcaatggcaattttcccaaaaccaacctcaaacctggcagtccttctgatctggagaatgcaaccccgaagctctttttagaaggggaaaaagagtcagtttcccctgagagtttaaagtccagcacttcccttacttcagaagagaaacaagagaagctgggaactctcttcttctccttagaatacaacttcgagagaaaagcatttgtggtcaatatcaaggaagcccgtggcttgccagccatggatgagcagtcgatgacctctgacccatatatcaaaatgacgatcctcccagagaagaagcataaagtgaaaactagagtgctgagaaaaaccttggatccagcttttgatgagacctttacattctatgggataccctacacccaaatccaagaattggccttgcacttcacaattttgagttttgacaggttttcaagagatgatatcattggggaagttctaattcctctctcgggaattgaattatctgaaggaaaaatgttaatgaatagagagatcatcaagagaaatgttaggaagtcttcaggacggggtgagttactgatctctctctgctatcagtccaccacaaacactctaactgtggttgtcttaaaagctcgacatctgcctaaatctgatgtgtccggactttcagatccctatgtcaaagtgaacctgtaccatgccaaaaagagaatctccaagaagaagactcatgtgaagaaatgcacccccaatgcagtgttcaatgagctgtttgtctttgatattccttgtgagggccttgaagatataagtgttgaatttttggttttggattctgaaagggggtcccgaaatgaggtaatcgggcagttagtcttgggtgcagcagcagaaggaactggtggagagcactggaaagagatctgtgactaccccaggagacaaattgccaagtggcacgtgctctgtgatggttagcatcctagccgtgagttggaacttaaaggtttttactaggcaaggagaaattttctttctttctatattggattgcaagcttgggaaatcaagctacctttttgttgttgttgttgttgctagaaatggattgaattagtagaccagaaagtaacttcaaatgtgtattatgataatttccctatttattagaagagttggataaattttcataagatattcaatatctccttcagattaccagtgatataactaggaatagtcagacattttatgaatactgtgccagaatcccaaattataaatgtgacaatctcattggaacatgtcacaaaaagttaatgtgattaagatttaaaaacgaaaagtatgccttgccttgtgaaaatttatccatttatcttcaggttggggaaatcaatttttctttaaatccaaagatactaaaaaaatgtcctccagtttgtatttattaattctgtcatgtgcaaatggttgtcctgcatataaaagtatctggtcatttcagtttggtttgtaattatttgatgcaattttatcataagagtaactcagattcatttcaaaaggacagtgaacaagctgagaaattattttatcaaagggctgagttgagaacactgtggctgaaatataatttttctcccccctaaggttacatgtgagtcaaaattttgtaaaatataacctcacataagaaccatggccttggattattcactgcctgtcacaagcctcagtgtggcctgagaaatccctatgtacctttgtgaaattgttgaattagttagtgaataaagaaataaacttcaactagaaatccagttagaagtgcaattttcttataggaaataggtatagtgtgcaagtgtacttttaaggccatcgtttgtacccagagtcggcatggccacctaagtcttcatttaatttattgtcccccagaaaagattaagatgctacttgaaaagactgtgaagattttttacattgccagataaaaagtgttacttaaccaacaaacaaatgtaagactacaaaatcgttcaagagcaattctaatataatttacatatgttcacgcaaaatatgcttaggctgtcaaattagcacaacaaagaatgtgtttcactatcttttctaggctaatttgtcttgagctgttgtctatagagcagtttacagacttgtgtcttgtatcattttccagtgccagggttctgaaattcattcagaacctgttagattaaagctgcaccctgtgattatttgaaaagaattagcttgagagtaatgtcactatatttgagttcttagagaagtatgagtggaacttgagtacagttgaattattaaatatgcaagttagaaattaagtctactgaaaaatttacattttgagtcaggttttgtgtcagtactttagcagtttttgagaatgtgtttgatatcacagtgtttgtaaattctatgaaaaatgcattttccaaacaacttatacatgctttttatgactatgcctaatgtaaagaaaatgtattacattctgtatgtacaaagattaaaaatcaacctcttttttgtgctttaaaatgactttgggattaaaaaagcatatttcccaatcattgtcttcattccactacaaagtcacctcacagcatcttgctccactcggcatctctgtgaaagcaacatgaaatgaactgtagtaggtgtgtagtttggggaagtcaaatggccattttatgtatgtgcatttggtatcatgggccgtggaacagaatatatgttggacctctgaaaagttgtaaggggccaattctaagtattcttcacggcagccagaagttaatggtggtagcagctgaggtatggttgttggacgaggccgatttttttttttttaacatggaacaatgaaaccaacaacaaacatttttaaaattaaaatggataatttgtaaatagtttttagcttttaaaatttaaagtgtttttgagtgtgaaaagttgagtaaaactatttgcaactggttttcagaaaagagaaaagaaacaacaaaggaattgaaacaggcagggagatcttaatacctaatttcatcatttctgaaaatgtactgttttagaatgtattacaatatcaatgtgaatatcttgaatcctgttacaaatcctgcactgtattaaacatgtaaattaattgtttgtctgattagccaatctcaccacccaaatggggaggtatacatgtttgaagaactgtgtaactcagtaattgatttgttctgatgttgtaactcaatagaagtgttttggaaggaagcatggtgtgtgagacagtgtctgttcttttgtgccagctctgtatgatgtttgtaagaccatgtttgtaagacatgaataaattgctgcttttgccc

SEQ ID NO: 205765 - DNA, 1513 bp, Artificial Sequence
  derived and/or modified sequence
ttcagcgctccgaaagccggcgcttgagatccaggcaagtgaatccagccaggcagttttcccttcagcacctcggacagaacacgcagtaaaaaatggctccgatcaccaccagccgggaagaatttgatgaaatccccacagtggtggggatcttcagtgcatttggcctggtcttcacagtctctctctttgcatggatctgctgtcagagaagaagcataaagtgaaaactagagtgctgagaaaaaccttggatccagcttttgatgagacctttacattctatgggataccctacacccaaatccaagaattggccttgcacttcacaattttgagttttgacaggttttcaagagatgatatcattggggaagttctaattcctctctcgggaattgaattatctgaaggaaaaatgttaatgaatagagagatcatcaagagaaatgttaggaagtcttcaggacggggtgagttactgatctctctctgctatcagtccaccacaaacactctaactgtggttgtcttaaaagctcgacatctgcctaaatctgatgtgtccggactttcagatccctatgtcaaagtgaacctgtaccatgccaaaaagagaatctccaagaagaagactcatgtgaagaaatgcacccccaatgcagtgttcaatgagctgtttgtctttgatattccttgtgagggccttgaagatataagtgttgaatttttggttttggattctgaaagggggtcccgaaatgaggtaatcgggcagttagtcttgggtgcagcagcagaaggaactggtggagagcactggaaagagatctgtgactaccccaggagacaaattgccaagtggcacgtgctctgtgatggttagcatcctagccgtgagttggaacttaaaggtttttactaggcaaggagaaattttctttctttctatattggattgcaagcttgggaaatcaagctacctttttgttgttgttgttgttgctagaaatggattgaattagtagaccagaaagtaacttcaaatgtgtattatgataatttccctatttattagaagagttggataaattttcataagatattcaatatctccttcagattaccagtgatataactaggaatagtcagacattttatgaatactgtgccagaatcccaaattataaatgtgacaatctcattggaacatgtcacaaaaagttaatgtgattaagatttaaaaacgaaaagtatgccttgccttgtgaaaatttatccatttatcttcaggttggggaaatcaatttttctttaaatccaaagatactaaaaaaatgtcctccagtttgtatttattaattctgtcatgtgcaaatggttgtcctgcatataaaagtatctggtcatttcagtttggtttgtaattatttgatgcaattttatcataagagtaactcagattcatttcaaaaggacagtgaacaagctgagaaattattttatcaaa

SEQ ID NO: 205766 - protein, 825 aa, Artificial Sequence
  derived and/or modified sequence
MFSGFNVFRVGISFVIMCIFYMPTVNSLPELSPQKYFSTLQPGKASLAYFCQADSPRTSVFLEELNEAVRPLQDYGISVAKVNCVKEEISRYCGKEKDLMKAYLFKGNILLREFPTDTLFDVNAIVAHVLFALLFSEVKYITNLEDLQNIENALKGKANIIFSYVRAIGIPEHRAVMEAAFVYGTTYQFVLTTEIALLESIGSEDVEYAHLYFFHCKLVLDLTQQCRRTLMEQPLTTLNIHLFIKTMKAPLLTEVAEDPQQVSTVHLQLGLPLVFIVSQQATYEADRRTAEWVAWRLLGKAGVLLLLRDSLEVNIPQDANVVFKRAEEGVPVEFLVLHDVDLIISHVENNMHIEEIQEDEDNDMEGPDIDVQDDEVAETVFRDRKRKLPLELTVELTEETFNATVMASDSIVLFYAGWQAVSMAFLQSYIDVAVKLKGTSTMLLTRINCADWSDVCTKQNVTEFPIIKMYKKGENPVSYAGMLGTEDLLKFIQLNRISYPVNITSIQEAEEYLSGELYKDLILYSSVSVLGLFSPTMKTAKEDFSEAGNYLKGYVITGIYSEEDVLLLSTKYAASLPALLLARHTEGKIESIPLASTHAQDIVQIITDALLEMFPEITVENLPSYFRLQKPLLILFSDGTVNPQYKKAILTLVKQKYLDSFTPCWLNLKNTPVGRGILRAYFDPLPPLPLLVLVNLHSGGQVFAFPSDQAIIEENLVLWLKKLEAGLENHITILPAQEWKPPLPAYDFLSMIDAATSQRGTRKVPKCMKETDVQENDKEQHEDKSAVRKEPIETLRIKHWNRSNWFKEAEKSFRRDKELGCSKVN

SEQ ID NO: 205767 - DNA, 2478 bp, Artificial Sequence
  derived and/or modified sequence
atgttcagtggattcaacgtgtttcgagtaggaatctcatttgtgatcatgtgcattttttacatgccgacagtgaattctttgccagaactaagcccccagaagtacttcagcacacttcagcccggaaaggcatccctggcttacttttgtcaggccgattctccaagaacaagtgtattcctggaagaattgaacgaagcagtacgtccactgcaggactacggtatttctgtcgctaaggttaattgcgtaaaagaggaaatatctcgttactgcgggaaggagaaggatctcatgaaggcttacctattcaagggcaacatcctgctgagggagtttcccaccgacaccctgttcgacgtcaacgccatagtcgcacatgtcctgttcgcactgctgtttagtgaagtgaaatacatcacaaaccttgaagatctccagaatattgagaacgcactcaagggtaaggcaaatattattttcagctacgtccgagccattggcattcctgagcatagagccgtcatggaggccgcttttgtgtatggcacgacttaccagtttgtcttaacaactgagatcgcccttctcgaatctattgggtcagaagatgtggagtatgcccacctgtactttttccattgcaaactggtgctggatcttacccaacagtgcaggcgcactctgatggagcaaccgctaaccactttgaacatacatctattcataaagaccatgaaagcccctctgctgactgaggttgcggaggatccccagcaggtgtctaccgttcatcttcagctgggtctgccgttagttttcattgttagccagcaagccacttacgaagcggaccgccgaactgctgaatgggtcgcttggcggctcctggggaaggccggtgtgctgctcctccttcgggattcacttgaagtgaatattccccaggacgccaatgtggtgttcaaacgcgcagaggagggagttcccgtggaattcctggtcctccatgatgttgacttaattatttctcacgttgagaataatatgcatatagaagagatccaggaggacgaagataatgacatggaaggacctgatattgatgtccaggacgatgaagtcgccgaaacggtgttcagggacagaaagcggaagctgcctctggagctgaccgtggaattgacagaggagacatttaacgctactgtgatggcatcagacagcatagttctcttttatgctgggtggcaagctgtgtccatggccttcctgcagtcctatattgatgttgctgtgaagctgaaggggacatccacaatgctgctcactaggatcaattgcgcagattggagcgacgtctgtactaaacagaacgtgacagaattccccataatcaaaatgtataaaaaaggagaaaacccagtgagctacgcaggcatgctggggacagaggaccttctgaaatttatccaattaaacaggatctcctatccagtgaacataacaagtatacaggaagctgaggagtacctgtccggagagctctacaaagatttaattttgtacagtagcgtgagcgtcttgggcttgttttcccctacgatgaaaaccgctaaagaagacttctctgaagccggaaactatctgaaggggtacgtcatcacaggcatctattccgaagaggatgtattactgttgagcacaaagtacgcagcaagtctgccagccctgctgctcgcccgtcacaccgaaggcaagatcgagagtattcccctagcttccacccatgcgcaagatatagtgcagattattacggacgcactgctggagatgtttcccgaaatcaccgttgaaaatttgcctagctattttaggctgcagaaaccgctgctgatcctcttttctgacggcaccgtgaatcctcagtacaagaaagcaatccttacactggtcaagcagaaatacctggacagcttcaccccttgctggctgaacctcaagaacacccctgtggggagaggcatcctgagagcatactttgaccctctgccaccgctgccactgttggtgctagtcaatctccacagtggcggacaggtcttcgccttccccagtgaccaggccataatcgaggagaatttggtactctggctaaaaaagctggaagcaggattggagaaccacataacgatcttgcctgcccaggagtggaagcccccactcccagcttacgacttcttgagtatgattgatgcagccacatcgcagagagggacgcggaaagtacccaagtgtatgaaagaaacagatgtgcaggagaatgacaaggaacagcacgaagataaatccgccgtcagaaaggaacccatcgaaaccctgagaatcaagcattggaacagaagcaactggtttaaagaggctgagaagagtttccgcagagacaaggaactgggatgcagtaaggtgaactag

SEQ ID NO: 205768 - DNA, 2478 bp, Artificial Sequence
  derived and/or modified sequence
atgtttagcggatttaacgtcttccgagtgggaatcagtttcgtgataatgtgcatcttttacatgccgacggtaaatagcctccctgagctgtcaccacagaagtatttttccaccttgcagccaggtaaggccagtctcgcatatttctgccaggcagattcgcccaggacgtcagtattcctggaagaactgaatgaagcggttagacctctccaggactatgggatatccgtggctaaggtgaactgcgttaaggaagagatcagcagatactgcgggaaagagaaggatctgatgaaagcctacctcttcaagggtaatattctgctccgcgagttccccactgacactctgttcgacgtcaacgcaatcgtcgctcatgtgctattcgccctgcttttctctgaggtaaagtacatcaccaatttggaagaccttcagaacatagaaaatgccctcaaaggcaaagcaaacataatctttagttatgtgcgggctatcgggatccctgagcacagagccgtaatggaagccgccttcgtatacggcaccacctaccaattcgtactgacaacagaaatcgccctcctggagtctataggatccgaagacgtcgagtatgcccacctgtattttttccattgcaaattggtgctggatctgacacagcagtgtcggcgcaccctgatggagcaacctctcactacattgaatatccacctgttcatcaaaaccatgaaagccccactcctgactgaggtcgcagaggaccctcaacaagtctcaactgtacacctccagcttggcctgcccctggtgttcattgtctcccaacaagcgacatacgaggccgacagacgtacggccgaatgggtagcgtggagactcctgggtaaagccggcgtactgctgttactaagagacagccttgaagtcaacatccctcaggatgcaaatgtggtgtttaagcgagctgaggaaggagtgcctgtggaatttctggtcctgcatgacgtggatctcattattagtcacgttgaaaacaatatgcacatcgaggaaatccaagaagacgaggacaatgatatggaagggcccgacatcgacgtccaggatgacgaagtggccgagactgtgttccgtgaccgtaagcgcaaactgcctctcgaactgacagtggagctgaccgaagagacctttaatgcaacagtcatggcatccgattcaatcgtgttattttatgccggttggcaggccgtgtctatggcatttctgcagtcgtacattgatgtggccgtgaaattgaaaggaacatccactatgctgctcacgaggattaattgtgcagattggtcagacgtctgtactaaacaaaacgtaacagagttccccatcatcaagatgtacaagaagggggagaacccagtatcctacgccgggatgcttggcacggaagatctgctcaagtttatccagctcaatagaatcagctacccagtgaatatcacttcgattcaggaagcagaggagtacctttcaggagagctctataaagatctgatcctctatagttctgtaagcgttctgggactcttctcacctaccatgaagacggctaaagaggattttagcgaagctgggaattatcttaagggatatgtgatcacggggatttatagcgaagaagatgtcctgctcctatcaactaaatatgcagcctcccttcctgccctattattggcccggcacaccgaaggtaagatcgagagcatcccattggcttcaacccatgcccaagatatcgtccagataatcaccgacgccctgttagaaatgtttccggaaatcacagtggagaatctgccctcttacttccgactccagaaacctttgctcatccttttctcagacggtacggtcaatccccagtacaaaaaggccatcctgacactggtgaagcagaagtatctggacagcttcactccatgttggctgaatcttaagaatacccccgtgggccgcggcatcctcagagcctactttgaccctcttcccccactccctctcttggtactggtcaaccttcactccggtggtcaagtgtttgcgtttccctctgatcaggcaatcattgaggagaaccttgtgctctggctgaaaaaactggaagcaggtttggagaaccacattacaattctgccagcacaggagtggaagcccccattgcctgcctacgacttcctgtccatgatagacgccgcaacttcccagcgaggtacccgaaaagtacccaagtgtatgaaggagactgatgttcaagaaaatgataaggaacagcacgaagacaaatccgccgtccgcaaggaaccaattgagaccctgcgcattaagcattggaacagaagtaactggttcaaggaggctgagaagtcattccggcgggataaagagcttggctgcagtaaagttaactag

SEQ ID NO: 205769 - DNA, 2478 bp, Artificial Sequence
  derived and/or modified sequence
atgttttcagggttcaacgtgttcagggtcggcatcagcttcgtcatcatgtgcatcttttatatgcccacagtcaacagtctccccgaactcagccctcagaaatacttcagtaccttacagcctggaaaagcttctctggcatacttttgtcaagctgattctcctcgcacctccgtctttctggaagaactgaatgaagcagtccgccccctccaagattatggtatttcggtagcgaaagtaaactgcgttaaagaggaaatatccagatattgtggtaaggagaaggacttaatgaaagcttacctcttcaaggggaacattcttctgcgtgagttccctaccgatactctgttcgacgtaaacgccatcgtagctcacgtccttttcgcgctgttatttagtgaagtgaagtacattaccaacctggaggacttacagaatatcgagaacgcgcttaaaggcaaggctaacatcattttttcctacgtacgggccatcggtatcccagaacatcgagctgtgatggaagccgcattcgtgtatggtacgacctatcagttcgtcctaaccaccgaaatcgcactgcttgaaagcatcggctcagaagatgttgagtatgcccacctctactttttccattgtaagctcgtgctcgatctgacgcagcagtgccggaggaccttaatggaacagcccctgacaacccttaatatccacttatttatcaaaaccatgaaggccccattactaactgaagtggccgaagatcctcagcaggtctcaacagtgcacttgcagctgggtttgcccttagtctttattgtctcacaacaggctacctatgaagcagaccgcaggacagccgaatgggtcgcctggcggctgttaggtaaagccggagtcctcttattgcttcgggatagcttagaagtgaacataccccaagacgctaacgtagtttttaagagagctgaggagggtgtgcccgtggagttcctggtgttacatgatgtcgatttgattatcagccacgtagaaaacaacatgcacatcgaagaaatacaggaagacgaagacaacgatatggaagggcctgacatcgacgtgcaagacgacgaggtggcagagaccgtgttcagagaccggaagcgcaaactgcctttggagctcacagtagagttgaccgaggagacttttaatgccacggtcatggcttccgattcaatagtattgttctacgccggatggcaggctgtctctatggcttttcttcaatcttatatcgatgtggccgtgaaactaaaaggaactagtaccatgttactgacccgcatcaactgcgccgactggagtgacgtttgtacaaaacagaatgtcactgaatttccaatcatcaaaatgtacaaaaaaggagagaatccagtgtcctacgccggaatgctagggacagaggatcttctaaagtttatacagctcaatcgtatttcatatccggtgaatatcacctccattcaagaagccgaagagtatttgtccggcgagctatataaggatctgatcctgtactccagtgtgtccgtcttgggcctcttctctcctacaatgaagactgcgaaagaagacttttccgaagcagggaattacctcaaaggctacgtgatcaccgggatttattcagaggaagatgttctgttgctgagcaccaagtatgccgcctctcttcccgccctactcctggccagacatacagagggaaaaatcgaatccatcccattggcatctacccacgctcaagatatcgtccaaataatcaccgacgcactccttgaaatgttcccagaaatcaccgttgagaacttaccatcctactttagactgcagaagcctcttttgatcctgtttagcgacggtaccgtcaatccccagtacaagaaagcgatcttgaccctagtcaaacagaagtacttggattcattcaccccttgctggctgaacttgaaaaacactccggtgggccggggcatcctgcgtgcttacttcgatcctttaccaccactgcccttactcgtattagtcaatctgcattcaggtggccaagtattcgcatttccgtccgatcaggccattatcgaggagaatctcgtactctggctcaaaaagcttgaggccggactagaaaatcatattactattctccctgctcaagagtggaagccccctttgccagcctatgactttctgtcaatgatcgacgctgcaacgtctcaaagaggtacaagaaaggtcccaaagtgtatgaaagaaaccgatgtccaggaaaatgacaaagaacagcacgaagataaatccgccgtgcgaaaggagcctatcgaaacacttcgcatcaaacattggaacagatctaattggttcaaggaagcagagaaatcctttagacgtgataaagagctggggtgtagcaaggtaaactag

SEQ ID NO: 205770 - DNA, 4564 bp, Artificial Sequence
  derived and/or modified sequence
cgagtcggtggcggctgcaggctgggagggagaagtgctacgcctttgcaggttggcgaagtggttccaggctacccggctagtctggcacggccccgtcttctgcctcctcctccgtcgcgtggcggcgggaactgttggccgcgcggcctcgggaacggcccaggtccccgcccgcaggtcccgggcagataacatagatcatcagtagaaaacttcttgaagttgttcaagaaaaatttgaaagtagcaaaatagaaaataaagaattaacagcagatacagaggacagcatggaagtgttgtcttaggaaacagaacacagcagtgaaaaaacagacaaaatccgctcagatacaactgcagctgataatgttttccggcttcaatgtctttagagttgggatctcttttgtcataatgtgcattttttacatgccaacagtaaactctttaccagaactgagtcctcagaaatattttagtacattgcaaccaggaaaagcctctttagcttatttttgtcaagctgattccccaagaacatctgtatttcttgaagaactgaatgaggctgttagacctctgcaggactatggaatttcagttgccaaggttaattgtgtcaaagaagaaatatcaagatactgtggaaaagaaaaggatttgatgaaagcatatttattcaagggcaacatattgctcagagaattccctactgacaccttgtttgatgtgaatgccattgtcgcccatgttctctttgctcttctttttagtgaagtgaaatatattaccaacctggaagaccttcagaacatagaaaatgctctgaaaggaaaagcaaatattatattctcatatgtaagagccattggaataccagagcacagagcagtcatggaagccgcttttgtgtatgggactacataccaatttgtcttaaccacagaaattgcccttttggaaagtattggctctgaggatgtggaatatgcacatctctacttttttcattgtaaactagtcttggacttgacccagcaatgtagaagaacactaatggaacagccattgactacactgaacattcacctgtttattaagacaatgaaagcacctctgttgactgaagttgctgaagatcctcaacaagtttcaactgtccatctccaactgggcttaccactggtttttattgttagccaacaggctacttatgaagctgatagaagaactgcagaatgggttgcttggcgtcttctgggaaaagcaggagttctactcttgttaagggactctttggaagtgaacattcctcaagatgctaatgtggtcttcaaaagagcagaagagggagttccagtggaatttttggtattacatgatgttgatttaataatatctcatgtggaaaataatatgcacattgaggaaatacaagaagatgaagacaatgacatggaaggtccagatatagatgttcaggatgatgaagtggcagaaactgttttcagagataggaagagaaaattacctttggaacttacagtggaactaacagaagaaacatttaatgcaacagtgatggcttctgacagcatagtactcttctatgctggttggcaagcagtatccatggcatttttgcaatcctatattgatgtggcagttaaactgaaaggcacatctactatgcttcttactagaataaactgtgcagattggtctgatgtatgtactaagcaaaatgttactgaatttcctatcataaagatgtacaagaaaggcgagaacccagtatcttatgctggaatgttaggaaccgaagatctcctaaaatttatccagctcaacaggatttcatatccagtgaatataacatcgatccaagaagcagaagaatatttaagtggggaattatataaagacctcatcttgtattctagtgtgtcagtattgggactatttagtccaaccatgaaaacagcaaaagaagattttagtgaagcaggaaactacctaaaaggatatgttatcactggaatttattctgaagaagatgttttgctactgtcaaccaaatatgctgcaagtcttccagccctgctgcttgccagacacacagaaggcaaaatagagagcatcccactagctagcacacatgcacaagacatagttcaaataataacagatgcactactggaaatgtttccggaaatcactgtggaaaatcttcccagttatttcagacttcagaaaccattattgattttgttcagtgatggcactgtaaatcctcagtataaaaaagcaatattgacactggtaaagcagaaatacttggattcatttactccatgctggttaaatctaaagaatactccagtggggagaggaatcttgagggcatattttgatcctctgcctccccttcctcttcttgttttggtgaatctgcattcaggtggccaagtatttgcatttccttcagaccaggctataattgaagaaaaccttgtattgtggctgaagaaattagaagcaggactagaaaatcatatcacaattttacctgctcaagaatggaaacctcctcttccagcttatgattttctaagtatgatagatgccgcaacatctcaacgtggcactaggaaagttcccaagtgtatgaaagaaacagatgtgcaggagaatgataaggaacaacatgaagataaatcggcagtcagaaaagaaccgattgaaactctgagaataaagcattggaatagaagtaattggtttaaagaagcagaaaaatcatttagacgtgataaagagttaggatgctcaaaagtgaactaattttatagggctgtggtttccaaaatttttttggcatgatagacttaatttatttccttaaagaataatattaaatcatttcaagtttgcagactagtgccatccaatagaattataatataagtcacatattttatttaaaattttctagtaactacattaaacaaagtaaaagtgagcagggcaaaataattttgatattacttttcacccagtagtatacccaaaatagcgaaatatagaaattattaatgagatattttacatccttttttgtaccaagtcttctaaatgcagtacatattttatacttactgcatttcttacttccgagtagccatatttcaagtgttccttgccacatgtggcctgtgactactgtattggacagttcagtactagacaaaaactagcataattaacttagttctagccatgatttctatttggattaaaattaaactctaatcacagttaactccacagtgcattcatgcagctgacagttatatttgttttattggagtcatgatattaaaatcagcgtttgtcaacctcaggggatatttagcaattgtcgggagacatttttgatgtcatgactagggcagttattgacatttagtgagtagaggccagggatcctgctaaataacctgcattggacagcgccccacaacaaagaattatcctgcccgaaatggtagtcgtgccaaggctgagtaaccttgtgttaaaagtaacctgtggcagactaggtttccagaatttcctggttctgctcacgtatcatgtttgaaaaaattttggctattaaagatatgtattagatggtcttatcctgattattacctggatacaacttgatcttttctaatattttcagaaagtgatgggataaccctagaagaggactcagaatgatatttatattttaagtgagtcttaaaacctcctcttatttctacaagttatatggctaaatttcagattgaacagggattcagcattctgccatctcctcatggaaagagaggctccctcatctgaagcgtctctgaaatctacccttgcaagcttcagacaaatcagttgatctccctgagccacacggcctcattctgtgagggagggaaagattagccaaagagttaattttcattccaaatcacttagctgttagactgatctgtttgtagcagttgtttgtctcatttttgctctgtgcattttttgagacatttgttgagaatattctatttggtgctctactgtatttttctttttaatatctacttgatatcttgttctttaaattttcttcacatatggtttgcctgatacaactgatttttataactgaaatttaaggaatctaacagctaaaactcagtaagtgcatatatttccttataacatagacccgttgctactctcagcaccctctcctcaattttttttcctgtagcatgtgatgcctgattaaactcattttcatttgcttttatttctaatatgggaacaatgagagtgaactctaaatataggttgtagtaataaaacatcattagcctaattattagaaaatgctaattaagtaccagcacatagaaacatgaaattgcttagtcattgtacctttgtcagcaattttgacagtcattaatgtttgtcataattttaaataaagtgtctgggtttcagaataccttca

SEQ ID NO: 205771 - DNA, 2478 bp, Artificial Sequence
  derived and/or modified sequence
atgttcagcggcttcaacgtgttcagagtgggcatcagcttcgtgatcatgtgcatcttctacatgcccaccgtgaacagcctgcccgagctgagcccccagaagtacttcagcaccctgcagcccggcaaggccagcctggcctacttctgccaggccgacagccccagaaccagcgtgttcctggaggagctgaacgaggccgtgagacccctgcaggactacggcatcagcgtggccaaggtgaactgcgtgaaggaggagatcagcagatactgcggcaaggagaaggacctgatgaaggcctacctgttcaagggcaacatcctgctgagagagttccccaccgacaccctgttcgacgtgaacgccatcgtggcccacgtgctgttcgccctgctgttcagcgaggtgaagtacatcaccaacctggaggacctgcagaacatcgagaacgccctgaagggcaaggccaacatcatcttcagctacgtgagagccatcggcatccccgagcacagagccgtgatggaggccgccttcgtgtacggcaccacctaccagttcgtgctgaccaccgagatcgccctgctggagagcatcggcagcgaggacgtggagtacgcccacctgtacttcttccactgcaagctggtgctggacctgacccagcagtgcagaagaaccctgatggagcagcccctgaccaccctgaacatccacctgttcatcaagaccatgaaggcccccctgctgaccgaggtggccgaggacccccagcaggtgagcaccgtgcacctgcagctgggcctgcccctggtgttcatcgtgagccagcaggccacctacgaggccgacagaagaaccgccgagtgggtggcctggagactgctgggcaaggccggcgtgctgctgctgctgagagacagcctggaggtgaacatcccccaggacgccaacgtggtgttcaagagagccgaggagggcgtgcccgtggagttcctggtgctgcacgacgtggacctgatcatcagccacgtggagaacaacatgcacatcgaggagatccaggaggacgaggacaacgacatggagggccccgacatcgacgtgcaggacgacgaggtggccgagaccgtgttcagagacagaaagagaaagctgcccctggagctgaccgtggagctgaccgaggagaccttcaacgccaccgtgatggccagcgacagcatcgtgctgttctacgccggctggcaggccgtgagcatggccttcctgcagagctacatcgacgtggccgtgaagctgaagggcaccagcaccatgctgctgaccagaatcaactgcgccgactggagcgacgtgtgcaccaagcagaacgtgaccgagttccccatcatcaagatgtacaagaagggcgagaaccccgtgagctacgccggcatgctgggcaccgaggacctgctgaagttcatccagctgaacagaatcagctaccccgtgaacatcaccagcatccaggaggccgaggagtacctgagcggcgagctgtacaaggacctgatcctgtacagcagcgtgagcgtgctgggcctgttcagccccaccatgaagaccgccaaggaggacttcagcgaggccggcaactacctgaagggctacgtgatcaccggcatctacagcgaggaggacgtgctgctgctgagcaccaagtacgccgccagcctgcccgccctgctgctggccagacacaccgagggcaagatcgagagcatccccctggccagcacccacgcccaggacatcgtgcagatcatcaccgacgccctgctggagatgttccccgagatcaccgtggagaacctgcccagctacttcagactgcagaagcccctgctgatcctgttcagcgacggcaccgtgaacccccagtacaagaaggccatcctgaccctggtgaagcagaagtacctggacagcttcaccccctgctggctgaacctgaagaacacccccgtgggcagaggcatcctgagagcctacttcgaccccctgccccccctgcccctgctggtgctggtgaacctgcacagcggcggccaggtgttcgccttccccagcgaccaggccatcatcgaggagaacctggtgctgtggctgaagaagctggaggccggcctggagaaccacatcaccatcctgcccgcccaggagtggaagccccccctgcccgcctacgacttcctgagcatgatcgacgccgccaccagccagagaggcaccagaaaggtgcccaagtgcatgaaggagaccgacgtgcaggagaacgacaaggagcagcacgaggacaagagcgccgtgagaaaggagcccatcgagaccctgagaatcaagcactggaacagaagcaactggttcaaggaggccgagaagagcttcagaagagacaaggagctgggctgcagcaaggtgaactag

SEQ ID NO: 205772 - DNA, 2478 bp, Artificial Sequence
  derived and/or modified sequence
atgtttagcggtttcaacgtctttagggtgggcataagctttgtcatcatgtgtatcttttacatgccaacagtcaattctttgccagagctgtcaccgcagaaatacttcagcaccctccagcccggcaaagcatcactcgcatacttctgccaggcagactcaccacgcactagcgtcttcctcgaggagcttaacgaagcagtgcggcctctgcaggactatggtatatctgttgctaaagtcaattgtgtcaaagaggagatatcccgatactgcggaaaagagaaagatctgatgaaagcttacctgttcaaaggtaatattctgttgcgggagttcccaacagacaccctgtttgacgttaatgctattgtcgcacacgtgttgtttgctctgctttttagcgaagtcaagtacatcacaaatctggaagacctgcagaacatagagaacgccctgaaggggaaggccaatatcatcttctcgtacgtgcgggctatcggcattcctgagcatcgcgcggtgatggaggctgctttcgtgtacggaaccacgtatcaatttgtactgaccaccgaaatcgcactcctggagagtatcggaagtgaggacgtggagtacgcgcacctgtacttttttcattgtaaactcgttctggacctgacccaacagtgtcgccgtacattaatggaacagcccttgaccactctcaacatccacctcttcataaaaacaatgaaagctccccttctcactgaagtcgccgaagacccccagcaggtaagcactgtgcacctccagttaggactgccgctcgttttcatcgtgagccagcaagctacgtacgaggctgaccgccgaacagccgaatgggttgcctggaggctgctcggtaaagctggggtgctgttactgttgcgcgattcccttgaggtgaatatcccacaggatgcaaacgttgtctttaaacgggcagaggaaggcgttccagtagaatttttagtcctccacgacgtggatttaatcatctcccatgttgaaaacaatatgcacatcgaggaaatccaggaggatgaggataacgatatggaaggacctgacatagacgtccaggatgatgaagtggcagagacggtctttagggacagaaagcgaaagcttcctctcgagcttacagtggagctcacagaggaaacttttaacgccaccgtgatggcctctgatagcattgtgcttttctacgccggttggcaggctgtaagtatggcgtttctgcagtcatacatcgacgtggctgtgaaactgaaaggcacatcaaccatgttactgactcgtatcaactgtgcagactggtctgacgtgtgcacaaaacagaatgtgacggaattccctataattaagatgtacaagaagggggaaaatcctgtctcatacgcaggtatgcttggcacagaggacctgcttaagtttatccagttaaatcggatttcatacccagtgaacataacatctatccaggaggctgaggagtacctcagtggagagctgtacaaggatcttatcttgtattcttcagtgtcggtgctcggactcttctctcctaccatgaagactgcaaaagaggatttttccgaggccgggaactacctgaaaggttatgtcatcaccggcatttacagtgaagaggacgtgctgttactgtctacaaagtacgctgctagcctgccagccttgctactcgcgagacacaccgagggcaaaatcgagtcgattcccttagcttccacgcacgcccaggatatcgtgcagataatcacagatgctctgttggagatgtttcccgagatcaccgtggaaaatctgcccagttacttccgtttgcagaagccgcttctgattctgttttcggatggtacggtgaatcctcagtataagaaggctatcctcactctcgtaaagcagaagtacctagatagcttcaccccgtgctggttgaacttgaaaaacacacccgtggggcgcggaatcctgcgcgcctacttcgatcccctaccccccctgcctctgctcgtcctggttaacctgcactctggagggcaggtttttgcctttccctccgaccaggccatcatcgaggaaaatctcgtactgtggctaaaaaagcttgaggccggcctggagaaccacatcacaatcctcccagcccaggaatggaagccgcctcttccggcgtacgatttcctttctatgatcgatgccgctaccagccaacgcggcacccgtaaagtaccaaaatgtatgaaagagactgacgtgcaggagaatgacaaagagcaacatgaggacaaatctgccgtacggaaggagcctatcgagacactcagaataaagcattggaaccgtagcaactggttcaaggaggctgagaagtcattcaggcgtgacaaggagctagggtgttccaaggtgaactag

SEQ ID NO: 205773 - DNA, 2478 bp, Artificial Sequence
  derived and/or modified sequence
atgttttctggcttcaacgtgttccgggtgggcatcagctttgtgatcatgtgcatcttctacatgcccaccgtgaacagcctgcctgagctgagcccccagaagtacttcagcaccctgcagcccgggaaggccagcctggcctacttctgccaggccgacagccccaggacctctgtgttcctggaggagctgaatgaggccgtgcggcccctgcaggactatggcatctctgtggccaaggtgaactgtgtgaaggaggagatcagccgctactgcggcaaggagaaggacctgatgaaggcctacctgttcaagggcaacatcctgctgcgggagttccccacagacaccctgtttgatgtgaatgccatcgtggcccacgtgctgtttgccctgctcttcagcgaggtgaagtacatcaccaacctggaggacctgcagaacattgaaaatgccctgaagggcaaggccaacatcatcttctcctatgtgcgggccatcggcatccctgagcacagagctgtgatggaggccgcctttgtgtatggcaccacctaccagtttgtgctgaccacagaaattgccctgctggagagcatcggctctgaagatgtggagtatgcccacctgtacttcttccactgcaagctggtgctggacctgacccagcagtgcaggaggaccctgatggagcagcccctgaccaccctgaacatccacctgttcatcaagaccatgaaggcccccctgctgacagaggtggccgaggacccccagcaggtgtccacagtgcacctgcagctgggcctgcccctggtgttcatcgtgtcccagcaggccacctatgaagctgacagaagaacagctgagtgggtggcctggaggctgctgggcaaggccggcgtgctgctgctgctgcgggacagcctggaggtgaacatcccccaggatgccaacgtggtgttcaagagagctgaggagggcgtgcctgtggagttcctggtgctgcatgatgtggacctgatcatcagccacgtggagaacaacatgcacatcgaggagatccaggaggatgaggacaatgacatggagggccctgacattgatgtgcaggatgatgaggtggccgagaccgtcttccgggacaggaagaggaagctgcccctggagctgactgtggagctgacagaggagaccttcaatgccaccgtgatggccagtgacagcatcgtgctcttctacgccggctggcaggccgtgtccatggccttcctgcagagctacattgatgtggccgtgaagctgaagggcaccagcaccatgctgctgacccgcatcaactgtgccgactggagcgatgtgtgcaccaagcagaatgtgacagagttccccatcatcaagatgtacaagaagggggagaaccctgtgtcctatgccggcatgctgggcacagaggacctgctgaagttcatccagctgaaccgcatctcctaccctgtgaacatcaccagcatccaggaggccgaggagtacctgagcggggagctgtacaaggacctgatcctgtacagctctgtgtctgtgctgggcctcttcagccccaccatgaagacagccaaggaggacttcagcgaggccggcaactacctgaagggctacgtgatcaccggcatctacagtgaagaagatgtgctgctgctgagcaccaagtatgctgccagcctgcctgccctgctgctggcccggcacacagagggcaagattgagagcatccccctggccagcacccacgcccaggacatcgtgcagatcatcacagatgccctgctggagatgtttcctgagatcaccgtggagaacctgcccagctacttccggctgcagaagcccctgctgatcctcttcagtgatggcaccgtgaacccccagtacaagaaggccatcctgaccctggtgaagcagaagtacctggacagcttcaccccctgctggctgaacctgaagaacacccctgtgggccggggcatcctgcgggcctactttgaccccctgccccccctgcccctgctggtgctggtgaacctgcacagcggcggccaggtgtttgccttccccagcgaccaggccatcatcgaggagaacctggtgctgtggctgaagaagctggaggccggcctggagaaccacatcaccatcctgcctgcccaggagtggaagccacccctgcctgcctatgacttcctgtccatgattgatgctgccaccagccagaggggcaccaggaaggtgcccaagtgcatgaaggagacagatgtgcaggagaatgacaaggagcagcacgaggacaagtctgctgtgaggaaggagcccatcgagaccctgcgcatcaagcactggaacagaagcaactggttcaaggaggccgagaagagcttccggcgggacaaggagctgggctgcagcaaggtgaactag

SEQ ID NO: 205774 - DNA, 2478 bp, Artificial Sequence
  derived and/or modified sequence
atgttcagcggcttcaacgtgttccgggtgggcatcagcttcgtgatcatgtgcatattttatatgcccaccgttaattctcttccagagctgagcccccagaagtactttagcactctccagccgggaaaggccagtctggcttacttttgccaggccgactcaccccgcacatcagtcttcctggaagagctaaatgaagccgtccgacctctgcaggattacggtattagcgtggctaaggttaattgtgtgaaggaggaaatttctagatactgcggcaaagagaaagatttgatgaaggcttacttattcaaagggaatattctgctccgtgaatttcctacagacacactttttgatgtcaacgccattgtcgcgcatgtcctgttcgcgctcctcttttcagaagtgaagtacataaccaacttggaggacctacagaacattgagaatgcactgaagggcaaggccaacattatattctcctatgttcgtgctatcggcattccggagcacagggccgtcatggaggccgccttcgtgtacggaaccacctaccaattcgtcctgactacggaaatagccctattggaatccattggatcagaagatgtggagtacgcgcacctttacttcttccactgtaaactggttctggacctcacccaacagtgtaggagaacattgatggagcaacctctcaccaccttaaacattcatctcttcattaagacaatgaaagcccccctgctgacggaggtagcagaggatccacaacaagtgtccaccgttcacttgcagctgggtcttcctctcgtgttcattgtttcacagcaagcaacctatgaggctgatagacgcaccgccgaatgggtcgcttggagattgctgggtaaggcgggagtccttctcctgcttcgagactcactggaggtgaacatcccacaagacgccaatgtcgtctttaaacgcgctgaggagggggtgccagtagagtttctggttctgcacgacgtggacctgataatatctcacgtggaaaacaatatgcatatagaggaaatccaggaggacgaggacaatgacatggagggaccggacatcgacgtgcaagacgacgaagtggcggaaacggtgtttcgagatcggaaacgaaagctccccctcgagcttactgtcgaactgacagaggagacctttaacgccacagtgatggcctccgacagcatcgtgcttttctacgctggatggcaggccgtgtctatggcattccttcagtcgtatatagacgtcgccgttaagttgaagggtacatccactatgttattaactaggattaattgcgcagattggtcagacgtttgtactaaacagaacgtgactgaatttccaataattaaaatgtataaaaaaggagagaaccctgtgagctacgcaggaatgttgggtacagaagacctgctaaagtttatccagctgaacaggatttcttacccagtcaacataactagcatccaagaggccgaggaatatctctctggggaactctacaaggacctgatcttatacagcagcgtgtccgtcttaggcctctttagcccaacaatgaaaaccgccaaggaagacttttcagaagccggcaattaccttaaggggtatgtgattaccggaatttattctgaggaagatgtgctgctcctgtccacaaagtatgcagcctccctgccagccttactgctagccagacataccgagggaaagatcgagagtatcccactggcgagtacacatgcacaggatattgtacagatcatcaccgacgctcttctggagatgttccccgagattacggtggagaacttgccctcctattttaggcttcagaagcctctgctcattcttttctccgatggcacagtaaatccccaatacaagaaggccattttaaccttggtgaaacagaagtatctggactcattcaccccttgctggctgaatctcaagaacacccctgtgggacgtgggatcctcagggcatattttgacccccttccccccctgcccttacttgtgttagtcaatttgcactcgggaggtcaggtgtttgcattcccctccgatcaggcgattatagaagagaatcttgtgctttggcttaaaaaactggaagcaggcctggaaaatcatatcaccattctaccagctcaggaatggaagccaccactccccgcatacgacttcttgtctatgatcgatgcagctacgtcccagagaggcactcgtaaggttcccaaatgcatgaaagagactgacgtccaggagaacgataaggaacaacatgaagacaaaagtgccgtgaggaaagagcccattgagactctgcgaatcaaacattggaatcgcagtaactggttcaaggaggcagagaagtcttttaggcgggataaagagttggggtgctctaaagtaaactag

SEQ ID NO: 205775 - RNA, 2478 nt, Artificial Sequence
  derived and/or modified sequence
auguuuagcggauuuaacgucuuccgagugggaaucaguuucgugauaaugugcaucuuuuacaugccgacgguaaauagccucccugagcugucaccacagaaguauuuuuccaccuugcagccagguaaggccagucucgcauauuucugccaggcagauucgcccaggacgucaguauuccuggaagaacugaaugaagcgguuagaccucuccaggacuaugggauauccguggcuaaggugaacugcguuaaggaagagaucagcagauacugcgggaaagagaaggaucugaugaaagccuaccucuucaaggguaauauucugcuccgcgaguuccccacugacacucuguucgacgucaacgcaaucgucgcucaugugcuauucgcccugcuuuucucugagguaaaguacaucaccaauuuggaagaccuucagaacauagaaaaugcccucaaaggcaaagcaaacauaaucuuuaguuaugugcgggcuaucgggaucccugagcacagagccguaauggaagccgccuucguauacggcaccaccuaccaauucguacugacaacagaaaucgcccuccuggagucuauaggauccgaagacgucgaguaugcccaccuguauuuuuuccauugcaaauuggugcuggaucugacacagcagugucggcgcacccugauggagcaaccucucacuacauugaauauccaccuguucaucaaaaccaugaaagccccacuccugacugaggucgcagaggacccucaacaagucucaacuguacaccuccagcuuggccugccccugguguucauugucucccaacaagcgacauacgaggccgacagacguacggccgaauggguagcguggagacuccuggguaaagccggcguacugcuguuacuaagagacagccuugaagucaacaucccucaggaugcaaaugugguguuuaagcgagcugaggaaggagugccuguggaauuucugguccugcaugacguggaucucauuauuagucacguugaaaacaauaugcacaucgaggaaauccaagaagacgaggacaaugauauggaagggcccgacaucgacguccaggaugacgaaguggccgagacuguguuccgugaccguaagcgcaaacugccucucgaacugacaguggagcugaccgaagagaccuuuaaugcaacagucauggcauccgauucaaucguguuauuuuaugccgguuggcaggccgugucuauggcauuucugcagucguacauugauguggccgugaaauugaaaggaacauccacuaugcugcucacgaggauuaauugugcagauuggucagacgucuguacuaaacaaaacguaacagaguuccccaucaucaagauguacaagaagggggagaacccaguauccuacgccgggaugcuuggcacggaagaucugcucaaguuuauccagcucaauagaaucagcuacccagugaauaucacuucgauucaggaagcagaggaguaccuuucaggagagcucuauaaagaucugauccucuauaguucuguaagcguucugggacucuucucaccuaccaugaagacggcuaaagaggauuuuagcgaagcugggaauuaucuuaagggauaugugaucacggggauuuauagcgaagaagauguccugcuccuaucaacuaaauaugcagccucccuuccugcccuauuauuggcccggcacaccgaagguaagaucgagagcaucccauuggcuucaacccaugcccaagauaucguccagauaaucaccgacgcccuguuagaaauguuuccggaaaucacaguggagaaucugcccucuuacuuccgacuccagaaaccuuugcucauccuuuucucagacgguacggucaauccccaguacaaaaaggccauccugacacuggugaagcagaaguaucuggacagcuucacuccauguuggcugaaucuuaagaauacccccgugggccgcggcauccucagagccuacuuugacccucuucccccacucccucucuugguacuggucaaccuucacuccgguggucaaguguuugcguuucccucugaucaggcaaucauugaggagaaccuugugcucuggcugaaaaaacuggaagcagguuuggagaaccacauuacaauucugccagcacaggaguggaagcccccauugccugccuacgacuuccuguccaugauagacgccgcaacuucccagcgagguacccgaaaaguacccaaguguaugaaggagacugauguucaagaaaaugauaaggaacagcacgaagacaaauccgccguccgcaaggaaccaauugagacccugcgcauuaagcauuggaacagaaguaacugguucaaggaggcugagaagucauuccggcgggauaaagagcuuggcugcaguaaaguuaacuag

SEQ ID NO: 205776 - RNA, 2478 nt, Artificial Sequence
  derived and/or modified sequence
auguuuucaggguucaacguguucagggucggcaucagcuucgucaucaugugcaucuuuuauaugcccacagucaacagucuccccgaacucagcccucagaaauacuucaguaccuuacagccuggaaaagcuucucuggcauacuuuugucaagcugauucuccucgcaccuccgucuuucuggaagaacugaaugaagcaguccgcccccuccaagauuaugguauuucgguagcgaaaguaaacugcguuaaagaggaaauauccagauauugugguaaggagaaggacuuaaugaaagcuuaccucuucaaggggaacauucuucugcgugaguucccuaccgauacucuguucgacguaaacgccaucguagcucacguccuuuucgcgcuguuauuuagugaagugaaguacauuaccaaccuggaggacuuacagaauaucgagaacgcgcuuaaaggcaaggcuaacaucauuuuuuccuacguacgggccaucgguaucccagaacaucgagcugugauggaagccgcauucguguaugguacgaccuaucaguucguccuaaccaccgaaaucgcacugcuugaaagcaucggcucagaagauguugaguaugcccaccucuacuuuuuccauuguaagcucgugcucgaucugacgcagcagugccggaggaccuuaauggaacagccccugacaacccuuaauauccacuuauuuaucaaaaccaugaaggccccauuacuaacugaaguggccgaagauccucagcaggucucaacagugcacuugcagcuggguuugcccuuagucuuuauugucucacaacaggcuaccuaugaagcagaccgcaggacagccgaaugggucgccuggcggcuguuagguaaagccggaguccucuuauugcuucgggauagcuuagaagugaacauaccccaagacgcuaacguaguuuuuaagagagcugaggagggugugcccguggaguuccugguguuacaugaugucgauuugauuaucagccacguagaaaacaacaugcacaucgaagaaauacaggaagacgaagacaacgauauggaagggccugacaucgacgugcaagacgacgagguggcagagaccguguucagagaccggaagcgcaaacugccuuuggagcucacaguagaguugaccgaggagacuuuuaaugccacggucauggcuuccgauucaauaguauuguucuacgccggauggcaggcugucucuauggcuuuucuucaaucuuauaucgauguggccgugaaacuaaaaggaacuaguaccauguuacugacccgcaucaacugcgccgacuggagugacguuuguacaaaacagaaugucacugaauuuccaaucaucaaaauguacaaaaaaggagagaauccaguguccuacgccggaaugcuagggacagaggaucuucuaaaguuuauacagcucaaucguauuucauauccggugaauaucaccuccauucaagaagccgaagaguauuuguccggcgagcuauauaaggaucugauccuguacuccaguguguccgucuugggccucuucucuccuacaaugaagacugcgaaagaagacuuuuccgaagcagggaauuaccucaaaggcuacgugaucaccgggauuuauucagaggaagauguucuguugcugagcaccaaguaugccgccucucuucccgcccuacuccuggccagacauacagagggaaaaaucgaauccaucccauuggcaucuacccacgcucaagauaucguccaaauaaucaccgacgcacuccuugaaauguucccagaaaucaccguugagaacuuaccauccuacuuuagacugcagaagccucuuuugauccuguuuagcgacgguaccgucaauccccaguacaagaaagcgaucuugacccuagucaaacagaaguacuuggauucauucaccccuugcuggcugaacuugaaaaacacuccggugggccggggcauccugcgugcuuacuucgauccuuuaccaccacugcccuuacucguauuagucaaucugcauucagguggccaaguauucgcauuuccguccgaucaggccauuaucgaggagaaucucguacucuggcucaaaaagcuugaggccggacuagaaaaucauauuacuauucucccugcucaagaguggaagcccccuuugccagccuaugacuuucugucaaugaucgacgcugcaacgucucaaagagguacaagaaaggucccaaaguguaugaaagaaaccgauguccaggaaaaugacaaagaacagcacgaagauaaauccgccgugcgaaaggagccuaucgaaacacuucgcaucaaacauuggaacagaucuaauugguucaaggaagcagagaaauccuuuagacgugauaaagagcugggguguagcaagguaaacuag

SEQ ID NO: 205777 - protein, 122 aa, Artificial Sequence
  derived and/or modified sequence
MNPREEKVKIITEEFIENDEDADMGRQNKNSKVRRQPRKKQKPTPFSRACWQILPHLSAGVPLLGWEHPVQGKSFQATNCCPQGNGVRKIPPWQPPGACAGGAQDPPPEYDSPERPTERAGC

SEQ ID NO: 205778 - DNA, 666 bp, Artificial Sequence
  derived and/or modified sequence
atgagcgccctggtgttcttcccccccagcagccccctgcccatcgcattttttccccccagttcacctctgcccatcgcattctttcctccctcaagcccactcccaatcgtattcttcccatcactgttcagcatctttctgccccccccttacccgcacctgttgctcgcggccgcaagcagttgtagagcctttttaagcccccatcatttgctcttcctcttccctaccgtgctgtctccgcgcccacttctgtcccttagctctccccgagccttccctacaacagtcttcagtccggtcttttttccctcgcaccggtttttaccaatgtcttcccataggcttgctgccgcctctgtgagccggaatctgcttccaacattcttcagtccccccccgattgtgttcttccctcagcctctgattctgaggcacttgttgccgctgccaacattcagccagcagcggcttcctgctgctttcttctcccctcgtacactattcagtcccctacctctccccaccgtattcgcgccagatcgcttgctagctcatcccctgctcgccttgagcaactgtctctccccgcgctccgctccgcgagttaggcctccagtcagcctgcgtctggtgtgtctgtgtgctcagccagctccatag

SEQ ID NO: 205779 - DNA, 126 bp, Artificial Sequence
  derived and/or modified sequence
cggaagaacggccaacagcagcctcggggtagacccggatcagctagacctccggcacagcccccagaatgtggtgcagaccaacgcgtcaccctgcttacgggcgatccagtatccgctgcctag

SEQ ID NO: 205780 - DNA, 369 bp, Artificial Sequence
  derived and/or modified sequence
atgaatcctcgcgaagaaaaagtcaaaattattacagaggagtttattgagaatgatgaggacgccgatatggggagacagaataaaaattccaaagtccggcgacaaccacggaaaaaacagaagcccacaccattttcaagggcatgctggcagattttgccacacctaagtgctggcgtgcccctgctagggtgggagcatcctgtccagggcaaatcctttcaggccactaattgttgccctcagggtaacggagtaaggaagatccctccttggcagcctcctggtgcttgcgccggtggtgctcaggacccgcctcccgaatacgacagcccagagcgaccaacagagagggcaggttgctag

SEQ ID NO: 205781 - DNA, 369 bp, Artificial Sequence
  derived and/or modified sequence
atgaacccacgcgaagaaaaagtgaaaataattaccgaggaatttattgagaacgacgaagatgcagacatggggcgccagaataagaattcaaaagtgcgacgtcagccacggaagaaacaaaaaccaacacccttcagtagggcatgctggcagattctgcctcacctgtccgccggtgtgcccctcttagggtgggagcaccccgtacaggggaagtccttccaagcaaccaattgttgcccgcagggcaacggcgtcaggaagataccaccctggcagccccccggcgcctgcgcgggaggagctcaggacccgccgccagagtacgactcccctgagagacccactgagcgggcaggatgttag

SEQ ID NO: 205782 - DNA, 369 bp, Artificial Sequence
  derived and/or modified sequence
atgaatccccgagaggaaaaagtgaaaattatcacagaagaattcatcgaaaacgacgaggatgccgacatgggtcgccagaataagaattcgaaggtgagacgacagcctaggaaaaaacagaagcctacccctttctcccgtgcatgctggcagatcttgcctcatctttctgcaggagtaccattgcttggctgggagcaccctgtccaagggaagtctttccaagcgactaactgctgtccacagggtaacggggtcaggaaaatccctccctggcagccccctggtgcttgcgctggcggggcgcaagatcccccccctgagtatgatagtcccgagcggcccactgagcgagcaggatgctag

SEQ ID NO: 205783 - DNA, 369 bp, Artificial Sequence
  derived and/or modified sequence
atgaacccccgggaggagaaggtgaagatcatcacagaggagttcattgaaaatgatgaagatgctgacatgggccggcagaacaagaacagcaaggtgcggcggcagcccaggaagaagcagaagcccacccccttcagccgggcctgctggcagatcctgccccacctgtctgctggggtgcccctgctgggctgggagcaccctgtgcagggcaagagcttccaggccaccaactgctgcccccagggcaatggagtgaggaagatccccccctggcagcccccaggggcctgtgccggcggggcccaggaccccccaccagaatatgacagccctgagcggcccacagagcgggccggctgctag

SEQ ID NO: 205784 - DNA, 369 bp, Artificial Sequence
  derived and/or modified sequence
atgaacccccgggaggagaaggtgaagatcatcaccgaggagttcatcgaaaacgatgaagatgcagatatgggaagacaaaacaaaaatagcaaggtccgtcgccaaccacggaagaagcagaagcccacaccgttttctagagcctgttggcagatcttacctcatctgtcagcaggagtgcccctgctgggatgggaacacccggtgcagggaaagtccttccaagcaactaactgttgtcctcagggcaatggagtcaggaagattcccccctggcagcctccaggagcatgtgctggcggggcacaggaccccccccccgagtacgacagtccagagcggcccaccgaacgagccgggtgctag

SEQ ID NO: 205785 - DNA, 369 bp, Artificial Sequence
  derived and/or modified sequence
atgaacccccgggaggagaaggtgaagatcatcaccgaggagttcatcgaaaacgacgaggacgccgacatgggtcggcaaaacaaaaatagcaaagtgcggcggcaaccacgcaagaagcagaaacccactccattttctagggcatgctggcagatcctgccgcacctgagcgccggtgtaccgctactggggtgggaacacccagtgcagggcaaaagcttccaagccacgaattgttgtccccagggtaacggcgtccgcaaaatccccccctggcaaccgcctggggcttgcgccggcggagcccaagatcccccacctgagtacgactcccctgaacggcccaccgagagagccggctgctag

SEQ ID NO: 205786 - DNA, 369 bp, Artificial Sequence
  derived and/or modified sequence
atgaacccccgggaggagaaggtgaagatcatcaccgaggagttcattgagaatgatgaggatgccgacatgggtcgtcagaataaaaatagcaaggtgagaaggcagcctcgaaaaaaacagaagcccacccccttttctagagcatgttggcagattcttccacaccttagcgccggcgttccactgctcgggtgggagcatcctgttcaaggcaagtcctttcaggcaactaactgctgccctcagggaaacggtgtccgtaaaatccctccttggcaacccccgggggcttgtgcaggaggcgcccaggatccacccccagaatatgatagccccgagaggcccacagaacgagctggctgctag

SEQ ID NO: 205787 - DNA, 369 bp, Artificial Sequence
  derived and/or modified sequence
atgaaccccagggaggaaaaagtgaagataatcacagaagagttcatcgaaaacgacgaagatgccgacatgggccgacagaacaagaatagcaaggtacgaagacagcctaggaagaagcagaagccgacgcccttctccagagcctgctggcagatcttgccacatctctctgctggcgttcctcttctcggttgggaacatcccgtgcagggcaaaagctttcaagctacaaactgctgtccccagggcaatggagtgcgaaagattcccccatggcagcccccaggggcatgtgccggaggcgcacaggatccaccccctgagtacgacagccccgagaggcctaccgagcgggctggctgttag

SEQ ID NO: 205788 - DNA, 369 bp, Artificial Sequence
  derived and/or modified sequence
atgaatccaagggaagaaaaagtcaagattatcaccgaggagtttatagagaacgatgaggatgccgacatgggcagacagaataagaatagtaaggttcgtcggcaaccacgcaagaagcaaaagcccacccccttttctagggcttgctggcagatactgcctcatttaagcgcaggcgtcccgctgcttggttgggagcaccctgtgcagggtaagtcatttcaagcgactaattgctgccctcaaggtaacggcgtgcgaaaaatcccaccctggcagcccccaggcgcatgcgccggtggagcccaagatcctccgccagagtatgactctcctgaacgacctactgaacgggctggatgctag

SEQ ID NO: 205789 - DNA, 369 bp, Artificial Sequence
  derived and/or modified sequence
atgaacccaagggaggaaaaggtgaaaatcatcacagaagaattcatcgaaaatgatgaggatgctgacatgggcagacaaaacaagaactctaaggtgaggagacaaccgagaaaaaaacagaaacccacccccttcagccgggcatgctggcagattctgcctcaccttagtgccggagtgcctctgctgggctgggaacaccccgtgcagggaaagtcttttcaggcaacgaattgctgtccacaaggcaacggcgtgaggaaaatcccgccttggcaaccccctggagcctgtgccggtggagcccaagaccccccaccagagtatgacagccctgagaggcctacagaaagggccggatgctag

SEQ ID NO: 205790 - DNA, 1673 bp, Artificial Sequence
  derived and/or modified sequence
cttaggaacgggttgctaagctggtgtttttgctccaagacatggctgcagcttcccagggaggagcccaggggcatctccaacactcagcctttccctccggacccttttaaaagattcaacagcaccgtctctctccacttccatcctagaatgcagaatctgcaaagtgccttttgtaaagtttcttaaggtaaatcagtccctaaccggactttaggctgcaacattgtcagggacccatcccagccaaaatgaatcccagggaagaaaaagtaaaaataattacagaggagttcattgaaaatgatgaggatgcagacatgggaagacagaataagaactcaaaggttcgaagacagccaagaaagaaacagaagccaactcctttctcccgagcctgctggcagatcctcccccacctctccgcaggagttcccctcctaggctgggagcatcccgtgcagggtaaatcttttcaagccaccaactgctgtccccaaggaaatggtgtccgaaaaatcccaccttggcaacccccaggagcctgtgcaggaggagcccaagacccgcctcctgagtatgacagtccggagaggcccacggagagagctggttgttaaaaagagcctgggcaggccaggcacggtgactcacgtctgtaatcccagcactttggaaggccgaggcgggtaaatcacctgaggttgggagttcaagaccagcctgaccaacatggagaaaccccatctctactaaaaatacaaaaaaattagccaggcgtggtggcgcatgcctgtaatcccagctacttgggaggctgaggcatgagaattgcttgaacctgggaggtggaggttgcagtgagccgagatcggagcactgcactccagcctaggcaacagagcaagactccatctcagaaaacaaacaaacaaaaaagagcctggaacctcctcccctctctcttgctccctctctcaccatgcgacacacctgtttccccttccccttctgacataagtgaaagcttcctaaggcctcaccagaggcagatgctggcaccatgcttattgcacagtctgcagaacagtgagccaaaataaacctcttttctttataaattacccagtctcagatattcctttatagcaatgcaaaatggactaacaatacataagttagggagtgttaattagaatggaaattaaatatgcagaaactcaaaggaagatgaaattgttagggaagacatatgtgttaacctagtgaggcttgaatcagatgtttggaagaaatgagggaggtttctgaggctcctggtgaccttgccattgaggacacatatacttctccccctacacacgccttttcttcttccccagtacaatgaacattaggaattacctgctcattgtagggaaaatgaccacccttcaggcattgcttttcatgaaaagtggattagacaagaggagaagtggttacactttttaattgttacataattgttagactgttttccctatggcaaagttgggaaataagtaactgttggaaactagaggcctttggaagcaagtagactcttagattggaaaaatgtggttctaatctaaaagcaatgatacaatgagagctgttatgaattaataaaaacagaaccaaaattt

SEQ ID NO: 205791 - DNA, 630 bp, Artificial Sequence
  derived and/or modified sequence
ctagaatgcagaatctgcaaagtgccttttgtaaagtttcttaagctatattctaatggatatgggctgacattaacaaggacccatcccagccaaaatgaatcccagggaagaaaaagtaaaaataattacagaggagttcattgaaaatgatgaggatgcagacatgggaagacagaataagaactcaaaggttcgaagacagccaagaaagaaacagaagccaactcctttctcccgagcctgctggcagatcctcccccacctctccgcaggagttcccctcctaggctgggagcatcccgtgcagggtaaatcttttcaagccaccaactgctgtccccaaggaaatggtgtccgaaaaatcccaccttggcaacccccaggagcctgtgcaggaggagcccaagacccgcctcctgagtatgacagtccggagaggcccacggagagagctggttgttaaaaagagcctgggcaggccaggcacggtgactcacgtctgtaatcccagcactttggaaggccgaggcgggtaaatcacctgaggttgggagttcaagaccagcctgaccaacatggagaaaccccatctctactaaaaatacaaaaaaattagccaggcgtggt

SEQ ID NO: 205792 - DNA, 1659 bp, Artificial Sequence
  derived and/or modified sequence
tttttgctccaagacatggctgcagcttcccagggaggagcccaggggcatctccaacactcagcctttccctccggacccttttaaaagattcaacagcaccgtctctctccacttccatcctagaatgcagaatctgcaaagtgccttttgtaaagtttcttaagggacccatcccagccaaaatgaatcccagggaagaaaaagtaaaaataattacagaggagttcattgaaaatgatgaggatgcagacatgggaagacagaataagaactcaaaggttcgaagacagccaagaaagaaacagaagccaactcctttctcccgagcctgctggcagatcctcccccacctctccgcaggagttcccctcctaggctgggagcatcccgtgcagggtaaatcttttcaagccaccaactgctgtccccaaggaaatggtgtccgaaaaatcccaccttggcaacccccaggagcctgtgcaggaggagcccaagacccgcctcctgagtatgacagtccggagaggcccacggagagagctggttgttaaaaagagcctgggcaggccaggcacggtgactcacgtctgtaatcccagcactttggaaggccgaggcgggtaaatcacctgaggttgggagttcaagaccagcctgaccaacatggagaaaccccatctctactaaaaatacaaaaaaattagccaggcgtggtggcgcatgcctgtaatcccagctacttgggaggctgaggcatgagaattgcttgaacctgggaggtggaggttgcagtgagccgagatcggagcactgcactccagcctaggcaacagagcaagactccatctcagaaaacaaacaaacaaaaaagagcctggaacctcctcccctctctcttgctccctctctcaccatgcgacacacctgtttccccttccccttctgacataagtgaaagcttcctaaggcctcaccagaggcagatgctggcaccatgcttattgcacagtctgcagaacagtgagccaaaataaacctcttttctttataaattacccagtctcagatattcctttatagcaatgcaaaatggactaacaatacataagttagggagtgttaattagaatggaaattaaatatgcagaaactcaaaggaagatgaaattgttagggaagacatatgtgttaacctagtgaggcttgaatcagatgtttggaagaaatgagggaggtttctgaggctcctggtgaccttgccattgaggacacatatacttctccccctacacacgccttttcttcttccccagtacaatgaacattaggaattacctgctcattgtagggaaaatgaccacccttcaggcattgcttttcatgaaaagtggattagacaagaggagaagtggttacactttttaattgttacataattgttagactgttttccctatggcaaagttgggaaataagtaactgttggaaactagaggcctttggaagcaagtagactcttagattggaaaaatgtggttctaatctaaaagcaatgatacaatgagagctgttatgaattaataaaaacagaaccaaaatttatctcatatggctgtttctttttctaaatgctcaaaattatttattactaccaaa

SEQ ID NO: 205793 - DNA, 369 bp, Artificial Sequence
  derived and/or modified sequence
atgaaccccagagaggagaaggtgaagatcatcaccgaggagttcatcgagaacgacgaggacgccgacatgggcagacagaacaagaacagcaaggtgagaagacagcccagaaagaagcagaagcccacccccttcagcagagcctgctggcagatcctgccccacctgagcgccggcgtgcccctgctgggctgggagcaccccgtgcagggcaagagcttccaggccaccaactgctgcccccagggcaacggcgtgagaaagatccccccctggcagccccccggcgcctgcgccggcggcgcccaggaccccccccccgagtacgacagccccgagagacccaccgagagagccggctgctag

SEQ ID NO: 205794 - protein, 529 aa, Artificial Sequence
  derived and/or modified sequence
MSSTVSYWILNSTRNSIATLQGGRRLYSRYVSNRNKLKWRLFSRVPPTLNSSPCGGFTLCKAYRHTSTEEDDFHLQLSPEQINEVLRAGETTHKILDLESRVPNSVLRFESNQLAANSPVEDRRGVASCLQTNGLMFGIFDGHGGHACAQAVSERLFYYVAVSLMSHQTLEHMEGAMESMKPLLPILHWLKHPGDSIYKDVTSVHLDHLRVYWQELLDLHMEMGLSIEEALMYSFQRLDSDISLEIQAPLEDEVTRNLSLQVAFSGATACMAHVDGIHLHVANAGDCRAILGVQEDNGMWSCLPLTRDHNAWNQAELSRLKREHPESEDRTIIMEDRLLGVLIPCRAFGDVQLKWSKELQRSILERGFNTEALNIYQFTPPHYYTPPYLTAEPEVTYHRLRPQDKFLVLASDGLWDMLSNEDVVRLVVGHLAEADWHKTDLAQRPANLGLMQSLLLQRKASGLHEADQNAATRLIRHAIGNNEYGEMEAERLAAMLTLPEDLARMYRDDITVTVVYFNSESIGAYYKGG

SEQ ID NO: 205795 - DNA, 1590 bp, Artificial Sequence
  derived and/or modified sequence
atgagcagcaccgtgagctactggatcctgaacagcaccagaaacagcatcgccaccctgcagggcggcagaagactgtacagcagatacgtgagcaacagaaacaagctgaagtggagactgttcagcagagtgccccccaccctgaacagcagcccctgcggcggcttcaccctgtgcaaggcctacagacacaccagcaccgaggaggacgacttccacctgcagctgagccccgagcagatcaacgaggtgctgagagccggcgagaccacccacaagatcctggacctggagagcagagtgcccaacagcgtgctgagattcgagagcaaccagctggccgccaacagccccgtggaggacagaagaggcgtggccagctgcctgcagaccaacggcctgatgttcggcatcttcgacggccacggcggccacgcctgcgcccaggccgtgagcgagagactgttctactacgtggccgtgagcctgatgagccaccagaccctggagcacatggagggcgccatggagagcatgaagcccctgctgcccatcctgcactggctgaagcaccccggcgacagcatctacaaggacgtgaccagcgtgcacctggaccacctgagagtgtactggcaggagctgctggacctgcacatggagatgggcctgagcatcgaggaggccctgatgtacagcttccagagactggacagcgacatcagcctggagatccaggcccccctggaggacgaggtgaccagaaacctgagcctgcaggtggccttcagcggcgccaccgcctgcatggcccacgtggacggcatccacctgcacgtggccaacgccggcgactgcagagccatcctgggcgtgcaggaggacaacggcatgtggagctgcctgcccctgaccagagaccacaacgcctggaaccaggccgagctgagcagactgaagagagagcaccccgagagcgaggacagaaccatcatcatggaggacagactgctgggcgtgctgatcccctgcagagccttcggcgacgtgcagctgaagtggagcaaggagctgcagagaagcatcctggagagaggcttcaacaccgaggccctgaacatctaccagttcacccccccccactactacacccccccctacctgaccgccgagcccgaggtgacctaccacagactgagaccccaggacaagttcctggtgctggccagcgacggcctgtgggacatgctgagcaacgaggacgtggtgagactggtggtgggccacctggccgaggccgactggcacaagaccgacctggcccagagacccgccaacctgggcctgatgcagagcctgctgctgcagagaaaggccagcggcctgcacgaggccgaccagaacgccgccaccagactgatcagacacgccatcggcaacaacgagtacggcgagatggaggccgagagactggccgccatgctgaccctgcccgaggacctggccagaatgtacagagacgacatcaccgtgaccgtggtgtacttcaacagcgagagcatcggcgcctactacaagggcggctag

SEQ ID NO: 205796 - DNA, 1590 bp, Artificial Sequence
  derived and/or modified sequence
atgtcctctacagtgtcctattggattctcaactcaactaggaactccatcgccacccttcagggaggaaggcggttatattccaggtacgttagcaatagaaacaagctgaaatggcgcttattttcaagagtgcccccgacactgaattcaagtccgtgcgggggatttacgctgtgcaaggcctaccgtcataccagcaccgaagaagatgactttcacctgcagctgtctcctgagcagatcaatgaggttctgagggccggggagaccacccacaagatcctggatttagagtcacgggtacccaactccgtcctgcggtttgagagtaaccagctggccgccaattctccagtggaggaccgcaggggcgtggcaagctgcctgcagaccaacggcttaatgtttgggatttttgacgggcatggcgggcatgcatgcgcacaggccgtgagtgagcgccttttttactatgtggctgtttcactgatgagtcaccagactctggaacacatggagggggctatggaaagcatgaagccgttgcttcccattctccattggctgaagcacccgggggactccatctacaaagatgtgaccagcgtacaccttgaccacctgcgcgtttactggcaggaactgttggacctccatatggagatggggctgtcaattgaggaagcccttatgtatagctttcaacgactggattcagatatcagtctcgaaatccaggctcctttagaggacgaagtgactcgaaatctgtcactgcaagtcgctttctcaggggcaaccgcctgtatggcccacgttgatggtattcaccttcacgtcgcgaacgctggagactgcagagcaatactcggagttcaggaggataatggcatgtggtcctgtctgcccctaacccgcgatcacaacgcatggaaccaagcagaactgtctagacttaagcgggaacatcctgagtccgaagaccgcacgataattatggaggatcgactgctgggagtcctcatcccatgtcgagcttttggcgatgtgcagctcaagtggtcaaaggaacttcaaaggagcattctcgagagaggatttaatacggaggcacttaatatttaccagtttactcccccacattactataccccgccttacctgaccgcggagccagaagtcacttaccatcgcctgcggccccaggacaagtttctcgttctagcaagcgatgggctgtgggacatgttgtcaaacgaggacgtagttaggctcgtggtgggtcacttggcagaggccgattggcacaagacagatctggcacagagacctgcaaacctcgggctaatgcaatccttgctgctccagcggaaggcctccggtctgcacgaagcagaccagaatgccgcaacacggctgatacgccatgccattggaaacaatgagtatggtgaaatggaagccgagagactggccgccatgttgacactccccgaagatttggctagaatgtaccgtgatgacataacagtgacagttgtgtacttcaattcagagtcaatcggggcctactacaagggtggctag

SEQ ID NO: 205797 - DNA, 1590 bp, Artificial Sequence
  derived and/or modified sequence
atgagcagcacagtgtcctactggatcctgaacagcaccaggaacagcatcgccaccctgcagggcggccggcggctgtacagccgctacgtgagcaacagaaacaagctgaagtggaggctcttcagccgggtgccccccaccctgaacagcagcccctgtggcggcttcaccctgtgcaaggcctaccgccacaccagcacagaggaggatgacttccacctgcagctgagccctgagcagatcaatgaggtgctgcgggccggggagaccacccacaagatcctggacctggagagccgggtgcccaacagcgtgctgcgctttgagagcaaccagctggccgccaacagccctgtggaggacagaagaggagtggccagctgcctgcagaccaacggcctgatgtttggcatctttgatggccatggaggccacgcctgtgcccaggccgtgtctgagcggctcttctactacgtggccgtgtccctgatgagccaccagaccctggagcacatggagggcgccatggagagcatgaagcccctgctgcccatcctgcactggctgaagcaccctggggacagcatctacaaggatgtgacctctgtgcacctggaccacctgcgggtgtactggcaggagctgctggacctgcacatggagatgggcctgagcattgaggaggccctgatgtacagcttccagaggctggacagcgacatcagcctggagatccaggcccccctggaggatgaggtgaccaggaacctgagcctgcaggtggccttcagcggggccacagcctgcatggcccacgtggatggcatccacctgcacgtggccaatgctggggactgccgggccatcctgggcgtgcaggaggacaatggcatgtggagctgcctgcccctgacccgggaccacaatgcctggaaccaggccgagctgagccggctgaagcgggagcaccctgagagcgaggacaggaccatcatcatggaggaccggctgctgggcgtgctgatcccctgccgggcctttggagatgtgcagctgaagtggagcaaggagctgcagaggagcatcctggagcggggcttcaacacagaggccctgaacatctaccagttcaccccaccccactactacaccccaccctacctgacagctgagcctgaggtgacctaccaccggctgcggccccaggacaagttcctggtgctggccagtgatggcctgtgggacatgctgagcaatgaagatgtggtgcggctggtggtgggccacctggccgaggccgactggcacaagacagacctggcccagaggcctgccaacctgggcctgatgcagagcctgctgctgcagaggaaggccagcggcctgcacgaggccgaccagaatgctgccaccaggctcatcagacatgccatcggcaacaatgaatatggagagatggaggccgagcggctggccgccatgctgaccctgcctgaggacctggccaggatgtacagagatgacatcaccgtgacagtggtgtacttcaacagcgagagcatcggggcctactacaagggcggctag

SEQ ID NO: 205798 - DNA, 1590 bp, Artificial Sequence
  derived and/or modified sequence
atgagcagcaccgtgagctactggatcctgaacagcacccggaactcaattgccaccctccagggaggccgcaggctgtattctaggtacgtcagcaaccgaaataagcttaaatggcgtctcttctcccgggtcccacctacgttaaacagttcaccatgtggtggtttcaccctgtgtaaggcttaccgccatacaagcacggaggaggacgacttccacctgcagttgtcccccgagcaaatcaacgaggtgctgcgggccggcgagaccacgcacaagatacttgacctggagagtcgggtcccaaactctgtccttcgttttgagtccaaccagctggcagctaattctccagtggaggatcgcagaggcgtcgcgtcctgtctgcagaccaatggccttatgtttggcatttttgatggacacggtggtcacgcttgtgcccaggcagtgtctgagcgtctgttttactatgtggcggtgtccctgatgtcacatcagacactggagcacatggaaggcgctatggaatctatgaaaccacttctcccaatacttcattggctaaagcatcctggcgatagtatctacaaagacgttacttcagttcacctggatcaccttagagtgtattggcaggagctgctagatctccacatggagatgggactcagcattgaggaggctctcatgtactctttccagagactcgattccgacattagcctcgagatccaagcaccactggaggacgaggtcacccgcaatctgtcgctccaggttgctttttccggcgccacagcctgcatggcccacgtggatgggattcacctgcatgttgcaaacgcaggcgactgcagagccatcctgggtgtccaggaggacaatgggatgtggtcttgtctgcctctgacacgggaccataacgcttggaatcaggccgagctgagcaggctaaagagggaacatcccgaatctgaggatcgaaccattattatggaggacagactgctaggagtgctgattccatgcagggcctttggcgatgttcaactgaagtggtccaaggaactccagagatccatactcgagcggggattcaataccgaggcacttaatatttaccagtttacacctcctcactactacacccccccgtacctcaccgctgagccagaagtgacatatcatcggctgagaccccaggacaagtttcttgtgctggcatcagatggcttatgggatatgctcagtaatgaggacgtagtgcgcctggtggtgggccacttggctgaagcggactggcataagacagacctggcccagcggcccgccaacctggggctcatgcaatccttgttactccagcgcaaagcttccggactgcatgaggcagatcagaatgcggccactcgactcattcgccatgcaatcggtaacaatgagtatggggagatggaggctgaacgcctcgcagcgatgctgacacttcctgaggacttggccagaatgtatcgtgatgacatcactgtcaccgtggtttatttcaattcggaatccatcggggcatattacaaaggcggttag

SEQ ID NO: 205799 - DNA, 1590 bp, Artificial Sequence
  derived and/or modified sequence
atgtcctcaacagtgtcctattggatcctgaattcgaccagaaacagcattgctactctccaaggtggaaggcgactgtacagccggtatgttagcaaccgcaacaagctgaagtggcggttgttttctcgcgtccccccaacattgaattcttcgccttgtgggggtttcaccctctgtaaggcgtacaggcatacttcgactgaggaggatgacttccacctgcagttgtccccagagcaaatcaatgaggtcctccgggctggtgaaaccacccacaagatactggacctcgagagcagagttccaaatagcgttctccggttcgaatctaaccagctagccgctaattctccagttgaagatcggagaggggtggcttcctgtctgcaaacgaatggtttgatgttcgggatcttcgacggtcatggcggacacgcctgcgcccaggcggtatctgagaggctgttttactacgtagctgtgtcgttgatgtcacaccagaccttggagcatatggagggcgctatggaatccatgaaaccactccttcctatcttgcactggctgaaacaccccggagacagtatctacaaggacgtgacaagtgtgcacctggaccatcttagagtctactggcaggagcttctcgatctgcatatggaaatgggtctgagcatcgaagaagcgcttatgtattctttccagagactggacagtgatatttccctagagatccaagcaccgttggaggacgaagtaaccagaaatctcagcttacaggtggcatttagcggcgctacggcttgtatggcccatgtagatggcattcatctgcacgttgccaatgctggtgattgtcgcgctatcctgggcgtgcaagaagacaacgggatgtggtcatgccttcctctgacaagggaccacaatgcctggaaccaggccgaattgtcacggctgaaacgcgagcatcccgaatccgaggatcgcaccatcatcatggaggacaggctgctgggtgtgctgattccctgccgtgcctttggagacgtccagctgaaatggagcaaagaacttcagcgcagtatattagaacgtggttttaatacagaagcactcaatatttaccagttcacgccacctcactactatactcccccttatctcacggctgaacctgaggtgacataccataggttacgacctcaggataaattcctcgtgctggccagtgatggcctctgggatatgctaagcaatgaggacgtggtccgtctggtcgtgggccacctggccgaagcagactggcacaaaacggatttggcacagaggccagctaacctcggcctcatgcagtccctgctccttcagcggaaggctagtggccttcacgaagccgaccagaatgccgcaaccagactgattcgacacgccattggtaacaatgagtatggcgagatggaggccgaaagactggccgctatgctgactctgccagaagacctggcacgcatgtatcgggatgacataactgtcacagttgtgtatttcaacagcgagagtattggggcttattataagggaggctag

SEQ ID NO: 205800 - DNA, 3830 bp, Artificial Sequence
  derived and/or modified sequence
gactagggaccgcctgggtgaggtgaggacctggtggccgcagttgtggcactgtgcgcaggcgctgaactgaccggacggagcgggcggctgtggcctcgccagctggtttaaaaatatccttttttgctgaaggaacacatttgctggtatagtttcagaatgtcaagtactgtgtcctactggatcttaaattctacaaggaacagcattgccacattgcaagggggtagacgcttatactccaggtatgtctcaaataggaataaattaaaatggaggctcttttcccgggtgccacccaccctaaacagttccccatgtggtggctttactctgtgcaaagcctacagacacacatcaacagaggaagatgattttcacttgcaactcagccctgagcagataaatgaagtgcttcgagctggcgagacaacccacaagattcttgaccttgaaagcagagtcccaaattcagtgttgcggtttgagagcaaccagctggctgccaattccccagtggaggaccggcgaggtgtagcctcctgcctgcaaaccaatggactgatgtttggcatcttcgatggacatggtggtcatgcatgtgcccaagcagtgagcgagaggctcttctactatgtggcagtgtccctgatgtcccaccagaccctggagcacatggagggagctatggaaagcatgaaacccttgctgcccatcctgcattggctcaagcacccaggggacagtatctacaaggatgtcacatctgtgcatcttgaccacctccgtgtctattggcaggaactgcttgatttgcacatggaaatgggactaagcattgaagaagcattaatgtactccttccagagactggattctgacatctcgctggaaatccaggcccccctggaagatgaggtgacaaggaacctgtcactccaggttgctttctctggggcaacagcttgcatggcccatgttgatggaattcacttgcacgtggcaaatgctggtgactgccgagccatccttggtgtccaagaggacaatggcatgtggtcttgtctgccccttacacgtgaccacaatgcctggaaccaggccgagctgtcccggctaaagagggagcaccctgagtcagaggacaggacgatcatcatggaggacaggctactgggcgtcctcatcccctgcagggcctttggggatgttcagctgaagtggagtaaagagttgcagcgcagcattctggagaggggcttcaataccgaggccctcaacatttaccagttcacacccccacactactacactccaccctacctgactgctgagcctgaggtcacataccacaggctgaggccccaggataagttccttgtgctggcctcagatggcctgtgggacatgctgagcaatgaggacgtggtaaggctggtggtggggcacctggctgaggcagattggcacaagacagacctggcccagagacccgccaacttggggctcatgcagagcctgctgctgcagaggaaagccagcgggctccacgaggctgaccaaaatgcagccacgcggctgatcagacatgccatcgggaacaatgagtatggggagatggaggcagagcggctggcggcgatgctgacattgccagaggacttggcgaggatgtacagggatgatatcactgtcactgtggtgtattttaactcagaatcaatcggtgcatattacaaggggggttaagaatctcccatcctattgtcaaggttaacataaatgctcttctaaaatgtttcacttactcctaaactagctatccaaaccttactattaaaagcgcaggcagatttaatttgctaaatagactaacaggaggaaaaaaacaaacagcctagctttaaaaaacagtgaaatagcagtgatttcatgtccctgtatgttctgattaagtcttatatgcagagaggacagagcataaagtctatagaattggcttgggcttgtgtagccccagtcatttgataaagatgttgttaaactgtgtcagcctgagccttcaaagggtaaatttaatcatgattctgagaataaagaacttcaggagcttcttaggtcttgccacaaaaatctgcaaatttgataattctcctgaattcacaatcatggacttgtagactatgaagagatattttatttgtttgtcttttatttaaattactaaggtctaggtttacaaagcatactacaggacccttttctatgcaatatcctaacttttttttttgtgattatgcttgtgagaaattttgtaatactacattctagttctgttttcgtttattttaaaactgaatccttaaacttgcaaacacgcctactgtaagcatgcttggaatgacttgttttggttttcagctgataggatctatgcctctggaccagctgaacttactggtgcagctttttgtgccctctactgagtcccattccagaaactttgagccatgctaggaggtaactagtctatgccttaactcctgacctttcctgcattagtaaaatttcctcctgggctgagcctttgggggttgattcacagcatttaagctttctgattatacctctcaaacattcttctgtcaattccacacaatccttctacctctgctatgctgaacccctcattcaccctgcacctgccaactgcaaaatattgtctgaaagaatctttcacatgttcctgcttcctatggctgcaggaaaggagaaaatgtgattgcatgtggtagttgtggtgatagacgtttagacaggacaggttaatttagcggattgtggacttaagattcaacctctatctggagaggtgaaaacacaaaggcttaaggacaacagtttctaaccaagtttctctgaatcctttcctgagaggtggtgggcaggagggaggagtgagacttatcagatgggacgcttgccccaagactgtgggataaaccaccattgctagtcctcaggaattagaccatatttagtataggagttggggcaaaaataaaagtgtaatttgtaatggtttctgtgggctgtagactctttgtatttacttggaaattcagttatgtggatccattttggagatgaatttcatctcatgagttgctgtggcatttaaacaacaggaaatgtgtccctaaatggaaacaaatataatcccacaaaaccaacaattttatttgcctctactacgtcaggcagaattcttcaattaagttgaactacatttgttgatcccttttctcatcttacccctttatgccacctactgaaaagaaaaacaaatagctaggtttggtttcctgttttttgtctatgtcccagctgacattcagtcaaatgttgggatacttctaatttggtggtgtttctttgtacatttttcagtgcaactgtttagtcatgtgttttcatctaagaaattatcttttgaatatttaagccttgatccttttattctgaaaccattaatattccttcttggctgggtgcagtagtttacgcctgtaatcccagcactgtgggaggccgaggcggatggatcacctgaggtcgggaattcgagaccagcctgaccaacatggagaaactccatctctactaaaaatacaaaattagccaggtgtggtggtgcatgcctgtaatcccagctactcgggaggctgaggcaggaaaatcacttgaacccgggaggcggaggttgcggtgagccaagatcgcaccattgcactccagcctgggcaacaagagtgaaactctgtctc

SEQ ID NO: 205801 - protein, 520 aa, Artificial Sequence
  derived and/or modified sequence
MTTDDTEVPAMTLAPGHAALETQTLSAETSSRASTPAGPIPEAETRGAKRISPARETRSFTKTSPNFMVLIATSVETSAASGSPEGAGMTTVQTITGSDPREAIFDTLCTDDISEEAKTLTMDILTLAHTSTEAKGLSSESSASSDGPHPVITPSRASESSASSDGPHPVITPSRASESSASSDGPHPVITPSRASESSASSDGPHPVITPSWSPGSDVTLLAEALVTVTNIEVINCSITEIETTTSSIPGASDTDLIPTEGVKASSTSDPPALPDSTNTKPHITEVTASAETLSTAGTTESAAPDATIGTPLPTNSTIEREVTAPGATTLSGALATGNPLEETSALSVETPSYVKVSGAAPVSIEAGSAVGKTTSFAGSSASSYSPLEAALKNFTPSETLTTDIATKGPFPTSRDPLPSVPPTTTNSSRGTNSTLAKITTSAKTTMKPPTATPTTARTRPTTDVSAGENGGFLLLRLSVASPEDLTDPRVAERLMQQLHRELHAHAPHFQVSLLRVRRG

SEQ ID NO: 205802 - DNA, 1563 bp, Artificial Sequence
  derived and/or modified sequence
atgaccacagatgataccgaagtgcctgctatgaccctggctcctgggcacgccgcactggagacccaaacgctgtccgccgagacctctagtagagcaagtaccccggctgggcctatccctgaagccgagactaggggggctaagcgaatctcccctgccagagagactaggagtttcacaaagacctcaccgaactttatggtattaattgcaacctctgtggaaacaagcgccgcttcagggtccccagaaggagctggaatgaccacggtgcagacaatcaccgggtccgatccccgtgaggcgatctttgacaccctgtgcacggatgacatctccgaagaggccaagactctcaccatggacatcctgacgttggcccacacatctacagaggcaaaaggcctgtctagcgagtcttctgcctcctctgatggaccccatccagtaatcaccccctcccgtgcttcagaatccagcgctagctctgacggcccacatccagtgatcaccccatccagagcttctgaatcgtcagcttcttcagatggaccacaccctgtgatcactcctagccgggcttccgaatcatcggccagctctgatggtccacacccagtcataactccttcctggtctccagggtctgacgtgaccctgctggctgaagccctcgtgaccgtgacaaacatagaagtaatcaattgcagcataacagaaattgaaaccaccacgagtagcattccaggagcctcagataccgatctcattcccaccgaaggggttaaggctagttctacaagtgatccgcctgccttgcctgatagtaccaataccaagccccacattacggaggtgacagccagtgcagagactctcagtactgccggtaccaccgagagtgctgctcctgacgcgacaatcgggacgccactgcccactaatagtacgatcgagagagaggtcacagctccaggcgcaacaacactcagtggggcactcgccacaggaaatcctctcgaagaaactagtgccctgtccgtagagactccatcatacgtgaaggtgagtggtgctgctcctgtctccattgaggcaggctctgccgtaggaaagactaccagttttgcgggatccagcgcctcctcctacagccccttagaggctgcgttgaaaaacttcaccccaagtgagaccctgacaacggacatcgcaacaaaaggcccattcccgactagcagggaccccctcccttccgttccacctaccaccacaaactccagcaggggcacaaactcaacactggcgaaaattacgacgtccgccaagacgacaatgaaaccaccaacggccacaccgaccaccgcacgcacgcgacccaccacagatgtttccgctggggagaacggaggcttcctgctgctcagactgtctgtggccagtccagaagaccttaccgacccccgagtggcggagcggctgatgcagcagctgcaccgagagcttcatgcccatgctcctcatttccaggtgtctttgctgagggtccgcaggggatag

SEQ ID NO: 205803 - DNA, 1563 bp, Artificial Sequence
  derived and/or modified sequence
atgactacggatgatacagaggtacccgctatgacactcgccccaggtcatgcagcactcgaaacacaaacactcagtgctgaaacatctagtcgtgcaagtacccccgccgggcccataccagaggctgagaccagaggggccaagcgtatctctccagcccgcgagacccgctcttttaccaagactagccctaatttcatggtcctgatcgctaccagcgtcgagacatccgccgcctcagggagtcctgagggtgcaggcatgactacagtccagactatcacaggaagcgatccaagagaagcgatcttcgacaccctctgcactgatgacatcagcgaggaggcaaaaactctgacaatggacatcctgacgctcgcgcacaccagtactgaggctaaagggctatcatcagagtcttcagcttcatcagacggcccccaccctgttatcactcctagccgggcctccgaatccagcgccagttccgatggaccacacccagtcatcactccctctcgcgcgtcagaaagtagcgcttcctccgacggcccccatccagtcattaccccctccagagccagcgagagctcggctagctcagacgggccacaccctgtaatcactccaagttggagccctggttccgatgtcacactgctcgctgaagcactcgtcacggtgaccaacattgaggtgatcaactgtagcattaccgagatagaaaccactacttcttcaatacccggcgctagcgacaccgacttgatccctacagagggggttaaagcctctagcacatcagacccccccgccctcccagactcaaccaatactaagccccacatcaccgaggtgactgcatctgccgagactctcagcactgccgggactactgaatctgccgcacccgacgctacaatcggaacacccttgcccactaactccactatcgagagggaggtgaccgctcctggggctaccacactgagtggggccttagccacaggaaatcctttagaggaaacaagtgcactttctgttgagactccaagctacgtcaaagtctctggtgcagctccagtgtccattgaagcaggctccgcagtcggaaagaccacctccttcgcaggcagcagtgccagcagctactcacctcttgaggcggccctgaaaaactttacaccaagcgagacactcaccaccgacattgccaccaagggtcctttcccaacttccagagacccccttcctagcgtgcctcccactactaccaactcctctcggggaactaactccacactggcaaaaatcaccacaagtgcgaaaaccaccatgaagccaccaactgccacccccaccactgctcggactcggcccactacagacgtgtccgccggcgagaacggcggtttccttctactgcggctgtccgtcgcctcccctgaagacctgaccgacccgagggttgccgaaaggctgatgcagcagctgcatcgtgagcttcacgcccatgccccccatttccaggtttcgctgctgagggtgagaagaggatag

SEQ ID NO: 205804 - DNA, 1563 bp, Artificial Sequence
  derived and/or modified sequence
atgaccacagacgacactgaggtgcctgccatgaccctggctccaggccacgccgcactcgagactcagacactgagtgctgaaacttcctctagagcgagtactcccgcaggacctatcccagaagccgagacccggggagcaaaacgaatttcaccagcgagagagacccgaagcttcactaagacgagccccaatttcatggtattgatcgcaacctccgtagaaaccagtgccgcaagcggatcgcccgaaggagccggcatgaccactgtgcagactatcacaggcagcgaccctcgcgaggctatattcgacacactctgtaccgatgatatctccgaagaagctaaaaccttgacgatggatattttgacactcgcacatacatcaactgaagcaaagggacttagttccgaaagttctgcgagctccgatggcccgcaccccgtgatcacaccatcccgagccagtgagagctctgcttcctcagacgggccacatccagttataacaccatcgcgagccagcgaatcctctgcatcaagtgacggcccgcatcctgtaatcacaccctcccgagcatccgagtcttctgcatcctctgacggccctcaccccgtgataaccccatcttggtccccaggttccgacgttacactgctcgctgaagcccttgtgacagttaccaatatcgaagtgatcaattgttcaataaccgaaattgaaaccactacttctagtatcccaggagcatctgacaccgaccttattcctactgagggcgttaaggcttcctccacgtctgacccccccgcattgccagacagcaccaataccaaacctcacattacagaggtgacagcttccgcagagacactttccactgcaggcaccacggaatcagccgctccagacgctacaattggtacgcccctccccactaactcaaccatcgagcgcgaagttaccgcacccggggccacaacattgtctggcgctctcgcaactggcaatcccctggaagaaacgagcgcattgagcgttgagaccccgtcctatgtgaaggtgtcaggagcagccccagtgtccattgaagccgggtccgcagtaggtaaaaccacctcattcgctggatcctcagcctcgtcctattcccccctggaagcagcactcaagaactttacgccctctgaaactcttacaaccgacatcgctactaagggaccttttccaacaagcagagaccctctcccaagtgtcccccctacaactacaaactcttcaaggggcacaaatagtacactagctaaaataactactagtgctaagacaactatgaaaccaccaaccgccacccccacaacagctaggactagaccgacaactgacgtgagcgccggagaaaacggaggttttttgctcctgcggctgtctgtggcgtcgccagaagatcttaccgatccacgtgttgcagaacgattaatgcagcagctgcaccgggagttacacgcccacgccccccatttccaagtctcactgctaagagtgcgcagaggttag

SEQ ID NO: 205805 - DNA, 1563 bp, Artificial Sequence
  derived and/or modified sequence
atgaccaccgacgacaccgaggtgcccgccatgaccctggcccccggccacgccgccctggagacccagaccctgagcgccgagaccagcagcagagccagcacccccgccggccccatccccgaggccgagaccagaggcgccaagagaatcagccccgccagagagaccagaagcttcaccaagaccagccccaacttcatggtgctgatcgccaccagcgtggagaccagcgccgccagcggcagccccgagggcgccggcatgaccaccgtgcagaccatcaccggcagcgaccccagagaggccatcttcgacaccctgtgcaccgacgacatcagcgaggaggccaagaccctgaccatggacatcctgaccctggcccacaccagcaccgaggccaagggcctgagcagcgagagcagcgccagcagcgacggcccccaccccgtgatcacccccagcagagccagcgagagcagcgccagcagcgacggcccccaccccgtgatcacccccagcagagccagcgagagcagcgccagcagcgacggcccccaccccgtgatcacccccagcagagccagcgagagcagcgccagcagcgacggcccccaccccgtgatcacccccagctggagccccggcagcgacgtgaccctgctggccgaggccctggtgaccgtgaccaacatcgaggtgatcaactgcagcatcaccgagatcgagaccaccaccagcagcatccccggcgccagcgacaccgacctgatccccaccgagggcgtgaaggccagcagcaccagcgacccccccgccctgcccgacagcaccaacaccaagccccacatcaccgaggtgaccgccagcgccgagaccctgagcaccgccggcaccaccgagagcgccgcccccgacgccaccatcggcacccccctgcccaccaacagcaccatcgagagagaggtgaccgcccccggcgccaccaccctgagcggcgccctggccaccggcaaccccctggaggagaccagcgccctgagcgtggagacccccagctacgtgaaggtgagcggcgccgcccccgtgagcatcgaggccggcagcgccgtgggcaagaccaccagcttcgccggcagcagcgccagcagctacagccccctggaggccgccctgaagaacttcacccccagcgagaccctgaccaccgacatcgccaccaagggccccttccccaccagcagagaccccctgcccagcgtgccccccaccaccaccaacagcagcagaggcaccaacagcaccctggccaagatcaccaccagcgccaagaccaccatgaagccccccaccgccacccccaccaccgccagaaccagacccaccaccgacgtgagcgccggcgagaacggcggcttcctgctgctgagactgagcgtggccagccccgaggacctgaccgaccccagagtggccgagagactgatgcagcagctgcacagagagctgcacgcccacgccccccacttccaggtgagcctgctgagagtgagaagaggctag

SEQ ID NO: 205806 - DNA, 1563 bp, Artificial Sequence
  derived and/or modified sequence
atgaccacggatgataccgaggtgcccgcgatgacgcttgcacccggacatgcagctctggaaacacagactctctctgcggagacttcctcgagagccagtaccccagccggtccaatcccggaggctgagacccggggtgctaaaaggatctcgcccgcccgtgaaactcgatctttcaccaagacatctcctaacttcatggttctgattgctacatccgtggaaacttctgctgccagcggatcccccgagggagccggtatgacaacagtacagaccatcacggggtccgatccccgagaggcgatcttcgatacactctgcaccgacgacatatcagaagaggcaaaaaccctgacgatggatattctgacactggcacatacctccacagaggcaaagggcctttctagcgaatcttctgctagcagtgacggcccccacccagttattactccatcaagagcttccgagtctagtgcaagttccgacggaccccaccccgttattacgccttctcgcgccagcgagtccagtgcttcaagtgatggtccccatcccgttatcacgccttcgagggcctcagagtctagcgcttcatccgatggtccgcacccagttattacgccatcctggtccccgggatccgacgtcaccctcctggccgaggccctggtgacagtcacaaatattgaagtcatcaactgctcaattaccgagatcgaaaccactacaagcagcattccgggcgcttcagatacagatttgatccctaccgagggcgtcaaggcttcctcaacttcagacccgcccgcactccctgactctactaatactaaacctcacattactgaagtcaccgctagcgccgagacactctctactgcaggcacaaccgaatccgccgctccagacgcgacaatcggcacgcccctaccaactaattcaacaatagagcgcgaagtcactgcaccaggtgccactacattgagcggagccctggccaccggcaacccacttgaagagacctctgctctttctgttgaaactccctcctatgtcaaggtgtccggggccgcgccagtctcaattgaggcaggctccgcagtagggaaaaccacatcttttgccggctctagtgcttcctcgtactccccactcgaggcagcccttaaaaactttaccccctcagagacactcaccaccgacatcgccaccaaaggacctttccccacttctcgtgatcccctgccctctgttccccccactaccacaaactcctcgcgcggcacaaactctacccttgccaagataactacgtccgccaagaccactatgaagccccccactgccacacccaccaccgcccgaactcggcctactacggacgtttcggccggggaaaatgggggatttttattacttcggctctcagtagcctcccccgaggatttgacagaccctcgggtggctgagagactcatgcagcagttacatcgggaactgcacgctcacgcgccacattttcaggtcagcctgctgcgggttaggcgaggctag

SEQ ID NO: 205807 - DNA, 1563 bp, Artificial Sequence
  derived and/or modified sequence
atgaccacagatgacacagaggtgcctgccatgaccctggcccctggccacgccgccctggagacccagaccctgtctgctgagaccagcagccgggccagcaccccagctggccccatccctgaggccgagaccaggggggccaagaggatcagccctgcccgggagaccaggagcttcaccaagaccagccccaacttcatggtgctgattgccacctctgtggagaccagcgctgccagcggcagccctgagggcgccggcatgaccaccgtgcagaccatcaccggcagtgacccccgggaggccatctttgacaccctgtgcacagatgacatcagcgaggaggccaagaccctgaccatggacatcctgaccctggcccacaccagcacagaggccaagggcctgagcagcgagagcagcgccagcagtgatggcccccaccctgtgatcacccccagccgggccagcgagagcagcgccagcagtgatggcccccaccctgtgatcacccccagccgggccagcgagagcagcgccagcagtgatggcccccaccctgtgatcacccccagccgggccagcgagagcagcgccagcagtgatggcccccaccctgtgatcacccccagctggagccctggcagtgatgtgaccctgctggccgaggccctggtgacagtgaccaacatcgaggtgatcaactgcagcatcacagaaattgagaccaccaccagcagcatccctggggccagtgacacagacctgatccccacagagggcgtgaaggccagcagcaccagtgaccccccagccctgcctgacagcaccaacaccaagccccacatcacagaggtgacagccagcgctgagaccctgagcacagctggcaccacagagagcgctgccccagatgccaccatcggcacccccctgcccaccaacagcaccatcgagcgggaggtgacagcccctggggccaccaccctgagcggggccctggccactggaaaccccctggaggagaccagcgccctgtctgtggagacccccagctatgtgaaggtgtctggggccgcccctgtgtccattgaagctggcagcgctgtgggcaagaccaccagctttgctggcagcagcgccagcagctacagccccctggaggccgccctgaagaacttcacccccagcgagaccctgaccacagacatcgccaccaagggccccttccccaccagccgggaccccctgcccagcgtgccccccaccaccaccaacagcagccggggcaccaacagcaccctggccaagatcaccaccagcgccaagaccaccatgaagcccccaacagccacccccaccacagcccggacccggcccaccacagatgtgtctgctggagaaaatggaggcttcctgctgctgcggctgtctgtggccagccctgaggacctgacagacccccgggtggccgagcggctgatgcagcagctgcaccgggagctgcacgcccacgccccccacttccaggtgtccctgctgcgggtgcggcggggctag

SEQ ID NO: 205808 - DNA, 2247 bp, Artificial Sequence
  derived and/or modified sequence
accagatttgaagattgtaccaggagagccgcagtgttccagagctactgaggggctgggccgggatttgctgtattcgagaagacccccttggacccgagaggctgtgggcttggggagcatgaggaggtttcacagcagaaaggacaccccggggctcctggataagccagaaaatgtgccaggggaagtcgggctccaagggcaccactctgggcttccagctgtgtgggctggaccaagaaggctcagagaaatgatctcaggcttgaagtggggagaagaaactgtattatgaaggcagatgaacagttcctgcaaaagccccagcacccgcagagcagacactgcgatgacaacggacgacacagaagtgcccgctatgactctagcaccgggccacgccgctctggaaactcaaacgctgagcgctgagacctcttctagggcctcaaccccagccggccccattccagaagcagagaccaggggagccaagagaatttcccctgcaagagagaccaggagtttcacaaaaacatctcccaacttcatggtgctgatcgccacctccgtggagacatcagccgccagtggcagccccgagggagctggaatgaccacagttcagaccatcacaggcagtgatcccagggaagccatctttgacaccctttgcaccgatgacatctctgaagaggcaaagacactcacaatggacatattgacattggctcacacctccacagaagctaagggcctgtcctcagagagcagcgcctcttccgacggcccccatccagtcatcaccccgtcacgggcctcagagagcagcgcctcttccgacggcccccatccagtcatcaccccgtcacgggcctcagagagcagcgcctcttccgacggcccccatccagtcatcaccccgtcacgggcctcagagagcagcgcctcttccgacggcccccatccagtcatcaccccctcatggtccccgggatctgacgtcactctcctcgctgaagccctggtgactgtcacaaacatcgaggttattaattgcagcatcacagaaatagaaacaacgacttccagcatccctggggcctcagacacagatctcatccccacggaaggggtgaaggcctcgtccacctccgatccaccagctctgcctgactccactaacacaaaaccacacatcactgaggtcacagcctctgccgagaccctgtccacagccggcaccacagagtcagctgcacctgatgccacgattgggaccccactccccaccaacagcaccatagaaagagaagtgacagcacccggggccacgaccctcagtggagctctggccacagggaatcccctggaagaaacctcagccctctctgttgagacaccaagttacgtcaaagtctcaggagcagctccggtctccatagaggctgggtcagcagtgggcaaaacaacttcctttgctgggagctctgcttcctcctacagccccttggaagccgccctcaagaacttcaccccttcagagacactgaccacggacatcgcaaccaaggggcccttccccaccagcagggaccctcttccttctgtccctccgactacaaccaacagcagccgagggacgaacagcaccttagccaagatcacaacctcagcgaagaccacgatgaagcccccaacagccacgcccacgactgcccggacgaggccgaccacagacgtgagtgcaggtgaaaatggaggtttcctcctcctgcggctgagtgtggcttccccggaagacctcactgaccccagagtggcagaaaggctgatgcagcagctccaccgggaactccacgcccacgcgcctcacttccaggtctccttactgcgtgtcaggagaggctaacggacatcagctgcagccaggcatgtcccgtatgccaaaagagggtgctgcccctagcctgggcccccaccgacagactgcagctgcgttactgtgctgagaggtacccagaaggttcccatgaagggcagcatgtccaagcccctgaccccagatgtggcaacaggaccctcgctcacatccaccggagtgtatgtgtggggaggggcttcacctgttcccagaggtgtccttggactcaccttggcacatgttctgtgtttcagtaaagagagacctgatcacccatctgtgtgcttccatcctgcattaaaattcactcagtgtggccc

SEQ ID NO: 205809 - DNA, 1563 bp, Artificial Sequence
  derived and/or modified sequence
atgaccaccgacgacaccgaggtgcccgccatgaccctggcccccggtcatgcagccctcgagacacagacccttagtgccgagacgagcagtcgtgccagcacccctgccgggcctattcccgaggctgaaacacggggggcaaaaaggatatcccccgcgcgagagaccagatcattcactaaaacatcacccaactttatggtgttgatcgctacctcagtagagacctccgccgcctcaggctcccccgaaggggcaggaatgaccactgtacagactataacggggtcagacccacgggaggccatcttcgacacactgtgcaccgatgacattagcgaggaggcaaaaactctcactatggatatactgacccttgcgcatacgagcactgaagccaaaggactcagttcagagagtagcgcctcaagcgacggcccccaccctgtcataactcccagccgcgcatccgagagcagcgcctcttccgacggacctcacccagttataacaccttcacgagcgtctgagtcctctgcaagcagtgatgggccacatccagtgatcaccccatctcgtgcgagtgaaagtagcgcgagctccgatggacctcatcctgttataaccccaagctggtcccccggctcagacgtcacattgctcgccgaagccctggtcacagtaactaatatagaggtaatcaactgcagcatcacggaaatcgaaaccacaaccagctctatccccggcgcctccgatactgacttgattcccactgagggtgtcaaggccagcagtacatctgatccccctgccctcccagatagtacaaacacgaaaccccacattaccgaggtgacagccagtgctgaaacactatccaccgctggcactaccgagagcgctgcacccgacgcgacgattggtacccccttacctacaaactctacaattgagcgggaagttacagcaccaggggctacgaccttatcaggcgccctcgctacaggcaatccgttggaagagacaagcgcattgagcgtggagactccctcgtacgtgaaggtcagcggggcagccccggtatctatcgaagccgggtcagcggtcggtaagaccacctcctttgccggcagttccgccagctcttactcacccctcgaggccgctttaaagaatttcacgccctctgaaaccttgacgacggacatcgcaaccaaagggccctttcctaccagcagggatcccctaccttccgtgccccctacgactaccaacagctcccgcggaacaaactctacactagccaagattactaccagcgcaaagacaacgatgaaaccgccaactgctacccccactacagcacgaactaggcctaccaccgatgtgagcgccggggaaaacggaggctttttgctgcttaggctctccgttgcttcgcccgaagacctcaccgacccgcgggtggcagagcgtctcatgcagcagctccatcgagagcttcatgcccatgcaccacatttccaggtcagtctgctgagggttaggagaggctag

SEQ ID NO: 205810 - RNA, 1563 nt, Artificial Sequence
  derived and/or modified sequence
augacuacggaugauacagagguacccgcuaugacacucgccccaggucaugcagcacucgaaacacaaacacucagugcugaaacaucuagucgugcaaguacccccgccgggcccauaccagaggcugagaccagaggggccaagcguaucucuccagcccgcgagacccgcucuuuuaccaagacuagcccuaauuucaugguccugaucgcuaccagcgucgagacauccgccgccucagggaguccugagggugcaggcaugacuacaguccagacuaucacaggaagcgauccaagagaagcgaucuucgacacccucugcacugaugacaucagcgaggaggcaaaaacucugacaauggacauccugacgcucgcgcacaccaguacugaggcuaaagggcuaucaucagagucuucagcuucaucagacggcccccacccuguuaucacuccuagccgggccuccgaauccagcgccaguuccgauggaccacacccagucaucacucccucucgcgcgucagaaaguagcgcuuccuccgacggcccccauccagucauuacccccuccagagccagcgagagcucggcuagcucagacgggccacacccuguaaucacuccaaguuggagcccugguuccgaugucacacugcucgcugaagcacucgucacggugaccaacauugaggugaucaacuguagcauuaccgagauagaaaccacuacuucuucaauacccggcgcuagcgacaccgacuugaucccuacagaggggguuaaagccucuagcacaucagacccccccgcccucccagacucaaccaauacuaagccccacaucaccgaggugacugcaucugccgagacucucagcacugccgggacuacugaaucugccgcacccgacgcuacaaucggaacacccuugcccacuaacuccacuaucgagagggaggugaccgcuccuggggcuaccacacugaguggggccuuagccacaggaaauccuuuagaggaaacaagugcacuuucuguugagacuccaagcuacgucaaagucucuggugcagcuccaguguccauugaagcaggcuccgcagucggaaagaccaccuccuucgcaggcagcagugccagcagcuacucaccucuugaggcggcccugaaaaacuuuacaccaagcgagacacucaccaccgacauugccaccaaggguccuuucccaacuuccagagacccccuuccuagcgugccucccacuacuaccaacuccucucggggaacuaacuccacacuggcaaaaaucaccacaagugcgaaaaccaccaugaagccaccaacugccacccccaccacugcucggacucggcccacuacagacguguccgccggcgagaacggcgguuuccuucuacugcggcuguccgucgccuccccugaagaccugaccgacccgaggguugccgaaaggcugaugcagcagcugcaucgugagcuucacgcccaugccccccauuuccagguuucgcugcugagggugagaagaggauag

SEQ ID NO: 205811 - RNA, 1563 nt, Artificial Sequence
  derived and/or modified sequence
augaccacagacgacacugaggugccugccaugacccuggcuccaggccacgccgcacucgagacucagacacugagugcugaaacuuccucuagagcgaguacucccgcaggaccuaucccagaagccgagacccggggagcaaaacgaauuucaccagcgagagagacccgaagcuucacuaagacgagccccaauuucaugguauugaucgcaaccuccguagaaaccagugccgcaagcggaucgcccgaaggagccggcaugaccacugugcagacuaucacaggcagcgacccucgcgaggcuauauucgacacacucuguaccgaugauaucuccgaagaagcuaaaaccuugacgauggauauuuugacacucgcacauacaucaacugaagcaaagggacuuaguuccgaaaguucugcgagcuccgauggcccgcaccccgugaucacaccaucccgagccagugagagcucugcuuccucagacgggccacauccaguuauaacaccaucgcgagccagcgaauccucugcaucaagugacggcccgcauccuguaaucacacccucccgagcauccgagucuucugcauccucugacggcccucaccccgugauaaccccaucuugguccccagguuccgacguuacacugcucgcugaagcccuugugacaguuaccaauaucgaagugaucaauuguucaauaaccgaaauugaaaccacuacuucuaguaucccaggagcaucugacaccgaccuuauuccuacugagggcguuaaggcuuccuccacgucugacccccccgcauugccagacagcaccaauaccaaaccucacauuacagaggugacagcuuccgcagagacacuuuccacugcaggcaccacggaaucagccgcuccagacgcuacaauugguacgccccuccccacuaacucaaccaucgagcgcgaaguuaccgcacccggggccacaacauugucuggcgcucucgcaacuggcaauccccuggaagaaacgagcgcauugagcguugagaccccguccuaugugaaggugucaggagcagccccaguguccauugaagccggguccgcaguagguaaaaccaccucauucgcuggauccucagccucguccuauuccccccuggaagcagcacucaagaacuuuacgcccucugaaacucuuacaaccgacaucgcuacuaagggaccuuuuccaacaagcagagacccucucccaaguguccccccuacaacuacaaacucuucaaggggcacaaauaguacacuagcuaaaauaacuacuagugcuaagacaacuaugaaaccaccaaccgccacccccacaacagcuaggacuagaccgacaacugacgugagcgccggagaaaacggagguuuuuugcuccugcggcugucuguggcgucgccagaagaucuuaccgauccacguguugcagaacgauuaaugcagcagcugcaccgggaguuacacgcccacgccccccauuuccaagucucacugcuaagagugcgcagagguuag

SEQ ID NO: 205812 - protein, 440 aa, Artificial Sequence
  derived and/or modified sequence
MSSCRGQKVAGGLRVVSPFPLCQPAGEPSQGKMRSSCVLLTALVALAAYYVYIPLPGSVSDPWKLMLLDATFRGAQQVSNLIHYLGLSHHLLALNFIIVSFGKKSAWSSAQVKVTDTDFDGVEVRVFEGPPKPEEPLKRSVVYIHGGGWALASAKIRYYDELCTAMAEELNAVIVSIEYRLVPKVYFPEQIHDVVRATKYFLKPEVLQKYMVDPGRICISGDSAGGNLAAALGQQFTQDASLKNKLKLQALIYPVLQALDFNTPSYQQNVNTPILPRYVMVKYWVDYFKGNYDFVQAMIVNNHTSLDVEEAAAVRARLNWTSLLPASFTKNYKPVVQTTGNARIVQELPQLLDARSAPLIADQAVLQLLPKTYILTCEHDVLRDDGIMYAKRLESAGVEVTLDHFEDGFHGCMIFTSWPTNFSVGIRTRNSYIKWLDQNL

SEQ ID NO: 205813 - protein, 408 aa, Artificial Sequence
  derived and/or modified sequence
MRSSCVLLTALVALAAYYVYIPLPGSVSDPWKLMLLDATFRGAQQVSNLIHYLGLSHHLLALNFIIVSFGKKSAWSSAQVKVTDTDFDGVEVRVFEGPPKPEEPLKRSVVYIHGGGWALASAKIRYYDELCTAMAEELNAVIVSIEYRLVPKVYFPEQIHDVVRATKYFLKPEVLQKYMVDPGRICISGDSAGGNLAAALGQQFTQDASLKNKLKLQALIYPVLQALDFNTPSYQQNVNTPILPRYVMVKYWVDYFKGNYDFVQAMIVNNHTSLDVEEAAAVRARLNWTSLLPASFTKNYKPVVQTTGNARIVQELPQLLDARSAPLIADQAVLQLLPKTYILTCEHDVLRDDGIMYAKRLESAGVEVTLDHFEDGFHGCMIFTSWPTNFSVGIRTRNSYIKWLDQNL

SEQ ID NO: 205814 - DNA, 1323 bp, Artificial Sequence
  derived and/or modified sequence
atgtccagctgcagggggcagaaagtcgccggaggcctcagagtcgtaagcccattcccactgtgtcagcctgccggcgaaccgtcccaggggaaaatgcggtcctcttgcgtgctgctcactgctttggtcgcgctggccgcttattacgtgtacattccacttccagggtccgttagcgacccatggaagcttatgttgttagacgccacgttccggggtgcacagcaagtctcaaacctgatccactacctagggctgtcacaccatctcctggcgctgaatttcattatcgtcagcttcggaaagaagagtgcctggtcctcggctcaggtgaaagtcactgacacggacttcgatggagtggaggttcgagtgtttgagggacccccaaagcctgaggagccgctgaaaaggtccgtggtgtacattcatggaggggggtgggcactggcaagcgccaagattcgctactatgacgagttgtgcaccgccatggcagaggagcttaatgcagtcatagtgagcattgagtatagattggtccctaaggtgtactttcctgaacagatccacgacgtcgtacgcgcaaccaagtattttctgaagccagaagtgttgcagaaatatatggtagaccctggcaggatctgcataagcggagactctgccggtggaaatcttgccgccgctctcgggcaacaattcactcaggacgcatcactaaaaaacaaactgaaactccaggctttgatctatcctgttctccaggccctggattttaacacaccatcataccaacagaacgtaaatactccaattctcccaagatacgtgatggtcaaatactgggttgactattttaaaggcaactatgattttgttcaagccatgatcgtcaataaccatacatcactcgacgttgaagaggccgccgctgtgcgagcccggttgaattggacttccctgctaccagcttcattcaccaaaaactataagccagtggttcagaccacgggaaacgcccggatagtgcaggaattgccccagctcctggatgcaagatccgctcctctaatcgctgatcaggccgtgttgcagctactccctaagacatacatactgacctgcgagcacgacgtgctccgggatgatgggataatgtacgccaagcggctggagagcgcgggcgtcgaggtgacgctggatcatttcgaggatggcttccatggctgcatgattttcaccagctggcctacaaatttctccgttggaatccgcacacggaatagctacattaagtggttggaccagaacctgtag

SEQ ID NO: 205815 - DNA, 1227 bp, Artificial Sequence
  derived and/or modified sequence
atgcggagtagctgcgtactgctcaccgccctagtcgctttggctgcctattacgtgtacatacccctccccggctccgtcagtgacccctggaaattaatgctgctggacgcaacgttccggggcgcccagcaggtctccaacttaatccattatctaggactgtcacaccatctgctcgctctgaattttatcatcgtgtccttcgggaaaaagtccgcctggtcctccgcccaggtgaaggttaccgacaccgactttgatggggtggaggttagagttttcgagggtcctccaaagccagaagaacctctgaagcgctctgttgtctacattcatggaggcgggtgggccctcgccagcgccaagatcagatactacgacgaactttgcacagccatggctgaggagttgaatgctgttattgtgagcattgaataccgactggtgccgaaagtgtattttcctgagcaaattcacgacgtcgtgagggctaccaagtacttcctgaaaccggaggtgctccagaaatacatggttgacccaggacgcatctgtatcagcggagactctgccggagggaacttagctgccgcactcggacagcagtttacccaggatgcatctttgaagaacaagctgaaacttcaggccttgatctatccggtcttacaggccctggatttcaacacgccatcatatcagcagaatgtgaacacacctattctccctaggtacgtgatggtaaagtactgggtcgactatttcaagggaaattatgattttgtacaggccatgatcgtgaacaaccatacctccctggacgtcgaggaagccgccgccgtcagagctagacttaattggacttcactactgccagcaagcttcaccaagaactacaaacctgtcgtgcaaacaaccggcaatgcacgcattgttcaggagctcccccagctgctggacgccagatctgccccactgatcgccgatcaagcagtcttgcaactgctccctaaaacatatatcttaacttgtgagcatgacgtgctgcgggatgacggaattatgtatgccaaaaggttggaatccgcaggcgtggaggtgaccttagaccactttgaagatgggtttcacggttgcatgatttttacgagttggcctaccaatttttctgtgggcattcgcacccgaaattcttacattaaatggttggaccagaacctgtag

SEQ ID NO: 205816 - DNA, 1323 bp, Artificial Sequence
  derived and/or modified sequence
atgagcagctgccggggccagaaggtggccggcggcctgcgggtggtgagccccttccccctgtgccagcctgctggggagcccagccagggcaagatgaggagcagctgtgtgctgctgacagccctggtggccctggccgcctactacgtgtacatccccctgcccggctctgtgtctgacccctggaagctgatgctgctggatgccaccttccggggggcccagcaggtgagcaacctgatccactacctgggcctgagccaccacctgctggccctgaacttcatcatcgtgtcctttgggaagaagagcgcctggagcagcgcccaggtgaaggtgacagacacagactttgatggagtggaggtgcgggtgtttgagggcccccccaagccagaggagcccctgaagaggtctgtggtgtacatccatggaggcggctgggccctggccagcgccaagatccgctactatgatgagctgtgcacagccatggccgaggagctgaatgctgtgattgtgtccattgagtaccgcctggtgcccaaggtgtacttccctgagcagatccatgatgtggtgcgggccaccaagtacttcctgaagccagaggtgctgcagaagtacatggtggaccccggccgcatctgcatcagcggggacagcgctgggggcaacctggccgccgccctgggccagcagttcacccaggatgccagcctgaagaacaagctgaagctgcaggccctgatctaccctgtgctgcaggccctggacttcaacacccccagctaccagcagaatgtgaacacccccatcctgccccgctacgtgatggtgaagtactgggtggactacttcaagggcaactatgactttgtgcaggccatgattgtgaacaaccacaccagcctggatgtggaggaggccgctgctgtgcgggcccggctgaactggaccagcctgctgcctgccagcttcaccaagaactacaagcctgtggtgcagaccactggaaatgcccgcatcgtgcaggagctgccccagctgctggatgcccggagcgcccccctgattgctgaccaggccgtgctgcagctgctgcccaagacctacatcctgacctgtgaacatgatgtgctgagagatgatggcatcatgtatgccaagaggctggagagcgctggggtggaggtgaccctggaccactttgaagatggcttccacggctgcatgatcttcacctcctggcccaccaacttctctgtgggcatccgcaccagaaattcctacatcaagtggctggaccagaacctgtag

SEQ ID NO: 205817 - DNA, 1227 bp, Artificial Sequence
  derived and/or modified sequence
atgaggagcagctgtgtgctgctgacagccctggtggccctggccgcctactacgtgtacatccccctgcccggctctgtgtctgacccctggaagctgatgctgctggatgccaccttccggggggcccagcaggtgagcaacctgatccactacctgggcctgagccaccacctgctggccctgaacttcatcatcgtgtcctttgggaagaagagcgcctggagcagcgcccaggtgaaggtgacagacacagactttgatggagtggaggtgcgggtgtttgagggcccccccaagccagaggagcccctgaagaggtctgtggtgtacatccatggaggcggctgggccctggccagcgccaagatccgctactatgatgagctgtgcacagccatggccgaggagctgaatgctgtgattgtgtccattgagtaccgcctggtgcccaaggtgtacttccctgagcagatccatgatgtggtgcgggccaccaagtacttcctgaagccagaggtgctgcagaagtacatggtggaccccggccgcatctgcatcagcggggacagcgctgggggcaacctggccgccgccctgggccagcagttcacccaggatgccagcctgaagaacaagctgaagctgcaggccctgatctaccctgtgctgcaggccctggacttcaacacccccagctaccagcagaatgtgaacacccccatcctgccccgctacgtgatggtgaagtactgggtggactacttcaagggcaactatgactttgtgcaggccatgattgtgaacaaccacaccagcctggatgtggaggaggccgctgctgtgcgggcccggctgaactggaccagcctgctgcctgccagcttcaccaagaactacaagcctgtggtgcagaccactggaaatgcccgcatcgtgcaggagctgccccagctgctggatgcccggagcgcccccctgattgctgaccaggccgtgctgcagctgctgcccaagacctacatcctgacctgtgaacatgatgtgctgagagatgatggcatcatgtatgccaagaggctggagagcgctggggtggaggtgaccctggaccactttgaagatggcttccacggctgcatgatcttcacctcctggcccaccaacttctctgtgggcatccgcaccagaaattcctacatcaagtggctggaccagaacctgtag

SEQ ID NO: 205818 - DNA, 1323 bp, Artificial Sequence
  derived and/or modified sequence
atgagcagctgccggggccagaaggtggccggcggcctgcgggtggtctcccccttcccattgtgtcagccggccggggagccctctcagggcaagatgcgctccagttgtgttctgctgacagccctggttgcccttgccgcgtactacgtgtacatcccactgcccggcagcgtgtctgatccttggaagttaatgttactcgatgccacctttcgcggggcgcagcaagtcagtaatcttatccactacctgggccttagtcatcatctactggccttgaactttattatcgtgtcctttggcaagaagagcgcctggtcctctgcccaggtgaaggtgacagacaccgacttcgacggcgtcgaggttcgcgtgtttgaaggaccccctaaacctgaggaaccccttaaacggtcagtcgtttacatccacgggggagggtgggcccttgcatccgccaaaatcagatattatgatgaactctgcacagccatggcagaagagctgaatgccgtgatcgtctcaatcgagtacagactcgtcccaaaagtgtattttccagaacagattcatgacgttgtgcgggctaccaagtacttcctaaagccagaagttctgcagaagtacatggtagaccccggtaggatctgcatttcaggcgattcagctggcggaaacctcgcggctgcactgggtcagcagttcacacaagacgctagcttgaagaataagctgaagctccaggcgctgatctatccagtgctgcaggcactggatttcaacacccctagttatcagcaaaacgtgaacactccaatcctccctaggtacgtgatggtgaagtattgggtggactactttaaaggcaattacgatttcgttcaggccatgatcgtgaataaccatacttccctggacgtggaagaagctgctgcagttcgggcccggctgaactggacatctctattgcctgcctccttcacaaaaaattataagcccgtcgtgcaaaccacaggaaatgctagaattgtacaggagcttccccagctgctagatgcccgcagcgcccccctcattgctgaccaggccgtgctgcaactgttgcctaagacgtacattttgacatgcgagcatgacgtccttcgggatgatggaatcatgtacgccaaaaggcttgaatcagccggagtcgaggtcaccttagaccactttgaggatggtttccacggctgcatgatctttacaagttggccaacgaatttcagcgtaggaatacggacaagaaacagctatattaagtggctggaccaaaatctttag

SEQ ID NO: 205819 - DNA, 1227 bp, Artificial Sequence
  derived and/or modified sequence
atgcggagcagctgcgtgctgctgaccgccctggtggccctggccgcctattatgtgtacatccccctgcccggatccgtcagcgacccatggaagcttatgctgctggatgctactttccgcggagcccagcaggtcagcaacctgattcactacttaggattatcccaccacctcttagcactcaattttattatcgtgagtttcggcaagaagtccgcatggtcctctgcccaagtgaaagtaacggacaccgattttgatggggtggaggttagggtctttgagggcccacccaagcccgaagaaccactcaagcggagcgtggtgtacatccacggcgggggatgggccctcgcctcagccaaaatccggtattacgatgaactctgcacagccatggccgaggaactgaacgccgtgattgtgtcaatagaataccggctggtgccaaaggtatatttccccgagcagatacacgatgtcgtacgggcaaccaagtacttcttgaagcctgaggttctgcagaagtacatggtcgatcccggcaggatatgtatttctggcgattccgctggaggaaatctggctgctgcacttggccagcagttcacgcaagacgcctccctcaagaacaagctgaagctccaggcattgatttaccctgtcctgcaagcgttggacttcaatacccctagctatcagcagaacgtgaatactccaatcttgccaaggtatgtgatggtgaaatattgggttgactacttcaaggggaattacgatttcgttcaggccatgattgtcaacaatcacacttccctcgacgtcgaagaggcggctgcagtcagagctagactgaactggacatcactgctaccagccagtttcaccaaaaattacaaaccggtagttcaaactaccggcaacgcaagaatagtacaggagctgccccagcttctagacgctagatccgccccgctcatcgcagatcaggcggtgctccagctgctccccaaaacgtacattctgacgtgcgagcatgacgtgcttagggacgacggcatcatgtacgcgaaacgactggaatccgctggggtggaagtgaccctggatcacttcgaggacggattccatggttgcatgatctttactagttggcccacaaatttctctgtgggaattagaactcgcaattcatatattaaatggctggaccaaaacttgtag

SEQ ID NO: 205820 - DNA, 4291 bp, Artificial Sequence
  derived and/or modified sequence
agagcagcgacagagccttcctcaaacctgtagtgactgccacactttgcaaggacaccgtagagggggcatgtccgcgctccaacttcctcccgacgcagcctctgattggctcctgggcttataagaaacgcgtgaatgagcagctgccgcgggcagaaagttgccggaggtctccgggtggtatcgccctttcctctttgccagcccgctggcgagccgagccagggcaagatgaggtcgtcctgtgtcctgctcaccgccctggtggcgctggccgcctattacgtctacatcccgctgcctggctccgtgtccgacccctggaagctgatgctgctggacgccactttccggggtgcacagcaagtgagtaacctgatccactacctgggactgagccatcacctgctggcactgaattttatcattgtttcttttggcaaaaaaagcgcgtggtcttctgcccaagtgaaggtgaccgacacagactttgatggtgtggaagtcagagtgtttgaaggccctccgaagcccgaagagccactgaaacgcagcgtcgtttatatccacggaggaggctgggccttggcaagtgcaaaaatcaggtattatgatgagctgtgtacagcaatggctgaggaattgaatgctgtcattgtttccattgaatacaggctagttccaaaggtttattttcctgagcaaattcatgatgttgtacgggccacaaagtatttcctgaagccagaagtcttacagaagtatatggttgatccaggcagaatttgcatttctggtgacagtgctggtggaaatctggctgctgcccttggacaacagtttactcaagatgccagcctaaaaaataagctcaaactacaagctttaatttatccagttcttcaagctttagattttaacacaccatcttatcagcaaaatgtgaacaccccaatcctgccccgctatgtcatggtgaagtattgggtggactacttcaaaggcaactatgactttgtgcaggcaatgatcgttaacaatcacacttcacttgatgtggaagaggctgctgctgtcagggcccgtctaaactggacatccctcttgcctgcatccttcacaaagaactacaagcctgttgtacagaccacaggcaatgccaggattgtccaggagcttcctcagttgctggatgcccgctccgccccactcattgcagaccaggcagtgctgcagctcctcccaaagacctacattctgacgtgtgagcatgatgtcctcagagacgatggcatcatgtatgccaagcgtttggagagtgccggtgtggaggtgaccctggatcactttgaggatggctttcacggatgtatgattttcactagctggcccaccaacttctcagtgggaatccggactaggaatagttacatcaagtggctagatcaaaacctgtaaaggagcaaaacttccagaagcctcgagcccctcttgacctcctacacctgctttggaaagacatgcactttttagttgactaattcttcctcccattcccctctacttgcgagttatggaatttctattccataactgaagtctttatgataacctaatttttaaaaatgaatttgactaacttaagtgcaaaacatgtaaatttggttcccagagtgggccaatctctctgttcttgttatcttagccaactatactgatacctacagctacagaaagcaggactaggaactggaaataactttgggtcctgccttcattaggacgttctttttagaagcagttcttccagctctggatcatagagtgacctttaataagttaaaaaaacgaggactccttaattctgctagagttaaccttgagttcagagcagtattaaatgcgtgcactttcaggtcagtactggggaccaagtaccctctggtcttttgtgaatggatggttttgtttcctatgggaattttggcaaaggttttctggaaagaacaagtttctcaaaggactttcttcctctagaatgttcattttatgagatcgctatctgtaagtccagttggattacaggaatacttgaaagttactttctaccactattagaaaatatgaagtcgcatgcactggatatctatatatcattaggtttttgttgtgtttttggttatgctgtcccccttctccttggggagatatttgggagcaaacttatttagatttagagtaaacttttcattatagagcaagtaaaaacagacaaatgaaacaacctagtgtttcacataaaaatacttctgacataaagtaccaagagcagtgtgaatatacttggcatagtcaaaaaagaaaatacatttaatattagttcaaaattgttaaaaatacctttagaaggtctagtctattattgaaaactcaattttttcacttatatggctttaaaatggagctattttgctacaatataatgtattgtttatttttttaagttatttaatgttaatatacatagctagacttaaggtttttcagaaagatgtccataataaatattaaaaacaatggtattttttaaaaaactgccttagggttttaaaaccttccctacagttataaccacgtgtaattttgtggaaatgatataacagctattaatactactataacataggcataaatattttcgtgtttatatgcatatacaagttaaaataattagaaactatgactgcgcctagtaaagtcatctaggtttatagttcagtagcttaggcaaggcacacactgctcatctccgctttttagggtcagaggaacacaagctcatgttctgagtgaagggcgtacactggcacctggtgttgcctagatcccccatctcctccttccagccaggtctggaagtttcaacagcccaagcttaacttcatgtaaagtcttcactgccagtgggaacatctttgacacaacaagacactccaattgtgatttgagttgaggatctctgcctgccttcctgccgtccttccttcttccccgatccatgctacttttaggggctgcggagagcagcagcagagctgagtaatgatacagggcaccacggagagaaagtagaaccatttcactcctgggaagatggggtatttcccacttccagcaacgaaataacaaatgaaaagttgcatacttattgatgtattgtatgagccagtagcattttatgtacaaaacagaagtcaatgcaacagtatgtatgtgtgcctgtgtgtgtataaaaataaccattgaagctaacttgctaatgtacttaggcaagccacttcccatctctgggcctcgtctttcctccctctaaaatcaaagagctgaattatgtgatccttgaggtctcttccacttataataccaactgtcttgtcagactggcaaattatattggcctctccttatgtggtggtttttttggtaggtcatagttccttatacacagacacctgcatcatcgaaggtctttttttcctaaaaaaaaaaaatgggattttagttcttattctgtgataactatcctcctcatataatactattctttttgacaccatttgaaggaaccaatatttggaccttattttgaggttgtctgtctcgaagaaaaagaaaataaaatgtataggcagggttccttcaattggcattttccccagaattgtgagccaaagcctatagtaattgcagacagcaaatgattccggatctctaaaaggctctctcagatgaaaagggagtaaaggaaaaaagaggtcaaccactgtttctgataatgtacttgagtttcattgttcttttagtttgtattcttataaaaaatgtttacactctgcagattgattttttttttttagtactgtggctttcttttcctattttatgaaaaaaatgataatctttttgtaaaattgtctgtgaaatataaacattaatatataaagaaaaaccttgaagtgctgtatagtgaagtataaattaatgttttattgatttgtgaagaatttaagactattatataattatcttggtggatctattttatgcatgaccttttaacctttgactttgcttatttcccactacgaaggggaaggtagattttatgaatgattttaatagcaaatatattttataaagtgaaaatccagtgtggaggtagcaaagcatctatctattctgaatcatgtttggaaataaaattgctccatctgggaatgtgctttca

SEQ ID NO: 205821 - DNA, 4687 bp, Artificial Sequence
  derived and/or modified sequence
agagcagcgacagagccttcctcaaacctgtagtgactgccacactttgcaaggacaccgtagagggggcatgtccgcgctccaacttcctcccgacgcagcctctgattggctcctgggcttataagaaacgcgtgaatgagcagctgccgcgggcagaaagttgccggaggtctccgggtggtatcgccctttcctctttgccagcccgctggcgagccgagccagggcaagatgaggtcgtcctgtgtcctgctcaccgccctggtggcgctggccgcctattacgtctacatcccgctgcctggctccgtgtccgacccctggaagctgatgctgctggacgccactttccggggtgcacagcaagtgagtaacctgatccactacctgggactgagccatcacctgctggcactgaattttatcattgtttcttttggcaaaaaaagcgcgtggtcttctgcccaagtgaaggtgaccgacacagactttgatggtgtggaagtcagagtgtttgaaggccctccgaagcccgaagagccactgaaacgcagcgtcgtttatatccacggaggaggctgggccttggcaagtgcaaaaatcaggtattatgatgagctgtgtacagcaatggctgaggaattgaatgctgtcattgtttccattgaatacaggctagttccaaaggtttattttcctgagcaaattcatgatgttgtacgggccacaaagtatttcctgaagccagaagtcttacagaagtatatggttgatccaggcagaatttgcatttctggtgacagtgctggtggaaatctggctgctgcccttggacaacagtttactcaagatgccagcctaaaaaataagctcaaactacaagctttaatttatccagttcttcaagctttagattttaacacaccatcttatcagcaaaatgtgaacaccccaatcctgccccgctatgtcatggtgaagtattgggtggactacttcaaaggcaactatgactttgtgcaggcaatgatcgttaacaatcacacttcacttgatgtggaagaggctgctgctgtcagggcccgtctaaactggacatccctcttgcctgcatccttcacaaagaactacaagcctgttgtacagaccacaggcaatgccaggattgtccaggagcttcctcagttgctggatgcccgctccgccccactcattgcagaccaggcagtgctgcagctcctcccaaagacctacattctgacgtgtgagcatgatgtcctcagagacgatggcatcatgtatgccaagcgtttggagagtgccggtgtggaggtgaccctggatcactttgaggatggctttcacggatgtatgattttcactagctggcccaccaacttctcagtgggaatccggactaggaatagttacatcaagtggctagatcaaaacctgtaaaggagcaaaacttccagaagcctcgagcccctcttgacctcctacacctgctttggaaagacatgcactttttagttgactaattcttcctcccattcccctctacttgcgagttatggaatttctattccataactgaagtctttatgataacctaatttttaaaaatgaatttgactaacttaagtgcaaaacatgtaaatttggttcccagagtgggccaatctctctgttcttgttatcttagccaactatactgatacctacagctacagaaagcaggactaggaactggaaataactttgggtcctgccttcattaggacgttctttttagaagcagttcttccagctctggatcatagagtgacctttaataagttaaaaaaacgaggactccttaattctgctagagttaaccttgagttcagagcagtattaaatgcgtgcactttcaggtcagtactggggaccaagtaccctctggtcttttgtgaatggatggttttgtttcctatgggaattttggcaaaggttttctggaaagaacaagtttctcaaaggactttcttcctctagaatgttcattttatgagatcgctatctgtaagtccagttggattacaggaatacttgaaagttactttctaccactattagaaaatatgaagtcgcatgcactggatatctatatatcattaggtttttgttgtgtttttggttatgctgtcccccttctccttggggagatatttgggagcaaacttatttagatttagagtaaacttttcattatagagcaagtaaaaacagacaaatgaaacaacctagtgtttcacataaaaatacttctgacataaagtaccaagagcagtgtgaatatacttggcatagtcaaaaaagaaaatacatttaatattagttcaaaattgttaaaaatacctttagaaggtctagtctattattgaaaactcaattttttcacttatatggctttaaaatggagctattttgctacaatataatgtattgtttatttttttaagttatttaatgttaatatacatagctagacttaaggtttttcagaaagatgtccataataaatattaaaaacaatggtattttttaaaaaactgccttagggttttaaaaccttccctacagttataaccacgtgtaattttgtggaaatgatataacagctattaatactactataacataggcataaatattttcgtgtttatatgcatatacaagttaaaataattagaaactatgactgcgcctagtaaagtcatctaggtttatagttcagtagcttaggcaaggcacacactgctcatctccgctttttagggtcagaggaacacaagctcatgttctgagtgaagggcgtacactggcacctggtgttgcctagatcccccatctcctccttccagccaggtctggaagtttcaacagcccaagcttaacttcatgtaaagtcttcactgccagtgggaacatctttgacacaacaagacactccaattgtgatttgagttgaggatctctgcctgccttcctgccgtccttccttcttccccgatccatgctacttttaggggctgcggagagcagcagcagagctgagtaatgatacagggcaccacggagagaaagtagaaccatttcactcctgggaagatggggtatttcccacttccagcaacgaaataacaaatgaaaagttgcatacttattgatgtattgtatgagccagtagcattttatgtacaaaacagaagtcaatgcaacagtatgtatgtgtgcctgtgtgtgtataaaaataaccattgaagctaacttgctaatgtacttaggcaagccacttcccatctctgggcctcgtctttcctccctctaaaatcaaagagctgaattatgtgatccttgaggtctcttccacttataataccaactgtcttgtcagactggcaaattatattggcctctccttatgtggtggtttttttggtaggtcatagttccttatacacagacacctgcatcatcgaaggtctttttttcctaaaaaaaaaaaatgggattttagttcttattctgtgataactatcctcctcatataatactattctttttgacaccatttgaaggaaccaatatttggaccttattttgaggttgtctgtctcgaagaaaaagaaaataaaatgtataggcagggttccttcaattggcattttccccagaattgtgagccaaagcctatagtaattgcagacagcaaatgattccggatctctaaaaggctctctcagatgaaaagggagtaaaggaaaaaagaggtcaaccactgtttctgataatgtacttgagtttcattgttcttttagtttgtattcttataaaaaatgtttacactctgcagattgattttttttttttagtactgtggctttcttttcctattttatgaaaaaaatgataatctttttgtaaaattgtctgtgaaatataaacattaatatataaagaaaaaccttgaagtgctgtatagtgaagtataaattaatgttttattgatttgtgaagaatttaagactattatataattatcttggtggatctattttatgcatgaccttttaacctttgactttgcttatttcccactacgaaggggaaggtagattttatgaatgattttaatagcaaatatattttataaagtgaaaatccagtgtggaggtagcaaagcatctatctattctgaatcatgtttggaaataaaattgctccatctgggaatgtgctttcattttcccgtctcattttctgtttcccatttgaaaacagtgttctcttctcttctttctgtatgccaaattgccagccacaattctttcccaatcttctgcccagtggagtactccagctgtctttcctttagagaggtggttcagtggcctccttgatgacatttgtttcatgtctggatacagtatgtgttgccctcctttggactggctagaatattcataaaagccaggcaggccctgggactattttgggaccttcaatacacatgttaggaaaaggatgatcataatgccaagagtttgagctgaattgtttcagccaaagcatcactatcactgaaggcaggttctcaaactgaccttgtcattacaaataaatctaatttcacacttga

SEQ ID NO: 205822 - DNA, 1323 bp, Artificial Sequence
  derived and/or modified sequence
atgtcctcttgccggggacagaaggtggcgggtggactgcgcgtcgtgagccctttccccctctgtcagcctgccggtgaaccctctcagggcaagatgcggtctagctgcgtgctgctgaccgcactagtcgcgctggccgcttactatgtgtacatccctttgccagggagtgtgtcagacccctggaagctgatgctcctggatgccacctttcgcggagcccagcaggtgtccaacctcatccattacctggggctcagtcatcacctcctggccctgaattttattatcgtatccttcggcaagaaaagcgcatggtcttcagcccaggtgaaggttaccgatacggatttcgacggcgttgaagtcagggtgtttgaaggacctccaaagcctgaagaacctcttaaacggtcggtcgtttacatacacggcggtggttgggcactcgcctccgctaagatccgctactatgacgagctgtgtactgccatggctgaagagctgaacgctgtcatcgtaagcattgaataccggctcgtgccaaaagtatactttccagaacagattcacgatgtggtacgtgccactaaatactttctgaagcccgaggtcctgcagaagtacatggtggacccgggaaggatttgtatcagtggcgactccgcaggagggaacttagcagccgctcttggacaacagtttacgcaggatgcgagtctcaagaacaagctgaagttgcaggccctcatctaccccgtcctgcaggctctggatttcaacaccccatcctatcagcagaacgtgaacacacctatcctccccagatacgtgatggtgaaatattgggtggactacttcaagggcaattacgactttgttcaggccatgatcgttaataaccataccagcctggacgtggaggaagctgctgccgtgcgtgcccgactgaattggacatccctgttgccagcaagtttcactaaaaactacaaacctgtggtacagaccacggggaatgccagaatagtgcaggagcttccacagttattggacgcaagatctgctccactgattgctgaccaagcggttttacaattattgcccaagacatatatcttaacatgcgagcatgacgtacttcgagacgatggcataatgtacgccaagcggctggaatctgcaggcgtggaagttacgctggaccattttgaggacggcttccatggttgtatgattttcacttcctggcccacaaacttttcagtgggcataagaactcggaattcctatattaagtggctcgatcagaatctctag

SEQ ID NO: 205823 - DNA, 1227 bp, Artificial Sequence
  derived and/or modified sequence
atgcggagcagctgcgtgctactcaccgccctcgttgcgctcgccgcatactacgtgtacattccattacccggttccgtgtctgacccctggaaactgatgcttttagacgcaacctttcgtggggctcagcaggtgtccaacttgatccactatctgggcctatcgcatcacttgctcgctttgaattttattattgtcagctttggcaaaaagtccgcctggagctcagcccaagtcaaggttactgacacagactttgacggtgtcgaagtgcgcgttttcgagggtccgccaaagcctgaagagccactgaaacgctccgttgtgtatattcatggtggcggatgggcgttagcaagcgccaaaatcaggtattatgatgagctgtgcaccgccatggcggaggagctcaacgcagtgatcgtcagtatcgagtatagactggtcccaaaggtgtactttcccgagcagatacatgacgttgtacgtgcaaccaagtatttcctgaagccagaagtcctccagaaatacatggtggatcctggcaggatttgcatctcaggggatagcgcgggagggaacctggccgcagccctcgggcaacagttcacacaggacgcttccctcaagaacaagctcaaactgcaggcacttatctacccagtgctgcaagctcttgactttaatacccctagctaccaacagaatgtgaacactcctatcttgcccagatatgtgatggtgaaatattgggtagattactttaagggcaactatgacttcgtccaagccatgatagtaaacaaccacacatccctggatgtagaggaggcagccgcagtccgcgcacggctgaattggacctctctgctgccagcatcattcaccaagaactataagcccgtggtgcagacaacagggaatgccaggattgtgcaggagttgccgcaactgttggacgccaggtccgcgccattaatcgcagaccaagccgtcctccagttattgccgaaaacgtacattcttacttgtgagcacgacgtgttgagggacgacggtatcatgtacgccaaacgactggaatcggccggtgtcgaggtgacactcgatcatttcgaggatggctttcacggttgcatgattttcacatcttggcccactaattttagtgtgggcattagaactagaaatagttatattaagtggcttgaccagaacctgtag

SEQ ID NO: 205824 - DNA, 1323 bp, Artificial Sequence
  derived and/or modified sequence
atgagcagctgcagaggccagaaggtggccggcggcctgagagtggtgagccccttccccctgtgccagcccgccggcgagcccagccagggcaagatgagaagcagctgcgtgctgctgaccgccctggtggccctggccgcctactacgtgtacatccccctgcccggcagcgtgagcgacccctggaagctgatgctgctggacgccaccttcagaggcgcccagcaggtgagcaacctgatccactacctgggcctgagccaccacctgctggccctgaacttcatcatcgtgagcttcggcaagaagagcgcctggagcagcgcccaggtgaaggtgaccgacaccgacttcgacggcgtggaggtgagagtgttcgagggcccccccaagcccgaggagcccctgaagagaagcgtggtgtacatccacggcggcggctgggccctggccagcgccaagatcagatactacgacgagctgtgcaccgccatggccgaggagctgaacgccgtgatcgtgagcatcgagtacagactggtgcccaaggtgtacttccccgagcagatccacgacgtggtgagagccaccaagtacttcctgaagcccgaggtgctgcagaagtacatggtggaccccggcagaatctgcatcagcggcgacagcgccggcggcaacctggccgccgccctgggccagcagttcacccaggacgccagcctgaagaacaagctgaagctgcaggccctgatctaccccgtgctgcaggccctggacttcaacacccccagctaccagcagaacgtgaacacccccatcctgcccagatacgtgatggtgaagtactgggtggactacttcaagggcaactacgacttcgtgcaggccatgatcgtgaacaaccacaccagcctggacgtggaggaggccgccgccgtgagagccagactgaactggaccagcctgctgcccgccagcttcaccaagaactacaagcccgtggtgcagaccaccggcaacgccagaatcgtgcaggagctgccccagctgctggacgccagaagcgcccccctgatcgccgaccaggccgtgctgcagctgctgcccaagacctacatcctgacctgcgagcacgacgtgctgagagacgacggcatcatgtacgccaagagactggagagcgccggcgtggaggtgaccctggaccacttcgaggacggcttccacggctgcatgatcttcaccagctggcccaccaacttcagcgtgggcatcagaaccagaaacagctacatcaagtggctggaccagaacctgtag

SEQ ID NO: 205825 - DNA, 1227 bp, Artificial Sequence
  derived and/or modified sequence
atgagaagcagctgcgtgctgctgaccgccctggtggccctggccgcctactacgtgtacatccccctgcccggcagcgtgagcgacccctggaagctgatgctgctggacgccaccttcagaggcgcccagcaggtgagcaacctgatccactacctgggcctgagccaccacctgctggccctgaacttcatcatcgtgagcttcggcaagaagagcgcctggagcagcgcccaggtgaaggtgaccgacaccgacttcgacggcgtggaggtgagagtgttcgagggcccccccaagcccgaggagcccctgaagagaagcgtggtgtacatccacggcggcggctgggccctggccagcgccaagatcagatactacgacgagctgtgcaccgccatggccgaggagctgaacgccgtgatcgtgagcatcgagtacagactggtgcccaaggtgtacttccccgagcagatccacgacgtggtgagagccaccaagtacttcctgaagcccgaggtgctgcagaagtacatggtggaccccggcagaatctgcatcagcggcgacagcgccggcggcaacctggccgccgccctgggccagcagttcacccaggacgccagcctgaagaacaagctgaagctgcaggccctgatctaccccgtgctgcaggccctggacttcaacacccccagctaccagcagaacgtgaacacccccatcctgcccagatacgtgatggtgaagtactgggtggactacttcaagggcaactacgacttcgtgcaggccatgatcgtgaacaaccacaccagcctggacgtggaggaggccgccgccgtgagagccagactgaactggaccagcctgctgcccgccagcttcaccaagaactacaagcccgtggtgcagaccaccggcaacgccagaatcgtgcaggagctgccccagctgctggacgccagaagcgcccccctgatcgccgaccaggccgtgctgcagctgctgcccaagacctacatcctgacctgcgagcacgacgtgctgagagacgacggcatcatgtacgccaagagactggagagcgccggcgtggaggtgaccctggaccacttcgaggacggcttccacggctgcatgatcttcaccagctggcccaccaacttcagcgtgggcatcagaaccagaaacagctacatcaagtggctggaccagaacctgtag

SEQ ID NO: 205826 - protein, 835 aa, Artificial Sequence
  derived and/or modified sequence
MWLLALCLVGLAGAQRGGGGPGGGAPGGPGLGLGSLGEERFPVVNTAYGRVRGVRRELNNEILGPVVQFLGVPYATPPLGARRFQPPEAPASWPGVRNATTLPPACPQNLHGALPAIMLPVWFTDNLEAAATYVQNQSEDCLYLNLYVPTEDGPLTKKRDEATLNPPDTDIRDPGKKPVMLFLHGGSYMEGTGNMFDGSVLAAYGNVIVATLNYRLGVLGFLSTGDQAAKGNYGLLDQIQALRWLSENIAHFGGDPERITIFGSGAGASCVNLLILSHHSEGLFQKAIAQSGTAISSWSVNYQPLKYTRLLAAKVGCDREDSAEAVECLRRKPSRELVDQDVQPARYHIAFGPVVDGDVVPDDPEILMQQGEFLNYDMLIGVNQGEGLKFVEDSAESEDGVSASAFDFTVSNFVDNLYGYPEGKDVLRETIKFMYTDWADRDNGEMRRKTLLALFTDHQWVAPAVATAKLHADYQSPVYFYTFYHHCQAEGRPEWADAAHGDELPYVFGVPMVGATDLFPCNFSKNDVMLSAVVMTYWTNFAKTGDPNQPVPQDTKFIHTKPNRFEEVVWSKFNSKEKQYLHIGLKPRVRDNYRANKVAFWLELVPHLHNLHTELFTTTTRLPPYATRWPPRPPAGAPGTRRPPPPATLPPEPEPEPGPRAYDRFPGDSRDYSTELSVTVAVGASLLFLNILAFAALYYKRDRRQELRCRRLSPPGGSGSGVPGGGPLLPAAGRELPPEEELVSLQLKRGGGVGADPAEALRPACPPDYTLALRRAPDDVPLLAPGALTLLPSGLGPPPPPPPPSLHPFGPFPPPPPTATSHNNTLPHPHSTTRV

SEQ ID NO: 205827 - DNA, 2508 bp, Artificial Sequence
  derived and/or modified sequence
atgtggctccttgccctttgtctggtgggtcttgccggcgcacagcggggaggggggggtcctgggggaggagcaccaggcggacctggcctggggctcggatcgctgggtgaggagagattccccgtagtgaatactgcatacggccgtgtcagaggagttcgcagagagctcaacaatgagattctcggacccgtcgtgcagttcctgggcgtaccatatgccaccccgccgctcggagcccgcagattccagccccccgaggctccggcatcttggccaggggtccgcaacgccacaaccctgccccctgcctgcccacaaaacctgcatggcgctctacccgcgattatgctaccagtgtggtttactgacaacttagaagcagctgctacttacgtgcagaaccaaagcgaggactgcctttacttgaacctatacgtacccactgaagacggcccgctcacaaagaaacgggacgaggcaactctaaatcctcccgatactgacatacgggaccctggaaaaaagcccgtcatgctattcttgcacggaggctcctacatggagggtaccggcaatatgttcgacgggagtgtgctcgccgcttatggaaacgtgatcgtggcaaccctgaattaccgccttggtgttctgggatttctcagtaccggcgatcaggcggcaaagggtaattatggcttgttagaccaaattcaggcactgcgctggttatcggagaacattgcccactttggaggggacccagaaaggattacaatctttggttccggcgctggcgcttcctgcgtaaacttgcttattctgtcacaccacagcgaaggactattccagaaagccattgcccaatcaggtacagcaatcagcagctggagtgttaactaccagcccctgaagtatacacggctactggcagctaaggtcggttgcgatcgagaggattcggctgaggccgtggagtgcctcagacgcaaaccaagccgggaactggtggatcaagatgtacaacctgccagataccatatagcttttggccccgttgttgatggagacgtcgtgccggatgatcccgagatcttaatgcagcagggagaatttctgaactatgatatgcttattggagtgaaccaaggagagggccttaagtttgttgaggactcagccgaaagcgaagatggagttagcgcctctgcctttgattttaccgtgagcaactttgttgataacctgtacggataccctgaaggcaaagacgtactcagggagaccattaagtttatgtacaccgactgggctgatagagataatggcgaaatgcgtaggaagaccttactggctttgttcaccgaccaccaatgggtggctcccgccgtggccaccgctaagctccacgctgattaccaaagccccgtgtacttctacactttctatcaccattgtcaggcagagggtagacccgagtgggccgatgccgcacatggggatgaactgccctatgtattcggcgtccccatggtgggggctactgatctcttcccctgcaacttttcaaaaaacgacgtcatgctgtctgcagttgtcatgacttattggaccaatttcgcaaaaacgggggatcctaatcagcccgtgcctcaggacactaagtttatccacacaaaacccaacaggttcgaggaagtggtctggagtaaattcaattcaaaggaaaaacagtacctccacattggcctcaagccccgcgttcgggataattatcgagcgaacaaagtggcgttctggctggagttagttccccaccttcacaaccttcatacagagttgtttactactacaactcgtctccccccttacgcgactcgttggcccccacggccaccagcaggagctcccggcacgcggagacccccacctcccgctactttacctcccgagccagaacctgagcccggtcccagagcatacgaccggttccctggcgactcaagggactactccacagaactgagtgtcacagttgcagtgggagccagtttattatttctcaatattctggcatttgccgcgctgtactacaaaagggatcgccgtcaggaactgcgttgtaggcgtctgtcgcctccgggtggctccggcagcggggtccctggtggtgggcctctcctgcccgctgccggcagggaactgccgccagaggaggagcttgtcagcctgcagctcaagcgcggcggtggcgtgggcgcagacccggcagaggccttgagacctgcctgccccccagactacaccttggccttacgaagggcaccagatgacgtgccgcttttagctccaggggccctgactctgctgccctccggactgggtccacccccccctccgcctcctcctagcttgcatcctttcggtccctttccccccccgccgcccaccgcaacatcacacaacaacacactgccgcacccacactctactactcgagtatag

SEQ ID NO: 205828 - DNA, 2508 bp, Artificial Sequence
  derived and/or modified sequence
atgtggctgctggccctgtgcctggtgggcctggccggggcccagagaggaggcggcggccctgggggcggggcccctgggggccctggcctgggcctgggcagcctgggggaggagcgcttccctgtggtgaacacagcctacggccgggtgcggggcgtgagaagagagctgaacaatgagatcctgggccctgtggtgcagttcctgggcgtgccctatgccaccccacccctgggcgcccggcgcttccagcccccagaggccccagcctcctggccaggagtgagaaatgccaccaccctgcccccagcctgcccccagaacctgcatggagccctgcctgccatcatgctgcctgtgtggttcacagacaacctggaggccgccgccacctacgtgcagaaccagagcgaggactgcctgtacctgaacctgtatgtgcccacagaagatggccccctgaccaagaagagagatgaggccaccctgaaccccccagacacagacatccgggaccccgggaagaagcctgtgatgctgttcctgcacggcggcagctacatggagggcaccggcaacatgtttgatggctctgtgctggccgcctatggaaatgtcatcgtggccaccctgaactaccgcctgggcgtgctgggcttcctgagcactggagaccaggccgccaagggcaactacggcctgctggaccagatccaggccctgcgctggctgtctgaaaatattgcccactttggaggagaccctgagcgcatcaccatcttcggcagcggggccggggccagctgtgtgaacctgctgatcctgagccaccacagcgagggcctcttccagaaggccatcgcccagagcggcacagccatcagctcctggagcgtgaactaccagcccctgaagtacacccggctgctggccgccaaggtgggctgtgaccgggaggacagcgctgaggccgtggagtgcctgcggaggaagcccagccgggagctggtggaccaggatgtgcagcctgcccgctaccacatcgcctttggacctgtggtggatggagatgtggtgcctgatgatcctgagatcctgatgcagcagggcgagttcctgaactatgacatgctgattggagtgaaccagggcgagggcctgaagtttgtggaggacagcgctgagagtgaagatggagtgtctgccagcgcctttgacttcaccgtgagcaactttgtggacaacctgtatggctacccagagggcaaggatgtgctgcgggagaccatcaagttcatgtacacagactgggccgaccgggacaatggagagatgaggaggaagaccctgctggccctcttcacagaccaccagtgggtggccccagctgtggccacagccaagctgcacgccgactaccagagccctgtgtacttctacaccttctaccaccactgccaggccgagggccggcctgagtgggcagatgctgcccatggagatgagctgccctacgtgtttggagtgcccatggtgggcgccacagacctcttcccctgcaacttcagcaagaatgatgtgatgctgtctgctgtggtgatgacctactggaccaactttgccaagacaggagaccccaaccagcctgtgccccaggacaccaagttcatccacaccaagcccaacagatttgaggaggtggtgtggagcaagttcaacagcaaggagaagcagtacctgcacatcggcctgaagccccgggtgcgggacaactaccgggccaacaaggtggccttctggctggagctggtgccccacctgcacaacctgcacacagagctgttcaccaccaccacccggctgcccccctatgccacccgctggccacccaggcctcctgctggggcccctggcaccaggaggcctcctcctccagccaccctgcccccagagcctgagcctgagcccggcccccgggcctatgaccgcttccctggggacagccgggactacagcacagagctgtctgtgacagtggccgtgggcgccagcctgctcttcctgaacatcctggcctttgctgccctgtactacaagagggaccggcggcaggagctgcgctgccggcggctgagccccccaggcggcagcggcagcggcgtgcctgggggcggccccctgctgcctgctgctggccgggagctgcccccagaggaggagctggtgtccctgcagctgaagaggggcggcggcgtgggcgctgaccctgctgaggccctgcggcctgcctgccccccagactacaccctggccctgcggcgggccccagatgatgtgcccctgctggcccctggggccctgaccctgctgcccagcggcctgggccccccacctcctcctcctccacccagcctgcaccccttcggccccttccccccacctccacccacagccaccagccacaacaacaccctgccccacccccacagcaccaccagggtgtag

SEQ ID NO: 205829 - DNA, 2508 bp, Artificial Sequence
  derived and/or modified sequence
atgtggctgctggccctgtgcctggtgggcctggccggcgcccagagaggaggcggggggcccgggggtggtgcgcccgggggaccgggcctcggcttggggtcattgggggaggaacgattccctgtggtcaataccgcctatggtagagtgcgaggggtcaggagggaactcaacaacgaaatcctgggccctgttgtacagttcctgggcgtgccctatgccacaccaccactcggggcccgtcggtttcagccgcctgaggctccagcttcctggcccggcgtgcgcaacgccactaccctccctcctgcatgccctcagaacttgcacggcgccctccccgccatcatgctgcctgtgtggttcacggacaatctggaagccgcagcaacctatgttcagaatcagtcggaggactgtttgtacctaaacttatacgttcccacagaggatggacccttgaccaagaaacgcgacgaagccacactgaacccaccggacacagatatcagagacccagggaagaagcctgttatgcttttcctccacggcggcagttacatggagggaacagggaatatgtttgacggttctgtcttggctgcgtacgggaacgtgattgtggccaccctgaattacaggttaggcgttctcgggtttctatccacaggggatcaggccgcgaaaggaaactatggactgttggaccagatccaagccctcagatggctgtcagagaacattgcacacttcggcggcgacccggaacggataacaatctttgggtccggggcaggcgccagttgtgtgaatttgctcatactctcacaccactcagagggcttgttccagaaggccattgcccaatcggggacggcgatatcaagctggagtgtgaactaccagccgttgaaatacactaggctattagcagcgaaagtaggctgcgacagggaagactctgccgaggcggtcgagtgccttcgtcggaaaccttcgagagagctggtagaccaggacgtacaacctgcccgataccacatcgcctttggcccagtcgtcgatggcgatgtagttcctgatgatccagaaattctgatgcagcaaggggaattcctgaactatgacatgctgattggcgtcaatcaaggagagggcctgaaatttgttgaggacagcgcggaatccgaggacggagtcagtgcatctgcattcgatttcaccgtgagcaactttgtagataacctgtatggttaccctgaaggcaaggatgtgcttcgggagactatcaagttcatgtacaccgattgggcagatcgcgacaatggcgagatgaggcggaagaccctcctcgccctgtttacggaccaccagtgggtggcccctgccgtggccacagccaagctccatgcagactaccagtcacctgtatatttttataccttctatcatcactgccaggccgagggccggccagaatgggccgatgctgcccacggcgacgagcttccatacgttttcggcgtgcccatggtgggcgccacagacctgttcccttgcaacttcagcaagaacgatgtgatgctcagtgcggtggtgatgacctactggaccaactttgcaaagaccggcgatccaaatcaacctgtgccacaggatactaagttcatccataccaagcctaaccgtttcgaggaggtcgtgtggtccaaattcaactcaaaagagaaacagtacctgcacatcggcctcaaaccaagagtgcgggacaattatcgcgctaacaaggtagctttttggttagaactggttccacacttgcataacttgcatactgagctctttaccactaccactcggctgccaccatatgccaccaggtggcctccacggcctcccgccggcgccccaggaacaagaagaccgcctcccccagccaccttgccaccagaaccggagccggagcctgggccgcgagcttatgacagattccctggcgattccagggattacagtactgaactgagtgtaactgttgctgtgggtgcctccctcctctttctgaatatccttgctttcgccgctctgtactataagcgcgacagacgccaggaactgagatgtcgaagactcagtccacccggcggatctggtagtggcgtacctgggggcggaccactgttaccagcagcaggtcgggaactgcctcctgaagaggaactcgtgtctcttcagttaaagagaggtggcggagttggggccgatccagcagaagctctgcggcccgcctgtccccctgactacacattagcgctgagaagagcccccgacgatgtgccactactggcgcccggtgctctcaccctcttgccttctggtttgggaccaccgccacctcctcctcccccgagtctacaccccttcgggccgttccccccaccaccacctactgcaacttcccacaacaatactttgccccaccctcactctacaacccgagtctag

SEQ ID NO: 205830 - DNA, 4642 bp, Artificial Sequence
  derived and/or modified sequence
tccctctcccccccttctctctctctccgaggggggggggtcccagggagggagggggggtcccccgatcagcatgtggctcctggcgctgtgtctggtggggctggcgggggctcaacgcgggggagggggtcccggcggcggcgccccgggcggccccggcctgggcctcggcagcctcggcgaggagcgcttcccggtggtgaacacggcctacgggcgagtgcgcggtgtgcggcgcgagctcaacaacgagatcctgggccccgtcgtgcagttcttgggcgtgccctacgccacgccgcccctgggcgcccgccgcttccagccgcctgaggcgcccgcctcgtggcccggcgtgcgcaacgccaccaccctgccgcccgcctgcccgcagaacctgcacggggcgctgcccgccatcatgctgcctgtgtggttcaccgacaacttggaggcggccgccacctacgtgcagaaccagagcgaggactgcctgtacctcaacctctacgtgcccaccgaggacggtccgctcacaaaaaaacgtgacgaggcgacgctcaatccgccagacacagatatccgtgaccctgggaagaagcctgtgatgctgtttctccatggcggctcctacatggaggggaccggaaacatgttcgatggctcagtcctggctgcctatggcaacgtcattgtagccacgctcaactaccgtcttggggtgctcggttttctcagcaccggggaccaggctgcaaaaggcaactatgggctcctggaccagatccaggccctgcgctggctcagtgaaaacatcgcccactttgggggcgaccccgagcgtatcaccatctttggttccggggcaggggcctcctgcgtcaaccttctgatcctctcccaccattcagaagggctgttccagaaggccatcgcccagagtggcaccgccatttccagctggtctgtcaactaccagccgctcaagtacacgcggctgctggcagccaaggtgggctgtgaccgagaggacagcgctgaagctgtggagtgtctgcgccggaagccctcccgggagctggtggaccaggacgtgcagcctgcccgctaccacatcgcctttgggcccgtggtggatggcgacgtggtccccgatgaccctgagatcctcatgcagcagggagaattcctcaactacgacatgctcatcggcgtcaaccagggagagggcctcaagttcgtggaggactctgcagagagcgaggacggtgtgtctgccagcgcctttgacttcactgtctccaactttgtggacaacctgtatggctacccggaaggcaaggatgtgcttcgggagaccatcaagtttatgtacacagactgggccgaccgggacaatggcgaaatgcgccgcaaaaccctgctggcgctctttactgaccaccaatgggtggcaccagctgtggccactgccaagctgcacgccgactaccagtctcccgtctacttttacaccttctaccaccactgccaggcggagggccggcctgagtgggcagatgcggcgcacggggatgaactgccctatgtctttggcgtgcccatggtgggtgccaccgacctcttcccctgtaacttctccaagaatgacgtcatgctcagtgccgtggtcatgacctactggaccaacttcgccaagactggggaccccaaccagccggtgccgcaggataccaagttcatccacaccaagcccaatcgcttcgaggaggtggtgtggagcaaattcaacagcaaggagaagcagtatctgcacataggcctgaagccacgcgtgcgtgacaactaccgcgccaacaaggtggccttctggctggagctcgtgccccacctgcacaacctgcacacggagctcttcaccaccaccacgcgcctgcctccctacgccacgcgctggccgcctcgtccccccgctggcgccccgggcacacgccggcccccgccgcctgccaccctgcctcccgagcccgagcccgagcccggcccaagggcctatgaccgcttccccggggactcacgggactactccacggagctgagcgtcaccgtggccgtgggtgcctccctcctcttcctcaacatcctggcctttgctgccctctactacaagcgggaccggcggcaggagctgcggtgcaggcggcttagcccacctggcggctcaggctctggcgtgcctggtgggggccccctgctccccgccgcgggccgtgagctgccaccagaggaggagctggtgtcactgcagctgaagcggggtggtggcgtcggggcggaccctgccgaggctctgcgccctgcctgcccgcccgactacaccctggccctgcgccgggcaccggacgatgtgcctctcttggcccccggggccctgaccctgctgcccagtggcctggggccaccgccacccccaccgcccccctcccttcatcccttcgggcccttccccccgccccctcccaccgccaccagccacaacaacacgctaccccacccccactccaccactcgggtatagggggtgggtggggaggccctcctccccggccctccctggcccggccactccgaaggcagggaggaggacttggcaactggcttttctcctgtggagtcgtcacacgccatccagcagcgctaaggtggacatgggattcctccctgcgatgcgtgtctttcccacgcagagaagcccagtctcttctctggatctgggcctttgaacaactggggggcgttttctcccccccattgggacaccagtcttcggtgtgtggaatgtggtattttcccgcgtggaggtgtgctttctcacaacggggtgtgttttcccatgtgcagggtgaggtttttttttgccaccctggacacatgttggccccctcaaagaatttctgtggggatttgtaccccagaatcctgttcccccatcccttctcccacctcctcccctctccctccccctggagaccctggaagtggtgtgttcacatacagtgacccttggccaccagaccacagaggatggagcctgggaagcagcgaggaaatcacagccccctcgcccctgcctcccttgcccctaccccggcgaagcatgttccccccgacgccccccttggcacaagtcagatgaagcacgttctgccggggaggccctcaccttccagagaggacagacacagatttcctgctgggggagggaggagtccacgcatcctgatgctgcctggaagcttattttcccgtggccaggacgcatttctctgagtggaaacaggttcttgcatgtggatgtgtgtttccccaggcagacggcccctctcttcccagcacttccctgcctcccccaggcctcaggcccagcacccagttcctcctcacatggcaggtgagcacagacttctagttggcaggagctgaggagggtgaacaaaccccgagggaggcccggcccttgctcccgagttggggggagggggtgtggcaacgtgccccccgcagaggccacgcatgtttgaccaaagccctcattgtggtccgaggacagccttttccccaggcctcagagcattgctcatccgtgccaaactgggtaggtggatttgagcggaaagactcccaaaatgtgccaagaatttcccagtcccaggcagggcaggggaaactaagggcaagcaggatacagggcgagggatgtggcaggtgagggggctcccgcctgtgccccttctcctcaccatgtctcccccaccctgcctcagttctccgttccccttcatctccgtccccctctttgaagctgtccccatctcagtgtcagaccagccttctcctcagctgaccaccctcctctgacccacgccccctccttgtctgaaagaaaggagccttgaatggtggagggaggcagtggggagaaaggtctcaccggacaggttgggagaatgaggtcagcggtgctggggaacagatggagggggcagtggggacagggcttgggcagacaccagcaggaataatttgaaatgtgtgaggtgactccccggagggccttgggcttgggcatttgggaaaagaatgatgtctggaagggcttaagggacacagtggacgaggggagagtcctcatctgctggcattttgtggggtgttagtgccaaacttgaataggggctggggtgctgtcttccactgacacccaaatccagaatccctggtcttgagtccccagaactttgcctcttgactgtcccttctcttcctacctccatccatggaaaattagttattttctgatcctttcccctgcctggtctagctcctctccaaacagccatgccctccaaatgctagagacctgggccctgaaccctgtagacagatgccctcagaattggggcatgggaggggggctgggggaccccatgattcagccacggactccaatgcccagctcctctccccaaaacaatcccgacaatcccttatccctaccccaaccctttgcggctctgtacacatttttaaacctggcaaaagatgaagagaatattgtaaatataaaagtttaactgtt

SEQ ID NO: 205831 - DNA, 2508 bp, Artificial Sequence
  derived and/or modified sequence
atgtggctgctagccctgtgcctggttgggcttgccggtgcacagcgcggaggcggtgggccaggtggtggtgctccaggagggccaggcctcggacttggatcactcggtgaagagagattcccggtagtgaatactgcctatggtcgggtcaggggggtgaggagggaactgaacaacgagatcctcgggccagtcgtccagtttctgggcgtcccatacgctactcccccactcggcgctcgaagattccagccacctgaagcccctgcctcctggccgggagtacgcaacgctacaactctccctcctgcttgtccacaaaacctccatggggctctgcccgcaataatgctgcccgtgtggttcactgataatctggaggccgcagcaacctacgtgcaaaatcagagcgaggactgtctgtatctgaacttatatgtgcctaccgaggatggaccgctgacgaaaaaacgagacgaagcgacgttgaatcctccagatactgacattagggatcctgggaaaaagcctgttatgttatttctgcatggcggttcttatatggaaggtacaggaaatatgtttgatgggtccgttttggcagcctacggcaacgtcattgtggccacgctaaattacaggctaggagtcctaggatttcttagtaccggcgaccaggcggctaaagggaattatggccttctagaccaaatacaagccctccggtggctgtccgagaatatcgcacatttcggcggagaccctgaaaggattaccattttcgggtcaggagctggggcttcgtgtgtgaacctactgattttgtcccatcatagcgaaggtttgttccagaaagccattgcgcaatcaggaaccgctatttctagttggagtgtcaattaccagcctcttaagtataccagattgctggctgccaaggtaggctgtgatagggaggacagcgccgaggccgtggaatgcctcaggaggaagcctagtcgtgagctggtggaccaagacgtgcagcccgcaaggtatcacatagcttttggacccgtagtggatggcgacgtggtccccgatgatcccgagatcctaatgcaacagggtgagtttttgaattatgacatgctgattggggttaaccaaggtgagggtttgaagtttgtggaagattccgcagagtctgaagacggggtctcagcgtccgcctttgactttacagtatcgaatttcgtggacaacttgtacggctaccctgaagggaaggatgtgctccgcgagaccatcaagttcatgtatacagattgggccgatagggacaatggcgagatgagaaggaagaccctcctggccctgttcaccgaccaccaatgggtggctcccgctgttgcgactgctaagcttcatgcggactaccagagtcccgtgtacttttacacattctaccatcactgtcaggccgaaggaaggcctgaatgggctgacgcagctcacggtgacgaactgccttatgtctttggcgtcccaatggtgggtgcgactgacctcttcccatgtaacttttctaagaacgatgttatgctgagcgccgttgtcatgacctattggaccaatttcgccaaaactggggatccgaatcagccagtgccccaagacacaaagtttattcataccaagcccaatagattcgaggaagtggtgtggagcaaattcaattccaaagagaaacagtacttgcacatcggattgaagccaagggtccgcgataattaccgggcaaacaaggtggccttttggctggaactggtgccacacttgcataatctgcacacagagctgtttaccacaaccacacgcctccctccctatgcaacgagatggccgcctaggcctcccgcaggtgcccctggtactagaaggcctccaccaccagccacactaccaccggagcccgagcccgaacccggtccccgtgcatacgatagattcccgggagattccagagactatagcacagaactgagtgttacagtagcagttggggcatctcttctctttcttaatatccttgcattcgccgcactatattacaagcgcgacagacggcaggagttgcgctgtagaaggttgtctccaccaggcggatcaggcagtggtgtgccaggaggaggtccgctgctccctgccgcaggtagggagttaccgcctgaggaggagttggtttcgctgcagcttaagcggggagggggagtgggagcagacccagcagaggcccttcgccctgcctgcccacccgattacactcttgcactgaggagggcgcctgatgacgttcccttgttggcgccaggcgcactgaccctcctgccatcagggctggggccaccaccccctcctccacctcctagcttgcacccgtttgggccatttccacctccgccacccaccgccacctctcataacaacaccttaccacacccacatagcaccactcgcgtgtag

SEQ ID NO: 205832 - DNA, 2508 bp, Artificial Sequence
  derived and/or modified sequence
atgtggctgctggccctgtgcctggtgggcctggccggcgcccagagaggcggcggcggccccggcggcggcgcccccggcggccccggcctgggcctgggcagcctgggcgaggagagattccccgtggtgaacaccgcctacggcagagtgagaggcgtgagaagagagctgaacaacgagatcctgggccccgtggtgcagttcctgggcgtgccctacgccaccccccccctgggcgccagaagattccagccccccgaggcccccgccagctggcccggcgtgagaaacgccaccaccctgccccccgcctgcccccagaacctgcacggcgccctgcccgccatcatgctgcccgtgtggttcaccgacaacctggaggccgccgccacctacgtgcagaaccagagcgaggactgcctgtacctgaacctgtacgtgcccaccgaggacggccccctgaccaagaagagagacgaggccaccctgaacccccccgacaccgacatcagagaccccggcaagaagcccgtgatgctgttcctgcacggcggcagctacatggagggcaccggcaacatgttcgacggcagcgtgctggccgcctacggcaacgtgatcgtggccaccctgaactacagactgggcgtgctgggcttcctgagcaccggcgaccaggccgccaagggcaactacggcctgctggaccagatccaggccctgagatggctgagcgagaacatcgcccacttcggcggcgaccccgagagaatcaccatcttcggcagcggcgccggcgccagctgcgtgaacctgctgatcctgagccaccacagcgagggcctgttccagaaggccatcgcccagagcggcaccgccatcagcagctggagcgtgaactaccagcccctgaagtacaccagactgctggccgccaaggtgggctgcgacagagaggacagcgccgaggccgtggagtgcctgagaagaaagcccagcagagagctggtggaccaggacgtgcagcccgccagataccacatcgccttcggccccgtggtggacggcgacgtggtgcccgacgaccccgagatcctgatgcagcagggcgagttcctgaactacgacatgctgatcggcgtgaaccagggcgagggcctgaagttcgtggaggacagcgccgagagcgaggacggcgtgagcgccagcgccttcgacttcaccgtgagcaacttcgtggacaacctgtacggctaccccgagggcaaggacgtgctgagagagaccatcaagttcatgtacaccgactgggccgacagagacaacggcgagatgagaagaaagaccctgctggccctgttcaccgaccaccagtgggtggcccccgccgtggccaccgccaagctgcacgccgactaccagagccccgtgtacttctacaccttctaccaccactgccaggccgagggcagacccgagtgggccgacgccgcccacggcgacgagctgccctacgtgttcggcgtgcccatggtgggcgccaccgacctgttcccctgcaacttcagcaagaacgacgtgatgctgagcgccgtggtgatgacctactggaccaacttcgccaagaccggcgaccccaaccagcccgtgccccaggacaccaagttcatccacaccaagcccaacagattcgaggaggtggtgtggagcaagttcaacagcaaggagaagcagtacctgcacatcggcctgaagcccagagtgagagacaactacagagccaacaaggtggccttctggctggagctggtgccccacctgcacaacctgcacaccgagctgttcaccaccaccaccagactgcccccctacgccaccagatggccccccagaccccccgccggcgcccccggcaccagaagaccccccccccccgccaccctgccccccgagcccgagcccgagcccggccccagagcctacgacagattccccggcgacagcagagactacagcaccgagctgagcgtgaccgtggccgtgggcgccagcctgctgttcctgaacatcctggccttcgccgccctgtactacaagagagacagaagacaggagctgagatgcagaagactgagcccccccggcggcagcggcagcggcgtgcccggcggcggccccctgctgcccgccgccggcagagagctgccccccgaggaggagctggtgagcctgcagctgaagagaggcggcggcgtgggcgccgaccccgccgaggccctgagacccgcctgcccccccgactacaccctggccctgagaagagcccccgacgacgtgcccctgctggcccccggcgccctgaccctgctgcccagcggcctgggcccccccccccccccccccccccccagcctgcaccccttcggccccttccccccccccccccccaccgccaccagccacaacaacaccctgccccacccccacagcaccaccagagtgtag

SEQ ID NO: 205833 - protein, 1030 aa, Artificial Sequence
  derived and/or modified sequence
MRSEALLLYFTLLHFAGAGFPEDSEPISISHGNYTKQYPVFVGHKPGRNTTQRHRLDIQMIMIMNGTLYIAARDHIYTVDIDTSHTEEIYCSKKLTWKSRQADVDTCRMKGKHKDECHNFIKVLLKKNDDALFVCGTNAFNPSCRNYKMDTLEPFGDEFSGMARCPYDAKHANVALFADGKLYSATVTDFLAIDAVIYRSLGESPTLRTVKHDSKWLKEPYFVQAVDYGDYIYFFFREIAVEYNTMGKVVFPRVAQVCKNDMGGSQRVLEKQWTSFLKARLNCSVPGDSHFYFNILQAVTDVIRINGRDVVLATFSTPYNSIPGSAVCAYDMLDIASVFTGRFKEQKSPDSTWTPVPDERVPKPRPGCCAGSSSLERYATSNEFPDDTLNFIKTHPLMDEAVPSIFNRPWFLRTMVRYRLTKIAVDTAAGPYQNHTVVFLGSEKGIILKFLARIGNSGFLNDSLFLEEMSVYNSEKCSYDGVEDKRIMGMQLDRASSSLYVAFSTCVIKVPLGRCERYGKCKKTCIASRDPYCGWIKEGGACSHLSPNSRLTFEQDIERGNTDGLGDCHNSFVALNGHSSSLLPSTTTSDSTAQEGYESRGGMLDWKHLLDSPDSTDPLGAVSSHNHQDKKGVIRESYLKGHDQLVPVTLLAIAVILAFVMGAVFSGITVYCVCDHRRKDVAVVQRKEKELTHSRRGSMSSVTKLSGLFGDTQSKDPKPEAILTPLMHNGKLATPGNTAKMLIKADQHHLDLTALPTPESTPTLQQKRKPSRGSREWERNQNLINACTKDMPPMGSPVIPTDLPLRASPSHIPSVVVLPITQQGYQHEYVDQPKMSEVAQMALEDQAATLEYKTIKEHLSSKSPNHGVNLVENLDSLPPKVPQREASLGPPGASLSQTGLSKRLEMHHSSSYGVDYKRSYPTNSLTRSHQATTLKRNNTNSSNSSHLSRNQSFGRGDNPPPAPQRVDSIQVHSSQPSGQAVTVSRQPSLNAYNSLTRSGLKRTPSLKPDVPPKPSFAPLSTSMKPNDACT

SEQ ID NO: 205834 - DNA, 3093 bp, Artificial Sequence
  derived and/or modified sequence
atgagaagcgaggccctgctgctgtacttcaccctgctgcacttcgccggcgccggcttccccgaggacagcgagcccatcagcatcagccacggcaactacaccaagcagtaccccgtgttcgtgggccacaagcccggcagaaacaccacccagagacacagactggacatccagatgatcatgatcatgaacggcaccctgtacatcgccgccagagaccacatctacaccgtggacatcgacaccagccacaccgaggagatctactgcagcaagaagctgacctggaagagcagacaggccgacgtggacacctgcagaatgaagggcaagcacaaggacgagtgccacaacttcatcaaggtgctgctgaagaagaacgacgacgccctgttcgtgtgcggcaccaacgccttcaaccccagctgcagaaactacaagatggacaccctggagcccttcggcgacgagttcagcggcatggccagatgcccctacgacgccaagcacgccaacgtggccctgttcgccgacggcaagctgtacagcgccaccgtgaccgacttcctggccatcgacgccgtgatctacagaagcctgggcgagagccccaccctgagaaccgtgaagcacgacagcaagtggctgaaggagccctacttcgtgcaggccgtggactacggcgactacatctacttcttcttcagagagatcgccgtggagtacaacaccatgggcaaggtggtgttccccagagtggcccaggtgtgcaagaacgacatgggcggcagccagagagtgctggagaagcagtggaccagcttcctgaaggccagactgaactgcagcgtgcccggcgacagccacttctacttcaacatcctgcaggccgtgaccgacgtgatcagaatcaacggcagagacgtggtgctggccaccttcagcaccccctacaacagcatccccggcagcgccgtgtgcgcctacgacatgctggacatcgccagcgtgttcaccggcagattcaaggagcagaagagccccgacagcacctggacccccgtgcccgacgagagagtgcccaagcccagacccggctgctgcgccggcagcagcagcctggagagatacgccaccagcaacgagttccccgacgacaccctgaacttcatcaagacccaccccctgatggacgaggccgtgcccagcatcttcaacagaccctggttcctgagaaccatggtgagatacagactgaccaagatcgccgtggacaccgccgccggcccctaccagaaccacaccgtggtgttcctgggcagcgagaagggcatcatcctgaagttcctggccagaatcggcaacagcggcttcctgaacgacagcctgttcctggaggagatgagcgtgtacaacagcgagaagtgcagctacgacggcgtggaggacaagagaatcatgggcatgcagctggacagagccagcagcagcctgtacgtggccttcagcacctgcgtgatcaaggtgcccctgggcagatgcgagagatacggcaagtgcaagaagacctgcatcgccagcagagacccctactgcggctggatcaaggagggcggcgcctgcagccacctgagccccaacagcagactgaccttcgagcaggacatcgagagaggcaacaccgacggcctgggcgactgccacaacagcttcgtggccctgaacggccacagcagcagcctgctgcccagcaccaccaccagcgacagcaccgcccaggagggctacgagagcagaggcggcatgctggactggaagcacctgctggacagccccgacagcaccgaccccctgggcgccgtgagcagccacaaccaccaggacaagaagggcgtgatcagagagagctacctgaagggccacgaccagctggtgcccgtgaccctgctggccatcgccgtgatcctggccttcgtgatgggcgccgtgttcagcggcatcaccgtgtactgcgtgtgcgaccacagaagaaaggacgtggccgtggtgcagagaaaggagaaggagctgacccacagcagaagaggcagcatgagcagcgtgaccaagctgagcggcctgttcggcgacacccagagcaaggaccccaagcccgaggccatcctgacccccctgatgcacaacggcaagctggccacccccggcaacaccgccaagatgctgatcaaggccgaccagcaccacctggacctgaccgccctgcccacccccgagagcacccccaccctgcagcagaagagaaagcccagcagaggcagcagagagtgggagagaaaccagaacctgatcaacgcctgcaccaaggacatgccccccatgggcagccccgtgatccccaccgacctgcccctgagagccagccccagccacatccccagcgtggtggtgctgcccatcacccagcagggctaccagcacgagtacgtggaccagcccaagatgagcgaggtggcccagatggccctggaggaccaggccgccaccctggagtacaagaccatcaaggagcacctgagcagcaagagccccaaccacggcgtgaacctggtggagaacctggacagcctgccccccaaggtgccccagagagaggccagcctgggcccccccggcgccagcctgagccagaccggcctgagcaagagactggagatgcaccacagcagcagctacggcgtggactacaagagaagctaccccaccaacagcctgaccagaagccaccaggccaccaccctgaagagaaacaacaccaacagcagcaacagcagccacctgagcagaaaccagagcttcggcagaggcgacaaccccccccccgccccccagagagtggacagcatccaggtgcacagcagccagcccagcggccaggccgtgaccgtgagcagacagcccagcctgaacgcctacaacagcctgaccagaagcggcctgaagagaacccccagcctgaagcccgacgtgccccccaagcccagcttcgcccccctgagcaccagcatgaagcccaacgacgcctgcacctag

SEQ ID NO: 205835 - DNA, 1374 bp, Artificial Sequence
  derived and/or modified sequence
atgaagaccggccacagcagcagcctgctgcccagcaccaccaccagcgacagcaccgcccaggagggctacgagagcagaggcggcatgctggactggaagcacctgctggacagccccgacagcaccgaccccctgggcgccgtgagcagccacaaccaccaggacaagaagggcgtgatcagagagagctacctgaagggccacgaccagctggtgcccgtgaccctgctggccatcgccgtgatcctggccttcgtgatgggcgccgtgttcagcggcatcaccgtgtactgcgtgtgcgaccacagaagaaaggacgtggccgtggtgcagagaaaggagaaggagctgacccacagcagaagaggcagcatgagcagcgtgaccaagctgagcggcctgttcggcgacacccagagcaaggaccccaagcccgaggccatcctgacccccctgatgcacaacggcaagctggccacccccggcaacaccgccaagatgctgatcaaggccgaccagcaccacctggacctgaccgccctgcccacccccgagagcacccccaccctgcagcagaagagaaagcccagcagaggcagcagagagtgggagagaaaccagaacctgatcaacgcctgcaccaaggacatgccccccatgggcagccccgtgatccccaccgacctgcccctgagagccagccccagccacatccccagcgtggtggtgctgcccatcacccagcagggctaccagcacgagtacgtggaccagcccaagatgagcgaggtggcccagatggccctggaggaccaggccgccaccctggagtacaagaccatcaaggagcacctgagcagcaagagccccaaccacggcgtgaacctggtggagaacctggacagcctgccccccaaggtgccccagagagaggccagcctgggcccccccggcgccagcctgagccagaccggcctgagcaagagactggagatgcaccacagcagcagctacggcgtggactacaagagaagctaccccaccaacagcctgaccagaagccaccaggccaccaccctgaagagaaacaacaccaacagcagcaacagcagccacctgagcagaaaccagagcttcggcagaggcgacaaccccccccccgccccccagagagtggacagcatccaggtgcacagcagccagcccagcggccaggccgtgaccgtgagcagacagcccagcctgaacgcctacaacagcctgaccagaagcggcctgaagagaacccccagcctgaagcccgacgtgccccccaagcccagcttcgcccccctgagcaccagcatgaagcccaacgacgcctgcacctag

SEQ ID NO: 205836 - DNA, 3093 bp, Artificial Sequence
  derived and/or modified sequence
atgcggtctgaggcactgctgctctactttaccttactgcacttcgcgggcgccggatttccagaagattcagaacccattagcatctcccacggaaactacaccaaacagtatcctgtattcgttggtcacaagccgggtcggaatacgacccagcggcaccgattggacatccagatgatcatgatcatgaacggcactctctatatagctgccagagatcatatctatactgtcgacattgatacatcccacaccgaagaaatctactgcagtaaaaaactcacatggaagtctcgccaggccgacgtcgatacatgcaggatgaaaggcaaacacaaggatgaatgtcataactttattaaggtcctgttgaagaagaatgatgatgcactgtttgtctgcgggactaacgccttcaacccttcttgccgtaactataaaatggacaccttagagccgttcggcgacgagttcagtggaatggctcgctgtccctacgacgccaaacatgccaacgtggctctcttcgccgacggcaagctctatagcgccaccgtcacagatttcctggcaatcgacgctgtgatttacagatccctcggtgaatcgccaacactcaggacagtcaaacacgacagcaaatggttgaaagagccttactttgtacaggccgtggactatggcgactatatctacttcttcttccgggagatagccgtagaatacaacaccatgggaaaggtagtgttccctagagtggcacaggtttgtaagaatgatatggggggcagtcagagagttctagagaaacagtggacgtcattcctgaaggccaggcttaattgcagtgtgcctggggacagccatttttatttcaacatccttcaggcagtgacggacgttattaggatcaatggtcgagacgtcgtgctggccaccttctctaccccatacaacagcattccgggttctgctgtgtgcgcatatgacatgctggacatcgctagcgtttttaccggacgattcaaggagcagaaatctccagactctacatggacccccgtaccagatgaacgcgttccgaaaccaagacccggctgctgtgctggatcatcctctcttgagaggtacgcgacctctaacgaatttcctgacgataccctaaactttatcaagacccacccactcatggacgaggcagtaccatctatttttaaccggccatggttcctgcgcaccatggtgcgctatcgtctgactaaaattgccgtcgatactgcggcaggaccctaccaaaatcatacagtggtgtttctgggttcggagaaagggattattcttaagttcttggctcgcattggcaactctggttttttgaatgacagcctctttttggaggagatgagcgtatacaactctgaaaagtgctcttacgacggggtcgaggataaacgcataatgggtatgcaactcgatagagcctcttcttctttgtacgtcgcttttagtacttgtgttattaaggtgccacttggccgctgcgagcgctacggtaaatgcaaaaagacctgcatcgcatccagggatccctactgcggttggattaaggagggaggggcctgtagtcatctttcccccaattctaggcttacattcgagcaggacattgagcgggggaataccgacggcctgggagactgccataactcattcgttgccctgaatgggcactccagctcactactgccaagcacgaccacaagtgacagcaccgcccaggagggctacgaatctcgggggggtatgctcgactggaaacacctgttggacagccccgatagtacagaccctcttggagccgttagcagtcacaatcaccaggataaaaaaggcgttatcagggagagctacctgaaaggacatgatcagctcgtcccagtaaccttgctggccatagctgttatactggcattcgtgatgggagctgtgtttagcggaatcactgtttactgcgtatgtgaccaccgcagaaaagatgtggccgtcgtccaacgcaaagaaaaagaattaacccatagccgccggggttcaatgtcatctgttacaaaactcagcggcctctttggcgatacccagtccaaggatcccaaacccgaggctattctaacgccgctgatgcacaacggtaagctcgcaactcccggaaacacagctaagatgctgatcaaggccgatcagcaccacctggacctcacagcccttcccaccccggagagcaccccaactttacagcaaaagaggaagccaagccggggcagccgtgaatgggaacgtaatcagaatctaatcaatgcttgtacgaaagatatgccccctatgggaagccccgtcattcctactgacctgccccttagggcaagtccctcccatattccgtctgtggtcgtccttccaataacacaacagggctaccagcacgagtatgtagatcagcctaaaatgagtgaagtagcccagatggcgctggaggatcaagccgcaactttggagtacaagacaattaaagaacacctgtcttcgaagtccccaaatcacggggtcaacctggtggagaatttagattcacttccccccaaggtgccacagcgtgaggccagccttggaccgcccggcgcgtccctgagccagaccgggctctccaagaggctcgagatgcatcattctagtagctatggtgttgattacaagcggtcctatcccacgaattccttgacaaggtcacatcaggctaccaccctgaagaggaacaatacgaattccagtaatagctcccacttaagccggaatcagagttttgggaggggagataaccccccccccgctccacaaagagtagactcgatacaagtgcactcatcccagccgagcggacaggccgtgactgtatcccgccagcctagcctaaatgcctacaactcacttacgaggagtggcctcaagcggacaccttcccttaagccagatgtgcctcccaaaccctctttcgcgcccctgtccacctccatgaagccaaatgacgcctgtacttag

SEQ ID NO: 205837 - DNA, 3093 bp, Artificial Sequence
  derived and/or modified sequence
atgcgatctgaggcgcttctcctatacttcaccttgctgcatttcgctggcgccggcttcccagaggacagtgaaccgataagtatttcacacggaaattatacaaagcagtacccggttttcgtggggcacaagcccggtagaaatactactcagcgccacagattggacatccagatgatcatgatcatgaatggcacactttatattgcagcccgcgaccacatctataccgttgacattgacacctcacacaccgaagagatctattgctctaagaagttaacgtggaaaagtagacaggctgatgtcgatacgtgtaggatgaaaggaaagcataaggatgagtgtcataactttattaaggttttgctgaaaaagaatgacgatgctttattcgtgtgcgggacaaacgcttttaatccttcatgccgcaattataagatggatacactggagcctttcggcgatgagttcagtggcatggcacggtgtccttatgatgctaaacatgctaatgtggccctgtttgctgacggtaaactctattctgccacagtcaccgacttcttggctattgacgctgtcatctatcggtccttaggggagagcccgactctgaggaccgtgaaacacgatagtaagtggttgaaagagccatactttgtccaggcagtggattacggagactatatttacttcttttttcgagagatagccgtggagtacaacacaatgggaaaggtggtcttcccaagggttgcccaggtgtgcaaaaacgacatggggggatctcagcgagtgttggaaaaacagtggactagctttctgaaagcccgacttaactgtagcgtgccaggcgactcccacttttactttaatatccttcaggccgtcaccgatgtgattcggatcaacgggagggacgtggtgcttgccacattctctacaccctacaacagcattcccggatccgccgtatgtgcttatgacatgctcgatatagccagtgttttcactggacgattcaaagagcaaaaatcccccgatagcacctggacaccagtgccggatgaaagagtcccaaaacctcgcccaggctgttgcgctggctccagtagtttggagaggtatgcaacatctaacgaatttccagatgatacgctgaatttcatcaaaacacatcccctgatggacgaggcagtgccttcaatcttcaatcggccatggtttctccgaaccatggttcgctacagattaactaagattgcagtggacactgctgctggtccatatcagaaccatactgttgttttcctggggtccgagaagggcattatcctcaaatttctagcaaggatcggaaatagcggttttctaaacgacagtttatttctggaggaaatgagcgtttacaactctgaaaaatgttcttacgacggtgtcgaggacaagagaatcatggggatgcaactagatagagccagcagttccctctatgtggccttcagtacctgtgtcatcaaggtgcccctcggccgctgcgaacggtacgggaaatgtaaaaagacatgcatcgcgtctcgagatccgtattgcggctggataaaagaaggaggtgcttgctcgcatctatcaccaaattcaaggctgacattcgagcaagacattgagagaggaaacacagacggcctcggagactgccacaactcatttgtcgcgcttaatggacacagctctagccttctgccctctactactacgtcagactctaccgcccaagaggggtacgaaagtagaggaggcatgctggactggaaacatttgctggactcacctgattctaccgaccctctcggtgcagtctcttctcataaccaccaggataagaagggggtcattcgagaatcttacctcaaagggcacgaccaactggtccctgtgacgttgctcgccattgctgtaatcctggctttcgtgatgggagctgtcttctccggtatcaccgtgtactgcgtgtgcgatcaccgaagaaaggacgtagctgtggtccaacgaaaggagaaagaattaacacattctcgtcgcggatccatgtcctctgttacaaaactgtccggtctctttggcgacacgcagagcaaagatccaaaaccagaagccatactcacacctttgatgcataacgggaagttggcaactcccggcaatactgccaagatgctgatcaaagccgatcagcaccatctggatctcaccgctctaccaactcctgagtccacccctacccttcagcagaagagaaagccgtcaaggggctcacgtgagtgggaaaggaatcaaaatctcataaatgcatgtaccaaggacatgccaccgatggggagccccgtgatccccactgacctcccactgagagccagcccctctcacattccctctgtcgtggtgttgccgatcacccagcaggggtaccagcacgagtacgtggaccagcctaagatgtcggaggtggcgcagatggccttggaagaccaggcggctacgttggagtacaaaactatcaaggaacacctgtcgagcaaatcccccaatcatggcgtcaatctggtggagaatttagacagtctgccacctaaggtaccacagcgagaagcttctctcggcccccccggggcctctctctctcagacgggactctcgaagcggctcgaaatgcaccacagtagctcttatggagtggattacaagcgatcctatcctaccaactccctaactcggtcacatcaggctaccacgcttaagcgtaacaacaccaactctagcaattcctctcatctgagccgcaaccagagcttcggacggggggacaacccccccccagcccctcagcgtgtggactctattcaggtacactcgagtcagccatccgggcaggcagtaacagtttcacggcagcctagtttgaacgcctataacagcctgacgcggagcggactaaagcgcactccaagtttaaagcccgatgtgcctcctaaaccaagcttcgcacctctctccacttccatgaaaccaaatgacgcttgcacctag

SEQ ID NO: 205838 - DNA, 1374 bp, Artificial Sequence
  derived and/or modified sequence
atgaaaaccggtcacagcagctcactactccccagcactacgacatctgacagtaccgcccaggaagggtacgaatcacgcggggggatgctcgattggaaacacttgctcgatagtccggattcgactgaccccctcggtgctgtatcgtctcataatcaccaggacaagaagggtgtaatcagagaaagctacctaaagggccacgatcaactagtgcctgtgacgctgctcgctattgcagtcatcctagcattcgtcatgggagctgtattctctgggataactgtttactgcgtctgcgatcatcgccgcaaggatgtggccgttgtgcagcggaaggaaaaagagctgacgcattcacgcagaggaagtatgtcctcagtgacaaaactgtccggtctgtttggcgatacccagagcaaggatcccaagcctgaagccattttgacccccttgatgcacaatgggaaactggcgacgcctggcaatacggccaaaatgctcataaaagctgatcagcatcatttggacctgaccgcactcccaaccccggaatccaccccaaccctgcaacagaagcgtaagccaagtaggggttcccgcgaatgggagcggaatcagaaccttataaacgcctgcacgaaagatatgccacctatgggcagccctgtcattcccaccgacctgcccctccgcgccagtccttcacacatcccatcagtggtcgtgttgccaatcactcagcaagggtatcaacatgaatatgtcgaccagccgaagatgtccgaagtggcacaaatggccctggaggaccaagcggccacactggaatacaagaccataaaagagcacctgtctagcaaatctccaaatcacggcgtcaacttggtcgaaaacttagatagcctcccccccaaagtccctcaacgggaagccagcttgggcccacccggagctagcctcagccaaacaggcttgagtaaaagactggagatgcatcactccagctcatatggtgtcgactataagcgctcctaccctactaattctctcacacggtctcatcaggccaccacattgaagcgtaataatactaacagttcgaatagtagccatctatctaggaaccagtcatttggacgcggcgacaacccgccccccgcaccacagagagttgattcaattcaagtgcactcctcccagccttccggtcaggctgtaacagtgtcccggcagcccagcctgaatgcatataatagtctgacccggagcggcctgaaaagaaccccgtcactgaaaccagatgtgccccccaagccaagctttgcccccctaagcacctcaatgaagccaaatgatgcctgcacctag

SEQ ID NO: 205839 - DNA, 3093 bp, Artificial Sequence
  derived and/or modified sequence
atgaggtctgaggccctgctgctgtacttcaccctgctgcactttgctggggccggcttccctgaggacagcgagcccatcagcatcagccacggcaactacaccaagcagtaccctgtgtttgtgggccacaagccaggcaggaacaccacccagaggcaccggctggacatccagatgatcatgatcatgaatggcaccctgtacatcgccgcccgggaccacatctacacagtggacatcgacaccagccacacagaggagatctactgcagcaagaagctgacctggaagagccggcaggctgatgtggacacctgcaggatgaagggcaagcacaaggatgagtgccacaacttcatcaaggtgctgctgaagaagaatgatgatgccctgtttgtgtgtggcaccaatgccttcaaccccagctgcaggaactacaagatggacaccctggagccctttggagatgagttcagcggcatggcccgctgcccctatgatgccaagcacgccaacgtggccctgtttgctgatggcaagctgtacagcgccaccgtgacagacttcctggccattgatgctgtgatctaccgcagcctgggggagagccccaccctgaggacagtgaagcatgacagcaagtggctgaaggagccctactttgtgcaggccgtggactatggagactacatctacttcttcttccgggagattgctgtggagtacaacaccatgggcaaggtggtgttcccccgggtggcccaggtgtgcaagaatgacatgggcggcagccagagggtgctggagaagcagtggaccagcttcctgaaggcccggctgaactgcagcgtgcctggggacagccacttctacttcaacatcctgcaggccgtgacagatgtgatccgcatcaatggaagagatgtggtgctggccaccttcagcaccccctacaacagcatccctggcagcgctgtgtgtgcctatgacatgctggacatcgcctctgtgttcaccggccgcttcaaggagcagaagagcccagacagcacctggacccctgtgcctgatgagcgggtgcccaagccccggcccggctgctgtgccggcagcagcagcctggagagatatgccaccagcaatgagttcccagatgacaccctgaacttcatcaagacccaccccctgatggatgaagctgtgcccagcatcttcaaccggccctggttcctgcggaccatggtgcgctaccgcctgaccaagattgctgtggacacagctgctggcccctaccagaaccacacagtggtgttcctgggcagcgagaagggcatcatcctgaagttcctggcccgcatcggcaacagcggcttcctgaatgacagcctcttcctggaggagatgtctgtgtacaacagcgagaagtgcagctatgatggagtggaggacaagaggatcatgggcatgcagctggaccgggccagcagcagcctgtatgtggccttcagcacctgtgtgatcaaggtgcccctgggccgctgtgaaagatatggcaagtgcaagaagacctgcatcgccagccgggacccctactgcggctggatcaaggagggcggggcctgcagccacctgagccccaacagccggctgacctttgagcaggacatcgagcggggcaacacagatggcctgggggactgccacaacagctttgtggccctgaatggccacagcagcagcctgctgcccagcaccaccaccagtgacagcacagcccaggagggctatgagagcagaggaggcatgctggactggaagcacctgctggacagcccagacagcacagaccccctgggcgctgtgagcagccacaaccaccaggacaagaagggcgtcatccgggagagctacctgaagggccatgaccagctggtgcctgtgaccctgctggccatcgccgtcatcctggcctttgtgatgggcgctgtgttcagcggcatcaccgtgtactgtgtgtgtgaccacaggaggaaggatgtggccgtggtgcagaggaaggagaaggagctgacccacagcagaagaggctccatgagctctgtgaccaagctgagcggcctgtttggagacacccagagcaaggaccccaagccagaggccatcctgacccccctgatgcacaacgggaagctggccaccccaggcaacacagccaagatgctgatcaaggctgaccagcaccacctggacctgacagccctgcccaccccagagagcacccccaccctgcagcagaagaggaagcccagccggggcagccgggagtgggagaggaaccagaacctgatcaatgcctgcaccaaggacatgccacccatgggcagccctgtgatccccacagacctgcccctgcgggccagccccagccacatccccagcgtggtggtgctgcccatcacccagcagggctaccagcatgaatatgtggaccagcccaagatgtctgaggtggcccagatggccctggaggaccaggccgccaccctggagtacaagaccatcaaggagcacctgagcagcaagagccccaaccacggcgtgaacctggtggagaacctggacagcctgccccccaaggtgccccagcgggaggccagcctgggccccccaggggccagcctgagccagacaggcctgagcaagaggctggagatgcaccacagcagcagctatggagtggactacaagaggagctaccccaccaacagcctgaccaggagccaccaggccaccaccctgaagaggaacaacaccaacagcagcaacagcagccacctgagcaggaaccagagctttggccgcggggacaaccccccaccagccccccagagggtggacagcatccaggtgcacagcagccagcccagcggccaggccgtgacagtgtcccggcagcccagcctgaatgcctacaacagcctgaccaggagcggcctgaagaggacccccagcctgaagccagatgtgccccccaagcccagctttgcccccctgagcacctccatgaagcccaatgatgcctgcacctag

SEQ ID NO: 205840 - DNA, 1374 bp, Artificial Sequence
  derived and/or modified sequence
atgaagacaggccacagcagcagcctgctgcccagcaccaccaccagtgacagcacagcccaggagggctatgagagccggggcggcatgctggactggaagcacctgctggacagcccagacagcacagaccccctgggcgctgtgagcagccacaaccaccaggacaagaagggcgtcatccgggagagctacctgaagggccatgaccagctggtgcctgtgaccctgctggccatcgctgtgatcctggcctttgtgatgggcgctgtgttttctggcatcaccgtgtactgtgtgtgtgaccacaggaggaaggatgtggccgtggtgcagaggaaggagaaggagctgacccacagccggcggggctccatgagctctgtgaccaagctgagcggcctgtttggagacacccagagcaaggaccccaagccagaggccatcctgacccccctgatgcacaacgggaagctggccaccccaggcaacacagccaagatgctgatcaaggctgaccagcaccacctggacctgacagccctgcccaccccagagagcacccccaccctgcagcagaagaggaagcccagccggggcagccgggagtgggagaggaaccagaacctgatcaatgcctgcaccaaggacatgccacccatgggcagccctgtgatccccacagacctgcccctgcgggccagccccagccacatccccagcgtggtggtgctgcccatcacccagcagggctaccagcacgagtatgtggaccagcccaagatgtctgaggtggcccagatggccctggaggaccaggccgccaccctggagtacaagaccatcaaggagcacctgagcagcaagagccccaaccacggcgtgaacctggtggagaacctggacagcctgccccccaaggtgccccagcgggaggccagcctgggccccccaggggccagcctgagccagacaggcctgagcaagaggctggagatgcaccacagcagcagctatggagtggactacaagaggagctaccccaccaacagcctgaccaggagccaccaggccaccaccctgaagaggaacaacaccaacagcagcaacagcagccacctgagcaggaaccagagctttggccgcggggacaaccccccaccagccccccagagggtggacagcatccaggtgcacagcagccagcccagcggccaggccgtgacagtgtcccggcagcccagcctgaatgcctacaacagcctgaccaggagcggcctgaagaggacccccagcctgaagccagatgtgccccccaagcccagctttgcccccctgagcacctccatgaagcccaatgatgcctgcacctag

SEQ ID NO: 205841 - DNA, 3093 bp, Artificial Sequence
  derived and/or modified sequence
atgcggagcgaggccctgctgctgtacttcaccctgctgcacttcgctggcgcggggttcccggaagactccgagcccatctcgatttcgcatggcaattatacaaaacagtatcccgtgttcgtgggacacaaacctggccggaatacaactcagcgtcatagactcgatattcaaatgatcatgattatgaacggaaccctttatatcgccgccagggatcacatctacaccgttgacattgacacctcacacacagaagaaatttactgctctaagaaactcacttggaagtcgagacaagccgacgttgacacttgtaggatgaagggcaagcacaaggatgaatgccataatttcatcaaggtgttactcaaaaaaaacgacgacgccctctttgtgtgcggaacaaacgcattcaatcccagttgccggaattataaaatggacaccctggaacctttcggtgatgagttcagcggaatggcccgctgcccgtatgacgctaagcacgcaaacgtggccttattcgcagatggcaaattgtactccgcaaccgtgaccgatttcctggctatcgacgcggttatttaccggtccctcggcgagtcccctacgctgcgtaccgttaagcatgacagcaaatggctgaaagagccctactttgtacaggctgttgactatggagattacatctacttcttcttcagagagattgcagtagagtacaacaccatgggaaaggtcgtttttccccgggtcgctcaggtttgcaaaaacgatatggggggatctcagagggtcctggaaaaacagtggacaagcttcttgaaggcccgcttgaactgcagcgtgccgggagattctcacttttacttcaacatcctgcaagccgttaccgacgtgatcaggatcaacggcagggacgtcgtcttggctaccttttcaacaccctacaactctatcccgggcagtgctgtctgtgcctatgacatgcttgacattgcctccgtgtttaccgggcgctttaaggagcagaaaagtccagactccacctggactcctgtcccagatgaaagagttccaaaacccaggccaggttgctgtgccggcagctcctctctcgagcgctacgccacctccaatgaattcccagacgatacattgaactttatcaaaacccaccccctgatggatgaagctgtgcctagcatatttaatcgcccttggttcctacgaacgatggtgcgctaccggctgacaaaaatcgcagttgacactgcggccggaccttaccaaaatcacaccgtggtgtttctggggtcagagaaagggatcatcttgaagttcctcgccagaattggtaattccggcttcctgaacgactcactcttccttgaggaaatgtcagtctacaattctgaaaaatgttcttacgatggggtggaggataaacggatcatgggtatgcaacttgatcgggcttcttcctccttatatgtggcgttcagcacgtgtgtaatcaaagtccctctgggacggtgcgagagatacggaaagtgcaagaagacgtgcatcgcttcaagggacccgtattgcggctggatcaaggagggtggcgcatgcagccacttgtccccaaactcccggctgacatttgaacaggacatcgaaagaggaaacaccgacggactgggggactgccataacagcttcgtggccttaaatggtcatagctccagcttgctgccgtcaacaaccaccagtgattctaccgcacaggagggatacgagtctcgtggcggaatgcttgattggaagcacctccttgacagtcctgacagcacagacccactaggggcagtaagcagtcataatcaccaggacaagaaaggcgtaatccgcgagagttatcttaagggccatgaccagttagtcccagtcacacttcttgcaatagccgtcatcctggcctttgttatgggagcagttttctccggaatcactgtgtattgcgtgtgcgatcaccggcgcaaggacgtcgctgtagtacaacggaaggaaaaggaactgacccacagccgcagaggcagcatgagcagtgtcaccaaactgtcaggactctttggagacacccagagcaaagacccaaagccagaagcaatcctgacacccctgatgcacaatggcaagctcgcaacacccggtaacacggctaagatgttgattaaagcggatcaacaccacctcgacctgaccgcgctcccaacccctgaatctacccccactctccaacagaaacgcaaaccttcaagggggtcccgggagtgggagaggaaccaaaatttgataaatgcctgtactaaagacatgcccccgatgggtagccctgttattccaacagatttgccactgagggcctctccttcccacatcccatccgttgtggtcctacctattacacagcagggctaccaacatgagtacgtggaccagcctaaaatgagcgaagtcgctcagatggctttggaggatcaggccgctacactcgaatataaaacaataaaagaacatctaagctctaagtccccgaaccacggggtcaacctggtcgaaaatctcgacagcttgccccccaaggtgccccagagggaggcttccctaggacctccaggcgcttcactatcacagaccggcttatctaaacgcttggagatgcaccattctagttcttacggtgtcgactacaaacgatcataccctacaaattcactcaccaggtcccaccaagcaactacactgaagagaaacaatacgaacagcagcaattcttcacacttgtccagaaatcaatctttcgggcggggtgataacccgccccctgcgccacagagagtggattccattcaggtgcactcctcgcagccatccggacaggctgtgaccgtcagtagacaaccttcactaaatgcgtataatagcctgacccggtctgggctaaagagaacgccctccttaaagccagatgttccccccaaaccttcttttgctcctctctctacttctatgaaacctaatgatgcctgcacttag

SEQ ID NO: 205842 - DNA, 3093 bp, Artificial Sequence
  derived and/or modified sequence
atgcggagcgaggccctgctgctgtacttcaccctgctgcacttcgcaggggccggattccctgaggattctgagcccatcagcatatctcatggcaattataccaagcagtacccggtctttgtcggacacaaaccaggcagaaatactacacagcggcatagactagacatacagatgataatgatcatgaatggcacactgtatattgccgcaagagaccatatctacaccgtggacatagataccagccatactgaagaaatctattgttcaaaaaagctcacctggaagagtcgtcaggccgacgtggacacgtgtaggatgaaaggaaaacataaagacgagtgtcataattttattaaagtgctcttaaaaaagaacgatgatgccctgttcgtatgcgggacaaatgcgttcaatccctcctgtcgcaattacaagatggatacactggagccattcggagatgaattctctgggatggctcgctgtccctatgacgccaagcacgccaacgtggcgctgtttgcagatggtaaattgtacagtgccaccgtgacggatttcctcgcaatcgacgccgtcatctaccggagtctgggcgaaagccctacactacgtaccgtcaagcatgactccaaatggctgaaggagccatattttgtccaagccgtcgattacggagactacatctacttttttttcagagaaatcgctgtggagtataataccatgggaaaagtggtgttccctcgtgtggcccaggtgtgtaagaacgatatgggaggcagccagcgggtcctggagaagcagtggacctcttttcttaaggctcgtctgaattgcagcgtgccaggcgacagccacttctattttaacatcctccaagccgttaccgatgtcattcggataaatggccgggatgtcgtcctggctaccttttcgaccccgtataacagcatccctggttccgcagtttgtgcttatgacatgctggacatagcctctgtctttacaggccggttcaaggagcagaagagccccgattcaacatggacccctgtgcctgatgaacgagttcccaaaccccgcccggggtgttgcgccggttcttcctcactggaaaggtacgccacctctaatgaatttcccgacgataccttaaattttattaagacacaccctttaatggacgaagccgtgccatctatatttaatagaccctggttcctccgcactatggtgagatatcggctgactaagattgcggtcgacacagctgcaggtccatatcaaaaccatactgtggtttttctcgggagcgaaaagggaatcatcctgaagtttctggctagaattggaaatagcgggtttttgaatgattccctgtttctggaagagatgtcagtctataactctgaaaagtgctcctacgatggtgtcgaggacaaaaggatcatgggaatgcagctggacagggctagctctagcctgtacgtggctttctccacctgtgtgatcaaagttccacttggtagatgcgaaaggtacggaaagtgtaaaaagacttgtatagcatctcgcgatccgtattgtggctggataaaagagggcggcgcctgcagtcacctatcacccaactccaggctgaccttcgaacaagacattgaaagaggaaacacagatggcctcggcgattgtcataactcattcgtagccctcaatggacatagttcctcactgctgccttctaccactacatctgattctactgctcaggaaggttacgaatcacgaggtggaatgttggactggaaacatttactagattcgccagactccaccgaccccctaggggcagtgtcaagccacaaccaccaggacaagaagggggtcatcagagagtcatatctgaaaggacatgaccagttggtaccagtgaccctcctcgcgatcgccgtcattcttgcgtttgttatgggagccgtctttagtggcatcactgtctactgtgtgtgtgaccatcggcggaaggacgtcgccgttgttcagcggaaagagaaagagcttactcactctaggcgggggtccatgtcaagcgttaccaagctgtccggactctttggggacactcagagcaaggatccaaagcctgaggcaattctcacccctctcatgcacaacggcaagctggcaactcctggcaacacagccaagatgctgattaaagccgaccagcaccatttagacttaaccgctctgcctacacccgagtctactccgacgctccaacagaagcggaaaccctcccgcgggtctcgcgagtgggagcgcaaccagaacctgattaatgcctgcacaaaggacatgccccctatgggttccccggtgatcccaactgaccttccactgagggcgagcccttcacatatccccagcgtggtcgtgctgcctatcacccaacaaggctatcagcatgagtacgtggatcagcctaagatgtctgaagtcgcccaaatggccctggaagaccaggccgcgaccttggagtataagactataaaagaacacctgagctccaagagccctaatcatggtgtcaatttggtggagaatcttgactctctgcctccaaaagtcccgcagcgagaggcatctctgggcccaccgggggcctctctgtcacagacaggactgagtaaacgtcttgagatgcatcactcctcctcttatggagtggactataagcgcagttaccctacaaactcattgaccaggtcacaccaagccaccactcttaaaaggaacaacacaaacagcagcaactcatctcatctcagtagaaaccagtcctttggcagaggggacaacccaccccctgcccctcagagagttgactctatccaggtccacagttctcagccttctggacaggcagtgacggtttccaggcagccgagtcttaatgcgtataacagcctgacaagatccggtctgaagaggacaccaagtctaaaaccagatgtccctcctaagccgagtttcgctccactctctactagtatgaagccgaatgatgcttgcacctag

SEQ ID NO: 205843 - DNA, 1374 bp, Artificial Sequence
  derived and/or modified sequence
atgaagaccggccacagcagcagcctgctgcccagcaccaccacctctgactccaccgcacaggagggctatgagtcccggggcgggatgctcgattggaagcatctgctggactcacccgacagcacagacccgctcggggcggtcagcagtcataaccaccaggacaagaagggggtcatccgtgaatcctacctcaaaggacacgaccagctcgtgccggtcaccctcctggcaatcgccgtgatactggcctttgttatgggggctgtgttctcgggaatcacggtttattgcgtctgcgatcacagacgcaaagatgtggccgtagtccaaaggaaggaaaaggaactgacacattccaggcgaggctctatgagttccgttacgaaactgagcggtttattcggcgacacgcaaagcaaggatccaaaacccgaggccattctcaccccactcatgcacaacgggaaacttgccaccccaggaaatactgctaagatgcttatcaaagcggaccagcaccacctggatcttacagccctgccaacgcccgaaagcactcccacgcttcaacagaagagaaagccgtccagagggtcccgagaatgggagcgaaatcagaacctgataaatgcgtgcacaaaagacatgccacccatgggatccccagtcatacccactgacctgcctctgcgggccagtccctcccatatcccgtcagtggtggtgcttcccatcacccagcaggggtatcagcatgaatatgttgatcagcccaaaatgagtgaggtggctcagatggctctggaagatcaagccgccaccctcgaatacaaaaccatcaaggaacatctgtcaagcaagagtccgaatcatggcgtcaacttggttgagaacttggatagtctgccacccaaagtaccacagcgcgaggcctcacttggcccccccggtgcctctttaagccaaactgggctcagtaaaagactggagatgcaccactcgtctagttacggagtggactataaaaggtcatatccaaccaattctctgacgcgctcgcaccaggccactacccttaaacggaacaacacgaactccagtaacagtagccatctttctaggaaccagagctttggcaggggcgacaacccacccccagctccgcagcgagtggatagcatccaggtccacagtagtcagccgagcgggcaggctgtaaccgtttcaagacaaccctctctgaacgcctataacagtctaacacgatccggcctgaagagaacccccagcctaaagccagatgtcccgccaaagccgagctttgctccactctccacatccatgaaacccaatgacgcatgcacgtag

SEQ ID NO: 205844 - DNA, 3093 bp, Artificial Sequence
  derived and/or modified sequence
atgcgcagtgaagctttattactttacttcaccttgctgcattttgccggagccggttttcccgaggactccgaaccaatctctatcagccacgggaactataccaagcagtatcccgtgtttgttggacacaaacccggacggaacacgactcaacgccaccgactagatatccagatgatcatgatcatgaacggtacactttacatagccgctagagatcatatctacacagttgacatcgatacatcacataccgaggaaatctattgcagtaaaaaactgacctggaagagtcgacaggctgacgttgacacctgcagaatgaaaggtaagcacaaggacgaatgccacaatttcattaaagtcctactgaagaagaacgacgacgctctctttgtgtgtggtaccaacgccttcaatccttcctgtaggaactataagatggatacgctggaacctttcggcgatgagttttcagggatggcccgatgtccatacgacgccaaacacgctaatgttgcgctgttcgctgacggaaaactgtactcagccaccgtcacggattttctcgctatcgatgctgttatctacagaagcctcggagagtccccgacgcttcggacagtcaaacatgattctaagtggcttaaggaaccttactttgtgcaagcggtagactatggcgattacatctacttcttctttcgcgaaattgcggtggagtacaatacaatgggtaaggtggtcttccccagggtggcccaggtttgcaagaatgatatgggcggatcacagagagtgctggagaaacagtggacaagcttccttaaagccagactaaattgtagtgtgcccggagattcccacttctacttcaacatactgcaggcagtgacggatgtgattaggatcaatggcagggatgttgtgctcgcaacattttctactccatacaacagtatccctggatccgcagtgtgtgcgtacgatatgctcgacatcgcttcggtgttcacaggacgatttaaggagcaaaaatcacccgactctacctggaccccagtcccagacgaacgtgtgcctaaacccagacccggttgttgtgccggtagctcaagcttagagcgatacgccacgtcaaatgagttccccgatgacacattgaatttcattaagacccatcccctcatggacgaggcagtgccatccatattcaacaggccatggttcctgagaacaatggtccggtaccgactgactaagattgcggtggacaccgctgccggaccataccagaatcacacagtagtgttcctggggtctgagaaggggataatcttaaagtttctcgccaggatcgggaattcaggattccttaacgattctttattcctcgaagagatgagtgtctacaacagcgagaagtgtagttatgacggggtggaagacaagagaattatgggtatgcaactggatagggcctcttcaagcctttacgtagccttcagcacctgcgtgatcaaggtgcctctgggccgttgcgagcgctacgggaaatgtaagaaaacttgtatcgccagccgcgatccgtattgtggttggatcaaagagggaggtgcttgtagtcacctgtctccaaactccaggcttacttttgaacaggatatcgaacggggtaatacggatgggctaggcgattgtcataatagcttcgtggccttgaatgggcatagcagctccctgctgcctagcactacgacgtctgactccaccgcgcaagagggatatgagtccagaggcggtatgctcgactggaagcaccttctcgatagccctgactcgacagatccactgggtgcagtgtctagccataatcatcaggacaaaaaaggcgtgatccgggaaagctacctgaaagggcacgatcagcttgtgccagttacattgctcgcaattgcagtgatccttgcctttgtcatgggcgctgtgttcagtggaattactgtctactgcgtgtgcgaccaccgaagaaaggacgttgccgttgtgcagcgtaaagagaaggagctaacccatagccggaggggatccatgtcaagtgttacaaagctcagcggactcttcggagatacccagagtaaggatcccaagcctgaagccatcttgacacctctgatgcacaacggtaaactggctaccccaggcaacaccgccaagatgctcatcaaggctgaccagcaccacctggacctgacagctctgccgacacctgagagcacccctaccctgcagcagaagaggaaaccaagccggggatcccgcgagtgggaacgaaaccagaatctgatcaacgcatgcactaaggatatgccacctatgggctccccggtgatcccaacagacctgcctctgcgggcatcgccgtcccacatcccaagcgttgtggtgttgcccattactcaacagggctaccagcacgagtatgttgaccagccaaagatgagcgaggtggcccagatggccctcgaagaccaggctgccactctcgaatacaaaactattaaagaacatctctcaagtaagtctccgaaccacggggttaatctagtggagaatctggatagcttgcctcctaaagttccccagagagaagccagcttgggaccaccaggagcaagtttgtcccaaactggactctctaaacgtctcgagatgcaccacagctcttcatatggcgtcgactacaaaaggtcttatcccacaaatagcctgacacgctcacatcaggccacaactctcaagagaaataatacaaactcctctaattccagccatctttcccgcaaccagagctttggaagaggcgataaccctccacccgctccgcaacgcgttgactccattcaagtccattccagtcaaccatccgggcaggccgtgacagtgtcccgccagccaagccttaacgcatacaattctttaacccgcagcggcctcaagagaacgcccagcctgaagcctgacgtgccccctaagcccagcttcgcacctctgtcgacaagcatgaaacctaatgatgcatgtacttag

SEQ ID NO: 205845 - DNA, 3093 bp, Artificial Sequence
  derived and/or modified sequence
atgcggtcagaggcattgcttctgtactttaccttattgcacttcgctggcgctggctttcccgaggattctgaacctatcagtatctctcacggaaattatacaaaacagtatcccgtgtttgtagggcacaagcctggcagaaacaccacccaaagacaccgcctcgacattcagatgattatgatcatgaacggcaccctgtatatcgctgcaagggatcacatttacaccgtggatattgacacctcacacactgaagaaatttactgttcaaagaagttgacatggaagtcccgacaggccgacgtcgacacttgtcgcatgaaggggaagcacaaggatgagtgccacaatttcattaaggtacttctgaagaagaacgatgatgccctgttcgtctgcggaaccaacgccttcaatccctcatgccgaaattataagatggatacacttgaaccttttggcgatgaattctccgggatggctcggtgtccgtatgacgccaagcacgccaatgtagcgttgttcgctgacgggaaactctattctgctactgttacggatttcttagccatcgatgcagtgatctaccggagcctcggagagtctcctactctgcgcaccgtgaaacatgatagcaagtggctgaaggaaccctacttcgtgcaggccgtagactatggcgactatatctatttcttttttagggaaattgcagtggagtataacacaatggggaaggtggtctttccccgtgtggcccaggtctgtaaaaatgacatgggcggtagtcaacgggttctcgagaagcagtggacatccttcctgaaggctcggttaaattgtagcgttcctggggattcccatttttatttcaacatccttcaggcagtcacggacgtcatccggattaacggacgggatgtggttctggcaacgttctccaccccatacaactcaattcccggatctgctgtgtgtgcatatgacatgctagatatcgcgtccgtctttaccggacgctttaaggaacagaagtcaccagacagcacatggaccccagttcccgatgaaagggtgccaaaaccaagacccggatgttgtgctgggagctctagcctggaaaggtacgccacaagtaacgaattccccgacgatactctcaatttcatcaaaacccaccccctgatggacgaagccgttcctagcatctttaatcgtccttggttccttcggacaatggtgcgatatagactcactaaaatcgctgtggacacagcggctggtccataccagaaccacaccgtggtattcctgggttcagagaaaggcattatattgaaatttctggccaggatcggcaattctggctttctcaacgactctctgttcctggaggagatgtctgtttataattcagagaagtgtagctacgatggggttgaggacaaacgtattatgggcatgcagctagaccgggctagtagctccctctatgtggccttttctacctgcgttataaaggttccgctggggagatgcgagagatatgggaaatgcaagaagacatgtatcgcatctcgcgacccttattgtggatggattaaggaggggggagcctgcagtcatctcagccctaactctcgcctgactttcgaacaggacatcgagcgaggcaatactgacgggctgggggactgccataatagctttgtcgctcttaacggacactcgagctcactgctcccgagtactactacatccgacagcaccgcacaagaaggctatgaaagtagagggggaatgctagactggaaacatctgctggacagtcccgatagcactgacccattgggcgcagtctctagccacaatcaccaggacaaaaaaggagtaattagggagagctacttgaaaggacacgatcaacttgtgcctgtaaccttgctggccattgctgtcatcctcgcattcgttatgggcgcagttttttccggtatcacagtgtactgcgtgtgtgatcataggcggaaggacgttgcagttgttcagaggaaagaaaaagaacttacccattcacggagaggcagcatgtcatcagtgaccaagctcagtggattatttggggatacgcagagcaaggatcctaagcctgaagctatcttgactccacttatgcataacggcaagctagcaacccctggtaatacagcgaagatgctcattaaagctgaccagcatcatctcgacctgaccgccctgcctacccctgagtccacccccacactacaacagaagcggaagccctctagaggtagtcgggaatgggaacgcaaccaaaacctgataaacgcctgcacaaaggatatgccaccaatgggatctccggtaataccaacggaccttcctctgagagcctctccctcccatataccatctgtggtggtgttacccatcacccagcagggttatcagcatgaatacgtggaccagccaaaaatgtccgaggtggcccagatggctctggaggaccaggctgccacgctggaatacaagaccattaaagaacatctctcctcaaaaagccccaaccacggcgttaacctcgtggagaacctggacagtctccccccaaaggtcccccaacgtgaggcatcattgggtcctccaggagcttccctttcccaaacgggactctcgaaacggttggaaatgcaccattcaagtagttatggagtggattacaaacgttcttaccctacaaacagcttaacaagatcccatcaggccacgacgctgaaaaggaataatacgaacagcagcaactctagccatctatcccgaaatcagtcttttgggcgaggagataatcctcccccagccccacagagggtggattctattcaggtccacagtagtcagccgagcggacaggccgtgactgtcagtcgccagcccagcctgaacgcctacaactccctcactcggagtggactgaagcgcacgccttcgctcaagccagacgttccgccaaagccctctttcgcaccgctgagtacatctatgaagccgaatgacgcatgcacctag

SEQ ID NO: 205846 - DNA, 1374 bp, Artificial Sequence
  derived and/or modified sequence
atgaagacaggtcactcttcctctcttttaccgagtacaactacctccgattccactgctcaggagggctacgagtcaagggggggaatgctggactggaagcacctgctggatagtccagactccacagaccccttgggagctgtgtcatctcataatcaccaggataagaagggggtgattcgggagtcttacttgaagggtcatgaccaactcgtcccggtcactctcctcgctatcgccgtgatcctggccttcgtcatgggtgccgttttcagcggtattactgtgtattgcgtgtgtgatcacaggcgtaaagacgtcgctgtggttcagagaaaggaaaaagagctgacccactctcggcgtgggagtatgagcagcgtgacgaaacttagtggcctgtttggcgacactcagtctaaggaccctaaaccggaagctattctaacccccctcatgcacaatggcaaactcgccaccccgggtaataccgcaaaaatgttgatcaaagctgatcaacaccatctggatctgacagcactgcccacacccgagagtactccaacccttcagcagaagagaaaaccgtctcggggtagtcgtgaatgggaaagaaaccagaacctgataaatgcgtgcacgaaagatatgccaccgatgggctcacctgtgattccaaccgacctgccactgcgtgcctcccccagccatataccctccgtggtagtacttcccattacacagcagggctatcaacacgaatacgtggatcagccaaagatgagcgaggtggcacaaatggccttagaggatcaagccgcaaccctagagtataagactatcaaggagcacctcagcagtaagagtccgaaccacggcgttaatctggtcgaaaatctggactcactgccacccaaggttccgcaaagagaggcaagcctaggtcctccgggagcttctcttagccagaccggactgagcaaacggttggaaatgcaccactcaagctcatacggcgtcgattacaagagatcctacccgacgaatagcctgacgaggagccaccaagccaccacactgaagcgtaataacacaaattcaagcaactccagccatcttagccgtaaccagagctttggacggggtgacaacccgcctcccgctcctcagcgcgtggattcaattcaggtccattctagccagccaagcggccaggccgtgaccgtgagtcggcagccgtcactgaacgcctacaactccctgacacggtccggtctgaagcggactccatctcttaagcctgacgttccccctaagccttcctttgctcccttgtcaacatcaatgaagcctaatgacgcctgcacgtag

SEQ ID NO: 205847 - DNA, 6878 bp, Artificial Sequence
  derived and/or modified sequence
gggtcggaggagacgccagccaaagtaggcggagttgcggaaggagagtccgatctgcgcaatccagtccgggacttggctccgcccgggagcggcggcctctccggtgacagaggagtagtgagcggcacggggtgaggctgcagccaactccgctccccgcgcactcggctgcccaggcgctcggaacccagcagcggcgctcctccgcggtgccggtcgcccgcgatgcccgcttagcagcgtgtagcagcggccagcatcaccacacccgcggcaccgcgctgccggccgcagagccgggccagagccttgcacccctgccccagcccccaccccgccccccgccctgaaatgacttgttaatcggcgcagacaccaccaaggggactcaccgaagtggaatccaagtggaatttggatttggagaagagtttcttgaacatttaccctcttccttgttggttttctttttctttttcttctttttttttttggcttcttttttcctctccccttctccgctcgtcattggagatgaacacatcgcgtttgcatcccagaaagtagtcgccgcgactatttcccccaaagagacaagcacacatgtaggaatgacaaaggcttgcgaaggagagagcgcagcccgcggcccggagagatcccctcgataatggattactaaatgggatacacgctgtaccagttcgctccgagccccggccgcctgtccgtcgatgcaccgaaaagggtgaagtagagaaataaagtctccccgctgaactactatgaggtcagaagccttgctgctatatttcacactgctacactttgctggggctggtttcccagaagattctgagccaatcagtatttcgcatggcaactatacaaaacagtatccggtgtttgtgggccacaagccaggacggaacaccacacagaggcacaggctggacatccagatgattatgatcatgaacggaaccctctacattgctgctagggaccatatttatactgttgatatagacacatcacacacggaagaaatttattgtagcaaaaaactgacatggaaatctagacaggccgatgtagacacatgcagaatgaagggaaaacataaggatgagtgccacaactttattaaagttcttctaaagaaaaacgatgatgcattgtttgtctgtggaactaatgccttcaacccttcctgcagaaactataagatggatacattggaaccattcggggatgaattcagcggaatggccagatgcccatatgatgccaaacatgccaacgttgcactgtttgcagatggaaaactatactcagccacagtgactgacttccttgccattgacgcagtcatttaccggagtcttggagaaagccctaccctgcggaccgtcaagcacgattcaaaatggttgaaagaaccatactttgttcaagccgtggattacggagattatatctacttcttcttcagggaaatagcagtggagtataacaccatgggaaaggtagttttcccaagagtggctcaggtttgtaagaatgatatgggaggatctcaaagagtcctggagaaacagtggacgtcgttcctgaaggcgcgcttgaactgctcagttcctggagactctcatttttatttcaacattctccaggcagttacagatgtgattcgtatcaacgggcgtgatgttgtcctggcaacgttttctacaccttataacagcatccctgggtctgcagtctgtgcctatgacatgcttgacattgccagtgtttttactgggagattcaaggaacagaagtctcctgattccacctggacaccagttcctgatgaacgagttcctaagcccaggccaggttgctgtgctggctcatcctccttagaaagatatgcaacctccaatgagttccctgatgataccctgaacttcatcaagacgcacccgctcatggatgaggcagtgccctccatcttcaacaggccatggttcctgagaacaatggtcagataccgccttaccaaaattgcagtggacacagctgctgggccatatcagaatcacactgtggtttttctgggatcagagaagggaatcatcttgaagtttttggccagaataggaaatagtggttttctaaatgacagccttttcctggaggagatgagtgtttacaactctgaaaaatgcagctatgatggagtcgaagacaaaaggatcatgggcatgcagctggacagagcaagcagctctctgtatgttgcgttctctacctgtgtgataaaggttccccttggccggtgtgaacgatatgggaagtgtaaaaaaacctgtattgcctccagagacccatattgtggatggataaaggaaggtggtgcctgcagccatttatcacccaacagcagactgacttttgagcaggacatagagcgtggcaatacagatggtctgggggactgtcacaattcctttgtggcactgaatgggcattccagttccctcttgcccagcacaaccacatcagattcgacggctcaagaggggtatgagtctaggggaggaatgctggactggaagcatctgcttgactcacctgacagcacagaccctttgggggcagtgtcttcccataatcaccaagacaagaagggagtgattcgggaaagttacctcaaaggccacgaccagctggttcccgtcaccctcttggccattgcagtcatcctggctttcgtcatgggggccgtcttctcgggcatcaccgtctactgcgtctgtgatcatcggcgcaaagacgtggctgtggtgcagcgcaaggagaaggagctcacccactcgcgccggggctccatgagcagcgtcaccaagctcagcggcctctttggggacactcaatccaaagacccaaagccggaggccatcctcacgccactcatgcacaacggcaagctcgccactcccggcaacacggccaagatgctcattaaagcagaccagcaccacctggacctgacggccctccccaccccagagtcaaccccaacgctgcagcagaagcggaagcccagccgcggcagccgcgagtgggagaggaaccagaacctcatcaatgcctgcacaaaggacatgccccccatgggctcccctgtgattcccacggacctgcccctgcgggcctcccccagccacatccccagcgtggtggtcctgcccatcacgcagcagggctaccagcatgagtacgtggaccagcccaaaatgagcgaggtggcccagatggcgctggaggaccaggccgccacactggagtataagaccatcaaggaacatctcagcagcaagagtcccaaccatggggtgaaccttgtggagaacctggacagcctgccccccaaagttccacagcgggaggcctccctgggtcccccgggagcctccctgtctcagaccggtctaagcaagcggctggaaatgcaccactcctcttcctacggggttgactataagaggagctaccccacgaactcgctcacgagaagccaccaggccaccactctcaaaagaaacaacactaactcctccaattcctctcacctctccagaaaccagagctttggcaggggagacaacccgccgcccgccccgcagagggtggactccatccaggtgcacagctcccagccatctggccaggccgtgactgtctcgaggcagcccagcctcaacgcctacaactcactgacaaggtcggggctgaagcgtacgccctcgctaaagccggacgtaccccccaaaccatcctttgctcccctttccacatccatgaagcccaatgatgcgtgtacataatcccagggggagggggtcaggtgtcgaaccagcaggcaaggcgaggtgcccgctcagctcagcaaggttctcaactgcctcgagtacccaccagaccaagaaggcctgcggcagagccgaggacgctgggtcctcctctctgggacacaggggtactcacgaaaactgggccgcgtggtttggtgaaggtttgcaacggcggggactcaccttcattctcttccttcactttcccccacaccctacaacaggtcggacccacaaaagacttcagttatcatcacaaacatgagccaaaagcacatacctaccccatcccccacccccacacacacacacacacacacatgcacacaacacatacacacacacgcacagaggtgaacagaaactgaaacattttgtccacaacttcacgggacgtggccagactgggtttgcgttccaacctgcaaaacacaaatacattttttaaaatcaagaaaatttaaaaagacaaaaaaaaaagaattcattgataattctaactcagactttaacaatggcagaagtttactatgcgcaaatactgtgaaatgcccgccagtgttacagctttctgttgcagcagataaatgccatgttgggcaactatgtcatagatttctgctcctcctctcttttaatgaaataacgtgaccgttaacgcaagtaactctttatttattgttcaccctttttttccttaaggaaaggactcttccaaatatcatcctatgaacagctcttcagaaagcccattgaaagttaaactatttaacgtgaaatccattaactggaataattgagtttctttatttttacaataaattcactgagtaaataagttggagctggaattctgagctttgtgtttggactgtctggtctgtagctaaaggaaaaagttaggaggggaatatttatttaaatctatcagttcattgcctggtcaggtctctggcctataaacatgcaaaaaaactaattcatgttaaagtccttccagatcctaatttctaaagcaatcaggagagaaagcttttagaatggcacatcatatctcattgatgccaacatggttttgtccatggttctgactttctgtgaaggcaccagcttgcaatatgccatcccatttcaccttgcatgtgagacagcaaacaaaatccacaaatggtgtgaactaatatgctggctgctaccttgcataaattaatgatttgatcacacgggttcttcgtggggttacatctgtgaatagcctgttttccacatgtaaatttgtgccttacaccttgagttgtgtacacttgtaaactctttatgatcaactgttcccccttttgaaataagtgcagatatttatttaaccctcccttccccaccctctgccccacttccagccctctgaaagattggagtcaagcagatggaagaatgcagtggtgatagttgtcatgcgacagcctgagaacgctgggcagcaccacaccctccaattcacactgccttctagttgtgccaactggaaccaccctttggctgtgctgcgaagcatggaccccagtgttgttgtgggtgtgtcaaatcccctttcatcctcaagagctccctgcttcccttagattatttcaatacggtgatatccttatttgctagcagaaaagggactaacgtcccattcctcttttctgctgcgtccactggctagagagcaggcggtgcgcggttgggcagacacctgggaggagtctccaagccatgtgcacagcacacacgtgcagtgcacacaaagaaatgacatggaaatagatgcaggcaggctggtccctgctgtgattaacgagtaactccaagtacaaggccgaccacaatggatgctgcaaaaacgttgactggggcaaaggattttttattttattttttattttgttaattatgtttttaggggatgggaggtggtgtgtgtttttctcctcttggttttcatttgctcaagcacacaaaagggacttttgtttactctatcatgaacaaaggaactgtccacatactgtaaaccatgagcagtgttgttgttgtttttttaaacagtatatttggtggtctctttgtctgcttttatttccagttcgatcttctgggtttagttttgtctttaaaaagaattcaaaaaaagactgacaatgacagttttgagttggatagtgaaaaagtggagcctccataatcagtgtggttgccttcagacctgagtacttagctgagggtgggtgagagccctttgttccaaaagtccattagttttgctgttgtttaggagtaggtggttgttgttgtttttactttttttttttttggcttttgtaatggaatccatgttcacatcctgtgaactctgtctcctgaaaccctgaagtatttcctagaacctgaaatattgttttcttccttgaattttctctagaaatgcagaaattaggaaggtgatgggtctgtatccccctgcccccttctttcccatgcttgactcccgagagtactggcagtgcagcacccatcattgacgtaagcggctgtcttgtccagtgtttgtaggcatcactgcctcagctgttaaggagacctgtgtcaaaacttacatccacattcctacacccccacaacccatcacttctggtgttaaccctaaaatacccacatgtattgagctggtcttctgcatttaagtatttctccccagtttttttccccactgtgtgtggggggagggtccataaacccgagtgtgcctttgctttccacccttgctagacactggtagatgcaacaaactcagatttatatttgttgtaaagttgtaaaaatattgtgatgtcaccaattttccttccatctccacatcccctaacatctgattcacgacttaatgtatgttgtaagaaaagaaaaaagaaaagaaaaaaagggaaaaaa

SEQ ID NO: 205848 - DNA, 3292 bp, Artificial Sequence
  derived and/or modified sequence
aatgcgttactgtgtggactgagttcccatgactcgggctccccaggacaatgtctctttcttcaccaagctgatggtaaatatctggttagcttcatctatttaaaaccagccaagcaggaatcctagtgctggagagaggattctttttttttttgtttggtgaagtagagaaataaagtctccccgctgaactactatgaggtcagaagccttgctgctatatttcacactgctacactttgctggggctggtttcccagaagattctgagccaatcagtatttcgcatggcaactatacaaaacagtatccggtgtttgtgggccacaagccaggacggaacaccacacagaggcacaggctggacatccagatgattatgatcatgaacggaaccctctacattgctgctagggaccatatttatactgttgatatagacacatcacacacggaagaaatttattgtagcaaaaaactgacatggaaatctagacaggccgatgtagacacatgcagaatgaagggaaaacataaggatgagtgccacaactttattaaagttcttctaaagaaaaacgatgatgcattgtttgtctgtggaactaatgccttcaacccttcctgcagaaactataagatggatacattggaaccattcggggatgaattcagcggaatggccagatgcccatatgatgccaaacatgccaacgttgcactgtttgcagatggaaaactatactcagccacagtgactgacttccttgccattgacgcagtcatttaccggagtcttggagaaagccctaccctgcggaccgtcaagcacgattcaaaatggttgaaagaaccatactttgttcaagccgtggattacggagattatatctacttcttcttcagggaaatagcagtggagtataacaccatgggaaaggtagttttcccaagagtggctcaggtttgtaagaatgatatgggaggatctcaaagagtcctggagaaacagtggacgtcgttcctgaaggcgcgcttgaactgctcagttcctggagactctcatttttatttcaacattctccaggcagttacagatgtgattcgtatcaacgggcgtgatgttgtcctggcaacgttttctacaccttataacagcatccctgggtctgcagtctgtgcctatgacatgcttgacattgccagtgtttttactgggagattcaaggaacagaagtctcctgattccacctggacaccagttcctgatgaacgagttcctaagcccaggccaggttgctgtgctggctcatcctccttagaaagatatgcaacctccaatgagttccctgatgataccctgaacttcatcaagacgcacccgctcatggatgaggcagtgccctccatcttcaacaggccatggttcctgagaacaatggtcagataccgccttaccaaaattgcagtggacacagctgctgggccatatcagaatcacactgtggtttttctgggatcagagaagggaatcatcttgaagtttttggccagaataggaaatagtggttttctaaatgacagccttttcctggaggagatgagtgtttacaactctgaaaaatgcagctatgatggagtcgaagacaaaaggatcatgggcatgcagctggacagagcaagcagctctctgtatgttgcgttctctacctgtgtgataaaggttccccttggccggtgtgaacgatatgggaagtgtaaaaaaacctgtattgcctccagagacccatattgtggatggataaaggaaggtggtgcctgcagccatttatcacccaacagcagactgacttttgagcaggacatagagcgtggcaatacagatggtctgggggactgtcacaattcctttgtggcactgaatgggcattccagttccctcttgcccagcacaaccacatcagattcgacggctcaagaggggtatgagtctaggggaggaatgctggactggaagcatctgcttgactcacctgacagcacagaccctttgggggcagtgtcttcccataatcaccaagacaagaagggagtgattcgggaaagttacctcaaaggccacgaccagctggttcccgtcaccctcttggccattgcagtcatcctggctttcgtcatgggggccgtcttctcgggcatcaccgtctactgcgtctgtgatcatcggcgcaaagacgtggctgtggtgcagcgcaaggagaaggagctcacccactcgcgccggggctccatgagcagcgtcaccaagctcagcggcctctttggggacactcaatccaaagacccaaagccggaggccatcctcacgccactcatgcacaacggcaagctcgccactcccggcaacacggccaagatgctcattaaagcagaccagcaccacctggacctgacggccctccccaccccagagtcaaccccaacgctgcagcagaagcggaagcccagccgcggcagccgcgagtgggagaggaaccagaacctcatcaatgcctgcacaaaggacatgccccccatgggctcccctgtgattcccacggacctgcccctgcgggcctcccccagccacatccccagcgtggtggtcctgcccatcacgcagcagggctaccagcatgagtacgtggaccagcccaaaatgagcgaggtggcccagatggcgctggaggaccaggccgccacactggagtataagaccatcaaggaacatctcagcagcaagagtcccaaccatggggtgaaccttgtggagaacctggacagcctgccccccaaagttccacagcgggaggcctccctgggtcccccgggagcctccctgtctcagaccggtctaagcaagcggctggaaatgcaccactcctcttcctacggggttgactataagaggagctaccccacgaactcgctcacgagaagccaccaggccaccactctcaaaagaaacaacactaactcctccaattcctctcacctctccagaaaccagagctttggcaggggagacaacccgccgcccgccccgcagagggtggactccatccaggtgcacagctcccagccatctggccaggccgtgactgtctcgaggcagcccagcctcaacgcctacaactcactgacaaggtcggggctgaagcgtacgccctcgctaaagccggacgtaccccccaaaccatcctttgctcccctttccacatccatgaagcccaatgatgcgtgtacataa

SEQ ID NO: 205849 - DNA, 3640 bp, Artificial Sequence
  derived and/or modified sequence
tatttctaattatttgcttatgctgggcactgaattttctcttaggctgaccatatattttattaaagtagtcttgaattcaggagtggaaaaaaaaaagttatgttttagacctcaatgtaagctgaaaggaaataaaggaacttctatatttccatttctcaggctgattttccttcccctgttctcttatctgtatcatgacatgagatgtgaacctcagaaatgtaaaaacaaaaagtctagaataaagcattccttgaattttaaatgaacatgcttttagcagctggatacgaagcagactattttcaacaaattgaatgtttcccacttgtgtgagagccaaacaagtgccatacagaaagggacctcttcaatgttaccaaagctttgtggcagcatttaagtgtggtggctccatagaagtcactatagcatggacgagccacttggcttgctttttcctgctaatcaaagttttaagaagataaaaagctatctttgttatatatgttttgtctaatttgcaatattacagtctcctggggggaaatccaacttccaataataattgtaaaaaaaaaaaaagaatgcactgtacttattcttttaatctgtctttctagaggccaatattttatttatcatgtgcatggtgatcatacttcaaggctggagcttttggagttgttgtgagtctgccctactttccaccaaaggcaccaattatacatgcacagtagttgcccttgtatcttttaaaaattgttcaagaggttgttctgtgtaagccaataactccacttgaaaatcacgaggaggtcatattttatttctgccagagagaacaggtatcattgtgccagcttggatcaaagcacctgatacaatctgtatttaaccttgtggaatgatggagggagagcttacaaacgaattcacaggaaatggctagagtttctgctgtaactctcaacctagccattcttctcatattatcctatggtagcttatctgaacctcagaaatctatccttttctaatttgaatcattttagtcaacgcagcctcagaaacggaaaccatctattgaaataatacacaaaagggacagccgtaatagcgtgtagccgttgaagcctccattccaatgaaaagacagtgggaatagatccctttggaaaccactaactaatcccagaaagaggaatgcctgtgaagttgagttgaacctgaagactagacacactgtagaacctccataggaagggtgcagagtaactgagttacttgtgatagggacaagacttacccactaccagaaacctgccccatcggtcacaaatgggattcccagagtggacactttctgtgtttagtgctgccatgggaatatcaaagaaggacactggcctttcttgagcacctatgtgtcagacactgtgcaagatgctttcaccattatgtcactatcctcccaacaccgagaggtatctttatccccactgggtgcacaggaagaggttaagtgattccctgaggcccacccagcaagtatgagagataggatctggcccttcattttctaactacaagttcaatgggctttctgctgaacacaccccacaccaccaccaccaccaccaccaccaccaccactaagccgtgtcatttctagggccatctcctctcagtcttacagccagcttgggtgtcccacctccaggcctctgcgcaaagggaatgtgggtctctctggtgatgttttcctaactgtatttgtgatgaaaacagggcattccagttccctcttgcccagcacaaccacatcagattcgacggctcaagaggggtatgagtctaggggaggaatgctggactggaagcatctgcttgactcacctgacagcacagaccctttgggggcagtgtcttcccataatcaccaagacaagaagggagtgattcgggaaagttacctcaaaggccacgaccagctggttcccgtcaccctcttggccattgcagtcatcctggctttcgtcatgggggccgtcttctcgggcatcaccgtctactgcgtctgtgatcatcggcgcaaagacgtggctgtggtgcagcgcaaggagaaggagctcacccactcgcgccggggctccatgagcagcgtcaccaagctcagcggcctctttggggacactcaatccaaagacccaaagccggaggccatcctcacgccactcatgcacaacggcaagctcgccactcccggcaacacggccaagatgctcattaaagcagaccagcaccacctggacctgacggccctccccaccccagagtcaaccccaacgctgcagcagaagcggaagcccagccgcggcagccgcgagtgggagaggaaccagaacctcatcaatgcctgcacaaaggacatgccccccatgggctcccctgtgattcccacggacctgcccctgcgggcctcccccagccacatccccagcgtggtggtcctgcccatcacgcagcagggctaccagcatgagtacgtggaccagcccaaaatgagcgaggtggcccagatggcgctggaggaccaggccgccacactggagtataagaccatcaaggaacatctcagcagcaagagtcccaaccatggggtgaaccttgtggagaacctggacagcctgccccccaaagttccacagcgggaggcctccctgggtcccccgggagcctccctgtctcagaccggtctaagcaagcggctggaaatgcaccactcctcttcctacggggttgactataagaggagctaccccacgaactcgctcacgagaagccaccaggccaccactctcaaaagaaacaacactaactcctccaattcctctcacctctccagaaaccagagctttggcaggggagacaacccgccgcccgccccgcagagggtggactccatccaggtgcacagctcccagccatctggccaggccgtgactgtctcgaggcagcccagcctcaacgcctacaactcactgacaaggtcggggctgaagcgtacgccctcgctaaagccggacgtaccccccaaaccatcctttgctcccctttccacatccatgaagcccaatgatgcgtgtacataatcccagggggagggggtcaggtgtcgaaccagcaggcaaggcgaggtgcccgctcagctcagcaaggttctcaactgcctcgagtacccaccagaccaagaaggcctgcggcagagccgaggacgctgggtcctcctctctgggacacaggggtactcacgaaaactgggccgcgtggtttggtgaaggtttgcaacggcggggactcaccttcattctcttccttcactttcccccacaccctacaacaggtcggacccacaaaagacttcagttatcatcacaaacatgagccaaaagcacatacctaccccatcccccacccccacacacacacacacacacacatgcacacaacacatacacacacacgcacagaggtgaacagaaactgaaacattttgtccacaacttcacgggacgtggccagactgggtttgcgttccaacctgcaaaacacaaatacattttttaaaatc

SEQ ID NO: 205850 - protein, 270 aa, Artificial Sequence
  derived and/or modified sequence
MRQQQLESEQFLFFEDQLKKQELARGQMRSQQTSGLSEQIDGSALSCFSTHQNNSLLNVFADQPNKSDATNYASHSPPVNRALTPAATLSAVQNLVVEGLRCVVLPEDLCHKFLQLAESNTVRGIETCGILCGKLTHNEFTITHVIVPKQSAGPDYCDMENVEELFNVQDQHDLLTLGWIHTHPTQTAFLSSVDLHTHCSYQLMLPEAIAIVCSPKHKDTGIFRLTNAGMLEVSACKKKGFHPHTKEPRLFSICKHVLVKDIKIIVLDLR

SEQ ID NO: 205851 - protein, 436 aa, Artificial Sequence
  derived and/or modified sequence
MDQPFTVNSLKKLAAMPDHTDVSLSPEERVRALSKLGCNITISEDITPRRYFRSGVEMERMASVYLEEGNLENAFVLYNKFITLFVEKLPNHRDYQQCAVPEKQDIMKKLKEIAFPRTDELKNDLLKKYNVEYQEYLQSKNKYKAEILKKLEHQRLIEAERKRIAQMRQQQLESEQFLFFEDQLKKQELARGQMRSQQTSGLSEQIDGSALSCFSTHQNNSLLNVFADQPNKSDATNYASHSPPVNRALTPAATLSAVQNLVVEGLRCVVLPEDLCHKFLQLAESNTVRGIETCGILCGKLTHNEFTITHVIVPKQSAGPDYCDMENVEELFNVQDQHDLLTLGWIHTHPTQTAFLSSVDLHTHCSYQLMLPEAIAIVCSPKHKDTGIFRLTNAGMLEVSACKKKGFHPHTKEPRLFSICKHVLVKDIKIIVLDLR

SEQ ID NO: 205852 - protein, 461 aa, Artificial Sequence
  derived and/or modified sequence
MDQPFTVNSLKKLAAMPDHTDVSLSPEERVRALSKLGCNITISEDITPRRYFRSGVEMERMASVYLEEGNLENAFVLYNKFITLFVEKLPNHRDYQQCAVPEKQDIMKKLKEIAFPRTDELKNDLLKKYNVEYQEYLQSKNKYKAEILKKLEHQRLIEAERKRIAQMRQQQLESEQFLFFEDQLKKQELARGQMRSQQTSGLSEQIDGSALSCFSTHQNNSLLNVFADQPNKSDATNYASHSPPVNRALTPAATLSAVQNLVVEGLRCVVLPEDLCHKFLQLAESNTVRGIETCGILCGKLTHNEFTITHVIVPKQSAGPDYCDMENVEELFNVQDQHDLLTLGWIHTHPTQTAFLSSVDLHTHCSYQLMLPEAIAIVCSPKHKDTGIFRLTNAGMLEVSACKKKGFHPHTKEPRLFSIQKFLSGIISGTALEMEPLKIGYGPNGFPLLGISRSSSPSEQL

SEQ ID NO: 205853 - DNA, 813 bp, Artificial Sequence
  derived and/or modified sequence
atgagacagcagcagctggagagcgagcagttcctgttcttcgaggaccagctgaagaagcaggagctggccagaggccagatgagaagccagcagaccagcggcctgagcgagcagatcgacggcagcgccctgagctgcttcagcacccaccagaacaacagcctgctgaacgtgttcgccgaccagcccaacaagagcgacgccaccaactacgccagccacagcccccccgtgaacagagccctgacccccgccgccaccctgagcgccgtgcagaacctggtggtggagggcctgagatgcgtggtgctgcccgaggacctgtgccacaagttcctgcagctggccgagagcaacaccgtgagaggcatcgagacctgcggcatcctgtgcggcaagctgacccacaacgagttcaccatcacccacgtgatcgtgcccaagcagagcgccggccccgactactgcgacatggagaacgtggaggagctgttcaacgtgcaggaccagcacgacctgctgaccctgggctggatccacacccaccccacccagaccgccttcctgagcagcgtggacctgcacacccactgcagctaccagctgatgctgcccgaggccatcgccatcgtgtgcagccccaagcacaaggacaccggcatcttcagactgaccaacgccggcatgctggaggtgagcgcctgcaagaagaagggcttccacccccacaccaaggagcccagactgttcagcatctgcaagcacgtgctggtgaaggacatcaagatcatcgtgctggacctgagatag

SEQ ID NO: 205854 - DNA, 1311 bp, Artificial Sequence
  derived and/or modified sequence
atggaccagcccttcaccgtgaacagcctgaagaagctggccgccatgcccgaccacaccgacgtgagcctgagccccgaggagagagtgagagccctgagcaagctgggctgcaacatcaccatcagcgaggacatcacccccagaagatacttcagaagcggcgtggagatggagagaatggccagcgtgtacctggaggagggcaacctggagaacgccttcgtgctgtacaacaagttcatcaccctgttcgtggagaagctgcccaaccacagagactaccagcagtgcgccgtgcccgagaagcaggacatcatgaagaagctgaaggagatcgccttccccagaaccgacgagctgaagaacgacctgctgaagaagtacaacgtggagtaccaggagtacctgcagagcaagaacaagtacaaggccgagatcctgaagaagctggagcaccagagactgatcgaggccgagagaaagagaatcgcccagatgagacagcagcagctggagagcgagcagttcctgttcttcgaggaccagctgaagaagcaggagctggccagaggccagatgagaagccagcagaccagcggcctgagcgagcagatcgacggcagcgccctgagctgcttcagcacccaccagaacaacagcctgctgaacgtgttcgccgaccagcccaacaagagcgacgccaccaactacgccagccacagcccccccgtgaacagagccctgacccccgccgccaccctgagcgccgtgcagaacctggtggtggagggcctgagatgcgtggtgctgcccgaggacctgtgccacaagttcctgcagctggccgagagcaacaccgtgagaggcatcgagacctgcggcatcctgtgcggcaagctgacccacaacgagttcaccatcacccacgtgatcgtgcccaagcagagcgccggccccgactactgcgacatggagaacgtggaggagctgttcaacgtgcaggaccagcacgacctgctgaccctgggctggatccacacccaccccacccagaccgccttcctgagcagcgtggacctgcacacccactgcagctaccagctgatgctgcccgaggccatcgccatcgtgtgcagccccaagcacaaggacaccggcatcttcagactgaccaacgccggcatgctggaggtgagcgcctgcaagaagaagggcttccacccccacaccaaggagcccagactgttcagcatctgcaagcacgtgctggtgaaggacatcaagatcatcgtgctggacctgagatag

SEQ ID NO: 205855 - DNA, 1386 bp, Artificial Sequence
  derived and/or modified sequence
atggaccagcccttcaccgtgaacagcctgaagaagctggccgccatgcccgaccacaccgacgtgagcctgagccccgaggagagagtgagagccctgagcaagctgggctgcaacatcaccatcagcgaggacatcacccccagaagatacttcagaagcggcgtggagatggagagaatggccagcgtgtacctggaggagggcaacctggagaacgccttcgtgctgtacaacaagttcatcaccctgttcgtggagaagctgcccaaccacagagactaccagcagtgcgccgtgcccgagaagcaggacatcatgaagaagctgaaggagatcgccttccccagaaccgacgagctgaagaacgacctgctgaagaagtacaacgtggagtaccaggagtacctgcagagcaagaacaagtacaaggccgagatcctgaagaagctggagcaccagagactgatcgaggccgagagaaagagaatcgcccagatgagacagcagcagctggagagcgagcagttcctgttcttcgaggaccagctgaagaagcaggagctggccagaggccagatgagaagccagcagaccagcggcctgagcgagcagatcgacggcagcgccctgagctgcttcagcacccaccagaacaacagcctgctgaacgtgttcgccgaccagcccaacaagagcgacgccaccaactacgccagccacagcccccccgtgaacagagccctgacccccgccgccaccctgagcgccgtgcagaacctggtggtggagggcctgagatgcgtggtgctgcccgaggacctgtgccacaagttcctgcagctggccgagagcaacaccgtgagaggcatcgagacctgcggcatcctgtgcggcaagctgacccacaacgagttcaccatcacccacgtgatcgtgcccaagcagagcgccggccccgactactgcgacatggagaacgtggaggagctgttcaacgtgcaggaccagcacgacctgctgaccctgggctggatccacacccaccccacccagaccgccttcctgagcagcgtggacctgcacacccactgcagctaccagctgatgctgcccgaggccatcgccatcgtgtgcagccccaagcacaaggacaccggcatcttcagactgaccaacgccggcatgctggaggtgagcgcctgcaagaagaagggcttccacccccacaccaaggagcccagactgttcagcatccagaagttcctgagcggcatcatcagcggcaccgccctggagatggagcccctgaagatcggctacggccccaacggcttccccctgctgggcatcagcagaagcagcagccccagcgagcagctgtag

SEQ ID NO: 205856 - DNA, 813 bp, Artificial Sequence
  derived and/or modified sequence
atgaggcagcaacagctggaatccgaacagtttctgttcttcgaagaccagctgaagaaacaggagttggccaggggccagatgagatcccagcaaaccagcggtctttccgagcagatagacgggtctgctctgtcttgcttttcaacacaccagaacaactcactgctgaatgtgttcgcggatcaacctaacaaaagcgatgctactaactatgcctcccacagcccacccgtgaaccgagcactgacccccgccgctactctaagtgctgttcagaacctcgtggtcgaaggattgcggtgtgtcgtgttacctgaggatttgtgtcataaatttttgcagttggctgagtccaatacggttaggggaatcgaaacctgcgggattctgtgcgggaaactcactcacaatgaattcacgattacccacgtaatcgtccccaagcagtctgcggggcccgattactgtgatatggagaatgtggaagaactgtttaatgttcaagatcagcacgacctacttacactcgggtggattcatacccaccctactcagactgcctttttgtcgtctgtggacctccacactcactgctcataccagctgatgcttccagaagcaattgcgattgtctgctcccctaagcataaagacaccggcatcttcagattgacgaatgctggtatgctggaggtgtcagcatgtaagaagaaaggattccaccctcatacaaaggagcccagactgttctccatatgtaaacacgttcttgtaaaggatatcaagatcatcgtgctggacctgcgatag

SEQ ID NO: 205857 - DNA, 1311 bp, Artificial Sequence
  derived and/or modified sequence
atggaccagcccttcaccgtgaattcactgaagaagctggccgccatgccagaccatacggacgttagcctgagtcctgaggagagagtgcgcgccctctcaaagctgggctgcaatattactattagcgaagacattactcccagacggtatttcaggtccggagttgaaatggagcggatggcctcagtgtatttggaagaaggaaatttggaaaatgcttttgtcctgtataataaattcattaccttattcgtggaaaaactgcccaaccacagagattaccagcagtgtgcagtccctgaaaagcaggatatcatgaaaaagctaaaggaaatcgcctttcccaggactgatgaactgaaaaacgatctgctgaagaagtacaatgtggagtatcaggagtacctgcagtcaaagaataaatacaaggcagaaatcctgaagaagctggagcatcagcggctgattgaagctgagaggaagcgcatcgcccaaatgagacagcagcaactcgaatctgagcaatttctcttctttgaggaccagctgaagaaacaagagttagctcgggggcagatgcggagccagcagacctctggcctgagcgagcagattgacggctccgcactctcctgcttttcaacacatcagaacaattcactgctgaatgtgtttgccgatcagcccaataagagtgacgctacaaattatgcctctcactcccctccggtgaatcgcgcactcacgcccgctgccactctgtcagctgtgcagaacctagtggtggagggtctgaggtgcgtggtactgcccgaggacctgtgtcacaaattcttgcagcttgcggagagcaataccgttcgggggatcgaaacgtgcggcatcctgtgcggaaaactgactcacaacgagttcaccatcacacatgtaattgttcccaaacagtcagccggcccggattattgcgatatggagaatgtggaggagctgtttaatgtccaggatcagcacgacctacttacgttaggatggattcatactcacccaacacagactgcattcctctcctctgtcgatctccacacccactgttcttaccagttgatgctccccgaagccattgcgatcgtatgctcacccaagcacaaggacactggcatttttagattgacgaacgctggtatgttggaggtcagcgcctgcaagaaaaaaggttttcacccacatactaaggaacccagactgttcagcatttgcaagcacgtgctcgtcaaggacatcaagatcatcgtcctcgacttgaggtag

SEQ ID NO: 205858 - DNA, 1311 bp, Artificial Sequence
  derived and/or modified sequence
atggaccagccgttcacggtcaacagcctgaaaaaattagctgcaatgcccgaccacactgacgtaagcttaagccccgaagagagagtccgggctctttctaaattgggttgcaacattactataagcgaagatattacaccgagacgatacttccggtccggtgtggagatggagcggatggcgtccgtgtacctggaagagggaaatctcgaaaacgctttcgtgctgtacaacaagtttatcacactgttcgtggagaagttgccaaaccaccgagactaccagcagtgcgcggtaccggaaaagcaggatattatgaaaaagttgaaagaaatcgccttccctcggacagacgaactaaaaaatgaccttttgaaaaaatacaacgtggagtatcaggagtacctgcagtctaaaaataaatataaggcggagatattgaagaagctggaacatcagcgactgattgaagctgagcgaaagaggatcgcacaaatgaggcagcaacagctggaaagcgagcagttcctgttttttgaagaccagctcaaaaaacaggaactcgcacggggtcaaatgcggtcgcagcagacatccgggctctccgaacagatcgacggatctgcattgtcatgtttttctacccaccagaataactccttactcaatgttttcgccgaccagccaaacaagagcgacgcaacaaattacgcctcccattcgccacccgttaatagagccttgactcccgccgcaaccctctcagctgtccagaatctcgtagtggagggactgcgctgtgtcgttctccccgaagatctttgccataagtttctacagctcgcggagagcaacactgtcagaggcattgagacctgcgggattctttgcggcaaactgacccacaacgaatttactattactcatgtaatagtacccaaacagtccgctggccccgattactgcgacatggagaacgtggaggaactcttcaatgtacaggaccagcatgacttgctaacactgggttggattcatacacacccaacccagacggcattccttagttccgtggatcttcacacccactgctcataccagctcatgctccctgaagcaatcgccatagtctgctctcccaagcataaggacacagggattttccgactcactaatgctggcatgttagaagtctccgcatgtaaaaaaaagggcttccatccacatacaaaagagcccaggctgtttagcatatgtaaacacgtcctggtcaaagacattaagatcatcgtgctcgatctgcgctag

SEQ ID NO: 205859 - DNA, 1386 bp, Artificial Sequence
  derived and/or modified sequence
atggaccagccctttactgtcaacagcctcaagaagctcgctgctatgcctgaccatacagatgtctcactctccccagaagagcgtgtcagagctttgagtaaactaggctgcaatataacgatatctgaggatattaccccaagacgatatttccgttctggggtcgagatggagcgcatggcttctgtttacttagaggaggggaacctggagaatgcgtttgtattatacaacaagtttattacactattcgtcgaaaaattgcccaaccatcgggactatcagcaatgtgccgtgcccgagaaacaggacatcatgaagaagctgaaagagatagcttttcctcggaccgacgagctgaagaatgacctcttaaagaagtataacgttgagtatcaggagtatctccagagcaaaaataaatacaaggcagaaatcctaaaaaagctcgaacaccagcgacttatcgaagcggaacggaagcgaattgcccagatgcgccaacagcagctagaaagcgaacaattccttttttttgaagaccagctcaagaagcaagagctcgcacgaggccagatgcggtctcagcagacaagcggactgtctgagcagattgacgggtcagccctgtcttgtttctctacgcaccagaataactctctcctgaacgtgttcgcagatcagcccaataagtctgacgcaaccaattatgcttcacactccccgcccgtcaatcgcgcattaaccccggccgccactctgtcggccgtgcagaatcttgttgtagaaggcctgaggtgtgtagttctgcccgaggacctgtgccataagtttctgcagctagctgaatctaatacggttcggggcatcgaaacgtgtggcattctgtgcggaaagcttactcacaacgaattcactattacccatgtcatcgtgcccaaacaatccgccggacccgactactgcgatatggaaaacgtcgaagagctgttcaacgtccaggatcaacacgaccttctcaccctgggctggatacatacccaccctacccagacagcctttctgtccagtgtcgatcttcacacccattgttcctaccagctgatgctgcctgaggctatcgcgatagtttgctctccgaaacacaaagacaccggcatcttccggctgacgaacgcggggatgttggaggtgtcagcttgtaagaagaaggggttccacccccatacgaaagagcccaggctgttctccattcagaaatttctgtccggcatcatttcaggcacagctctggaaatggagccactcaaaatcgggtatggaccaaatggattccccttactggggatcagtaggtcttcgtctccatccgaacaactgtag

SEQ ID NO: 205860 - DNA, 813 bp, Artificial Sequence
  derived and/or modified sequence
atgaggcagcagcagctggagagcgagcagttcctgttctttgaggaccagctgaagaagcaggagctggcccggggccagatgaggagccagcagaccagcggcctgtctgagcagattgatggcagcgccctgagctgcttcagcacccaccagaacaacagcctgctgaatgtgtttgctgaccagcccaacaagagtgatgccaccaactatgccagccacagcccccctgtgaacagagccctgaccccagctgccaccctgtctgctgtgcagaacctggtggtggagggcctgcgctgtgtggtgctgcctgaggacctgtgccacaagttcctgcagctggccgagagcaacacagtgcggggcatcgagacctgtggcatcctgtgtgggaagctgacccacaatgagttcaccatcacccacgtgattgtgcccaagcagagcgctggccctgactactgtgacatggagaatgtggaggagctgttcaacgtgcaggaccagcacgacctgctgaccctgggctggatccacacccaccccacccagacagccttcctgagctctgtggacctgcacacccactgcagctaccagctgatgctgcctgaggccatcgccatcgtgtgcagccccaagcacaaggacaccggcatcttccggctgaccaatgccggcatgctggaggtgtctgcctgcaagaagaagggcttccacccccacaccaaggagcccaggctcttcagcatctgcaagcacgtgctggtgaaggacatcaagatcatcgtgctggacctgaggtag

SEQ ID NO: 205861 - DNA, 1311 bp, Artificial Sequence
  derived and/or modified sequence
atggaccagcccttcaccgtgaacagcctgaagaagctggccgccatgccagaccacacagatgtgtccctgagccctgaggagcgggtgcgggccctgagcaagctgggctgcaacatcaccatcagcgaggacatcaccccccggcgctacttccgcagcggcgtggagatggagaggatggcctctgtgtacctggaggagggcaacctggagaatgcctttgtgctgtacaacaagttcatcaccctgtttgtggagaagctgcccaaccaccgggactaccagcagtgtgctgtgcctgagaagcaggacatcatgaagaagctgaaggagatcgccttccccaggacagatgagctgaagaatgacctgctgaagaagtacaacgtggagtaccaggagtacctgcagagcaagaacaagtacaaggccgagatcctgaagaagctggagcaccagaggctgattgaagctgagaggaagagaattgcccagatgaggcagcagcagctggagagcgagcagttcctgttctttgaggaccagctgaagaagcaggagctggcccggggccagatgaggagccagcagaccagcggcctgtctgagcagattgatggcagcgccctgagctgcttcagcacccaccagaacaacagcctgctgaatgtgtttgctgaccagcccaacaagagtgatgccaccaactatgccagccacagcccccctgtgaacagagccctgaccccagctgccaccctgtctgctgtgcagaacctggtggtggagggcctgcgctgtgtggtgctgcctgaggacctgtgccacaagttcctgcagctggccgagagcaacacagtgcggggcatcgagacctgtggcatcctgtgtgggaagctgacccacaatgagttcaccatcacccacgtgattgtgcccaagcagagcgctggccctgactactgtgacatggagaatgtggaggagctgttcaacgtgcaggaccagcacgacctgctgaccctgggctggatccacacccaccccacccagacagccttcctgagctctgtggacctgcacacccactgcagctaccagctgatgctgcctgaggccatcgccatcgtgtgcagccccaagcacaaggacaccggcatcttccggctgaccaatgccggcatgctggaggtgtctgcctgcaagaagaagggcttccacccccacaccaaggagcccaggctcttcagcatctgcaagcacgtgctggtgaaggacatcaagatcatcgtgctggacctgaggtag

SEQ ID NO: 205862 - DNA, 1386 bp, Artificial Sequence
  derived and/or modified sequence
atggaccagcccttcaccgtgaacagcctgaagaagctggccgccatgccagaccacacagatgtgtccctgagccctgaggagcgggtgcgggccctgagcaagctgggctgcaacatcaccatcagcgaggacatcaccccccggcgctacttccgcagcggcgtggagatggagaggatggcctctgtgtacctggaggagggcaacctggagaatgcctttgtgctgtacaacaagttcatcaccctgtttgtggagaagctgcccaaccaccgggactaccagcagtgtgctgtgcctgagaagcaggacatcatgaagaagctgaaggagatcgccttccccaggacagatgagctgaagaatgacctgctgaagaagtacaacgtggagtaccaggagtacctgcagagcaagaacaagtacaaggccgagatcctgaagaagctggagcaccagaggctgattgaagctgagaggaagagaattgcccagatgaggcagcagcagctggagagcgagcagttcctgttctttgaggaccagctgaagaagcaggagctggcccggggccagatgaggagccagcagaccagcggcctgtctgagcagattgatggcagcgccctgagctgcttcagcacccaccagaacaacagcctgctgaatgtgtttgctgaccagcccaacaagagtgatgccaccaactatgccagccacagcccccctgtgaacagagccctgaccccagctgccaccctgtctgctgtgcagaacctggtggtggagggcctgcgctgtgtggtgctgcctgaggacctgtgccacaagttcctgcagctggccgagagcaacacagtgcggggcatcgagacctgtggcatcctgtgtgggaagctgacccacaatgagttcaccatcacccacgtgattgtgcccaagcagagcgctggccctgactactgtgacatggagaatgtggaggagctgttcaacgtgcaggaccagcacgacctgctgaccctgggctggatccacacccaccccacccagacagccttcctgagctctgtggacctgcacacccactgcagctaccagctgatgctgcctgaggccatcgccatcgtgtgcagccccaagcacaaggacaccggcatcttccggctgaccaatgccggcatgctggaggtgtctgcctgcaagaagaagggcttccacccccacaccaaggagcccaggctcttcagcatccagaagttcctgagcggcatcatcagcggcacagccctggagatggagcccctgaagattggctacggccccaacggcttccccctgctgggcatcagccgcagcagcagccccagcgagcagctgtag

SEQ ID NO: 205863 - DNA, 813 bp, Artificial Sequence
  derived and/or modified sequence
atgcggcagcagcagctggagagcgagcagttcctgttcttcgaggaccagctgaaaaagcaggaactggcacgaggacaaatgcggagtcagcagacatccggattgtctgaacagatcgacggcagtgcgctctcctgtttcagcacgcatcaaaacaattccttactgaacgtcttcgctgaccaaccaaataaaagcgacgcaacaaattacgcctcacactctcctcctgtgaatcgtgctctcacaccagcggctacgctttcagccgtacagaacctcgtagtggaaggtctcagatgtgttgtcctcccagaggacctctgtcacaagttcctccaactagcagagagcaatacagtgcgcggtatagagacttgcggcattctatgtggaaagctgacacacaacgagttcaccatcacgcacgtcatcgtcccaaagcagtcagccgggccggattactgcgacatggaaaacgtcgaggaacttttcaacgtgcaggatcagcatgacctgcttactcttggctggattcacacccacccaacccagaccgctttcctgtcttctgtggaccttcatacccattgcagttatcaactgatgctgccagaggcaatcgccattgtatgcagcccaaagcacaaagataccggcatctttcgactgaccaacgccggcatgctagaggttagcgcttgtaagaaaaaggggtttcacccccacactaaggagcctcgactattctccatatgcaaacatgttctggtcaaagacattaaaattatcgtcctagatctgagatag

SEQ ID NO: 205864 - DNA, 1311 bp, Artificial Sequence
  derived and/or modified sequence
atggaccagcccttcaccgtgaacagcctgaagaagctggccgccatgccagaccacaccgatgtatctctatctcccgaggagagagtgagagcgttgtcgaagctcggttgcaacattactatatctgaagacatcacacctcgtcgatactttcggagcggcgtggaaatggagcggatggcttcggtgtatttggaggagggcaaccttgagaacgctttcgtgttgtacaataagttcatcacactgttcgtggagaaactcccgaaccatcgggattaccagcagtgtgcggtgccggagaagcaagatatcatgaagaaactcaaagaaattgcctttcctcgtactgacgagcttaaaaatgatttactcaagaaatataacgtcgaataccaggaatatcttcaatcaaaaaataaatacaaggccgaaattctgaagaagctggagcatcagaggctcatcgaagcagagcgcaagaggatcgcacagatgcgccagcagcagctagagagtgaacagtttctattctttgaggaccagctgaagaaacaggagctggctagaggccaaatgagatcccagcaaactagtggactcagcgagcagattgacggatctgcgctgagctgcttctctacgcatcagaataactccctactgaacgtgttcgctgaccagcccaataaaagcgacgcaaccaattacgcctcccactcaccccccgttaacagggctctcaccccggcagcaacacttagcgcggtgcagaacctggtggtagagggccttagatgcgtggttctgcctgaggatctgtgtcataaatttttgcagctggccgaatccaacaccgttcgcgggattgaaacttgtggcatcctgtgcggtaaacttacccacaatgaattcaccatcactcatgtcatcgtgcccaagcagagcgccggcccagactattgcgatatggaaaacgtggaagaactgttcaatgtccaagaccagcatgatctcttaacacttggttggatccacactcaccctacacagaccgcatttctgtctagtgtggatcttcatacccactgcagctatcagttaatgctgcctgaagcgattgctatcgtgtgttcccctaagcataaagataccggaatatttagactgactaacgccggaatgcttgaggtctcggcctgtaaaaagaaagggttccaccctcacacaaaagagccaagacttttcagtatctgcaaacacgtcctcgtcaaggatattaagataatcgtgctggatttgagatag

SEQ ID NO: 205865 - DNA, 1311 bp, Artificial Sequence
  derived and/or modified sequence
atggaccagcccttcaccgtgaacagcctgaagaagctggccgccatgcctgatcatacagacgtgtcattgtcccctgaggaaagagttagggctcttagtaagctgggatgcaatatcacaataagcgaagatattacgccccgccggtatttccgatctggcgtagaaatggaaagaatggcaagcgtctatcttgaggagggaaatctggagaatgcttttgtgctttacaacaagttcattacgctatttgtcgagaaactgccaaatcatcgcgactatcagcagtgcgcggtgcccgaaaaacaggatatcatgaaaaaactgaaggagatagcattccctcgcacagatgagctgaagaatgacctgctaaagaagtacaacgtggaataccaggaatacttgcagtccaagaataaatataaagcagagattttgaagaagctggagcatcagagattgatcgaggccgaaaggaagagaattgctcagatgcggcaacaacagctcgagagtgaacagttcttgtttttcgaggatcagctgaaaaagcaagaactggccagggggcagatgcgaagccagcagacctcaggactttcagagcagatcgacggcagtgcactttcatgcttttcaactcatcagaacaactccctactgaacgttttcgccgatcagcccaacaagtcagacgccaccaattatgcttcacacagtccccctgtcaaccgcgcattgacgcccgctgccacactgtctgcagtgcagaatttagtcgtggagggtttgcgatgcgtggtgctcccggaggatctctgtcacaaatttctacagctcgccgagtcaaatactgtgcggggtatcgagacctgcggcatactgtgtgggaagttgacgcataatgagtttactattactcacgtgatagtgccaaagcagtcagctggacccgattactgcgacatggagaatgttgaggagctgttcaatgtacaggatcaacacgacttgcttactctcggatggatccatactcacccaactcaaacggcatttttgtctagtgtggacctccatacccactgtagctaccagctcatgctaccagaggccattgccattgtctgtagccctaagcataaggacacaggaatttttcgactaacaaatgccggtatgctggaggttagcgcttgcaaaaaaaaaggtttccatccgcatacgaaagagcccagactgtttagtatttgtaaacacgtgctggtcaaggacattaaaataattgtgctcgatttgagatag

SEQ ID NO: 205866 - DNA, 1386 bp, Artificial Sequence
  derived and/or modified sequence
atggaccagcccttcaccgtgaacagcctgaagaagctggccgccatgccagatcatacagatgtcagcttgtctcctgaggaaagggtgagagccctgtctaaactcggctgcaacatcaccatttctgaagacatcacgcctaggcgctacttccgctcaggtgtcgaaatggagaggatggcttctgtgtacctcgaggaaggtaacttggagaacgcattcgtgttatataacaaattcattacattattcgtagaaaagttaccaaatcatagggactatcagcagtgcgcggtgccggaaaagcaggacatcatgaagaagcttaaggaaattgccttcccacggacagatgaactcaaaaacgacctattaaagaagtacaacgtggagtaccaagagtacctgcagtccaaaaataagtataaggcagagatcttaaaaaaactggagcaccaacgtttgatcgaggcagaacgcaagaggatcgcccagatgaggcaacagcagctggaatcagagcagtttctgttcttcgaagaccaattgaagaagcaggagttggcacgcggccaaatgcggtcacagcagacatctgggctgtcagagcaaatcgacggctctgccctgtcttgcttttccacccaccaaaataatagccttttaaatgtctttgctgatcagcccaataaatccgacgctaccaattacgcatctcacagcccaccggtaaacagagcattgacccctgctgcaacactgtcagcagtccagaacctggtagtggaggggctgaggtgcgtcgtgcttcccgaggatttatgccacaagttcctgcagctcgctgaatcaaacactgttaggggaatcgaaacttgtggtatattgtgtgggaaactcacacacaatgagtttacaataacccatgtgatagttccaaagcagtcggccggacctgattattgtgatatggaaaatgtggaagaactgttcaacgtgcaagaccagcacgacttgttgacgttaggctggattcatacacatccaactcagacagccttcttgtccagtgtggatctccacacacactgctcctaccagttgatgcttccagaggcaattgctattgtgtgttctcctaaacataaagatactgggatcttcaggctgactaacgcagggatgctagaagtgagcgcatgtaaaaaaaaaggttttcaccctcacactaaggagcccaggttgttttctatacaaaagttcctttcaggcattatcagtgggaccgcactggagatggagcctctcaagattgggtacgggcccaatggtttcccactgctgggaatcagcagaagttccagtcctagtgaacagttatag

SEQ ID NO: 205867 - DNA, 813 bp, Artificial Sequence
  derived and/or modified sequence
atgcggcagcagcaactggagtccgagcagtttttattctttgaagatcaacttaagaaacaagaattggcacgcggtcagatgcggagccagcagacctcgggcttgtctgagcagatcgatggaagcgcgctctcctgcttctccacccatcagaataacagcttgctgaacgtgtttgcagatcagcctaacaaatcggatgcgacgaactacgcctctcacagccccccagttaatcgggctctgacccctgctgccaccctcagtgccgtgcaaaatttggtagtggaaggccttcggtgtgtggtgctgcccgaagatttgtgccacaagtttctacaactggctgaatctaatacagtccgaggcatcgaaacatgcggaattttatgtgggaaacttacccacaacgagtttaccatcactcacgtgatcgttcctaaacagagcgctggcccagattattgcgatatggaaaacgtggaagagttgttcaacgtccaggatcaacatgacctcctcacgctaggctggatccacacacatcccactcagactgccttcttgtcctcggttgatcttcatacccattgctcctatcagttgatgttgcctgaagctattgccatcgtgtgctcacctaagcataaggacacaggcatatttcgccttacaaatgctggaatgctagaggtttctgcttgtaaaaaaaaaggttttcatccccacactaaagaaccaagattgttttccatctgcaagcacgtcctcgtcaaagacattaaaataatcgtgctggacctgagatag

SEQ ID NO: 205868 - DNA, 1311 bp, Artificial Sequence
  derived and/or modified sequence
atggatcagccctttaccgttaactcgctcaagaaactggctgccatgcctgaccatactgacgtaagcctgagccctgaggaacgcgtccgggctctaagcaaacttggctgcaacattactatatccgaagatataacgccgaggaggtatttcaggagtggcgtggaaatggagcggatggcctctgtttacctggaagaaggcaatctggagaacgcctttgtcctctacaacaaattcattacactgtttgtggagaagctgccaaaccacagggattaccagcagtgcgctgtgccagagaagcaggatatcatgaaaaaactgaaagagatcgctttccctaggaccgacgagttgaagaacgatctcctcaagaagtacaacgtcgagtatcaggagtatcttcagagtaagaataagtacaaggctgaaatcctgaaaaagctggagcaccagcgtctaatcgaggccgaacgcaagagaatagcccagatgcgccagcagcagctggagtccgagcagtttcttttcttcgaggatcagctgaagaaacaagagctggcacgcggacagatgcgcagccaacaaacatccggattatccgagcagatcgacggctctgccttgtcctgttttagtacccaccagaataatagtttgctcaatgtgttcgcagatcagcccaataaatcagatgcaaccaattatgctagtcactcacccccagtgaaccgcgctttgactccagcagccactctcagcgcagtccagaatctcgtcgtggaggggttgagatgtgtggtgctccccgaagatctgtgtcataagttcttgcagctggccgagagcaacaccgtccgtgggatcgaaacttgcggaatactttgtggcaaactgactcacaatgagttcaccattactcacgtgatcgtgcctaaacagtctgctggaccagactattgcgatatggagaacgtagaggagctctttaatgtccaggaccagcacgatttgctgaccctgggatggatccacactcaccctacccagacggcatttctgagtagcgtcgatctgcatactcattgttcgtatcaactcatgctacctgaggcaattgctatcgtctgctcaccgaaacataaggataccgggattttccgactcacaaacgcgggaatgctggaggtttccgcctgcaaaaagaagggtttccatccccatactaaggaacctcgcctattctcaatctgtaaacacgttctcgtgaaggacatcaaaattatcgttctggatttgcggtag

SEQ ID NO: 205869 - DNA, 1311 bp, Artificial Sequence
  derived and/or modified sequence
atggaccagccgttcaccgtaaattcactcaagaaattggccgctatgcctgaccataccgatgtgtccctcagtccagaggagcgggtgcgggctctgagcaaattaggctgcaacataacaatctcagaggatatcactcccagacgatactttagaagcggagtggagatggagcgaatggctagcgtgtacctggaagaagggaatttagagaacgctttcgtcttgtacaacaagtttatcacccttttcgtagagaagctgccaaaccaccgtgattaccagcaatgcgctgttcccgaaaagcaggacattatgaagaaactcaaagagatagccttccctaggacggatgagctgaaaaacgatcttctcaagaaatataacgtggagtaccaggagtacctccaatccaagaataaatataaggctgaaattctgaaaaagctggaacaccagaggctgatcgaagctgagaggaaaaggatcgcacagatgcggcaacaacagctcgagagtgaacagtttttatttttcgaggatcaactgaagaaacaagagctcgccagaggccagatgcggtctcagcaaacctccggcctgtcagaacagatagacggctcagcgctatcttgttttagtacccaccaaaacaactcccttctgaacgtttttgctgatcaaccgaataaatcggacgctaccaattacgctagccactccccccctgtgaatcgagcattaacccctgctgctacacttagcgccgtgcagaacctcgttgtcgaagggctgcggtgcgtcgtgctccccgaagacctgtgccacaagtttctgcaactggctgaatccaataccgtccgcggaatcgagacatgcgggattctctgcggaaaacttacccacaatgaatttaccatcacacacgtcattgtccctaagcagtcagcgggacctgattactgcgatatggaaaatgttgaagagttattcaatgtacaggaccaacacgatctgctgaccctgggctggatccacacacaccccactcagaccgcctttttatccagcgtcgacctacacacacactgctcctatcaactgatgcttccagaagcgatcgctatcgtgtgtagccccaaacacaaggacaccgggatttttagattgaccaacgctggcatgctggaagtgagcgcttgtaaaaaaaaaggctttcacccccatacgaaagaacctcgcctgttcagtatatgcaagcatgtcctggtgaaggatataaaaatcattgtgctcgacctgcggtag

SEQ ID NO: 205870 - DNA, 1386 bp, Artificial Sequence
  derived and/or modified sequence
atggaccagcccttcaccgtcaactcgttgaaaaaactggcagcaatgcctgaccataccgacgtgtctctctctcccgaggagcgtgtgcgcgcattgtcaaaactcggatgcaacatcactatatccgaggatatcaccccacggcgttatttccgatctggggtggaaatggagcggatggcctctgtgtacctggaggaagggaatctggagaacgccttcgtcctgtacaataaattcattacattgttcgttgaaaagctgccaaaccatagggactatcagcagtgtgcggttccggaaaaacaggatatcatgaagaagctcaaggaaatcgcttttcctagaaccgatgaacttaaaaatgacctgttgaaaaagtacaatgtagagtaccaggaatatcttcagagtaaaaacaagtataaggccgagatcctgaaaaaacttgagcatcaacgtctgatcgaggccgagaggaagagaattgcccaaatgcgccagcagcagcttgagagcgaacagtttctttttttcgaggaccagctgaaaaaacaggagctcgcccgaggtcaaatgaggtcgcaacagacttctggcctgagcgaacagattgacggctctgcgctctcttgtttcagtacgcatcaaaacaattcattactgaacgtgttcgccgaccagcccaacaaaagcgacgccactaattacgcctcacattcacccccagtgaatagggctctgacaccagcggcaacactcagtgccgtgcagaatctcgtcgtcgaaggcttgcgctgcgtggtcttacccgaggacctgtgccataagtttctgcagctggcagagtctaacactgtcagggggatcgaaacctgcggcattctatgtgggaagcttacccacaacgagttcacgatcactcatgtgatagtgccaaaacagagtgctgggccagattactgtgacatggagaacgtggaggagctgtttaacgtccaggaccagcatgatcttctaacactgggctggatccatacccacccaacgcagacggctttcctaagctcagtagacttacatacgcactgcagctaccagctcatgctgcctgaggctattgctattgtttgctcacctaaacataaagataccggtatttttaggcttaccaacgctggcatgcttgaggtgagtgcctgcaagaagaaagggttccacccacacaccaaagaacctcgactcttctccatccagaagttcctgagtggcatcatttccgggacagcactggaaatggagcctctgaagatagggtatgggccaaacgggtttcccctgctcggcatcagccggtcaagcagtcctagtgagcagctatag

SEQ ID NO: 205871 - DNA, 1899 bp, Artificial Sequence
  derived and/or modified sequence
atattatctgacctaataagcctggatattttgttagaactggagagcttgggactcctcctttttagcaaaactctgggttagtggtgacagagaaggttggaacacattttaataaccattttttagtgattccttcttatccataaatttccagcagagtatgagttctagagtcaaatgcgaaaggttctagggcagcactgttcaatagaactcctgtgatgatggaagtgttctgtttggcactttccaatatggtatccactagccacatgtggcttctgggtacttaaatgtgactgactagtgtccctgaggtactgaatttctaattttgtttaattttaatcaagttcaaataaccacatgtggctagtggccactatattagaagtgcagtaggggtgagatattttgtttcatatggtcttgttggtctgactgagcaaacaaccttgacgttgattttccagtatttaaaagcattagggaatgaagggatcctgattgtcatggcctgtctctggtaaaatatcagtggatttagaactgctatgttaatcagatcaaggggcttttgccctgatgttatgtatttctctcactgttccatgagtgtccctgtgggcatatcacagtatctagcattttctctgtctgcttgaagactgaaaatgtctaattccagttcaatgtttctccttggaaactaaccttctcttctggctgccacactttttagaacaaatataaagctgaaattctcaaaaaattggagcatcagagattgatagaggcagaaaggaagcggattgctcagatgcgccagcagcagctagaatcggagcagtttctgtttttcgaagatcaactcaagaagcaagagttagcccgaggtcaaatgcgaagtcagcaaacctcagggctgtcagagcagattgatgggagcgctttgtcctgcttttccacacaccagaacaattccttgctgaatgtatttgcagatcaacctaataaaagtgatgcaaccaattatgctagccactctcctcctgtaaacagggccttaacgccagctgctactctaagtgctgttcagaatttagtggttgaaggactgcgatgtgtagttttgccagaagatctttgccacaaatttctgcaactggcagaatctaatacagtgagaggaatagaaacctgtggaatactctgtggaaaactgacacataatgaatttactattacccatgtaattgtgccaaagcagtctgcgggaccagactattgtgacatggagaatgtagaggaattattcaatgttcaggatcaacatgatctcctcactctaggatggatccatacacatcccactcaaactgcatttttatccagcgttgatcttcacactcactgttcctatcaactcatgttgccagaggccattgccattgtttgctcaccaaagcataaagacactggcatcttcaggctcaccaatgctggcatgcttgaggtttctgcttgtaaaaaaaagggctttcatccacacaccaaggagcccaggctgttcagtatatgcaaacatgtgttggtaaaagacataaaaataattgtgttggatctgaggtgatatgttctgaatgtaagcaccgtcaacatcagacacctactcatggacatgtggttgccggattttcttaagatgtttccagaaatgactgatattttatatttatacattttagatgacaaagcttgatatttattgctgttgcacattttaaagttttctttttgggttgctctgtgtcaagagaggttacatggtgttaaatcggtacctgataatgtacccaaatactatggccagataataaattgtgctgcaaacaa

SEQ ID NO: 205872 - DNA, 2208 bp, Artificial Sequence
  derived and/or modified sequence
ctcttcatctttgtcatgtgattcaacatattcatgggaataatattccatgacctttgctgtcttctattggttagaagccaactacaggtcttaaacacactcaagtggagaggattacacaaacctacagatatcaaggggcaggaatcacagagctatcttagaattctgcctgttatagttctaaggttgagtttaaatccagactggctctaagtttaacagtccatgcttctaatcagtattatcttctttattcctttgaagaaagcaaacctactttataaccttgcatagagttctaagtaaggtatcccgcagcagattcatactgggtgtcagtcaaatgtgaattattttcacaccttcacttttaaagatcagcttcaggaaactataaccacttgcagttttgtattttcaggaagagatttccaacagtctctctaaacactcaggttatataggttatttcaatttgttcctgtttgtctgaggcagagataaccctggggtttgggatttcaaacttgggtctcaaaaaataactttagttctgcttcttgtttttgaaacagatgaagtgattgagaagaaacagtgaacatcctcatttcacagataagacaacatggatcagccttttactgtgaattctctgaaaaagttagctgctatgcctgaccatacagatgtttccctaagcccagaagagcgagtccgtgccctaagcaagcttggttgtaatatcaccatcagtgaagacatcactccacgacgttactttaggtctggagtagagatggagaggatggcgtctgtgtatttggaagaaggaaatttggaaaatgcctttgttctttataataaatttataaccttatttgtagaaaagcttcctaaccatcgagattaccagcaatgtgcagtacctgaaaagcaggatattatgaagaaactgaaggagattgcattcccaaggacagatgaattgaaaaacgaccttttaaagaaatataacgtagaataccaagaatatttgcaaagcaaaaacaaatataaagctgaaattctcaaaaaattggagcatcagagattgatagaggcagaaaggaagcggattgctcagatgcgccagcagcagctagaatcggagcagtttctgtttttcgaagatcaactcaagaagcaagagttagcccgaggtcaaatgcgaagtcagcaaacctcagggctgtcagagcagattgatgggagcgctttgtcctgcttttccacacaccagaacaattccttgctgaatgtatttgcagatcaacctaataaaagtgatgcaaccaattatgctagccactctcctcctgtaaacagggccttaacgccagctgctactctaagtgctgttcagaatttagtggttgaaggactgcgatgtgtagttttgccagaagatctttgccacaaatttctgcaactggcagaatctaatacagtgagaggaatagaaacctgtggaatactctgtggaaaactgacacataatgaatttactattacccatgtaattgtgccaaagcagtctgcgggaccagactattgtgacatggagaatgtagaggaattattcaatgttcaggatcaacatgatctcctcactctaggatggatccatacacatcccactcaaactgcatttttatccagcgttgatcttcacactcactgttcctatcaactcatgttgccagaggccattgccattgtttgctcaccaaagcataaagacactggcatcttcaggctcaccaatgctggcatgcttgaggtttctgcttgtaaaaaaaagggctttcatccacacaccaaggagcccaggctgttcagtatatgcaaacatgtgttggtaaaagacataaaaataattgtgttggatctgaggtgatatgttctgaatgtaagcaccgtcaacatcagacacctactcatggacatgtggttgccggattttcttaagatgtttccagaaatgactgatattttatatttatacattttagatgacaaagcttgatatttattgctgttgcacattttaaagttttctttttgggttgctctgtgtcaagagaggttacatggtgttaaatcggtacctgataatgtacccaaatactatggccagataataaattgtgctgcaaacaa

SEQ ID NO: 205873 - DNA, 2532 bp, Artificial Sequence
  derived and/or modified sequence
taacatccaggagatattctaatacttcttattttccaagtacacacaaattgggggtagggggaagggctaagatgcttaatagtgggcgtagccagttgtggataaatatcaaaaagggaatcctaacatgaagtataagtgggattttcaccaaaaccctatccttccccagactccagtgacagtttaacggtcagctgcatcaaggcttgtgtactgtgcagtcttaaaaggcaccactcctgtccatctcggtgaaattgatggtggagcaaaagggagtttaggtggttccggtctggggagaagacgtgcagggtttcagatgcgaaagtcgcacccaaccgcttcactcgggctctaggccatccgcaggggccctgcttccttccacctgcgagctttttctgcagaatgcgggaagccgccgccgccgccacagaggagggggcggaggcagaggcggaggcggcacccaggggccggggcaggggaggccgggaccatcgcagtgacaatttattttcctgcagcagcggcagcagggacggttgctgcaggttcggggtcggccggcctgcgcgtgggcttgcgaggacgctgttcgtcccctgcgctggggtgtccgacagcgaggaggagaacgacgcacggagcccgcgcgactggaaccagcaaagctccatctgtcggcagaggagaagggggaggaggcacggccgaggcaaacgagcggacgcctcgtcgccgggtgccggtatcaccccgctgcaacgccttccagcaaaagccaccgcggcccgggttgcagcagccggacggatgccaaggccacacggcagccacgggggcagccgtcgcagtcgccgtcccacacgggctgcggacaccaagggttgctaatgaagtgattgagaagaaacagtgaacatcctcatttcacagataagacaacatggatcagccttttactgtgaattctctgaaaaagttagctgctatgcctgaccatacagatgtttccctaagcccagaagagcgagtccgtgccctaagcaagcttggttgtaatatcaccatcagtgaagacatcactccacgacgttactttaggtctggagtagagatggagaggatggcgtctgtgtatttggaagaaggaaatttggaaaatgcctttgttctttataataaatttataaccttatttgtagaaaagcttcctaaccatcgagattaccagcaatgtgcagtacctgaaaagcaggatattatgaagaaactgaaggagattgcattcccaaggacagatgaattgaaaaacgaccttttaaagaaatataacgtagaataccaagaatatttgcaaagcaaaaacaaatataaagctgaaattctcaaaaaattggagcatcagagattgatagaggcagaaaggaagcggattgctcagatgcgccagcagcagctagaatcggagcagtttctgtttttcgaagatcaactcaagaagcaagagttagcccgaggtcaaatgcgaagtcagcaaacctcagggctgtcagagcagattgatgggagcgctttgtcctgcttttccacacaccagaacaattccttgctgaatgtatttgcagatcaacctaataaaagtgatgcaaccaattatgctagccactctcctcctgtaaacagggccttaacgccagctgctactctaagtgctgttcagaatttagtggttgaaggactgcgatgtgtagttttgccagaagatctttgccacaaatttctgcaactggcagaatctaatacagtgagaggaatagaaacctgtggaatactctgtggaaaactgacacataatgaatttactattacccatgtaattgtgccaaagcagtctgcgggaccagactattgtgacatggagaatgtagaggaattattcaatgttcaggatcaacatgatctcctcactctaggatggatccatacacatcccactcaaactgcatttttatccagcgttgatcttcacactcactgttcctatcaactcatgttgccagaggccattgccattgtttgctcaccaaagcataaagacactggcatcttcaggctcaccaatgctggcatgcttgaggtttctgcttgtaaaaaaaagggctttcatccacacaccaaggagcccaggctgttcagtatatgcaaacatgtgttggtaaaagacataaaaataattgtgttggatctgaggtgatatgttctgaatgtaagcaccgtcaacatcagacacctactcatggacatgtggttgccggattttcttaagatgtttccagaaatgactgatattttatatttatacattttagatgacaaagcttgatatttattgctgttgcacattttaaagttttctttttgggttgctctgtgtcaagagaggttacatggtgttaaatcggtacctgataatgtacccaaatactatggccagataataaattgtgctgcaaacaa

SEQ ID NO: 205874 - DNA, 4184 bp, Artificial Sequence
  derived and/or modified sequence
taacatccaggagatattctaatacttcttattttccaagtacacacaaattgggggtagggggaagggctaagatgcttaatagtgggcgtagccagttgtggataaatatcaaaaagggaatcctaacatgaagtataagtgggattttcaccaaaaccctatccttccccagactccagtgacagtttaacggtcagctgcatcaaggcttgtgtactgtgcagtcttaaaaggcaccactcctgtccatctcggtgaaattgatggtggagcaaaagggagtttaggtggttccggtctggggagaagacgtgcagggtttcagatgcgaaagtcgcacccaaccgcttcactcgggctctaggccatccgcaggggccctgcttccttccacctgcgagctttttctgcagaatgcgggaagccgccgccgccgccacagaggagggggcggaggcagaggcggaggcggcacccaggggccggggcaggggaggccgggaccatcgcagtgacaatttattttcctgcagcagcggcagcagggacggttgctgcaggttcggggtcggccggcctgcgcgtgggcttgcgaggacgctgttcgtcccctgcgctggggtgtccgacagcgaggaggagaacgacgcacggagcccgcgcgactggaaccagcaaagctccatctgtcggcagaggagaagggggaggaggcacggccgaggcaaacgagcggacgcctcgtcgccgggtgccggtatcaccccgctgcaacgccttccagcaaaagccaccgcggcccgggttgcagcagccggacggatgccaaggccacacggcagccacgggggcagccgtcgcagtcgccgtcccacacgggctgcggacaccaagggttgctaatgaagtgattgagaagaaacagtgaacatcctcatttcacagataagacaacatggatcagccttttactgtgaattctctgaaaaagttagctgctatgcctgaccatacagatgtttccctaagcccagaagagcgagtccgtgccctaagcaagcttggttgtaatatcaccatcagtgaagacatcactccacgacgttactttaggtctggagtagagatggagaggatggcgtctgtgtatttggaagaaggaaatttggaaaatgcctttgttctttataataaatttataaccttatttgtagaaaagcttcctaaccatcgagattaccagcaatgtgcagtacctgaaaagcaggatattatgaagaaactgaaggagattgcattcccaaggacagatgaattgaaaaacgaccttttaaagaaatataacgtagaataccaagaatatttgcaaagcaaaaacaaatataaagctgaaattctcaaaaaattggagcatcagagattgatagaggcagaaaggaagcggattgctcagatgcgccagcagcagctagaatcggagcagtttctgtttttcgaagatcaactcaagaagcaagagttagcccgaggtcaaatgcgaagtcagcaaacctcagggctgtcagagcagattgatgggagcgctttgtcctgcttttccacacaccagaacaattccttgctgaatgtatttgcagatcaacctaataaaagtgatgcaaccaattatgctagccactctcctcctgtaaacagggccttaacgccagctgctactctaagtgctgttcagaatttagtggttgaaggactgcgatgtgtagttttgccagaagatctttgccacaaatttctgcaactggcagaatctaatacagtgagaggaatagaaacctgtggaatactctgtggaaaactgacacataatgaatttactattacccatgtaattgtgccaaagcagtctgcgggaccagactattgtgacatggagaatgtagaggaattattcaatgttcaggatcaacatgatctcctcactctaggatggatccatacacatcccactcaaactgcatttttatccagcgttgatcttcacactcactgttcctatcaactcatgttgccagaggccattgccattgtttgctcaccaaagcataaagacactggcatcttcaggctcaccaatgctggcatgcttgaggtttctgcttgtaaaaaaaagggctttcatccacacaccaaggagcccaggctgttcagtattcagaaattcctttctgggataatttctggcactgctttggagatggagcccctgaaaattggctatggaccaaatggattcccactcttggggatctctaggtcatcatcaccatctgaacagctctgagagagacaagaagtggaatggagaaggtgattaggtaatccaagaattgccaggcgaacaattgtgaaaatctttcatagagttcccgatgaaaacaactctttcttgttagccattatctctgcctttcctttctaaagaaaaacacgtcatttcatcttgattatcagtttctcaagtactcatggatgtgaggccaggtaccctgtcaccttggctctgtttgggatgcaatgttgtgtttgtcaccacttcccattccccaaaagcatctttaacatagaccattcattcttcagattcaaaatgcttaagctgaactaacctcaaagggccctcattaatttacagacatttgaataacacccatattcatttctgctactgaaccaaagccttttccaaaaaaatcatctagcaaactgtttttgccaggccaaatattaacaggtatatatatttgcatacataaatatttacctctatgtcttgtgtgtttttgttatgagacagagtctcactctgtcgcccaggctggagtgcagtggcacagtctcagctcactgcaacctccacctcccaggttcaagcgattctcatgcctcagcctcccgagtagcgaggactacaggcgtgcaccaccacgcccagctaatttttgtatttttagtagagatggggttttaccctgttggccagggtggtctcgaattcctgacctctgatgatctacccgcctggacctctcaaagtgctgggattacagacatgagccactgtgccctgcctctgttttgtgtatttacataaatacatgtctccagagctttaaattcttcttaaattttaaaactagaactaaaccagacattgagaggacccagaaatataccctgactaacgtgggtggaatttcatttggcttgactctttggtgaaaaaaaaaaaaatcaggctctcaaggactcaatttggtgaaccaatgccaaatagaaaaatgttcttgacattttccccaaaatagatgtctaaagattttgcacttcaaattggtactttatgtattaaaagtgatattgaaactaaattcctacccaattagttgaaaaatatgaaaaaagcaattgctagagaatgcaatttattaaatgttggtggtcttttaaaaaatgaattcctcttgtagccagtgagatcagttatttatttatttattttaatagtaacaaggtctcactatattgtccaggctgatcttgaactcctggcctcaagctgtcctcccatctcagcttcccaaagtgctgagattataggcatgagccaccatgcctggctagttaatggttattaagtaatacaaacatttctgtgaattccaccagatcattgactttggcatagttcacttaagactttgtttgataaaataaatctctttcactctaattaggaagcatttttgggatcctgattaatgctctaatattgtggggccaaaaaatatgtggaacgtggccctgcagttagatgagctgagatcactatagtactatatagcgctctaaatcctaaatgctagatcactgtaatactgtacagatcagccacttgctggcttgtgactctgggccatttacttcacctctcaaaaggcatatttaaagtgaggaaaataataagtttattttggaaattcagttagatgatgcaaattgtttactgtaatttctagcatgtagttcgtgctccatgcatttaactgttattacaggttgtattagtatcacattaaattacccactgaagtgaaagtgaaaccagaatgctgtcaacgatt

SEQ ID NO: 205875 - protein, 777 aa, Artificial Sequence
  derived and/or modified sequence
MRLKISLLKEPKHQELVSCVGWTTAEELYSCSDDHQIVKWNLLTSETTQIVKLPDDIYPIDFHWFPKSLGVKKQTQAESFVLTSSDGKFHLISKLGRVEKSVEAHCGAVLAGRWNYEGTALVTVGEDGQIKIWSKTGMLRSTLAQQGTPVYSVAWGPDSEKVLYTAGKQLIIKPLQPNAKVLQWKAHDGIILKVDWNSVNDLILSAGEDCKYKVWDSYGRPLYNSQPHEHPITSVAWAPDGELFAVGSFHTLRLCDKTGWSYALEKPNTGSIFNIAWSIDGTQIAGACGNGHVVFAHVVEQHWEWKNFQVTLTKRRAMQVRNVLNDAVDLLEFRDRVIKASLNYAHLVVSTSLQCYVFSTKNWNTPIIFDLKEGTVSLILQAERHFLLVDGSSIYLYSYEGRFISSPKFPGMRTDILNAQTVSLSNDTIAIRDKADEKIIFLFEASTGKPLGDGKFLSHKNEILEIALDQKGLTNDRKIAFIDKNRDLCITSVKRFGKEEQIIKLGTMVHTLAWNDTCNILCGLQDTRFIVWYYPNTVYVDRDILPKTLYERDASEFSKNPHIVSFVGNQVTIRRADGSLVHISITPYPAILHEYVSSSKWEDAVRLCRFVKEQTMWACLAAMAVANRDMTTAEIAYAAIGEIDKVQYINSIKNLPSKESKMAHILLFSGNIQEAEIVLLQAGLVYQAIQININLYNWERALELAVKYKTHVDTVLAYRQKFLETFGKQETNKRYLHYAEGLQIDWEKIKAKIEMEITKEREQSSSSQSSKSIGLKP

SEQ ID NO: 205876 - protein, 64 aa, Artificial Sequence
  derived and/or modified sequence
MRLKISLLKEPKHQELVSCVGWTTAEELYSCSDDHQIVKWNLLTSETTQIVKLPDDIYPIDFHW

SEQ ID NO: 205877 - protein, 121 aa, Artificial Sequence
  derived and/or modified sequence
MRLKISLLKEPKHQELVSCVGWTTAEELYSCSDDHQIVKWNLLTSETTQIVKLPDDIYPIDFHWFPKSLGVKKQTQAESFVLTSSDGKFHLISKLGRVEKSVEAHCGAVLAGRWNYEGTAL

SEQ ID NO: 205878 - protein, 179 aa, Artificial Sequence
  derived and/or modified sequence
MRLKISLLKEPKHQELVSCVGWTTAEELYSCSDDHQIVKWNLLTSETTQIVKLPDDIYPIDFHWFPKSLGVKKQTQAESFVLTSSDGKFHLISKLGRVEKSVEAHCGAVLAGRWNYEGTALVTVGEDGQIKIWSKTGMLRSTLAQQGTPVYSVAWGPDSEKVLYTAGKQLIIKPLQPNA

SEQ ID NO: 205879 - DNA, 2334 bp, Artificial Sequence
  derived and/or modified sequence
atgcgtctgaagatctcactgttaaaggaaccgaagcaccaggagctggttagttgtgtcgggtggacaaccgccgaagagctgtactcttgcagtgacgatcatcagatagtgaagtggaatttgcttacttctgagaccacacagatcgtcaaactgcctgatgatatttaccccatcgacttccactggttcccaaagagtctgggcgtcaagaaacagactcaagccgaatccttcgtgctgaccagttcagacggcaaatttcacttgatcagcaaactgggtagagtcgagaagagtgttgaagcccattgcggagccgtgctagctggaaggtggaactacgaaggaactgcccttgtgactgtgggcgaagacgggcaaatcaagatatggtccaagaccggcatgctgaggtctacattagcgcaacaggggaccccagtgtatagcgtggcttggggccctgactcagagaaagttctgtataccgctggtaagcagctgatcatcaaaccactccagcccaatgccaaagtgctgcagtggaaagcgcatgacgggattatactgaaggttgactggaactccgtgaacgatctgatcctgtccgccggcgaggactgtaagtacaaggtgtgggactcttatggccggcctctgtacaactcccagcctcatgagcacccgataactagcgtggcctgggcccccgacggggagcttttcgcagtgggctccttccacacactgagattgtgcgataagaccggctggtcctacgcactggagaagccaaatactggctcgatctttaatatcgcctggagtatcgacggaacccaaatagctggagcttgcgggaatggacatgtggtgttcgctcacgtcgtagaacaacattgggaatggaagaactttcaggtgacgctgacaaagcggagggccatgcaggttcgcaacgtgctgaatgacgccgtggacctgctggagttccgcgacagggtcatcaaggccagtctgaattatgcacatttagttgtgtcaacctcactgcagtgttatgtcttctctaccaagaactggaacactccaatcatcttcgacctgaaagaagggactgtctccctgatcctgcaggccgagagacattttctgcttgttgacggcagttctatttacctatatagttatgaaggcagatttatcagctcccccaaattcccgggaatgagaacggacattctgaacgcccagactgtgtcattgtctaacgacaccatcgcaattcgggataaggctgatgagaaaattattttcctgtttgaggcttccacaggcaaaccactgggcgacggcaagtttctgtcacacaagaatgaaatcctggagatcgctttagatcagaaaggtctcacaaacgatcgaaagattgcgtttatcgacaaaaatagagacctttgcatcactagcgtgaagaggtttggaaaagaagaacaaatcattaagctcggaacaatggtgcacactctggcgtggaatgacacttgtaatatcctttgtgggctgcaggataccaggttcatcgtctggtattaccctaacactgtctacgtggaccgggatattctccccaaaaccctctatgaaagagacgcttctgaattttcaaagaacccccacatcgtgtcgttcgtgggcaatcaggttactatccgtagggctgacggtagccttgtccatatatccattacaccgtatcctgccattctccacgaatatgtctcctcatctaagtgggaagatgctgtgagattatgcagattcgtcaaagagcaaactatgtgggcatgccttgctgccatggccgtcgcaaacagggatatgacaactgctgaaatcgcttacgcggccattggtgagatagacaaagttcaatacattaactctattaaaaacctgcccagtaaagagtccaaaatggctcacatcctactctttagtggcaacatccaggaagccgagatcgttttgctccaggccggactcgtctaccaggccattcagattaacattaacctctataactgggaaagggcgttagaacttgctgtcaaatataaaacccatgtggacacagtgctggcctatcggcaaaagttcctcgaaactttcggaaagcaggagacgaataagagatatctccactacgcagaagggctgcaaattgattgggaaaaaatcaaggctaaaatcgagatggaaatcactaaggaacgtgaacagagttctagttcacagtccagcaagtcaatcggtttaaaaccatag

SEQ ID NO: 205880 - DNA, 195 bp, Artificial Sequence
  derived and/or modified sequence
atgcgcctcaaaatctcacttctgaaagagcctaaacaccaggagctggtgtcatgtgtcggatggaccactgccgaggagctgtatagctgtagtgacgatcaccagattgtgaagtggaatctcctgacctcagaaacgacccaaattgtgaagcttccagatgatatttatcccatagactttcattggtag

SEQ ID NO: 205881 - DNA, 366 bp, Artificial Sequence
  derived and/or modified sequence
atgcggttgaaaatctctctgctgaaggagcccaagcaccaggagctggtgtcatgtgtcggctggactaccgccgaagaactatattcatgctcagatgaccaccaaatcgtcaagtggaacttgcttacttccgaaaccacacagatcgtcaagcttcctgatgatatttacccaatcgatttccattggttcccaaagagcctgggagtcaaaaaacaaacgcaggccgagtcgttcgtgctgacgtcgtcagacggcaagttccatctgatatcaaaactcggtagggtggagaagtccgtagaggcacactgcggggcagtactggctgggaggtggaactacgagggtacagccctgtag

SEQ ID NO: 205882 - DNA, 540 bp, Artificial Sequence
  derived and/or modified sequence
atgcgcctcaagatcagcctgctgaaggagccaaagcatcaggagcttgtctcatgtgttggctggacaactgctgaagagctgtattcttgcagcgacgatcaccagatagtgaaatggaatctgctcaccagtgaaactacacagattgtgaagctgcccgatgacatatatcctatagatttccactggtttcccaagtcactcggcgtcaagaagcagacacaggccgagtctttcgtgctaacgagttcagatggcaaattccacctgatatccaaactaggtcgggtcgagaagtcggttgaagcccattgcggagctgtgctcgcaggccggtggaattatgagggaacagctctggtgacagtcggtgaagacggtcagattaagatctggtctaagaccggtatgctccggtctacattggctcaacaagggaccccggtttatagtgtcgcctgggggccggattccgaaaaggttctgtatacagccggtaaacagttgattattaagcctctacagcccaacgcttag

SEQ ID NO: 205883 - DNA, 4306 bp, Artificial Sequence
  derived and/or modified sequence
gcgcatgcgcgaactcctggcgggacctacgcggtagaagtttctactaagtgaaaaggaagagcgagggattcttttctctgtggtctacagcagcagcactattattaaaaatatttggaaagacaacctggcaagttttgaaaaagatttttttaaaaacggtagggttccgctcacagtgggaggcggggctcagtggtccagaaacgcctcttcagaagagggcgggctcgccgagaggcggggtctcgggcccactcggatgacgtgccgcgtagaagtatcgcgggaagaggaagggagcgtaactcttagaagtcactatggtgacggggaggtaccaggtatttgagagcaatcgccaccgctttcctggaacttgagtaaatacaatcaagtggcatcttaaatttttgctggaagtggagtcatgagactaaagatatctcttttaaaagaaccaaagcatcaagaattagtaagctgtgtgggctggactactgctgaagagctgtattcatgtagtgatgatcaccagatagtgaagtggaacttgttaaccagtgaaacaactcaaatagtaaagcttcctgatgatatttaccctattgattttcactggtttccaaaaagtttgggtgtaaagaaacaaacccaggcagaaagctttgtcctcacaagttctgatggtaaatttcatctgatttccaagttaggaagagtggaaaaaagtgtagaagctcactgtggagcagtacttgcaggaagatggaattatgaaggaacagcattagttacagttggagaagatggacaaataaaaatttggtcaaagactgggatgcttagatcaactttagctcagcaaggaacaccagtgtattcagtagcgtggggccctgattcagaaaaggttctttatacagcaggcaagcagctaatcattaaacctcttcaaccaaatgctaaagttttgcagtggaaagctcatgatggcattattttaaaagtagattggaactcggtcaatgatcttattttatctgctggtgaagactgtaaatataaggtatgggatagttacggccgcccactgtacaattcacaacctcatgagcatcccattacttcagttgcctgggctccagatggagaattatttgctgttggatcgtttcatactttacgcttgtgtgataaaactgggtggtcatatgcattagaaaaacccaacactggcagcatatttaatattgcatggtctatcgatggcactcagattgctggagcctgtggaaatggacatgtcgtttttgcacatgtggtggaacaacattgggagtggaaaaattttcaagtaacattaacgaaaagaagagccatgcaggttcgtaatgttcttaatgatgcagtggatttactggaattccgtgatagagtcattaaagcatctttgaactatgcacacttagttgtttcaacgtctcttcaatgttacgtgttctccacgaagaactggaacacaccaattatatttgatctcaaagaaggaactgttagtttgattctgcaggcagaaagacattttcttcttgtagatggtagtagtatctatttatattcatatgaagggcgctttatttcatctccaaaatttcctggaatgagaacagatattctgaatgcacagactgtgtctttgagtaatgataccatagcaataagagacaaagctgatgaaaaaataatcttcctctttgaggcatcaaccggaaagccgttaggtgatggaaagtttctttctcataagaatgaaatcttggaaattgctctggatcaaaaaggacttaccaatgatagaaaaattgctttcattgataaaaatagagatctctgtatcacttctgtgaaacgatttgggaaggaagaacaaattatcaagcttggaacaatggtgcatactttggcatggaacgatacatgcaatatcctttgtggacttcaagatactcgatttatagtgtggtattaccccaatacagtttatgtggacagagacattttgcctaaaacattatatgaaagggatgcaagtgaatttagtaaaaatccccatattgtgagttttgttggaaatcaagtaactattagaagagctgatggctccctggttcacatcagcataacaccatatcctgctattctccatgaatatgtaagcagttcaaaatgggaagatgctgtgagactttgtcgctttgttaaggagcaaaccatgtgggcttgtctagctgctatggcagttgctaatcgagatatgactactgcagaaatagcctatgcagcaattggtgaaattgataaggttcagtacatcaattctataaaaaatcttccatctaaagaatcaaaaatggcccacatactactgtttagtgggaacatacaggaggctgaaatagtacttcttcaggctggccttgtttatcaagcaatccagatcaatattaatctctacaactgggaaagggcactggaattggctgtaaaatacaaaacacatgttgatacagttcttgcttaccgtcaaaagtttttggagacatttggtaaacaggaaactaataaacgatacttgcattatgcagaaggtctccaaatagattgggagaaaatcaaagccaaaattgagatggaaattacaaaagaaagagagcaatcatcaagcagccaatccagcaagagtataggtttaaagccctaaatgccatgcgtatctttaagaaattttatcttttgaaacacgttctgattaaccaagggtaagcatgttttggttgctaaagaaaaaagcataatctttaaccgagtataagtacttgctgtgtatttagtgtaaaagtacatgcagaaagatgaaacacaaagtaattgatgtatttctatcttttatattttttagtccaataattagcaaaatattactatgtacttaagagatacctgtgtagtgtcgattatatgtcagttttttgcccattacttcatccctaaatcttcagcatgaacaaatattaatgtcgataataaaacattggactctttgaaatgtatgttaccattaatttctatttgacctctaaattgtaaaatgcctccaaaagtttatttatagaacaaaaatacatgaggatggatttgtacaaatgtataaaatgccactatttatacaccaagttcatagcagcattactggaatagcaaaagatggaaacagctcaagtgtctatcatgaatggataaacaaatgtgctataatacatacaatggaatattatttagctttaaaaaggaatgaaattctgataaatactacctcaggataaaccttgaaaacactatgctaagtgaaataagccagacacaaaaggccaaatatgatgccacttttatgaggtaccagcataggcaagttcacagaaacagaaaggagaatagtggttgccagggactgcagggaggaggaaatggggggtggggttattgtttaacgagtacatagtttctgtttgggatgaacaaattctggaaatggatagcgatgatggttgctcaacattttgaatgttaatgccactaaattgtacccataaaaatggttaaaatggtaaattttgttatgtatattttatcataatttaaaaaatatatctagaatgggcaagaaggattctcctcattcctctcttgacttgagaatgatcagtcaataggccctgaagtctgaatttgtgaaaatttccttgggtgacaaacttgtttgattactctatttagtgtatcccaaagttattaccacataatcttttaaacaataaaacaaataccccttagaaagtcttctgcaaacccatttctgaaaatggtacattatagggtgggtatagatgcatagatatgggattatgtatgatatatatatatatacacacacacacaaagggatagagagattacctctcttaacccccattttaattactatgtctaggttttttaaataaaaatcttttctttttaacatgtttcttttcttttccggaatattggaatattctgttcttgatccagatgaaatctgattgagcagtgtacttacaagttgtactgtgtatgtgtttcctatattgttatatttcaataagaagcttaaaatgtttaaaaataaatggttaaaaggttttatgttatgtatattttaccacaataaatgcaaaaaataaaaagtctgtgttctaaacaa

SEQ ID NO: 205884 - DNA, 542 bp, Artificial Sequence
  derived and/or modified sequence
attgtcgctcctgcgcatgcgcgaactcctggcgggacctacgcggtagaagtttctactaagtgaaaaggaagagcgagggattcttttctctgtggtctacagcagcagcactattattaaaaatatttggaaagacaacctgctcatcagccatcattaatgttagtgtattttatgtgtggcccaagacaattcttcctccaatgtggcctagggaagccgaaagattggacacccctgataaagtaaacggccatactgtttgctgtggctaagcctttgagtccgtgcctggaaatgtaaatacaatcaagtggcatcttaaatttttgctggaagtggagtcatgagactaaagatatctcttttaaaagaaccaaagcatcaagaattagtaagctgtgtgggctggactactgctgaagagctgtattcatgtagtgatgatcaccagatagtgaagtggaacttgttaaccagtgaaacaactcaaatagtaaagcttcctgatgatatttaccctattgattttcactggt

SEQ ID NO: 205885 - DNA, 4044 bp, Artificial Sequence
  derived and/or modified sequence
tgcaggtctgtgaaagaataggtaaataaattgaaagtaagggctgagaaatttttgtagcaatttgacattgttataatgtccaatttttctaatattttatttttattgtatcttacgaaatatccatatgcaatggattcgaaataaagaaaaatctggtccttcatcagaactaggaaagcactgatttaaacatttggtcagacattttaaattgaattagtaagctgtgtgggctggactactgctgaagagctgtattcatgtagtgatgatcaccagatagtgaagtggaacttgttaaccagtgaaacaactcaaatagtaaagcttcctgatgatatttaccctattgattttcactggtttccaaaaagtttgggtgtaaagaaacaaacccaggcagaaagctttgtcctcacaagttctgatggtaaatttcatctgatttccaagttaggaagagtggaaaaaagtgtagaagctcactgtggagcagtacttgcaggaagatggaattatgaaggaacagcattagttacagttggagaagatggacaaataaaaatttggtcaaagactgggatgcttagatcaactttagctcagcaaggaacaccagtgtattcagtagcgtggggccctgattcagaaaaggttctttatacagcaggcaagcagctaatcattaaacctcttcaaccaaatgctaaagttttgcagtggaaagctcatgatggcattattttaaaagtagattggaactcggtcaatgatcttattttatctgctggtgaagactgtaaatataaggtatgggatagttacggccgcccactgtacaattcacaacctcatgagcatcccattacttcagttgcctgggctccagatggagaattatttgctgttggatcgtttcatactttacgcttgtgtgataaaactgggtggtcatatgcattagaaaaacccaacactggcagcatatttaatattgcatggtctatcgatggcactcagattgctggagcctgtggaaatggacatgtcgtttttgcacatgtggtggaacaacattgggagtggaaaaattttcaagtaacattaacgaaaagaagagccatgcaggttcgtaatgttcttaatgatgcagtggatttactggaattccgtgatagagtcattaaagcatctttgaactatgcacacttagttgtttcaacgtctcttcaatgttacgtgttctccacgaagaactggaacacaccaattatatttgatctcaaagaaggaactgttagtttgattctgcaggcagaaagacattttcttcttgtagatggtagtagtatctatttatattcatatgaagggcgctttatttcatctccaaaatttcctggaatgagaacagatattctgaatgcacagactgtgtctttgagtaatgataccatagcaataagagacaaagctgatgaaaaaataatcttcctctttgaggcatcaaccggaaagccgttaggtgatggaaagtttctttctcataagaatgaaatcttggaaattgctctggatcaaaaaggacttaccaatgatagaaaaattgctttcattgataaaaatagagatctctgtatcacttctgtgaaacgatttgggaaggaagaacaaattatcaagcttggaacaatggtgcatactttggcatggaacgatacatgcaatatcctttgtggacttcaagatactcgatttatagtgtggtattaccccaatacagtttatgtggacagagacattttgcctaaaacattatatgaaagggatgcaagtgaatttagtaaaaatccccatattgtgagttttgttggaaatcaagtaactattagaagagctgatggctccctggttcacatcagcataacaccatatcctgctattctccatgaatatgtaagcagttcaaaatgggaagatgctgtgagactttgtcgctttgttaaggagcaaaccatgtgggcttgtctagctgctatggcagttgctaatcgagatatgactactgcagaaatagcctatgcagcaattggtgaaattgataaggttcagtacatcaattctataaaaaatcttccatctaaagaatcaaaaatggcccacatactactgtttagtgggaacatacaggaggctgaaatagtacttcttcaggctggccttgtttatcaagcaatccagatcaatattaatctctacaactgggaaagggcactggaattggctgtaaaatacaaaacacatgttgatacagttcttgcttaccgtcaaaagtttttggagacatttggtaaacaggaaactaataaacgatacttgcattatgcagaaggtctccaaatagattgggagaaaatcaaagccaaaattgagatggaaattacaaaagaaagagagcaatcatcaagcagccaatccagcaagagtataggtttaaagccctaaatgccatgcgtatctttaagaaattttatcttttgaaacacgttctgattaaccaagggtaagcatgttttggttgctaaagaaaaaagcataatctttaaccgagtataagtacttgctgtgtatttagtgtaaaagtacatgcagaaagatgaaacacaaagtaattgatgtatttctatcttttatattttttagtccaataattagcaaaatattactatgtacttaagagatacctgtgtagtgtcgattatatgtcagttttttgcccattacttcatccctaaatcttcagcatgaacaaatattaatgtcgataataaaacattggactctttgaaatgtatgttaccattaatttctatttgacctctaaattgtaaaatgcctccaaaagtttatttatagaacaaaaatacatgaggatggatttgtacaaatgtataaaatgccactatttatacaccaagttcatagcagcattactggaatagcaaaagatggaaacagctcaagtgtctatcatgaatggataaacaaatgtgctataatacatacaatggaatattatttagctttaaaaaggaatgaaattctgataaatactacctcaggataaaccttgaaaacactatgctaagtgaaataagccagacacaaaaggccaaatatgatgccacttttatgaggtaccagcataggcaagttcacagaaacagaaaggagaatagtggttgccagggactgcagggaggaggaaatggggggtggggttattgtttaacgagtacatagtttctgtttgggatgaacaaattctggaaatggatagcgatgatggttgctcaacattttgaatgttaatgccactaaattgtacccataaaaatggttaaaatggtaaattttgttatgtatattttatcataatttaaaaaatatatctagaatgggcaagaaggattctcctcattcctctcttgacttgagaatgatcagtcaataggccctgaagtctgaatttgtgaaaatttccttgggtgacaaacttgtttgattactctatttagtgtatcccaaagttattaccacataatcttttaaacaataaaacaaataccccttagaaagtcttctgcaaacccatttctgaaaatggtacattatagggtgggtatagatgcatagatatgggattatgtatgatatatatatatatacacacacacacaaagggatagagagattacctctcttaacccccattttaattactatgtctaggttttttaaataaaaatcttttctttttaacatgtttcttttcttttccggaatattggaatattctgttcttgatccagatgaaatctgattgagcagtgtacttacaagttgtactgtgtatgtgtttcctatattgttatatttcaataagaagcttaaaatgtttaaaaataaatggttaaaaggttttatgttatgtatattttaccacaataaatgcaaaaaataaaaagtctgtgttct

SEQ ID NO: 205886 - DNA, 610 bp, Artificial Sequence
  derived and/or modified sequence
atcgcgggaagaggaagggagcgtaactcttagaagtcactatggtgacggggaggtaccaggtatttgagagcaatcgccaccgctttcctggaacttgaggctggagtgcagtggtgtgatctcggtttactgcaacctccacctcctgagttccagcgattctcctgcctcagcctcctgagtagctgggattacagtaaatacaatcaagtggcatcttaaatttttgctggaagtggagtcatgagactaaagatatctcttttaaaagaaccaaagcatcaagaattagtaagctgtgtgggctggactactgctgaagagctgtattcatgtagtgatgatcaccagatagtgaagtggaacttgttaaccagtgaaacaactcaaatagtaaagcttcctgatgatatttaccctattgattttcactggtttccaaaaagtttgggtgtaaagaaacaaacccaggcagaaagctttgtcctcacaagttctgatggtaaatttcatctgatttccaagttaggaagagtggaaaaaagtgtagaagctcactgtggagcagtacttgcaggaagatggaattatgaaggaacagcattag

SEQ ID NO: 205887 - DNA, 3073 bp, Artificial Sequence
  derived and/or modified sequence
actcggatgacgtgccgcgtagaagtatcgcgggaagaggaagggagcgtaactcttagaagtcactatggtgacggggaggtaccaggtatttgagagcaatcgccaccgctttcctggaacttgagtaaatacaatcaagtggcatcttaaatttttgctggaagtggagtcatgagactaaagatatctcttttaaaagaaccaaagcatatccttttaatgcttataaatcttattggattttcttaattatagtattgttaaaagtttctctattttatatcctagttgaagaatagattttttttttcattcctttagtggctgtttacctaaattgttttaaagtatttaagatcatgtgttaaaaatctggtccttcatcagaactaggaaagcactgatttaaacatttggtcagacattttaaattgaattagtaagctgtgtgggctggactactgctgaagagctgtattcatgtagtgatgatcaccagatagtgaagtggaacttgttaaccagtgaaacaactcaaatagtaaagcttcctgatgatatttaccctattgattttcactggtttccaaaaagtttgggtgtaaagaaacaaacccaggcagaaagctttgtcctcacaagttctgatggtaaatttcatctgatttccaagttaggaagagtggaaaaaagtgtagaagctcactgtggagcagtacttgcaggaagatggaattatgaaggaacagcattagttacagttggagaagatggacaaataaaaatttggtcaaagactgggatgcttagatcaactttagctcagcaaggaacaccagtgtattcagtagcgtggggccctgattcagaaaaggttctttatacagcaggcaagcagctaatcattaaacctcttcaaccaaatgctaaagttttgcagtggaaagctcatgatggcattattttaaaagtagattggaactcggtcaatgatcttattttatctgctggtgaagactgtaaatataaggtatgggatagttacggccgcccactgtacaattcacaacctcatgagcatcccattacttcagttgcctgggctccagatggagaattatttgctgttggatcgtttcatactttacgcttgtgtgataaaactgggtggtcatatgcattagaaaaacccaacactggcagcatatttaatattgcatggtctatcgatggcactcagattgctggagcctgtggaaatggacatgtcgtttttgcacatgtggtggaacaacattgggagtggaaaaattttcaagtaacattaacgaaaagaagagccatgcaggttcgtaatgttcttaatgatgcagtggatttactggaattccgtgatagagtcattaaagcatctttgaactatgcacacttagttgtttcaacgtctcttcaatgttacgtgttctccacgaagaactggaacacaccaattatatttgatctcaaagaaggaactgttagtttgattctgcaggcagaaagacattttcttcttgtagatggtagtagtatctatttatattcatatgaagggcgctttatttcatctccaaaatttcctggaatgagaacagatattctgaatgcacagactgtgtctttgagtaatgataccatagcaataagagacaaagctgatgaaaaaataatcttcctctttgaggcatcaaccggaaagccgttaggtgatggaaagtttctttctcataagaatgaaatcttggaaattgctctggatcaaaaaggacttaccaatgatagaaaaattgctttcattgataaaaatagagatctctgtatcacttctgtgaaacgatttgggaaggaagaacaaattatcaagcttggaacaatggtgcatactttggcatggaacgatacatgcaatatcctttgtggacttcaagatactcgatttatagtgtggtattaccccaatacagtttatgtggacagagacattttgcctaaaacattatatgaaagggatgcaagtgaatttagtaaaaatccccatattgtgagttttgttggaaatcaagtaactattagaagagctgatggctccctggttcacatcagcataacaccatatcctgctattctccatgaatatgtaagcagttcaaaatgggaagatgctgtgagactttgtcgctttgttaaggagcaaaccatgtgggcttgtctagctgctatggcagttgctaatcgagatatgactactgcagaaatagcctatgcagcaattggtgaaattgataaggttcagtacatcaattctataaaaaatcttccatctaaagaatcaaaaatggcccacatactactgtttagtgggaacatacaggaggctgaaatagtacttcttcaggctggccttgtttatcaagcaatccagatcaatattaatctctacaactgggaaagggcactggaattggctgtaaaatacaaaacacatgttgatacagttcttgcttaccgtcaaaagtttttggagacatttggtaaacaggaaactaataaacgatacttgcattatgcagaaggtctccaaatagattgggagaaaatcaaagccaaaattgagatggaaattacaaaagaaagagagcaatcatcaagcagccaatccagcaagagtataggtttaaagccctaaatgccatgcgtatctttaagaaattttatcttttgaaacacgttctgattaaccaagggtaagcatgttttggttgctaaagaaaaaagcataatctttaaccgagtataagtacttgctgtgtatttagtgtaaaagtacatgcagaaagatgaaacacaaagtaattgatgtatttctatcttttatattttttagtccaataattagcaaaatattactatgtacttaagagatacctgtgtagtgtcgattatatgtcagttttttgcccattacttcatccctaaatcttcagcatgaacaaatattaatgtcgataataaaacattggactctttgaaa

SEQ ID NO: 205888 - DNA, 719 bp, Artificial Sequence
  derived and/or modified sequence
tgcgcatgcgcgaactcctggcgggacctacgcggtagaagtttctactaagtgaaaaggaagagcgagggattcttttctctgtggtctacagcagcagcactattattaaaaatatttggaaagacaacctgtaaatacaatcaagtggcatcttaaatttttgctggaagtggagtcatgagactaaagatatctcttttaaaagaaccaaagcatcaagaattagtaagctgtgtgggctggactactgctgaagagctgtattcatgtagtgatgatcaccagatagtgaagtggaacttgttaaccagtgaaacaactcaaatagtaaagcttcctgatgatatttaccctattgattttcactggtttccaaaaagtttgggtgtaaagaaacaaacccaggcagaaagctttgtcctcacaagttctgatggtaaatttcatctgatttccaagttaggaagagtggaaaaaagtgtagaagctcactgtggagcagtacttgcaggaagatggaattatgaaggaacagcattagttacagttggagaagatggacaaataaaaatttggtcaaagactgggatgcttagatcaactttagctcagcaaggaacaccagtgtattcagtagcgtggggccctgattcagaaaaggttctttatacagcaggcaagcagctaatcattaaacctcttcaaccaaatgctaa

SEQ ID NO: 205889 - DNA, 2334 bp, Artificial Sequence
  derived and/or modified sequence
atgaggctgaagatcagcctgctgaaggagcccaagcaccaggagctggtgtcctgtgtgggctggaccacagctgaggagctgtacagctgcagtgatgaccaccagatcgtgaagtggaacctgctgaccagcgagaccacccagatcgtgaagctgcctgatgacatctaccccatcgacttccactggttccccaagagcctgggcgtgaagaagcagacccaggccgagagctttgtgctgaccagcagtgatggcaagttccacctgatcagcaagctgggccgggtggagaagtctgtggaggcccactgtggggctgtgctggccggccgctggaactatgagggcacagccctggtgacagtgggggaggatggccagatcaagatctggagcaagacaggcatgctgcggagcaccctggcccagcagggcacccctgtgtacagcgtggcctggggcccagattctgagaaggtgctgtacacagctgggaagcagctgatcatcaagcccctgcagcccaatgccaaggtgctgcagtggaaggcccatgatggcatcatcctgaaggtggactggaacagcgtgaatgacctgatcctgtctgctggggaggactgcaagtacaaggtgtgggacagctatggccggcccctgtacaacagccagccccatgagcaccccatcacctctgtggcctgggccccagatggagagctgtttgctgtgggcagcttccacaccctgcggctgtgtgacaagacaggctggagctatgccctggagaagcccaacacaggcagcatcttcaacatcgcctggagcattgatggcacccagattgctggggcctgtggaaatggccacgtggtgtttgcccacgtggtggagcagcactgggagtggaagaacttccaggtgaccctgaccaagagaagagccatgcaggtgagaaatgtgctgaatgatgctgtggacctgctggagttccgggacagagtcatcaaggccagcctgaactatgcccacctggtggtgtccaccagcctgcagtgctacgtgttcagcaccaagaactggaacacccccatcatctttgacctgaaggagggcaccgtgtccctcatcctgcaggccgagcggcacttcctgctggtggatggcagcagcatctacctgtacagctatgagggccgcttcatcagcagccccaagtttcctggcatgaggacagacatcctgaatgcccagacagtgtccctgagcaatgacaccatcgccatccgggacaaggcagatgagaagatcatcttcctgtttgaggccagcacaggcaagcccctgggagatggcaagttcctgagccacaagaatgagatcctggagatcgccctggaccagaagggcctgaccaatgacaggaagatcgccttcatcgacaagaacagagacctgtgcatcacctctgtgaagagatttgggaaggaggagcagatcatcaagctgggcaccatggtgcacaccctggcctggaatgacacctgcaacatcctgtgtggcctgcaggacacccgcttcatcgtgtggtactaccccaacacagtgtatgtggaccgggacatcctgcccaagaccctgtatgaaagagatgccagcgagttcagcaagaacccccacatcgtgtcctttgtgggcaaccaggtgaccatccggcgggcagatggcagcctggtgcacatcagcatcaccccctacccagccatcctgcatgaatatgtgagcagcagcaagtgggaggatgctgtgcggctgtgccgctttgtgaaggagcagaccatgtgggcctgcctggccgccatggctgtggccaacagagacatgaccacagctgagatcgcctatgctgccatcggggagattgacaaggtgcagtacatcaacagcatcaagaacctgcccagcaaggagagcaagatggcccacatcctgctcttcagcggcaacatccaggaggccgagatcgtgctgctgcaggccggcctggtgtaccaggccatccagatcaacatcaacctgtacaactgggagcgggccctggagctggccgtgaagtacaagacccacgtggacacagtgctggcctaccggcagaagttcctggagaccttcggcaagcaggagaccaacaagcgctacctgcactatgcagagggcctgcagattgactgggagaagatcaaggccaagattgagatggagatcaccaaggagcgggagcagagcagcagcagccagagcagcaagagcatcggcctgaagccctag

SEQ ID NO: 205890 - DNA, 195 bp, Artificial Sequence
  derived and/or modified sequence
atgaggctgaagatcagcctgctgaaggagcccaagcaccaggagctggtgtcctgtgtgggctggaccacagctgaggagctgtacagctgcagtgatgaccaccagatcgtgaagtggaacctgctgaccagcgagaccacccagatcgtgaagctgcctgatgacatctaccccatcgacttccactggtag

SEQ ID NO: 205891 - DNA, 366 bp, Artificial Sequence
  derived and/or modified sequence
atgaggctgaagatcagcctgctgaaggagcccaagcaccaggagctggtgtcctgtgtgggctggaccacagctgaggagctgtacagctgcagtgatgaccaccagatcgtgaagtggaacctgctgaccagcgagaccacccagatcgtgaagctgcctgatgacatctaccccatcgacttccactggttccccaagagcctgggcgtgaagaagcagacccaggccgagagctttgtgctgaccagcagtgatggcaagttccacctgatcagcaagctgggccgggtggagaagtctgtggaggcccactgtggggctgtgctggccggccgctggaactatgagggcacagccctgtag

SEQ ID NO: 205892 - DNA, 540 bp, Artificial Sequence
  derived and/or modified sequence
atgaggctgaagatcagcctgctgaaggagcccaagcaccaggagctggtgtcctgtgtgggctggaccacagctgaggagctgtacagctgcagtgatgaccaccagatcgtgaagtggaacctgctgaccagcgagaccacccagatcgtgaagctgcctgatgacatctaccccatcgacttccactggttccccaagagcctgggcgtgaagaagcagacccaggccgagagctttgtgctgaccagcagtgatggcaagttccacctgatcagcaagctgggccgggtggagaagtctgtggaggcccactgtggggctgtgctggccggccgctggaactatgagggcacagccctggtgacagtgggggaggatggccagatcaagatctggagcaagacaggcatgctgcggagcaccctggcccagcagggcacccctgtgtacagcgtggcctggggcccagattctgagaaggtgctgtacacagctgggaagcagctgatcatcaagcccctgcagcccaatgcctag

SEQ ID NO: 205893 - DNA, 2334 bp, Artificial Sequence
  derived and/or modified sequence
atgcggctgaagatcagcctgctgaaggagcccaagcaccaggagcttgtgtcctgtgttggctggactacagcagaggagctgtactcctgtagcgatgatcaccagatcgtcaagtggaatttactcacatctgaaaccacccagattgtgaagctcccagatgacatttaccccatagattttcactggtttccaaagtcgctgggagtgaaaaaacagacacaagccgagtccttcgtccttacgagcagtgatggcaagttccatctcatatccaagttgggaagagtagagaagtccgtggaggctcactgcggcgctgtactcgccggcaggtggaattacgagggtaccgcactggttacagttggggaggacgggcaaatcaagatatggagcaagactggcatgctgaggagcaccctggcgcagcaggggactccagtttactctgttgcctggggcccagacagcgagaaagtcctatataccgccgggaagcagttgatcattaagccactgcaacccaacgccaaggtgttgcaatggaaagcacatgacggcatcatcctaaaggtagattggaatagtgtgaacgatctgattctaagcgctggagaggactgtaagtataaggtctgggacagctatgggcggcccctgtataacagccagccacacgagcatcctatcacttcagtggcttgggcacctgatggcgagctctttgctgtcgggtcatttcacacactgaggctatgcgacaagacgggatggtcttacgccctggaaaaaccaaacacaggtagcatttttaacattgcctggagtatagacggcacccagatcgcaggggcatgcggcaacgggcacgtggtctttgcccatgtcgtggagcagcactgggagtggaaaaattttcaagtcacactgacaaaacgtagagctatgcaggtgcggaacgtgctgaacgacgcagttgatctgcttgagttcagagatcgggtaataaaggcatccttgaattacgcccacttggttgtttccacctcactccagtgctacgtgttttcaaccaagaactggaatactcctatcatctttgacctgaaggagggcactgtctcactcatcctgcaggcagagagacactttcttctagtggacggcagctccatttacctatattcttatgagggccggtttatctccagtcccaagttcccggggatgaggactgacatacttaatgctcagacagtctcactgagcaatgacactatcgcaatacgcgacaaggcagacgaaaaaattatctttttgttcgaagcgagcactggaaagccactcggagatggtaaatttctgtcccacaagaacgagattctggagatcgcacttgaccagaagggcctgacaaacgacaggaaaatcgcttttatcgataaaaatagggacctctgcataactagcgtcaaacgctttggaaaagaggagcagatcattaaactgggaacaatggtgcatactttagcatggaacgacacctgtaatatcttatgcggcctccaagatacgagatttattgtgtggtactaccccaacacagtgtatgtcgatagagatatcctgcctaaaactctatacgaacgggatgcatctgagttctcgaagaatccccacattgtgagctttgttggcaaccaggtcacaatccgccgcgccgatggatccttggtgcatatttctatcacgccctaccccgccatccttcacgaatacgtatctagctccaaatgggaagacgcagttcgcctgtgcaggtttgtaaaggagcaaaccatgtgggcgtgcctggctgctatggctgttgctaacagggacatgactactgccgaaatcgcatacgccgcaataggtgaaatcgataaagtgcagtacattaattcaattaagaacctgccttctaaagaatcgaagatggcacacatactgctgttcagcggaaatattcaggaggccgaaattgttcttttacaggcaggtcttgtataccaagctatccagattaatataaacctttataactgggagcgcgccctggagctggcagtcaagtacaaaacccacgttgataccgtattggcctacagacagaagttcctggagacatttggcaagcaagaaacaaataagcgatatctccactacgctgaggggctgcagatcgattgggaaaagataaaggctaaaatagaaatggaaattacaaaggagagggaacagagctcttcatcgcaaagtagtaagagcatcggactgaaaccctag

SEQ ID NO: 205894 - DNA, 195 bp, Artificial Sequence
  derived and/or modified sequence
atgcggctgaagatcagcctgctgaaggagcccaagcaccaggagcttgtgagttgtgtgggctggaccacggcagaagagctgtactcctgttctgatgatcaccagattgtcaagtggaatctccttacttctgagactacccaaatagtaaagttgcctgacgatatatatcccatcgacttccactggtag

SEQ ID NO: 205895 - DNA, 366 bp, Artificial Sequence
  derived and/or modified sequence
atgcggctgaagatcagcctgctgaaggagcccaagcaccaggagctcgtttcttgcgttggctggacgacagctgaagagctctattcatgttccgacgatcaccagatcgtcaagtggaatctactgacttctgaaaccacacagatcgtgaaactccccgatgacatctacccaatagatttccattggttccccaagagtctcggcgtaaagaaacagactcaggccgagtctttcgtattaacaagcagtgacggcaaattccacctgataagcaagttggggcgcgtggagaaaagcgtcgaggcacattgcggcgccgtcctggctgggagatggaactacgaagggaccgctctttag

SEQ ID NO: 205896 - DNA, 540 bp, Artificial Sequence
  derived and/or modified sequence
atgcggctgaagatcagcctgctgaaggagcccaagcaccaggagctggtatcatgcgttggatggactaccgcagaagaattatatagttgttccgacgatcaccaaatcgtcaaatggaacctgctgacctctgagaccactcagattgtgaagctgccggacgacatctatcccatagacttccactggtttcccaagtcgctgggagtcaagaagcagacgcaggcagagtctttcgtcctgactagttcagacggcaagttccacctgatatcaaaacttgggagagtggagaaatcagtggaagcacactgcggcgctgttctcgccggccgttggaactacgagggcaccgctctggtcacagtcggtgaagatgggcagataaagatctggagtaagacaggcatgctaaggtctaccctggcacagcaaggcaccccagtctattccgtcgcttgggggcccgattccgagaaggttctctacaccgcgggcaaacagttgatcattaaacctctccaacccaacgcttag

SEQ ID NO: 205897 - DNA, 2334 bp, Artificial Sequence
  derived and/or modified sequence
atgaggctgaagatttcactcttaaaagagccaaagcaccaggagctggtgagctgtgtcggttggacaactgcggaggaactctactcttgctctgacgatcaccagatcgttaagtggaatctgttgacctcagagaccacgcagattgtgaagctcccagatgatatctacccaatcgattttcattggttccctaagagtctcggggtgaaaaaacaaacacaggctgagagttttgtgctgacgtccagtgacggcaagttccatctgatctccaagctcggccgtgtagagaagtcagtggaggcacactgtggagccgttctggctgggaggtggaattacgagggcactgctctcgtaacggtcggagaggatgggcagattaaaatctggagcaaaaccgggatgctccggtccactcttgcccagcaaggcacacctgtttactccgtagcttggggccctgactccgagaaagtcctatacacagccggtaagcaactcataattaaaccactgcaacccaacgcaaaggtgctgcagtggaaagctcatgacggcattattctcaaggtagattggaatagtgtgaatgacctgatcctgtcagcgggagaagactgtaaatacaaggtgtgggatagctatggacggcctttatataattcccagccccacgaacatcccattaccagcgtcgcctgggcaccagacggggaactgttcgctgtcggatcctttcacacgttgcgactctgtgataaaactggttggagctatgctctggagaagcctaataccggttctatatttaatatcgcatggtcaatcgacggcacccagatcgctggcgcatgcggcaacggccatgtggtcttcgcccatgtcgtggaacaacactgggagtggaagaacttccaggtgacactgacaaagaggagagcaatgcaagtgagaaatgtcctgaacgatgccgtcgatttactggagtttcgcgatcgagtgatcaaagcaagtctgaattacgcacacctcgtggtcagcacaagtctgcaatgctacgtgttcagtacaaaaaattggaataccccgatcatctttgatcttaaagagggaacagtctccttaatcctgcaggcggagcgccactttctgttagtggacggcagctctatctacctgtacagctatgagggacgctttatttcatcacctaagttcccagggatgagaactgatattttgaatgcacagaccgtgagtctttctaacgacactattgcaatcagagataaagcggacgagaaaatcatatttctgtttgaagcatcaaccgggaaaccgctgggagacggaaagttcttgtcacataaaaatgaaattcttgagattgcactagaccaaaaggggctaacgaacgataggaaaattgcatttatcgacaagaacagagatctatgtatcaccagcgtcaagcgctttggaaaagaggagcagataatcaagctcggcactatggtgcataccctcgcctggaacgacacctgtaatattctgtgcggcttacaggatacaaggttcattgtgtggtattatccaaacactgtgtatgtggatcgggatatcctgcctaagaccctttatgagagggatgccagcgagttctctaagaatccacacatcgtttccttcgttgggaaccaggtgacaattagacgggctgacggatcgctggtgcatatctccataactccatatcctgcgattttgcacgagtacgtctcatccagtaaatgggaagatgcggtgagactgtgtaggttcgtgaaggaacagacaatgtgggcctgtctcgccgctatggccgtggccaaccgagatatgaccacagcagaaattgcctacgccgctattggagagattgataaggttcagtatatcaactcgataaagaacctgcctagtaaagagagcaagatggctcatatcctgctgttctcagggaatatccaagaggcagagattgtcctgctgcaggctggcctggtgtatcaggcaatccagataaatattaatctgtacaactgggagcgcgcacttgagctggccgtaaaatacaagacacatgtagataccgtcctggcctacaggcagaaatttttggagacttttggcaaacaggagaccaataaaagatatcttcattacgccgagggcctccagatcgactgggagaagatcaaagctaagattgaaatggagattaccaaggaacgagaacagtcatcttcgagccaatccagcaaaagcatcggccttaagccctag

SEQ ID NO: 205898 - DNA, 195 bp, Artificial Sequence
  derived and/or modified sequence
atgagactgaagatttccttactgaaggagccaaaacaccaggagctggtttcttgcgtgggctggaccaccgcggaagaactgtactcttgctcagatgatcaccagattgtgaagtggaacctgctgacaagcgagacaacacaaatcgtaaagctgcctgatgacatttacccaatcgattttcattggtag

SEQ ID NO: 205899 - DNA, 366 bp, Artificial Sequence
  derived and/or modified sequence
atgcggctgaagatctccctgttaaaagagccaaaacaccaagaacttgtgtcctgcgtcgggtggactacggctgaagaactgtacagctgcagcgatgatcaccagatagttaagtggaatttgctcacgtcggaaaccactcagatagtcaaactgcccgacgatatttaccccatcgactttcactggtttcccaaaagccttggtgtgaaaaagcagacccaggccgagtcatttgtactgacttccagtgacggcaagttccatctcatctccaaactgggacgggtggagaaaagtgtggaggcgcactgcggggctgtcctggcagggagatggaattacgaggggactgctctctag

SEQ ID NO: 205900 - DNA, 540 bp, Artificial Sequence
  derived and/or modified sequence
atgaggctcaagatcagcttgcttaaagagccaaaacaccaggaactggtgtcatgtgttggctggaccacagccgaggaactgtactcatgcagcgatgaccatcagatagtcaaatggaacctgctcacctccgagaccacccagatcgtcaagttaccggacgacatttacccaatcgactttcactggttcccaaagtctttgggtgtaaaaaaacagactcaagcagagtcgtttgtgctgacatccagcgatgggaaatttcacctcatctccaagttgggcagggtggagaagtcagtggaagcccactgtggggctgtgctggcgggaaggtggaattatgaaggcaccgcactggtcacagtcggcgaggacggccaaatcaaaatttggtcaaagacggggatgctcagatccactctggctcagcagggcacccctgtctactcagtagcgtggggtccagactcagaaaaagttctgtatacggccggaaagcagttaatcatcaagcctctgcaaccgaacgcctag

SEQ ID NO: 205901 - DNA, 2334 bp, Artificial Sequence
  derived and/or modified sequence
atgagactgaagatcagcctgctgaaggagcccaagcaccaggagctggtgagctgcgtgggctggaccaccgccgaggagctgtacagctgcagcgacgaccaccagatcgtgaagtggaacctgctgaccagcgagaccacccagatcgtgaagctgcccgacgacatctaccccatcgacttccactggttccccaagagcctgggcgtgaagaagcagacccaggccgagagcttcgtgctgaccagcagcgacggcaagttccacctgatcagcaagctgggcagagtggagaagagcgtggaggcccactgcggcgccgtgctggccggcagatggaactacgagggcaccgccctggtgaccgtgggcgaggacggccagatcaagatctggagcaagaccggcatgctgagaagcaccctggcccagcagggcacccccgtgtacagcgtggcctggggccccgacagcgagaaggtgctgtacaccgccggcaagcagctgatcatcaagcccctgcagcccaacgccaaggtgctgcagtggaaggcccacgacggcatcatcctgaaggtggactggaacagcgtgaacgacctgatcctgagcgccggcgaggactgcaagtacaaggtgtgggacagctacggcagacccctgtacaacagccagccccacgagcaccccatcaccagcgtggcctgggcccccgacggcgagctgttcgccgtgggcagcttccacaccctgagactgtgcgacaagaccggctggagctacgccctggagaagcccaacaccggcagcatcttcaacatcgcctggagcatcgacggcacccagatcgccggcgcctgcggcaacggccacgtggtgttcgcccacgtggtggagcagcactgggagtggaagaacttccaggtgaccctgaccaagagaagagccatgcaggtgagaaacgtgctgaacgacgccgtggacctgctggagttcagagacagagtgatcaaggccagcctgaactacgcccacctggtggtgagcaccagcctgcagtgctacgtgttcagcaccaagaactggaacacccccatcatcttcgacctgaaggagggcaccgtgagcctgatcctgcaggccgagagacacttcctgctggtggacggcagcagcatctacctgtacagctacgagggcagattcatcagcagccccaagttccccggcatgagaaccgacatcctgaacgcccagaccgtgagcctgagcaacgacaccatcgccatcagagacaaggccgacgagaagatcatcttcctgttcgaggccagcaccggcaagcccctgggcgacggcaagttcctgagccacaagaacgagatcctggagatcgccctggaccagaagggcctgaccaacgacagaaagatcgccttcatcgacaagaacagagacctgtgcatcaccagcgtgaagagattcggcaaggaggagcagatcatcaagctgggcaccatggtgcacaccctggcctggaacgacacctgcaacatcctgtgcggcctgcaggacaccagattcatcgtgtggtactaccccaacaccgtgtacgtggacagagacatcctgcccaagaccctgtacgagagagacgccagcgagttcagcaagaacccccacatcgtgagcttcgtgggcaaccaggtgaccatcagaagagccgacggcagcctggtgcacatcagcatcaccccctaccccgccatcctgcacgagtacgtgagcagcagcaagtgggaggacgccgtgagactgtgcagattcgtgaaggagcagaccatgtgggcctgcctggccgccatggccgtggccaacagagacatgaccaccgccgagatcgcctacgccgccatcggcgagatcgacaaggtgcagtacatcaacagcatcaagaacctgcccagcaaggagagcaagatggcccacatcctgctgttcagcggcaacatccaggaggccgagatcgtgctgctgcaggccggcctggtgtaccaggccatccagatcaacatcaacctgtacaactgggagagagccctggagctggccgtgaagtacaagacccacgtggacaccgtgctggcctacagacagaagttcctggagaccttcggcaagcaggagaccaacaagagatacctgcactacgccgagggcctgcagatcgactgggagaagatcaaggccaagatcgagatggagatcaccaaggagagagagcagagcagcagcagccagagcagcaagagcatcggcctgaagccctag

SEQ ID NO: 205902 - DNA, 195 bp, Artificial Sequence
  derived and/or modified sequence
atgagactgaagatcagcctgctgaaggagcccaagcaccaggagctggtgagctgcgtgggctggaccaccgccgaggagctgtacagctgcagcgacgaccaccagatcgtgaagtggaacctgctgaccagcgagaccacccagatcgtgaagctgcccgacgacatctaccccatcgacttccactggtag

SEQ ID NO: 205903 - DNA, 366 bp, Artificial Sequence
  derived and/or modified sequence
atgagactgaagatcagcctgctgaaggagcccaagcaccaggagctggtgagctgcgtgggctggaccaccgccgaggagctgtacagctgcagcgacgaccaccagatcgtgaagtggaacctgctgaccagcgagaccacccagatcgtgaagctgcccgacgacatctaccccatcgacttccactggttccccaagagcctgggcgtgaagaagcagacccaggccgagagcttcgtgctgaccagcagcgacggcaagttccacctgatcagcaagctgggcagagtggagaagagcgtggaggcccactgcggcgccgtgctggccggcagatggaactacgagggcaccgccctgtag

SEQ ID NO: 205904 - DNA, 540 bp, Artificial Sequence
  derived and/or modified sequence
atgagactgaagatcagcctgctgaaggagcccaagcaccaggagctggtgagctgcgtgggctggaccaccgccgaggagctgtacagctgcagcgacgaccaccagatcgtgaagtggaacctgctgaccagcgagaccacccagatcgtgaagctgcccgacgacatctaccccatcgacttccactggttccccaagagcctgggcgtgaagaagcagacccaggccgagagcttcgtgctgaccagcagcgacggcaagttccacctgatcagcaagctgggcagagtggagaagagcgtggaggcccactgcggcgccgtgctggccggcagatggaactacgagggcaccgccctggtgaccgtgggcgaggacggccagatcaagatctggagcaagaccggcatgctgagaagcaccctggcccagcagggcacccccgtgtacagcgtggcctggggccccgacagcgagaaggtgctgtacaccgccggcaagcagctgatcatcaagcccctgcagcccaacgcctag

SEQ ID NO: 205905 - protein, 414 aa, Artificial Sequence
  derived and/or modified sequence
MVLGKVKSLTISFDCLNDSNVPVYSSGDTVSGRVNLEVTGEIRVKSLKIHARGHAKVRWTESRNAGSNTAYTQNYTEEVEYFNHKDILIGHERDDDNSEEGFHTIHSGRHEYAFSFELPQTPLATSFEGRHGSVRYWVKAELHRPWLLPVKLKKEFTVFEHIDINTPSLLSPQAGTKEKTLCCWFCTSGPISLSAKIERKGYTPGESIQIFAEIENCSSRMVVPKAAIYQTQAFYAKGKMKEVKQLVANLRGESLSSGKTETWNGKLLKIPPVSPSILDCSIIRVEYSLMVYVDIPGAMDLFLNLPLVIGTIPLHPFGSRTSSVSSQCSMNMNWLSLSLPERPEAPPSYAEVVTEEQRRNNLAPVSACDDFERALQGPLFAYIQEFRFLPPPLYSEIDPNPDQSADDRPSCPSR

SEQ ID NO: 205906 - DNA, 1245 bp, Artificial Sequence
  derived and/or modified sequence
atggtattaggcaaggtcaagtcactcactattagtttcgactgtcttaatgactctaacgtgcccgtttactcctctggagacaccgtttccggccgcgttaatctagaagtaacgggggaaatccgggttaagagtttaaaaatccacgctagaggccacgctaaagtacgatggaccgaatcgcggaacgcggggagcaacacagcatacacccaaaattatactgaggaagtggagtacttcaaccacaaagatatcctcatcggccatgaacgagacgacgacaacagcgaagaaggttttcacaccattcactccgggcgacacgagtacgccttctcattcgaacttccccaaactcccttggccactagctttgagggtcgccacggttctgtgcgctattgggtgaaggctgaacttcaccgaccctggcttcttccagtaaagctgaagaaagagtttactgtcttcgagcacatcgatataaatactcctagcctgctgagtcctcaggccggaactaaggagaagacattatgttgctggttttgtacttctggcccaattagtttatcagccaagatcgaacggaaggggtacactcccggggaaagcattcaaatttttgccgagatagaaaactgtagtagccgcatggttgtgccaaaagccgccatatatcagacccaggcgttctatgcaaagggcaaaatgaaagaggtcaaacagctagtggcaaacctgagaggggagagcctgtcttcaggcaaaactgagacttggaacgggaagctacttaagattccgccagtgagcccatcaatccttgactgctcaatcattcgcgtggagtacagcctgatggtttacgtggacattccaggggctatggatctgttcctgaacctgcccctggttataggcacgatacccctgcacccgttcggctcccgcacctcatctgtgagctcacagtgctcgatgaacatgaactggctgtcactgtcactaccggagcgcccagaggctcccccctcatatgccgaggtggtgacagaggagcaaagaaggaacaatctggcccctgtctcggcctgcgatgatttcgagcgtgctcttcaaggccctctgtttgcctacatacaagaatttagattccttccacctcctctttattcggagattgacccgaatccagaccagagcgcggacgatcgaccctcgtgtccatcccggtag

SEQ ID NO: 205907 - DNA, 1245 bp, Artificial Sequence
  derived and/or modified sequence
atggtgctgggcaaggtgaagagcctgaccatcagctttgactgcctgaatgacagcaatgtgcctgtgtacagcagcggggacacagtgtctggccgggtgaacctggaggtgactggagagatccgggtgaagagcctgaagatccacgcccggggccacgccaaggtgcgctggacagagagcagaaatgccggcagcaacacagcctacacccagaactacacagaggaggtggagtacttcaaccacaaggacatcctgattggacatgaaagagatgatgacaacagcgaggagggcttccacaccatccacagcggcagacatgaatatgccttctcctttgagctgccccagacccccctggccaccagctttgagggcagacatggctctgtgcgctactgggtgaaggccgagctgcaccggccctggctgctgcctgtgaagctgaagaaggagttcaccgtgtttgagcacatcgacatcaacacccccagcctgctgagcccccaggccggcaccaaggagaagaccctgtgctgctggttctgcaccagcggccccatcagcctgagcgccaagattgaaaggaagggctacaccccaggagagagcatccagatctttgctgagattgagaactgcagcagcaggatggtggtgcccaaggccgccatctaccagacccaggccttctacgccaagggcaagatgaaggaggtgaagcagctggtggccaacctgcggggggagagcctgagcagcggcaagacagagacctggaatggcaagctgctgaagatcccccctgtgagccccagcatcctggactgcagcatcatccgggtggagtacagcctgatggtgtatgtggacatccctggggccatggacctcttcctgaacctgcccctggtgattggcaccatccccctgcaccccttcggcagcaggaccagctctgtgagcagccagtgcagcatgaacatgaactggctgagcctgagcctgcctgagaggcctgaggccccacccagctatgcagaggtggtgacagaggagcagaggaggaacaacctggcccctgtgtctgcctgtgatgactttgagcgggccctgcagggccccctgtttgcctacatccaggagttccgcttcctgcccccacccctgtacagcgagattgaccccaacccagaccagagcgcagatgaccggcccagctgccccagcaggtag

SEQ ID NO: 205908 - DNA, 1245 bp, Artificial Sequence
  derived and/or modified sequence
atggtgctgggcaaggtgaagagcctgaccatcagcttcgactgcctgaacgattcaaatgtgcccgtatactcttccggagatacagtgagcggccgggttaacctggaagtgactggtgagatccgagtcaaaagccttaaaattcatgcaagggggcatgctaaagtcaggtggaccgagagtaggaacgcgggtagtaatactgcttatactcagaattacaccgaagaagttgagtactttaaccacaaagatattctgataggccatgagagggacgacgacaactctgaagagggattccacaccatccacagtggtcgccacgagtatgcattttcgtttgagctaccacagacccctttagctaccagcttcgaaggcagacatgggtccgtgcggtactgggtaaaggccgagctgcataggccatggctcctacctgttaagctcaaaaaagaattcacggtattcgagcatatcgatatcaataccccctctctactgtcccctcaggccggcaccaaagaaaagacactgtgctgctggttttgtactagtgggccaatcagtctcagcgcaaaaattgaacgaaaggggtacacacccggtgagagcatacagattttcgctgagatagagaactgctcctctagaatggtcgtccccaaggcagccatctaccagacccaggctttttatgccaagggcaagatgaaggaagtcaaacaactcgttgccaatctccgcggagagtctctcagctcaggcaaaacagagacatggaacggcaagctgctgaagattcctccagtcagccctagcatcttggactgttctattattagggtggagtacagcctaatggtttacgtcgacatccccggcgccatggatctcttcttgaatctgcctctggtcattgggaccatccctctacacccattcggctcaaggactagctcagtatcatcccagtgttctatgaatatgaattggctcagcctgtcacttccggaacgaccagaagcgccaccatcctacgctgaagtcgttaccgaggaacaacgcagaaacaatttagctcctgtgtcagcttgcgacgacttcgagcgagctcttcagggcccacttttcgcctatatacaggaatttcggttcttgcccccccctctctatagtgagatcgaccctaatcccgaccagtctgcggacgaccgcccaagttgtccgagtagatag

SEQ ID NO: 205909 - DNA, 1245 bp, Artificial Sequence
  derived and/or modified sequence
atggtgcttggcaaagttaagtccttaacaatatctttcgactgtttgaacgactcgaacgtgcctgtgtacagcagtggtgacacagtgagcgggagggtgaacctggaggtaaccggcgaaattagggttaaaagtctcaagatccacgcccgtggtcacgccaaggtcaggtggacagagtcccgaaacgccggaagcaatacagcctatacccaaaactacacagaagaggtggagtattttaaccacaaagatatcctgatagggcatgagagggatgatgataactcagaggaaggattccacactattcactcaggcagacacgagtacgctttctccttcgagctgccacagacacccctcgcaaccagtttcgaaggcaggcacggcagtgtgaggtactgggtgaaggcagagttgcatcgtccatggcttctgcctgttaagctaaaaaaggagtttactgtattcgagcatatagatattaacacacccagtttgctaagcccccaggccggaaccaaagagaaaaccttgtgttgctggttctgtacatccggccctatttcgctgagtgcaaaaatcgaaagaaaagggtatacgccaggcgaatccatccagatttttgctgagatagagaactgctcttcacgtatggtagtgcccaaagccgctatttaccagacgcaggccttctacgcaaagggaaagatgaaagaggtgaagcagttggtcgcaaatcttagaggtgaatccctctctagcggtaaaaccgaaacctggaacgggaagttgcttaagatacctccagtatcgccctctattctggattgtagcatcatccgcgttgaatactctctcatggtctacgtagatatcccgggtgccatggacctatttctgaatcttcctttggtgatcggaacaatacccctccacccgttcgggagcaggacgtcttctgtgtcatctcaatgtagcatgaacatgaattggttgagcctaagcctgccggagcggccagaggcccctccgagctatgcggaggttgtgactgaagaacagagacgtaataatctcgccccagtttctgcatgcgacgattttgagcgagccctgcagggaccactctttgcctatatacaggagtttagatttctcccaccccctctgtactctgaaatcgatccaaacccagaccagtcagctgatgaccgcccttcctgtccctcacgttag

SEQ ID NO: 205910 - DNA, 4188 bp, Artificial Sequence
  derived and/or modified sequence
acaaagctgctcttaaagtgagctggcagcttttagccgcccgtctttgtaaggagaccactgagacgagcgggagcgcggagcagcagcctctgctgccctgactttttaagaaatctcaatgaactatttgtagagaatcactgatccggcctgcaagcattttgcacggcaaaaatatcgatcagtgttaagtgaagatcacattttatatgcgatcttgacttttttgtcttacattatatttttatagattttgttataaacatggtgctgggaaaggtgaagagtttgacaataagctttgactgtcttaatgacagcaatgtccctgtgtattctagtggggataccgtctcaggaagggtaaatttagaagttactggggaaatcagagtaaaatctcttaaaattcatgcaagaggacatgcgaaagtacgctggactgaatctagaaacgccggctccaatactgcctatacacagaattacactgaagaagtagagtatttcaaccataaagacatcttaattgggcacgaaagagatgatgataattccgaagaaggcttccacactattcattcaggaaggcatgaatatgcattcagcttcgagcttccacagacaccactcgctacctcattcgaaggccgacatggcagtgtgcgctattgggtgaaagccgaattgcacaggccttggctactaccagtaaaattaaagaaggaatttacagtctttgagcatatagatatcaacactccttcattactgtcaccccaagcaggcacaaaagaaaagacactctgttgctggttctgtacctcaggcccaatatccttaagtgccaaaattgaaaggaagggctataccccaggtgaatcaattcagatatttgctgagattgagaactgctcttcccgaatggtggtgccaaaggcagccatttaccaaacacaggccttctatgccaaagggaaaatgaaggaagtaaaacagcttgtggctaacttgcgtggggaatccttatcatctggaaagacagagacgtggaatggcaagttgctgaaaattccaccagtttctccctctatcctcgactgtagtataatccgcgtggaatattcactaatggtatatgtggatattcctggagctatggatttatttcttaatttgccacttgtcatcggtaccattcctctacatccatttggtagcagaacctcaagtgtaagcagtcagtgtagcatgaatatgaactggctcagtttatcacttcctgaaagacctgaagcaccacccagctatgcagaagtggtaacagaggaacaaaggcggaacaatcttgcaccagtgagtgcttgtgatgactttgagagagcccttcaaggaccactgtttgcatatatccaggagtttcgattcttgcctccacctctttattcagagattgatccaaatcctgatcagtcagcagatgatagaccatcctgcccctctcgttgaaggaacacttggttgaatcaagttgatgtgggttccgaactgtatctcttccggctgaggacagagaagtatcttggagacacgtttcagaggaagtggaattacttttgcccagaaaaatggcgaatacatgaaacaaccagtgatcatgctttagaagcctacagcaacattctgagactgctccaacatgcttgaagatctaagcttttctcttttaaaactggcacatactcagagcagtcttcttagcctatggtcgtacgtgtcaagacatcacgttgtaaagagggatgatttccttcttttgatttgaaaatttgcacatgctcaatgcttacattgtgcggttcgacgtcactacagcttctttttttttttttttttttttctatttttgccagactcttgatactcttaaaacttgtttgtggtcagcacaacaaggaacaaaacaaagctttgaaaaaactttaacatgaaaaaacgcactgacatttttttttatttaatatagcctggactttacctgcgtatgcacatgctcagaattgtctactaggctgactatgtatcacctcttcagcttggatccaattgtggatttatttacaaacatcaaatgccttcaagccaatcctttttgctgtatgttttgcagcctactgtagtagatacgcaacagataatgtgggaaaaaaagagataagaggaggaagctaataagagactgtcaagattgtataccttcttggtttcttttaagaatttgttgcctttctactattacagcaaagcagcattttgttactgactgcctaaaatcacttaatctcaggtgaacgcatcacttgccaaactgttggaatgctatttgtgttttgttgcactgtttttttcgtttgtttgtttgtttatttggttggctttttggagagggaaatttggaaacgggacatacacaaaagttacacacccacattccctttttatcatgacatacaagaagaaactagcagagctaagaatggagtgaagaaaggcagtatggcaggcaccagcaaagagttgagggctgttgctcttaaaaattattttttttattattattttgaaagtatggaagttttccattcactggggaaaggagggaaaagtgcatttatttttatacagagttacttaattacctccaaaacacatatgttggaaatcgcttttgctggtgcaaagtatattaatgagcaggaatacatacattgaggttatgaatagagagctcaatttgtacctttgctgtcttgctcaagcttggtatggcatgaaaactcgactttattccaaaagtaacttcaaaatttaaaatactagaacgtttgctgcgataaatcttttggatttttgtgtttttctaatgagaatactgtttttcattacctaaagaacaatttgctaaacatgagaaatcactcactttgattatgtatagattacataggaagaacaatcacatcagtaagttatagtttatattaaaggtaattttctgttggctcataacaaatataccagcattcatgatagcatttcagcattttccaaggtaccaagtgtacttattttgttgttgttgttgttgttgtattttagaaggaattcagctctgatgtttttaaagaaaaccagcatctctgatgttgcaacatacgtgtaaaatgggtgttacatctatcctgccatttaaccccacagttaataaagtggctgaaaataatagtagctctggcttggtgcttgacctggttaaatactgtcttaaagctcatacaaaacaaataggcttttccataagtggcctttaagaaaacatggaagacaattcatgtttgacaaatgctgacagggtgaagaaagcccagtgtaaaaatgaatcgcgttttaagtgattcggttaaagagtttgggctcccgtagcaaactaatactagataataaggaaatgggggtgaaatatttttttattgttgaatcattttgtgaatgtccccctcaaaaaaagctaatggaatatttggcataaagggcatttggtggttttatttttgtttgagggggattgtcagaaaatcccttttctctcttacgtctaactgactagggaacaattgttgatatgcatagcattggaatacttgtcattatatactcttacaaataacacatgaagcaagaatgaccaatattctgataattggcactggatcacaaaatgtgataaaactttaaatgtataaaactttatcaaataaagttttattttcccctttaaaatgtatttctttagaggcattacttttttaaaaatattggtcaattcctgacataagatgtgaggttcacagttgtattccagtattcaagatagattcctgatttttcaattaggaaaagtaaaatccaaaatgttagcaaaacaaagtgcaatattaaatgtttgctttatagattatattctatggctgtttgtaatttctctttttttccttttttatttggtgctgaatatgtccttgtaggctctgttttaagaaaacaatatgtgggaaatgatttaatttttcctattgctcttccttgtggaaaataaagtgttttgtttttttctgttttgtataa

SEQ ID NO: 205911 - DNA, 1245 bp, Artificial Sequence
  derived and/or modified sequence
atggtgctgggcaaggtgaagagcctgaccatcagcttcgactgcctgaacgacagcaacgtgcccgtgtacagcagcggcgacaccgtgagcggcagagtgaacctggaggtgaccggcgagatcagagtgaagagcctgaagatccacgccagaggccacgccaaggtgagatggaccgagagcagaaacgccggcagcaacaccgcctacacccagaactacaccgaggaggtggagtacttcaaccacaaggacatcctgatcggccacgagagagacgacgacaacagcgaggagggcttccacaccatccacagcggcagacacgagtacgccttcagcttcgagctgccccagacccccctggccaccagcttcgagggcagacacggcagcgtgagatactgggtgaaggccgagctgcacagaccctggctgctgcccgtgaagctgaagaaggagttcaccgtgttcgagcacatcgacatcaacacccccagcctgctgagcccccaggccggcaccaaggagaagaccctgtgctgctggttctgcaccagcggccccatcagcctgagcgccaagatcgagagaaagggctacacccccggcgagagcatccagatcttcgccgagatcgagaactgcagcagcagaatggtggtgcccaaggccgccatctaccagacccaggccttctacgccaagggcaagatgaaggaggtgaagcagctggtggccaacctgagaggcgagagcctgagcagcggcaagaccgagacctggaacggcaagctgctgaagatcccccccgtgagccccagcatcctggactgcagcatcatcagagtggagtacagcctgatggtgtacgtggacatccccggcgccatggacctgttcctgaacctgcccctggtgatcggcaccatccccctgcaccccttcggcagcagaaccagcagcgtgagcagccagtgcagcatgaacatgaactggctgagcctgagcctgcccgagagacccgaggccccccccagctacgccgaggtggtgaccgaggagcagagaagaaacaacctggcccccgtgagcgcctgcgacgacttcgagagagccctgcagggccccctgttcgcctacatccaggagttcagattcctgcccccccccctgtacagcgagatcgaccccaaccccgaccagagcgccgacgacagacccagctgccccagcagatag

SEQ ID NO: 205912 - protein, 1117 aa, Artificial Sequence
  derived and/or modified sequence
MLAGRPGTRSAVGELGTESSDNLDRAPLGPRESGGHHRPGSYLDMKIHLEKNLEEERQILLQQQKICRNRARKYFVESNRRKKAFEEKRKEQEEKEHQIREQILQQRKQKFEEVTEKFQRAHVPLSQRRKAVSRKPVPPLEEALKQIQESNLKSEVNLPFSRRPTINWRAIDSALPSALSKNDHKHQKQLLSKINCEKEMNENMRATLATSKNVFQLKLEETQKLLEDQHLSNLQKFGDEVNQITNSETLSSIDSLEATEHEEIYLTLNKEHSTSIQRNTISLKPANMQSTNLSCFDEDKLAFSKTQHINNWLTNLDASNTQNVTAFSDILSKSNVLPSWEYFNSKEQNPSPLNGTVERATNTANNSVPFVSSPPMFVLDKKCEKTSETSTMRTTDSTSGAFKRERPLVTESPTFKFSKSQSTSDSLTQEVATFPDQEKYSELNQENGTTSIPTSCVPVATPLVLPSNIQSARPSAKNSIHIKEIDAVQCSDKLDELKDGKEEEIKYFNCNKEELPLFSDSFQDAYIPHNPDSKDEKQKLAETSSLSNVTSNYDFVGQHKKMKYNIHERNGVRFLKSILKKESKYEHGYLKALIINQSFKFGNQKAAAIRDSIELTKEKGAEIPKTIKKLRWFDETSNIENNAENSHSLKNKTGTTQQHSQQFHIQSGAGSNIISVSTCAVNSADTKKSREDSISENVTTLGGSGADHMPLNCFIPSGYNFAKHAWPASKKEESKIPVHDDSKTKQGKPQRGRAKIIRKPGSAKVQSGFICTNRKGAVIQPQSASKVNIFTQAQGKLIIPCPPPQSTSNIRSGKNIQVSQCQPVTPENPQNIITHNSFNSKHVLPTEHSLNQWNQESSSPLSNACSDLVTVIPSLPSYCSSECQTFAKINHSNGTQAVARQDATLYCTQRSPVCEESYPSVTLRTAEEESVPLWKRGPNVLHQNKRATGSTVMRRKRIAETKRRNILEQKRQNPGSVGQKYSEQINNFGQSVLLSSSEPKQTTRGTSYIEEVSDSTSEFLMAENLVKASVPEDEILTVLNSKQIQKSNLPLNKTQQFNICTLSAEEQKILESLNDLSERLHYIQESICKNPSIKNTLQIIPLLEKREDRTSSCRDKR

SEQ ID NO: 205913 - protein, 918 aa, Artificial Sequence
  derived and/or modified sequence
MNENMRATLATSKNVFQLKLEETQKLLEDQHLSNLQKFGDEVNQITNSETLSSIDSLEATEHEEIYLTLNKEHSTSIQRNTISLKPANMQSTNLSCFDEDKLAFSKTQHINNWLTNLDASNTQNVTAFSDILSKSNVLPSWEYFNSKEQNPSPLNGTVERATNTANNSVPFVSSPPMFVLDKKCEKTSETSTMRTTDSTSGAFKRERPLVTESPTFKFSKSQSTSDSLTQEVATFPDQEKYSELNQENGTTSIPTSCVPVATPLVLPSNIQSARPSAKNSIHIKEIDAVQCSDKLDELKDGKEEEIKYFNCNKEELPLFSDSFQDAYIPHNPDSKDEKQKLAETSSLSNVTSNYDFVGQHKKMKYNIHERNGVRFLKSILKKESKYEHGYLKALIINQSFKFGNQKAAAIRDSIELTKEKGAEIPKTIKKLRWFDETSNIENNAENSHSLKNKTGTTQQHSQQFHIQSGAGSNIISVSTCAVNSADTKKSREDSISENVTTLGGSGADHMPLNCFIPSGYNFAKHAWPASKKEESKIPVHDDSKTKQGKPQRGRAKIIRKPGSAKVQSGFICTNRKGAVIQPQSASKVNIFTQAQGKLIIPCPPPQSTSNIRSGKNIQVSQCQPVTPENPQNIITHNSFNSKHVLPTEHSLNQWNQESSSPLSNACSDLVTVIPSLPSYCSSECQTFAKINHSNGTQAVARQDATLYCTQRSPVCEESYPSVTLRTAEEESVPLWKRGPNVLHQNKRATGSTVMRRKRIAETKRRNILEQKRQNPGSVGQKYSEQINNFGQSVLLSSSEPKQTTRGTSYIEEVSDSTSEFLMAENLVKASVPEDEILTVLNSKQIQKSNLPLNKTQQFNICTLSAEEQKILESLNDLSERLHYIQESICKNPSIKNTLQIIPLLEKREDRTSSCRDKR

SEQ ID NO: 205914 - DNA, 3354 bp, Artificial Sequence
  derived and/or modified sequence
atgctggccggcagacccggcaccagaagcgccgtgggcgagctgggcaccgagagcagcgacaacctggacagagcccccctgggccccagagagagcggcggccaccacagacccggcagctacctggacatgaagatccacctggagaagaacctggaggaggagagacagatcctgctgcagcagcagaagatctgcagaaacagagccagaaagtacttcgtggagagcaacagaagaaagaaggccttcgaggagaagagaaaggagcaggaggagaaggagcaccagatcagagagcagatcctgcagcagagaaagcagaagttcgaggaggtgaccgagaagttccagagagcccacgtgcccctgagccagagaagaaaggccgtgagcagaaagcccgtgccccccctggaggaggccctgaagcagatccaggagagcaacctgaagagcgaggtgaacctgcccttcagcagaagacccaccatcaactggagagccatcgacagcgccctgcccagcgccctgagcaagaacgaccacaagcaccagaagcagctgctgagcaagatcaactgcgagaaggagatgaacgagaacatgagagccaccctggccaccagcaagaacgtgttccagctgaagctggaggagacccagaagctgctggaggaccagcacctgagcaacctgcagaagttcggcgacgaggtgaaccagatcaccaacagcgagaccctgagcagcatcgacagcctggaggccaccgagcacgaggagatctacctgaccctgaacaaggagcacagcaccagcatccagagaaacaccatcagcctgaagcccgccaacatgcagagcaccaacctgagctgcttcgacgaggacaagctggccttcagcaagacccagcacatcaacaactggctgaccaacctggacgccagcaacacccagaacgtgaccgccttcagcgacatcctgagcaagagcaacgtgctgcccagctgggagtacttcaacagcaaggagcagaaccccagccccctgaacggcaccgtggagagagccaccaacaccgccaacaacagcgtgcccttcgtgagcagcccccccatgttcgtgctggacaagaagtgcgagaagaccagcgagaccagcaccatgagaaccaccgacagcaccagcggcgccttcaagagagagagacccctggtgaccgagagccccaccttcaagttcagcaagagccagagcaccagcgacagcctgacccaggaggtggccaccttccccgaccaggagaagtacagcgagctgaaccaggagaacggcaccaccagcatccccaccagctgcgtgcccgtggccacccccctggtgctgcccagcaacatccagagcgccagacccagcgccaagaacagcatccacatcaaggagatcgacgccgtgcagtgcagcgacaagctggacgagctgaaggacggcaaggaggaggagatcaagtacttcaactgcaacaaggaggagctgcccctgttcagcgacagcttccaggacgcctacatcccccacaaccccgacagcaaggacgagaagcagaagctggccgagaccagcagcctgagcaacgtgaccagcaactacgacttcgtgggccagcacaagaagatgaagtacaacatccacgagagaaacggcgtgagattcctgaagagcatcctgaagaaggagagcaagtacgagcacggctacctgaaggccctgatcatcaaccagagcttcaagttcggcaaccagaaggccgccgccatcagagacagcatcgagctgaccaaggagaagggcgccgagatccccaagaccatcaagaagctgagatggttcgacgagaccagcaacatcgagaacaacgccgagaacagccacagcctgaagaacaagaccggcaccacccagcagcacagccagcagttccacatccagagcggcgccggcagcaacatcatcagcgtgagcacctgcgccgtgaacagcgccgacaccaagaagagcagagaggacagcatcagcgagaacgtgaccaccctgggcggcagcggcgccgaccacatgcccctgaactgcttcatccccagcggctacaacttcgccaagcacgcctggcccgccagcaagaaggaggagagcaagatccccgtgcacgacgacagcaagaccaagcagggcaagccccagagaggcagagccaagatcatcagaaagcccggcagcgccaaggtgcagagcggcttcatctgcaccaacagaaagggcgccgtgatccagccccagagcgccagcaaggtgaacatcttcacccaggcccagggcaagctgatcatcccctgcccccccccccagagcaccagcaacatcagaagcggcaagaacatccaggtgagccagtgccagcccgtgacccccgagaacccccagaacatcatcacccacaacagcttcaacagcaagcacgtgctgcccaccgagcacagcctgaaccagtggaaccaggagagcagcagccccctgagcaacgcctgcagcgacctggtgaccgtgatccccagcctgcccagctactgcagcagcgagtgccagaccttcgccaagatcaaccacagcaacggcacccaggccgtggccagacaggacgccaccctgtactgcacccagagaagccccgtgtgcgaggagagctaccccagcgtgaccctgagaaccgccgaggaggagagcgtgcccctgtggaagagaggccccaacgtgctgcaccagaacaagagagccaccggcagcaccgtgatgagaagaaagagaatcgccgagaccaagagaagaaacatcctggagcagaagagacagaaccccggcagcgtgggccagaagtacagcgagcagatcaacaacttcggccagagcgtgctgctgagcagcagcgagcccaagcagaccaccagaggcaccagctacatcgaggaggtgagcgacagcaccagcgagttcctgatggccgagaacctggtgaaggccagcgtgcccgaggacgagatcctgaccgtgctgaacagcaagcagatccagaagagcaacctgcccctgaacaagacccagcagttcaacatctgcaccctgagcgccgaggagcagaagatcctggagagcctgaacgacctgagcgagagactgcactacatccaggagagcatctgcaagaaccccagcatcaagaacaccctgcagatcatccccctgctggagaagagagaggacagaaccagcagctgcagagacaagagatag

SEQ ID NO: 205915 - DNA, 2757 bp, Artificial Sequence
  derived and/or modified sequence
atgaacgagaacatgagagccaccctggccaccagcaagaacgtgttccagctgaagctggaggagacccagaagctgctggaggaccagcacctgagcaacctgcagaagttcggcgacgaggtgaaccagatcaccaacagcgagaccctgagcagcatcgacagcctggaggccaccgagcacgaggagatctacctgaccctgaacaaggagcacagcaccagcatccagagaaacaccatcagcctgaagcccgccaacatgcagagcaccaacctgagctgcttcgacgaggacaagctggccttcagcaagacccagcacatcaacaactggctgaccaacctggacgccagcaacacccagaacgtgaccgccttcagcgacatcctgagcaagagcaacgtgctgcccagctgggagtacttcaacagcaaggagcagaaccccagccccctgaacggcaccgtggagagagccaccaacaccgccaacaacagcgtgcccttcgtgagcagcccccccatgttcgtgctggacaagaagtgcgagaagaccagcgagaccagcaccatgagaaccaccgacagcaccagcggcgccttcaagagagagagacccctggtgaccgagagccccaccttcaagttcagcaagagccagagcaccagcgacagcctgacccaggaggtggccaccttccccgaccaggagaagtacagcgagctgaaccaggagaacggcaccaccagcatccccaccagctgcgtgcccgtggccacccccctggtgctgcccagcaacatccagagcgccagacccagcgccaagaacagcatccacatcaaggagatcgacgccgtgcagtgcagcgacaagctggacgagctgaaggacggcaaggaggaggagatcaagtacttcaactgcaacaaggaggagctgcccctgttcagcgacagcttccaggacgcctacatcccccacaaccccgacagcaaggacgagaagcagaagctggccgagaccagcagcctgagcaacgtgaccagcaactacgacttcgtgggccagcacaagaagatgaagtacaacatccacgagagaaacggcgtgagattcctgaagagcatcctgaagaaggagagcaagtacgagcacggctacctgaaggccctgatcatcaaccagagcttcaagttcggcaaccagaaggccgccgccatcagagacagcatcgagctgaccaaggagaagggcgccgagatccccaagaccatcaagaagctgagatggttcgacgagaccagcaacatcgagaacaacgccgagaacagccacagcctgaagaacaagaccggcaccacccagcagcacagccagcagttccacatccagagcggcgccggcagcaacatcatcagcgtgagcacctgcgccgtgaacagcgccgacaccaagaagagcagagaggacagcatcagcgagaacgtgaccaccctgggcggcagcggcgccgaccacatgcccctgaactgcttcatccccagcggctacaacttcgccaagcacgcctggcccgccagcaagaaggaggagagcaagatccccgtgcacgacgacagcaagaccaagcagggcaagccccagagaggcagagccaagatcatcagaaagcccggcagcgccaaggtgcagagcggcttcatctgcaccaacagaaagggcgccgtgatccagccccagagcgccagcaaggtgaacatcttcacccaggcccagggcaagctgatcatcccctgcccccccccccagagcaccagcaacatcagaagcggcaagaacatccaggtgagccagtgccagcccgtgacccccgagaacccccagaacatcatcacccacaacagcttcaacagcaagcacgtgctgcccaccgagcacagcctgaaccagtggaaccaggagagcagcagccccctgagcaacgcctgcagcgacctggtgaccgtgatccccagcctgcccagctactgcagcagcgagtgccagaccttcgccaagatcaaccacagcaacggcacccaggccgtggccagacaggacgccaccctgtactgcacccagagaagccccgtgtgcgaggagagctaccccagcgtgaccctgagaaccgccgaggaggagagcgtgcccctgtggaagagaggccccaacgtgctgcaccagaacaagagagccaccggcagcaccgtgatgagaagaaagagaatcgccgagaccaagagaagaaacatcctggagcagaagagacagaaccccggcagcgtgggccagaagtacagcgagcagatcaacaacttcggccagagcgtgctgctgagcagcagcgagcccaagcagaccaccagaggcaccagctacatcgaggaggtgagcgacagcaccagcgagttcctgatggccgagaacctggtgaaggccagcgtgcccgaggacgagatcctgaccgtgctgaacagcaagcagatccagaagagcaacctgcccctgaacaagacccagcagttcaacatctgcaccctgagcgccgaggagcagaagatcctggagagcctgaacgacctgagcgagagactgcactacatccaggagagcatctgcaagaaccccagcatcaagaacaccctgcagatcatccccctgctggagaagagagaggacagaaccagcagctgcagagacaagagatag

SEQ ID NO: 205916 - DNA, 3354 bp, Artificial Sequence
  derived and/or modified sequence
atgctcgccggtcggccagggaccagaagcgccgtgggagagctgggcaccgagtctagcgataatttggatcgcgccccactaggacctagggaatcgggaggccaccaccgccccggctcatacctggatatgaagatccaccttgagaaaaatctggaagaggaacgccaaatcctgctgcagcagcagaaaatctgtaggaaccgcgcacgaaaatattttgtggaatccaacagacgcaaaaaggcattcgaggagaaaagaaaagagcaggaggagaaggaacaccagatccgcgaacaaatactgcagcaacgcaagcaaaagttcgaggaagtgacagagaaattccagagggcgcacgtgcctctatcccagcgaaggaaggctgtatcccgcaagcctgtgccaccactggaggaggctctcaaacaaatacaggagagcaatctgaaatccgaggtcaacctccccttcagcagaaggccgactataaactggagggccatagatagtgcactgcccagcgctctgtccaagaatgaccataaacaccagaagcagctcttgtccaaaataaattgcgaaaaagaaatgaacgaaaatatgcgcgcaacactggcaactagcaaaaacgtgtttcagctgaaacttgaggaaacgcagaagttactggaggaccagcatttgtccaacttacagaagttcggagatgaggtgaaccaaatcactaactctgagacactgtccagtatcgattccttagaggcaacagaacacgaagaaatttacctgactcttaacaaagagcactcaacaagtatccaacgaaacactatctcgttgaaaccagcaaatatgcagagtaccaacctcagctgtttcgacgaggataaactggcattctcaaagactcaacacataaacaattggttaacaaacctcgacgccagtaacacccagaatgtgaccgccttctccgatatcctgtccaaatctaacgttttgccttcctgggagtatttcaacagcaaagagcagaacccctctccattaaacggtacagttgagagagccaccaacacggctaacaactccgtcccattcgtatctagcccgcccatgtttgtcctggataagaagtgcgagaagactagcgagaccagcactatgcgtacaacagacagcacgagcggcgcctttaaaagagagcgccccctggtcactgaatctccaacatttaaatttagtaagagtcagagtacaagcgactccctcacacaggaggtcgcgacattcccggaccaggagaaatacagcgaattgaaccaagagaacgggacaacctctattcctacatcatgtgtcccagtagccacccctctcgtcctgcccagcaacatccaatcagcccgcccaagcgccaaaaattccattcacattaaggagattgacgccgtgcagtgtagtgataaattggacgagctaaaggacgggaaagaggaagagatcaagtactttaactgtaataaagaggaactccctctcttcagcgattcttttcaggatgcttatatcccccacaatcccgacagtaaggatgagaagcaaaagctggctgaaacaagtagcctgtccaatgtcactagcaactatgactttgttgggcaacacaagaaaatgaagtacaatatccacgaaaggaacggagtgagatttctcaaatctatcctcaagaaagaatcaaaatatgagcatggctacctcaaagcccttataattaaccagtcctttaagttcgggaatcagaaagcagcggctattagagattctatcgaattgacaaaggagaaaggggcggagattcccaaaaccatcaagaagttgcgttggtttgacgaaaccagtaatattgagaacaatgccgagaacagtcactctctgaaaaataaaacaggcacaactcagcagcactcacagcagtttcacatccaatcaggcgccggatctaatataatcagcgtgtccacctgcgcagtcaacagcgccgatacaaaaaagtccagggaggactcaattagcgaaaacgtcacaacattgggaggttctggagcagaccacatgcccctcaattgctttatcccaagtggttacaactttgcaaagcacgcttggcctgcttctaagaaagaagagagcaaaatcccggtccacgacgactccaagaccaaacaagggaagccacaaaggggcagggccaagattatcaggaagccgggatccgcaaaggtgcagtctggtttcatatgcacaaataggaagggtgcggtcattcaaccccagtctgcatccaaagtgaacatttttactcaggcacaggggaaactgatcatcccctgtccccctcctcagtccacctctaatatccgctctggtaagaatatccaggtgtcacagtgccaaccagtaactcctgaaaacccccagaatattatcacacataattcatttaatagcaaacatgttctgcctaccgaacactctctgaaccagtggaatcaggaaagcagcagtcctctgtccaatgcctgtagcgatttggtcaccgtcatcccctcgctccccagttattgctcgagcgagtgccagaccttcgccaagatcaaccactcgaacggtactcaggccgttgcaagacaagatgcaactctctactgtacccagcgatcgccggtgtgcgaggagtcttacccttctgttactttgcgaaccgccgaggaagaatctgttcccctgtggaagagagggccgaacgttctgcaccagaataaacgagccaccggttctaccgtcatgaggagaaagcggattgccgaaactaaaaggcgaaatatcttggagcagaagcgacagaaccccgggagtgttggccagaaatactcagagcagatcaataactttgggcagtctgtgttgctttctagctcagagcctaagcagaccacgcggggcacaagttatatcgaggaggtgagtgactcaaccagcgagtttttgatggccgagaacctggttaaggcgtcagtgccggaagatgagattctgacggttctgaattctaaacagattcaaaagtccaatctccctctcaataagacacaacaattcaatatttgtacgctttccgccgaggaacaaaaaattctggagtctcttaacgatctctcagagcgactgcactacatccaggaatccatctgcaaaaatccatcaattaaaaacactttgcagatcattcccctgctggaaaagcgtgaagacagaaccagctcctgcagagataaacgctag

SEQ ID NO: 205917 - DNA, 2757 bp, Artificial Sequence
  derived and/or modified sequence
atgaacgaaaacatgcgcgccaccctcgccacgtcaaagaacgttttccagttgaaactggaggaaacccagaagcttctggaggaccagcacctgagtaacctgcagaaattcggcgatgaggtgaaccagattaccaactccgagacactgtcttctattgatagcctcgaggccacagaacacgaagagatctaccttacactcaacaaggaacacagcaccagtatccaaagaaatacaatctcactgaagcctgctaacatgcagtccacaaacctctcttgttttgatgaggacaagctcgcttttagtaagacacagcacattaacaactggctcacaaatctcgatgcctccaacacccaaaatgttaccgcctttagcgacattttgtcgaagagcaatgtgctcccatcctgggagtatttcaattccaaggagcagaatcccagtcctctgaatgggactgtcgagagggctacaaacaccgcgaacaacagcgtgccattcgtttccagcccgcccatgttcgtgctcgacaagaagtgcgaaaaaacctcagagaccagtaccatgagaaccactgatagcaccagcggcgcctttaaaagagaaaggccactggttacggaaagcccgaccttcaagttctcaaaatcacagtctacgtctgactctctaactcaggaagtggcgacgtttccagatcaggagaagtactcagagctgaaccaagagaacgggaccacaagcatacccacctcctgcgtgcctgtcgccacccccttagtgcttccatctaatattcagagtgctcgtccctccgccaaaaactcaatccacatcaaggaaattgacgcggttcaatgctccgacaaactagatgagctgaaagacggaaaagaagaggagatcaagtacttcaattgtaacaaggaggagctccccttgttctcagacagttttcaggacgcctacatcccgcataatcccgattctaaggatgagaaacaaaagcttgctgaaacctctagtctctccaacgtgacatctaactatgactttgtcggacaacacaaaaagatgaagtataatattcacgagcgcaacggagttaggtttctgaagagcattctcaagaaggaaagtaagtatgagcacggatatctcaaggctttgattattaatcagtcatttaaatttggtaatcagaaggctgccgccatcagagacagcattgagctgactaaggagaagggcgctgaaatccctaagacaattaagaaattgaggtggttcgacgagaccagcaacatcgagaataacgccgagaatagtcactccttgaaaaacaaaacagggacaacccagcaacatagccaacagtttcacatccagagtggggccggtagtaatataatatcagtctctacttgcgctgtgaattcggccgacactaaaaaaagcagagaagacagcattagcgagaatgtgactacgcttggcggatcaggcgctgaccacatgcccctgaattgcttcataccctctgggtacaattttgctaaacacgcatggcccgctagtaagaaagaagagagcaagatcccagtgcatgacgacagcaagacaaagcagggcaagccccaacggggtagagccaaaatcattagaaaaccaggatcagcaaaggtgcagagcggctttatttgcaccaataggaaaggagctgtaattcagcctcagagtgcctccaaagtgaatatcttcacccaggcccagggaaagctaatcatcccctgtccacctcctcaatcaacctccaatataagaagcggcaagaatatacaggtctctcagtgccagcctgtcactccagagaacccgcagaacatcatcacacataactcattcaacagcaagcatgtgctgcctaccgaacattccctcaatcagtggaaccaggaatcttcaagtcccttgagcaacgcttgctccgatctagtgacggtgataccctctctcccctcttattgttcctcagagtgtcagacattcgcaaagatcaaccactccaatggcactcaggcggtggctaggcaggatgcaacactgtactgtactcagcgctctcctgtgtgcgaggaaagctaccctagcgtgactctgcgcactgcagaggaagagtctgtgcctctgtggaaaaggggccctaatgtgctacaccagaataagcgagcaactggttcaactgtgatgagaaggaagcgcatcgccgagacgaagagacgcaatatcctggagcagaagcgccagaaccccgggagcgtggggcagaagtatagcgaacagataaataatttcggccaatccgttcttctgtcgtcttcggagcctaaacagacaacacgaggaacatcctacattgaagaagtgtccgattctacctctgagttcctgatggctgagaatctggtcaaggcaagcgtgcccgaggatgagattttgaccgtgctcaatagtaaacaaatccagaagtctaatctgcccctaaacaaaacacagcagtttaacatatgcactctgagtgccgaggagcaaaagatcctcgaatcattaaatgatctgtcagaacgtctacactatatacaggagagtatatgtaaaaatccaagtattaagaatacattgcaaatcatcccccttttggaaaaacgcgaggaccggacctcttcttgtcgcgacaagaggtag

SEQ ID NO: 205918 - DNA, 3354 bp, Artificial Sequence
  derived and/or modified sequence
atgctggccggccggcccggcaccaggtctgctgtgggggagctgggcacagagagcagtgacaacctggaccgggcccccctgggcccccgggagagcggcggccaccacaggcctggcagctacctggacatgaagatccacctggagaagaacctggaggaggagcggcagatcctgctgcagcagcagaagatctgcaggaacagagccaggaagtactttgtggagagcaacagaaggaagaaggcctttgaggagaagaggaaggagcaggaggagaaggagcaccagatccgggagcagatcctgcagcagaggaagcagaagtttgaggaggtgacagagaagttccagagggcccacgtgcccctgagccagaggaggaaggctgtgtccaggaagcctgtgccccccctggaggaggccctgaagcagatccaggagagcaacctgaagtctgaggtgaacctgcccttcagccggcggcccaccatcaactggagggccattgattctgccctgcccagcgccctgagcaagaatgaccacaagcaccagaagcagctgctgagcaagatcaactgtgagaaggagatgaatgaaaacatgagggccaccctggccaccagcaagaatgtgttccagctgaagctggaggagacccagaagctgctggaggaccagcacctgagcaacctgcagaagtttggagatgaggtgaaccagatcaccaacagcgagaccctgagcagcattgacagcctggaggccacagaacatgaggagatctacctgaccctgaacaaggagcacagcaccagcatccagaggaacaccatcagcctgaagccagccaacatgcagagcaccaacctgagctgctttgatgaggacaagctggccttcagcaagacccagcacatcaacaactggctgaccaacctggatgccagcaacacccagaatgtgacagccttcagtgacatcctgagcaagagcaatgtgctgcccagctgggagtacttcaacagcaaggagcagaaccccagccccctgaatggcaccgtggagcgggccaccaacacagccaacaacagcgtgccctttgtgagcagcccccccatgtttgtgctggacaagaagtgtgagaagaccagcgagaccagcaccatgaggaccacagacagcaccagcggggccttcaagcgggagcggcccctggtgacagagagccccaccttcaagttcagcaagagccagagcaccagtgacagcctgacccaggaggtggccaccttcccagaccaggagaagtacagcgagctgaaccaggagaatggcaccaccagcatccccaccagctgtgtgcctgtggccacccccctggtgctgcccagcaacatccagagcgcccggcccagcgccaagaacagcatccacatcaaggagattgatgctgtgcagtgcagcgacaagctggatgagctgaaggatggcaaggaggaggagatcaagtacttcaactgcaacaaggaggagctgcccctcttcagtgacagcttccaggatgcctacatcccccacaacccagacagcaaggatgagaagcagaagctggccgagaccagcagcctgagcaatgtgaccagcaactatgactttgtgggccagcacaagaagatgaagtacaacatccatgaaagaaatggagtgcgcttcctgaagagcatcctgaagaaggagagcaaatatgaacatggctacctgaaggccctgatcatcaaccagagcttcaagtttggaaaccagaaggctgctgccatccgggacagcattgagctgaccaaggagaagggagctgagatccccaagaccatcaagaagctgcgctggtttgatgagaccagcaacatcgagaacaatgctgagaacagccacagcctgaagaacaagacaggcaccacccagcagcacagccagcagttccacatccagagcggggccggcagcaacatcatctctgtgtccacctgtgctgtgaacagcgctgacaccaagaagagcagagaagattccatcagtgaaaatgtgaccaccctgggcggcagcggggctgaccacatgcccctgaactgcttcatccccagcggctacaactttgccaagcacgcctggccagccagcaagaaggaggagagcaagatccctgtgcatgatgacagcaagaccaagcagggcaagccccagaggggccgggccaagatcatcaggaagccaggcagcgccaaggtgcagagcggcttcatctgcaccaacagaaaaggagctgtgatccagccccagagcgccagcaaggtgaacatcttcacccaggcccagggcaagctgatcatcccctgccccccaccccagagcaccagcaacatccgcagcggcaagaacatccaggtgtcccagtgccagcctgtgaccccagagaacccccagaacatcatcacccacaacagcttcaacagcaagcacgtgctgcccacagagcacagcctgaaccagtggaaccaggagagcagcagccccctgagcaatgcctgcagcgacctggtgaccgtcatccccagcctgcccagctactgcagcagcgagtgccagacctttgccaagatcaaccacagcaatggcacccaggccgtggcccggcaggatgccaccctgtactgcacccagaggagccctgtgtgtgaggagagctaccccagcgtgaccctgaggacagctgaggaggagagcgtgcccctgtggaagaggggccccaacgtgctgcaccagaacaagagggccaccggcagcacagtgatgaggaggaagagaattgctgagaccaagagaagaaacatcctggagcagaagaggcagaaccctggctctgtgggccagaagtacagcgagcagatcaacaactttggccagagcgtgctgctgagcagcagcgagcccaagcagaccacccggggcaccagctacatcgaggaggtgtctgacagcaccagcgagttcctgatggccgagaacctggtgaaggcctctgtgcctgaagatgagatcctgactgtgctgaacagcaagcagatccagaagagcaacctgcccctgaacaagacccagcagttcaacatctgcaccctgtctgctgaggagcagaagatcctggagagcctgaatgacctgtctgagcggctgcactacatccaggagagcatctgcaagaaccccagcatcaagaacaccctgcagatcatccccctgctggagaagcgggaggacaggaccagcagctgccgggacaagaggtag

SEQ ID NO: 205919 - DNA, 2757 bp, Artificial Sequence
  derived and/or modified sequence
atgaatgaaaacatgagggccaccctggccaccagcaagaatgtgttccagctgaagctggaggagacccagaagctgctggaggaccagcacctgagcaacctgcagaagtttggagatgaggtgaaccagatcaccaacagcgagaccctgagcagcattgacagcctggaggccacagagcacgaggagatctacctgaccctgaacaaggagcacagcaccagcatccagaggaacaccatcagcctgaagccagccaacatgcagagcaccaacctgagctgctttgatgaggacaagctggccttcagcaagacccagcacatcaacaactggctgaccaacctggatgccagcaacacccagaatgtgacagccttcagtgacatcctgagcaagagcaatgtgctgcccagctgggagtacttcaacagcaaggagcagaaccccagccccctgaatggaacagtggagcgggccaccaacacagccaacaacagcgtgccctttgtgagcagcccccccatgtttgtgctggacaagaagtgtgagaagaccagcgagaccagcaccatgaggaccacagacagcaccagcggggccttcaagcgggagcggcccctggtgacagagagccccaccttcaagttcagcaagagccagagcaccagtgacagcctgacccaggaggtggccaccttcccagaccaggagaagtacagcgagctgaaccaggagaatggcaccaccagcatccccaccagctgtgtgcctgtggccacccccctggtgctgcccagcaacatccagagcgcccggcccagcgccaagaacagcatccacatcaaggagattgatgctgtgcagtgcagcgacaagctggatgagctgaaggatggcaaggaggaggagatcaagtacttcaactgcaacaaggaggagctgcccctcttcagtgacagcttccaggatgcctacatcccccacaacccagacagcaaggatgagaagcagaagctggccgagaccagcagcctgagcaatgtgaccagcaactatgactttgtgggccagcacaagaagatgaagtacaacatccacgagagaaatggagtgcgcttcctgaagagcatcctgaagaaggagagcaaatatgagcacggctacctgaaggccctgatcatcaaccagagcttcaagtttggaaaccagaaggccgccgccatccgggacagcattgagctgaccaaggagaagggagctgagatccccaagaccatcaagaagctgcgctggtttgatgagaccagcaacattgaaaataatgctgagaacagccacagcctgaagaacaagacaggcaccacccagcagcacagccagcagttccacatccagagcggggccggcagcaacatcatctctgtgtccacctgtgctgtgaacagcgctgacaccaagaagagccgggaggacagcatcagtgaaaatgtgaccaccctgggcggcagcggggctgaccacatgcccctgaactgcttcatccccagcggctacaactttgccaagcacgcctggccagccagcaagaaggaggagagcaagatccctgtgcatgatgacagcaagaccaagcagggcaagccccagaggggccgggccaagatcatcaggaagccaggcagcgccaaggtgcagagcggcttcatctgcaccaacaggaagggggccgtcatccagccccagagcgccagcaaggtgaacatcttcacccaggcccagggcaagctgatcatcccctgccccccaccccagagcaccagcaacatccgcagcggcaagaacatccaggtgtcccagtgccagcctgtgaccccagagaacccccagaacatcatcacccacaacagcttcaacagcaagcacgtgctgcccacagagcacagcctgaaccagtggaaccaggagagcagcagccccctgagcaatgcctgcagcgacctggtgaccgtcatccccagcctgcccagctactgcagcagcgagtgccagacctttgccaagatcaaccacagcaatggcacccaggccgtggcccggcaggatgccaccctgtactgcacccagaggagccctgtgtgtgaggagagctaccccagcgtgaccctgaggacagctgaggaggagagcgtgcccctgtggaagaggggccccaacgtgctgcaccagaacaagagggccaccggcagcacagtgatgaggaggaagagaattgctgagaccaagagaagaaacatcctggagcagaagaggcagaaccctggctctgtgggccagaagtacagcgagcagatcaacaactttggccagagcgtgctgctgagcagcagcgagcccaagcagaccacccggggcaccagctacatcgaggaggtgtctgacagcaccagcgagttcctgatggccgagaacctggtgaaggcctctgtgcctgaagatgagatcctgactgtgctgaacagcaagcagatccagaagagcaacctgcccctgaacaagacccagcagttcaacatctgcaccctgtctgctgaggagcagaagatcctggagagcctgaatgacctgtctgagcggctgcactacatccaggagagcatctgcaagaaccccagcatcaagaacaccctgcagatcatccccctgctggagaagcgggaggacaggaccagcagctgccgggacaagaggtag

SEQ ID NO: 205920 - DNA, 3354 bp, Artificial Sequence
  derived and/or modified sequence
atgctggccggccggcccggcacccggagcgccgtgggcgagctgggcacagaaagcagcgacaacttggaccgggctcccctgggtcccagagaaagtggagggcaccacagacccggctcctatctggacatgaaaatccacttagagaagaatctcgaggaagagagacagattcttcttcaacagcagaaaatatgtaggaaccgggctaggaagtacttcgttgaaagcaacagaagaaaaaaagcctttgaagagaagcggaaggagcaagaagaaaaggagcaccagatcagagaacaaatactgcaacagcgtaagcagaagtttgaagaagtgactgaaaaattccagagggctcacgtgccactatcacagcgccgaaaagcggttagccgaaagccagtcccccctctagaggaagcccttaagcagattcaggaatccaatcttaagagtgaggtgaatttaccattctctcgtcgcccaaccattaattggagggccattgacagcgccctcccaagcgccctctccaaaaatgatcacaaacaccaaaagcagctgctctcgaaaatcaactgcgaaaaggagatgaacgagaacatgagggctactctggccacctctaaaaatgttttccaattgaagctggaggagacacagaagttactggaggatcagcatttgagtaacctgcagaaattcggtgacgaagtgaatcagattaccaacagcgagacacttagttctatcgacagcctcgaggccaccgaacacgaggaaatatatctgaccctgaacaaggaacatagtacatcgattcagcgcaataccatatctctgaagcctgccaacatgcagtcaaccaatctgtcttgcttcgacgaggataagcttgcctttagcaaaactcagcacattaacaattggctaaccaacctggacgcatcgaacacccagaatgttacagcatttagcgatatcctgagcaaatctaatgtcctgccaagctgggagtactttaactctaaggaacaaaaccctagtccgcttaacggaacagttgagcgagcaaccaacacagccaacaactctgtacccttcgtaagttccccacctatgttcgtgctggacaagaagtgtgagaaaaccagtgagacctccacaatgcgcacgacagattctacctctggtgccttcaaacgggagagacctctggttaccgagtcccccacatttaaattctccaaatcccagtctacttcagattcacttacccaggaggtggcaacattccctgatcaggaaaagtactccgaactcaatcaggaaaacggaacaacctctatccccacgagctgcgtgcctgtggcgactcctttggttctcccctctaatattcaaagcgcccgcccgtctgcaaaaaattctattcatattaaggaaatcgatgcagtgcagtgtagtgacaagctcgatgagttaaaggacggaaaggaggaggagattaagtacttcaactgcaataaggaggaactgcctctgttcagcgacagttttcaggacgcttatattccccacaatcccgacagtaaggacgagaaacagaagctggccgagacttcctcgctatcaaatgtcaccagcaattacgattttgtgggacagcataaaaagatgaagtacaatatacatgaaaggaacggtgtccggttcctcaagtccatcttgaagaaagagtctaagtatgagcacggctacctaaaggccttgatcattaatcagagcttcaaattcggcaatcagaaagccgcggctataagggactctattgagctgaccaaggagaaaggtgcagaaatccctaaaaccatcaagaaactgagatggtttgacgagacatccaatattgagaacaacgccgaaaattctcatagcttgaagaataagacaggcaccacccagcagcattcccagcagttccatatccagtctggtgccggtagcaatattatctctgtcagcacctgcgcagtgaattccgcagatacaaaaaagtcacgagaagacagcatttccgagaacgtaaccaccctgggggggtcgggcgccgaccacatgcccctgaactgctttatcccgtccggatataactttgccaagcacgcctggccggctagcaaaaaagaggaaagcaaaattcccgtccacgacgacagcaaaactaagcagggtaagcctcagaggggccgcgccaaaattattcgcaagcccggtagcgcaaaagttcagagcggctttatctgcactaatcgaaaaggcgccgtgatacagccacagtccgcttccaaagtcaatatatttacacaggctcaaggaaaactgattatcccatgtcctccaccccagtcaacatccaacatccggtcaggcaaaaatatccaggtgtctcagtgtcagcctgtgacaccggagaacccccagaatattataacccacaattcatttaactctaaacacgttcttcctactgaacactctctgaatcagtggaaccaggaatcatcttcccccttgtccaacgcttgttcggatctcgtcaccgtcattcccagccttccttcctactgttcatcagagtgccaaaccttcgcaaaaatcaaccatagcaacggcacccaagcagttgcacggcaagacgcaaccctctattgcactcaaaggtctcccgtgtgtgaagagtcgtatccctccgtgacactgcgcacagctgaggaggaatccgtccccctctggaagcgcgggcctaacgtgctccaccagaataaaagagcgactgggtctactgtcatgcggaggaaacgcatcgctgagacgaaaagacggaacatcctggaacagaagaggcagaacccaggttccgttggtcaaaagtactcggagcagatcaacaacttcggacagagtgtgctgttgtcatctagcgagcccaagcagactactcgaggaactagctacatcgaagaggtgtctgattcaacctctgagttcttaatggcagagaatctcgtcaaagcatccgtgccggaggatgagatactcaccgtgctgaactctaagcagatccaaaagtctaatcttcccctcaataaaactcagcaatttaacatatgcactctgagcgccgaggagcaaaagatcctggaaagcctgaatgatctttctgagaggctccactatatacaagaaagcatatgcaaaaatccttccatcaaaaacactctgcaaatcattccactcttggaaaagcgggaagaccgcaccagcagctgcagagataaacggtag

SEQ ID NO: 205921 - DNA, 2757 bp, Artificial Sequence
  derived and/or modified sequence
atgaacgagaacatgcgggccaccctggccaccagcaagaacgtgttccagctgaaattggaggaaacccagaagttactagaagaccagcacttatctaatcttcaaaaattcggagacgaggtcaatcaaattactaattctgagacgctatcttctatcgactccctggaagccaccgagcacgaagagatttacttgacacttaataaggagcactctacgtcgattcagcgtaacacaatctccttgaagccggccaacatgcagagcactaacctatcctgtttcgatgaagacaagctcgctttttcgaagacccagcacatcaataattggctcactaatctcgacgcatctaatacccagaatgtaactgcgttcagcgatatcctctctaaaagtaacgtattgccttcatgggagtattttaatagcaaagaacaaaatccatcaccactaaacggaaccgtggagcgcgccacaaatacggctaataacagcgtgccttttgtctccagtccccccatgttcgtgcttgataagaaatgtgagaagactagtgagactagcaccatgcgcaccactgacagcacctccggcgcatttaagagggaaaggccgctggtgacagagtccccaaccttcaaatttagcaaatcacaatctacaagtgacagtttgacccaggaggttgccactttccccgaccaggaaaagtattccgaactgaatcaggagaatggaacaacatcgattccgacgagttgcgtgcctgtcgctacacctctggttctcccctccaatattcagagcgcccgcccgtccgctaagaacagtattcacatcaaagaaattgatgccgtgcagtgctcggataagctagatgagctgaaagatggcaaggaagaagagatcaagtactttaactgtaacaaggaagagctccccctcttctctgattcctttcaggacgcctatataccccacaatccagactcaaaagatgagaagcagaagcttgccgaaacgtcctctctctcaaacgttacctcaaactacgacttcgtgggtcaacataagaagatgaagtacaacattcacgagcggaatggcgttagattcttgaagagcatactgaagaaggaaagtaagtacgagcacggatacctgaaagctttgatcatcaatcagtctttcaaatttgggaaccagaaggcagctgccatacgagattccattgagttaactaaggaaaaaggcgctgagattcccaagaccataaaaaaattaagatggtttgacgaaacgtccaatattgagaacaacgcggagaactctcatagcctgaaaaacaagacagggactacccagcaacatagccagcagttccacattcaaagcggagctggttcaaatataatcagcgtgagtacatgcgccgtgaattccgctgatacaaagaagtccagggaagactccattagcgagaacgttaccaccttgggtggtagcggcgcggaccacatgcctctgaattgcttcattccctctggctataacttcgctaagcacgcgtggccagcaagtaagaaggaagaatctaagatcccagtccatgacgatagcaaaacaaagcaggggaaaccgcagcgtgggagggcaaagatcatccgtaagccgggcagcgccaaagtacaaagtggcttcatttgcaccaatcgtaaaggagcagttatccagccacagtcagcctctaaagtgaatattttcacacaggctcagggcaaattaattattccgtgtccccccccccagagtacctccaatatcaggtcaggcaaaaacatccaggtctcccagtgccagcctgtgacacccgaaaatccacagaacataatcacccataacagctttaacagcaaacatgtcctacccactgagcactctctcaatcagtggaaccaggagtcatcttcccccctctccaacgcatgcagcgacttggttacagtgattccaagcttgccgagctactgcagctccgagtgccagacctttgccaaaattaaccactccaatggcacacaggccgtagctcgccaagacgcaacgttgtactgtacccagagatcacccgtctgcgaagaatcataccccagtgtaaccctccggaccgccgaggaggagagtgtccctctctggaagcgggggcccaacgtactgcatcaaaacaaacgagcaacgggctccacagtgatgcgcagaaagaggatcgcggaaacgaagaggagaaatatcctcgaacagaaaaggcagaacccagggtccgtcggtcagaagtactcggaacaaatcaataactttggccagtccgtgctgctgtccagttcagaaccaaagcaaacaacccgcgggacctcttacatcgaagaggtatccgacagcacgagtgaatttttgatggccgaaaatctcgtgaaggcttccgtgcctgaggatgagatcctgacagtgctgaattccaagcagatacagaagagtaatttgcctctgaacaaaacacagcagttcaacatttgtacccttagcgcagaggaacagaagatcctggaaagcctgaatgatctgtccgaacgtttacactatatccaggaatccatttgcaagaatccatctataaaaaatactctacagattatcccattattggagaagcgcgaggacaggacgagttcctgccgggataagcgctag

SEQ ID NO: 205922 - DNA, 3354 bp, Artificial Sequence
  derived and/or modified sequence
atgctggcaggacgccctggcacccgaagtgccgtgggcgaactcggaaccgagtcttccgataatctcgatcgcgcacccctgggtccaagggaatcagggggacatcatcgacctggcagctaccttgacatgaagattcatctggaaaagaatctggaggaggagcgacagatcctcttgcagcagcagaaaatttgtaggaacagagcaagaaaatattttgtcgaatctaacagacgcaaaaaagcattcgaggaaaagcggaaagaacaggaggaaaaggagcatcagatccgggaacaaatccttcagcagaggaaacagaaattcgaggaagtaacagagaagttccaaagggctcacgtccccctgagtcaaagaaggaaagctgtgtcaaggaagccagtaccacctttagaggaggcactgaaacaaatacaggagtctaaccttaaatcagaagtgaacttacccttcagtagacggccaacaatcaactggcgggcaatcgactccgctctaccctcagcgctttccaaaaatgatcacaagcatcagaaacaactcttgtcgaagatcaattgcgagaaagagatgaacgagaacatgcgtgctacactggctacgagtaagaacgtcttccagcttaagctggaagagacccagaaattgctggaagatcagcatttatccaacttacagaaatttggggacgaagttaatcaaatcacaaattccgaaacactgagcagcatagacagcctcgaggcaactgagcatgaggaaatctacctgaccctgaataaagaacacagtacctccattcagcgcaatactatctccctaaaaccagcgaatatgcagagcactaacctgtcttgcttcgatgaggacaaattggcattctcaaagacccaacacataaataactggctcactaacctggatgctagcaatacgcagaatgtcactgccttcagcgatatcctctctaaatctaatgtgctgccatcatgggaatattttaacagcaaagaacaaaatccctcaccactgaacgggaccgtcgaacgcgcaactaatactgccaacaatagcgtacctttcgtgagcagccccccaatgttcgtgctggacaagaagtgcgaaaagacaagcgaaacttcgacaatgcggactacagacagtacatctggcgcttttaagagggaaagacctctcgtgactgaaagtcctacttttaagttctcaaagtcccagtcaacgagcgattctctgacccaggaggtggccacattcccagaccaggagaaatactctgaacttaaccaggagaatggtaccaccagcattccaacaagttgcgtcccagttgccaccccactcgttctaccatccaatattcagagtgccaggccttctgccaagaactccattcatatcaaagagatcgacgcggttcaatgcagcgacaagttagacgagctgaaggacggcaaggaggaggaaattaagtactttaattgtaataaggaagagttgcctctcttcagcgattccttccaggacgcctatattccccacaacccagattctaaagacgagaaacagaagctggctgaaacctcaagcctgtcgaatgtcacatcaaactacgacttcgtcggtcagcacaaaaagatgaagtataacatccatgaacgcaacggcgttagattcctgaagagcattcttaaaaaagagagcaaatacgagcacggctatttgaaagccctgatcatcaatcagtcattcaaattcggcaatcagaaagccgctgccataagagacagcatagagctgaccaaagagaagggcgctgaaattcctaaaaccatcaaaaaactgaggtggttcgatgagacctcaaacattgaaaataatgcagagaattctcatagtctaaagaacaaaactggcaccacacagcagcactcccagcagttccatattcagagcggagccggttctaatatcattagtgtctccacctgcgctgtgaactctgccgataccaagaaaagcagggaggacagtatctccgagaatgttacaacactgggaggatccggagctgaccacatgccactgaattgctttatacccagcgggtataactttgccaagcacgcctggcccgcatccaaaaaagaagagtctaaaattcccgttcatgatgactcaaagacaaagcagggcaagccccagcggggacgcgctaaaatcattcgaaaacccggaagcgcgaaagttcagagtggattcatctgcaccaatcggaaaggggctgtgattcagccacagtcagcttccaaggtcaacatttttactcaggcccagggaaagcttatcataccatgccccccaccacagagtacaagcaatatcaggtcaggcaagaacatccaagtctctcaatgccagcctgtaacccccgagaacccccagaacattatcacccataactcttttaacagtaaacacgtcctccctaccgagcactcactgaaccaatggaatcaggagagctcgagcccactgagtaacgcgtgctctgacctggtgactgtgattccatctttgcccagttactgtagctccgagtgccaaacctttgctaagatcaaccatagtaatggcacacaggcggtggctagacaggacgctacactatactgcacgcagaggtcacccgtgtgtgaggaaagctatcccagcgtgacacttcgaacagcagaggaggagagcgtgcccttgtggaaaagagggcctaatgttctgcaccagaataaacgggctacagggtccacagttatgcgaaggaagaggatagcagaaactaagcgtagaaacatcctggagcaaaagcgacaaaatcctggctccgttggacagaaatactctgagcagatcaataatttcggacagtccgtcctcctctcatcaagcgagcccaagcaaactactcgcggaacaagctatattgaggaggtgagtgactctacttccgaatttttgatggctgaaaacctggtgaaggccagcgtcccagaggacgaaattcttacagtcctgaacagtaaacaaattcaaaagtcaaacctgcccttaaacaagacccagcaatttaacatctgcacgctatccgccgaggagcagaaaatcttggagtccctcaacgatttgtctgagaggcttcattatatacaggaatccatatgcaagaatccgagcatcaaaaacaccctgcaaatcattcctcttctggaaaagcgtgaggatcgaactagcagctgtcgagataaacgctag

SEQ ID NO: 205923 - DNA, 2757 bp, Artificial Sequence
  derived and/or modified sequence
atgaacgagaacatgcgggctacgttggcaacttccaaaaacgtgtttcagctgaagcttgaggagacccaaaagttacttgaggaccagcatctgagcaacctgcagaaattcggggacgaagtcaaccaaatcaccaactcagagacgctctcctcgatcgacagtttggaggccacagaacacgaggaaatttacctgactctaaacaaagagcattccacttcaatccagcgaaatacgatctccttaaaaccggctaatatgcaaagcactaatctgtcatgctttgatgaggacaaattggctttttcaaaaacgcagcatatcaataactggttgaccaatctggatgcatccaatacgcagaatgtcaccgccttctccgatatcctgagcaagtcaaatgtcctaccgtcctgggagtactttaattccaaggagcagaatccatcccctctgaacggtactgttgagagggcaactaacacagcaaataatagtgtgcctttcgtctcctcacctcctatgttcgtgcttgacaagaagtgcgagaaaacttccgaaacttcaacgatgagaactaccgatagtacatctggggcatttaaacgggagcggccactagtcaccgagagccctacattcaagttctctaagtcacagagcacgtctgatagcttgacacaggaagtagccacatttcccgaccaggagaagtatagcgagctgaatcaggagaatggtaccaccagtattcctacctcctgcgtgccagtggccactccactcgtgcttccatcaaatatccagtctgcccgaccaagtgcaaaaaacagcatacatataaaagagattgatgccgtgcagtgttcagacaagctggatgaactgaaggatggtaaggaagaggagataaagtatttcaactgcaataaagaagaattaccactgttctcagacagtttccaggacgcctacatccctcacaaccccgattccaaggacgagaaacagaagctggcggagacttcatccctttcaaacgtgacttctaactacgacttcgttggtcagcacaagaaaatgaagtacaatatccatgaaagaaatggggtccggttcctgaagtccattctgaagaaggagtccaagtacgaacatgggtatctcaaggccttaattatcaaccagtcattcaaatttggaaaccagaaagccgcagccatacgtgactctatagaactgaccaaggaaaagggagccgagattcctaagacaatcaagaaactgcgctggtttgacgaaacctcgaatatcgagaacaacgccgaaaatagccatagtctgaagaacaaaacaggaaccactcagcagcacagtcagcagtttcacatccagtctggagctggctctaatataattagcgtgagcacttgcgcagttaattctgcggacaccaagaagagtcgggaggactcgatttctgaaaatgtaactacgcttggcggatctggtgccgaccacatgccattaaattgcttcatccccagcgggtacaacttcgcaaagcatgcatggcccgctagtaagaaagaggaatcaaagatccccgtccatgacgactcaaagactaagcaaggaaagccgcagcgcggacgcgcaaaaattataagaaaacccggaagcgcaaaggtccagagcggcttcatttgtaccaaccgtaagggcgcagttattcagcctcaatcagcgagcaaggtcaatatttttactcaggcccagggcaagctgattatcccatgtccccctccacagtcaacaagtaacattcgttctgggaaaaatattcaagtgtcccagtgtcagccagtcactcctgagaaccctcagaacatcatcacacataacagcttcaacagtaagcatgttctgccgacagagcactctctgaatcagtggaatcaagagtcttcctctcctctgtccaatgcgtgtagtgacttggtcacggtcatcccctcactgccctcttattgctctagtgaatgccaaaccttcgccaaaattaaccacagcaatgggactcaggccgtggcccgacaggacgctaccctttactgcactcagagaagccctgtatgcgaagagagctacccatctgtgactctgaggacagccgaggaggagagtgtgccgctctggaaaaggggaccaaatgtactgcaccaaaacaaacgggctaccggttccactgttatgcgcaggaagagaatcgccgagaccaagcgcaggaacattctcgagcagaagcgtcaaaacccgggaagtgtgggccagaaatattccgagcaaatcaataactttggacagtcagtcctgctgtcttcatccgaaccgaaacagaccacccgcggaacttcctatatcgaggaagtcagcgattcgacaagcgagttcctgatggccgagaatctggtgaaggcttccgtgccggaggacgagatcttaacggtactcaacagcaagcaaattcagaaaagtaaccttcccctgaataagactcagcagtttaacatttgtaccttgtctgccgaagagcagaagatccttgaaagcctaaatgatctgagtgaacggctgcactacatacaagagtcaatctgcaaaaacccgtccatcaagaatacccttcaaatcatacctctcttagagaagcgggaggataggacgtcatcatgtcgagataaaaggtag

SEQ ID NO: 205924 - DNA, 7039 bp, Artificial Sequence
  derived and/or modified sequence
gtcggttgttgtcaagatggcggctgcagggttgctgccgccccatctgctattgcccggcgaggtcgccgctgcctcagctgccatcgccgctacaggcaccagtgccgctgcgcgggagctagggctgtcgaggccaacccttccgcgcccgtgacgcggggcctgagagacggagtgtagggaggggccgagcaggaggaggaggaagccggagctgccatgagggaggttctgggggcgagcagacaggcggcgctgaagtgaaggatgctggcggggaggcccggaacccggagcgcggtcggggaactgggcactgaatcatcggacaacctcgacagagcccccctcggccctcgggagagcggcgggcatcaccgacctggctcttacctagatatgaaaatccatctggagaaaaatttagaagaagagcgccagatattactgcagcaacaaaaaatatgtcgaaatcgagcacgtaaatattttgtggagtcaaatcggagaaaaaaagcttttgaggagaaacgaaaagaacaggaagaaaaagaacaccaaattagagaacaaatacttcaacaaagaaaacagaagtttgaagaagttactgaaaaattccagcgtgcccatgttcctctttcacagcggaggaaagcagtttcccgaaaaccagttcctccattagaagaggccctcaaacaaattcaggaatccaacttaaaatcagaagtaaaccttcccttttcccgtagaccaacaataaactggagagctatagattctgccttgccttccgcattatcaaaaaatgatcacaagcatcagaaacaactcttatccaaaatcaattgtgagaaagaaatgaatgaaaacatgagggcaaccttggctactagcaaaaatgtgttccagcttaaactggaggaaactcagaaactcctcgaagatcaacatctaagcaatttgcaaaaatttggtgatgaagttaatcagataaccaattctgaaaccctctcaagtatagacagtcttgaggctacagagcatgaagaaatatatttaacacttaataaggagcattccacatccatccagcggaataccatttccctcaaaccagcaaatatgcaatcaactaatctcagctgctttgatgaagataaactggcattctctaaaactcaacatataaataattggcttacaaatttagatgcttcaaatactcagaatgtcacagctttctcagatattttaagtaaatctaatgttctgccttcatgggaatattttaatagtaaagaacaaaatccatctcctttgaatggaacagtggaaagagccacaaatactgctaataattcagtaccctttgtatctagcccacccatgtttgtactagataaaaaatgtgaaaagacctctgaaactagcactatgaggacaactgactccacttctggagcattcaaaagagagagaccattagttactgagagcccaacatttaaatttagcaaatcccaaagcacttcagattctctaacccaggaagtggctacatttccagaccaagagaaatattctgaattaaatcaagaaaatggaactacttcaattcctacttcatgtgtaccagtggcaacgcctttagttttgccatctaatatacagtcagctagaccttcagcaaagaacagtatacacataaaagaaattgatgcagtgcagtgttctgataagttagatgaattgaaagatggtaaagaagaagagataaaatattttaattgcaataaggaagagttgcctttattttcagacagttttcaagatgcctatatacctcacaatcctgattcaaaagatgaaaaacaaaaattagctgaaacatcatccttgtctaatgtaacttctaattatgactttgttggccagcataagaaaatgaaatacaacatccatgagagaaatggtgtgagatttcttaaaagtattttaaagaaagaatctaaatatgaacatggttatcttaaggcattaattataaatcagagctttaagtttggaaatcaaaaagcagcagctatcagagatagtattgaattaacaaaggaaaaaggtgcagaaattccaaagaccattaaaaaactgaggtggtttgatgaaactagcaatatagaaaacaatgctgaaaacagtcattcactgaagaataaaacaggaacaactcaacagcattctcaacaattccacattcaaagtggtgctggaagcaacataattagtgtttctacttgtgctgtaaattctgctgatacaaagaagtccagggaggattctatctctgaaaatgttacgactttaggaggatctggagcagaccatatgcctttgaactgttttataccttcaggttataactttgctaaacatgcctggccagcctcaaaaaaagaagaaagtaaaatccctgtacatgatgattctaaaactaagcaaggtaagccacaaagaggtagagcaaaaataattagaaaaccaggatctgcaaaagtccaatcaggctttatatgtacaaacagaaaaggcgctgtcattcaaccacagtctgcaagcaaagtcaacatatttacacaagctcagggaaaattaattataccttgtcctcctcctcaatctacatcaaatattagaagtggtaaaaatatacaagtgtctcagtgtcaaccagtaactcctgaaaatcctcaaaacattattacacataactcttttaattcaaaacatgtgcttccaacagaacacagtttgaatcagtggaatcaggaaagtagttctccactctcaaatgcttgttctgacctagtcactgtgataccatcactgccatcatattgttcttcagagtgccaaactttcgcaaaaataaatcattcaaatggcactcaagcagttgcccggcaagatgcgacattatattgcacccaaagaagtcctgtttgtgaagaaagttatccgtctgtgactctaagaactgctgaagaagaatcagttcccttatggaaaagaggtcctaatgtcctgcatcaaaataagagggctacagggtctactgttatgagaagaaaacgaattgctgaaactaagcggagaaatattttagagcagaaaagacaaaaccctggatctgtaggacagaagtacagtgagcaaattaataattttggacaaagtgtcctgctaagttcaagtgagccaaaacaaactacaaggggtacttcttatattgaagaagtttcagatagtacttctgagtttttgatggctgaaaacttagtgaaagcatcagtgccggaggatgagattctgactgtcttgaatagcaaacagatacagaaatcaaatctacctttaaataaaactcaacaattcaacatctgcacactgtcagctgaagaacagaagatcctagagtcccttaatgatctcagtgaaagactacattatatacaagaatccatttgcaaaaacccatccatcaaaaatactttacaaataataccacttctggagaagagagaagatagaaccagcagctgcagagacaagagataattccagcagaatccgtctaagaagacctttcatgtacttccctaggactagatgcataccgttttgtgaaaaccagccataggaaaacatgtgagcaacaacccccatgaacatttgtcctaactcagattttgtgagcagtgaagtttaacagagcagtgacatttaacaaagcagtgaagtttaacagagttctgagaataccatgaaagacattatgcctgcctaaacaaaaagcaggacataacctagctctgaatacatgccacaaggatgaagcttgtgagtagagcaaacaaacgtttttccaaagaattcacagtgctcctttgcaatttatagatttcatgttgaaatatatgttaaataaaatttctgtttattgaacctctttattaaacctctaacttactgataagatgtttatgaagtatggcatattttgatttttttaattgtaataaatattcttaaagttaccacatcccacaaaatggcccttggtggcagcaatagagcaaaggttacctttttgtatggtgaagggaggccttcctatggctgtacaattacatcgattcttccaaatttcatatttcatacatggcactttggcataccgaaaaaacatgaaatttttcattaaaatgccatgaatcaagccagggccgttggcttatgcctgtaatcccagcactttgcaggccgaggtagacagatggcttgagctcaggagttcgtgaccagcctgggcaaccctgtctctacaaaaaatacaaaaattaaccaggcatggtggcatgcacctgtagtcccagctacttggggtgctgaggcgggaggattacttgagcccaggaggattacttcaacctgggaggttgaggctgcagtgagctgtgtttcgccactgcacaccagcctgggtgacagtgtgagacccagcctcaaaaaaaaaaaaaaaaaagtgatgaatcaaaattagaaattaagagttttaagaaaacatgtggccttttattaataacactactaaattttggttcctccatagaattagttttgaaacacttgatgtagtgagaaatgcattaacatgttgaatgcctaccatgtaccaaattttgtgcatatattttttatttaatctgaccagccacccaaaccatgggtatttttgtctccactttagagatgagaaactgagccaaggccacatagctacctacagtgacagaatcaaaattcaaactcaggtttatctagttccaaaacccatgttctttctgccacaccatgttagtagaaatggaaactattggatgaaatgaggaaaaacaggaaaagaattcactttttaaatgaagaaattagtgaaaaaattgacctaatgaaggaaacatttgtgctttcctatatttttaattttaagaataggatttcggaaggcgacagaaaatttagttcttagacatttaaatagaaagttgtgtgcccctatagaaaatatttgagaatttcttatactatcaagaaaaaattctgtgaattaagatgtaatttataaaataacatttcaatgggggtaaacaggccagaagagtgtgccaagttgtttgtgaatcattccaagcacctcagatgaaaactcacttttattaaaaaaaaaaaagacaagggtttatattcatatacactagtatatatgtacacagcagcatcctgcatgccaaagtagcttcaccgttagtaatccctcactttaatacctcttaggaaccaaagaatgcctctacaagcaaaaagatagttgaaaatagttaagatccaaagtcagaataggccaaaaaaaaaaaaaaaaaaagcctaaatagtaagctggtgaaacaagataagatttgcattttactagaacttgcacattatgatattgtccttttatgaaactgtcatatgaccagaattcttctgtaattctgcccatgactcctccagaattttagtagatacagggtgggttcattaagagtgataaaagtgggaagacataaagagcctttgtgaattaaagtggaagagaataacactttgcatgctataaacgtgaaaactaacatttttggccagacacagtggctcatgcatgtaattctagcactttggaggccaaggcaggaggactgcttgagcccaggagtttgagaccagcctgggcaatgtagcaagaccccatctctatataaaatataaaaatgttggctgtgcacggtagcttatgcctgtaatctcagcactttgggaggccaaggcaggcagatcatgaggtcaagagatcaagaccatcctggccaacatggtgaaaccctgtctctactaaaaatacaaaaatagctgggcatggtggcacgcacctctactcccagctactaggaggctgaggcaggagaatcgtttgaacccaggaggtagaggttgcagtgagctgagattgcaccactgcaccagcctggcaacagagcaagactccgtctcacaaaaatgaataaataaaataaaaataaaaatgttactttttaaaaagtaacttttttaataatataagaaagaaaaatgccctttcacactgaatcttcaagttctaaggaagaaaagagtctcctttcgaatgtgaagaagtaaatttagaggaaatcaaacaagcatcactttcctcagtggaaaaacttatgaaacttcttataagagagagtaatctcaggccggacatgctggctcatacctgtaatcccagaactttgggaggccgaggcaggtggatcatttgagctcaggaattcaagaccagcctgggtaatatggcaagagcccaactctactaaaaatacaaaaagaaaagaaaacagccaagcttggtggtatgtgcctgtggtcccagctactggggaggctgaggtgggaggatcgtttgagcctgggaggcagaggttgcagtgatcaggaattgtgccactgcactccaacctgagtgacagagcaacactctgtcttaaaagaaaaaaaaaaaagagagagatagtaatctcttgggcaaaaggtatcaaataattgaaagaaaagtttaaacacatttccgagaggcagggcaactaataactggtcagaaaaatttagacggtcttcattttaaaattggcatcaggaaggattaccatgaacttattttaaatccatattgtaccagaatgactatgtctgtgtttcttaggaatgttgaagctttttgtgaaaactgtactgtatacatatataaatatacacacacttacatgtatgtattttgatagatattacatggactaaattttgtcaatttcatgtaatttaccctttgcaataaaaatgattcattaaatat

SEQ ID NO: 205925 - DNA, 3750 bp, Artificial Sequence
  derived and/or modified sequence
ttccacaagccacagcattgtcaaatcagcccgaggcctttgcagatcatccaccagcctcagttctctcccttgcatctccctgtcattctccatcttcttctttgccttcatctccttctacttccacatccttttcttcagcctgtatactgttttcttcctcctcatctattctttcctcttcttcgacttcctgttctacttctccatccttacctccttcatctatccctcttttttcctctcctttgcattcatcttcctctccaggtttgcctccaacttatttagcttttccctctccagtttctcctgtttcttcttcctttatgatttcctcttcctttccccctattcttcactctccttctgtttctacctccccatctccttttattcctatccaccccttcaatcctcctcattgggggaagaaagtagagaagagaagagaagaaagtggagtagagaagaaaggaatagagaagaaagttgagacacgacaactttaaagagctatagattctgccttgccttccgcattatcaaaaaatgatcacaagcatcagaaacaactcttatccaaaatcaattgtgagaaagaaatgaatgaaaacatgagggcaaccttggctactagcaaaaatgtgttccagcttaaactggaggaaactcagaaactcctcgaagatcaacatctaagcaatttgcaaaaatttggtgatgaagttaatcagataaccaattctgaaaccctctcaagtatagacagtcttgaggctacagagcatgaagaaatatatttaacacttaataaggagcattccacatccatccagcggaataccatttccctcaaaccagcaaatatgcaatcaactaatctcagctgctttgatgaagataaactggcattctctaaaactcaacatataaataattggcttacaaatttagatgcttcaaatactcagaatgtcacagctttctcagatattttaagtaaatctaatgttctgccttcatgggaatattttaatagtaaagaacaaaatccatctcctttgaatggaacagtggaaagagccacaaatactgctaataattcagtaccctttgtatctagcccacccatgtttgtactagataaaaaatgtgaaaagacctctgaaactagcactatgaggacaactgactccacttctggagcattcaaaagagagagaccattagttactgagagcccaacatttaaatttagcaaatcccaaagcacttcagattctctaacccaggaagtggctacatttccagaccaagagaaatattctgaattaaatcaagaaaatggaactacttcaattcctacttcatgtgtaccagtggcaacgcctttagttttgccatctaatatacagtcagctagaccttcagcaaagaacagtatacacataaaagaaattgatgcagtgcagtgttctgataagttagatgaattgaaagatggtaaagaagaagagataaaatattttaattgcaataaggaagagttgcctttattttcagacagttttcaagatgcctatatacctcacaatcctgattcaaaagatgaaaaacaaaaattagctgaaacatcatccttgtctaatgtaacttctaattatgactttgttggccagcataagaaaatgaaatacaacatccatgagagaaatggtgtgagatttcttaaaagtattttaaagaaagaatctaaatatgaacatggttatcttaaggcattaattataaatcagagctttaagtttggaaatcaaaaagcagcagctatcagagatagtattgaattaacaaaggaaaaaggtgcagaaattccaaagaccattaaaaaactgaggtggtttgatgaaactagcaatatagaaaacaatgctgaaaacagtcattcactgaagaataaaacaggaacaactcaacagcattctcaacaattccacattcaaagtggtgctggaagcaacataattagtgtttctacttgtgctgtaaattctgctgatacaaagaagtccagggaggattctatctctgaaaatgttacgactttaggaggatctggagcagaccatatgcctttgaactgttttataccttcaggttataactttgctaaacatgcctggccagcctcaaaaaaagaagaaagtaaaatccctgtacatgatgattctaaaactaagcaaggtaagccacaaagaggtagagcaaaaataattagaaaaccaggatctgcaaaagtccaatcaggctttatatgtacaaacagaaaaggcgctgtcattcaaccacagtctgcaagcaaagtcaacatatttacacaagctcagggaaaattaattataccttgtcctcctcctcaatctacatcaaatattagaagtggtaaaaatatacaagtgtctcagtgtcaaccagtaactcctgaaaatcctcaaaacattattacacataactcttttaattcaaaacatgtgcttccaacagaacacagtttgaatcagtggaatcaggaaagtagttctccactctcaaatgcttgttctgacctagtcactgtgataccatcactgccatcatattgttcttcagagtgccaaactttcgcaaaaataaatcattcaaatggcactcaagcagttgcccggcaagatgcgacattatattgcacccaaagaagtcctgtttgtgaagaaagttatccgtctgtgactctaagaactgctgaagaagaatcagttcccttatggaaaagaggtcctaatgtcctgcatcaaaataagagggctacagggtctactgttatgagaagaaaacgaattgctgaaactaagcggagaaatattttagagcagaaaagacaaaaccctggatctgtaggacagaagtacagtgagcaaattaataattttggacaaagtgtcctgctaagttcaagtgagccaaaacaaactacaaggggtacttcttatattgaagaagtttcagatagtacttctgagtttttgatggctgaaaacttagtgaaagcatcagtgccggaggatgagattctgactgtcttgaatagcaaacagatacagaaatcaaatctacctttaaataaaactcaacaattcaacatctgcacactgtcagctgaagaacagaagatcctagagtcccttaatgatctcagtgaaagactacattatatacaagaatccatttgcaaaaacccatccatcaaaaatactttacaaataataccacttctggagaagagagaagatagaaccagcagctgcagagacaagagataattccagcagaatccgtctaagaagacctttcatgtacttccctaggactagatgcataccgttttgtgaaaaccagccataggaaaacatgtgagcaacaacccccatgaacatttgtcctaactcagattttgtgagcagtgaagtttaacagagcagtgacatttaacaaagcagtgaagtttaacagagttctgagaataccatgaaagacattatgcctgcctaaacaaaaagcaggacataacctagctctgaatacatgccacaaggatgaagcttgtgagtagagcaaacaaacgtttttccaaagaattcacagtgctcctttgcaatttatagatttcatgttgaaatatatgttaaataaaatttctgtttattg

SEQ ID NO: 205926 - protein, 769 aa, Artificial Sequence
  derived and/or modified sequence
MATEGMILTNHDHQIRVGVLTVSDSCFRNLAEDRSGINLKDLVQDPSLLGGTISAYKIVPDEIEEIKETLIDWCDEKELNLILTTGGTGFAPRDVTPEATKEVIEREAPGMALAMLMGSLNVTPLGMLSRPVCGIRGKTLIINLPGSKKGSQECFQFILPALPHAIDLLRDAIVKVKEVHDELEDLPSPPPPLSPPPTTSPHKQTEDKGVQCEEEEEEKKDSGVASTEDSSSSHITAAAIAAKKHPFYTSPAVVMAHGEQPIPGLINYSHHSTDERIPDSIISRGVQVLPRDTASLSTTPSESPRAQATSRLSTASCPTPKVQSRCSSKENILRASHSAVDITKVARRHRMSPFPLTSMDKAFITVLEMTPVLGTEIINYRDGMGRVLAQDVYAKDNLPPFPASVKDGYAVRAADGPGDRFIIGESQAGEQPTQTVMPGQVMRVTTGAPIPCGADAVVQVEDTELIRESDDGTEELEVRILVQARPGQDIRPIGHDIKRGECVLAKGTHMGPSEIGLLATVGVTEVEVNKFPVVAVMSTGNELLNPEDDLLPGKIRDSNRSTLLATIQEHGYPTINLGIVGDNPDDLLNALNEGISRADVIITSGGVSMGEKDYLKQVLDIDLHAQIHFGRVFMKPGLPTTFATLDIDGVRKIIFALPGNPVSAVVTCNLFVVPALRKMQGILDPRPTIIKARLSCDVKLDPRPEYHRCILTWHHQEPLPWAQSTGNQMSSRLMSMRSANGLLMLPPKTEQYVELHKGEVVDVMVIGRL

SEQ ID NO: 205927 - DNA, 2310 bp, Artificial Sequence
  derived and/or modified sequence
atggctaccgaaggaatgatattgaccaaccacgatcatcagatccgagtaggtgttttgaccgtcagtgactcctgctttagaaacctggccgaggataggtcaggtatcaacctgaaggatttagtgcaagatcccagcctgttgggcggtacgatctccgcctataagattgtgccagacgagattgaagagataaaagagactttgattgattggtgcgacgagaaagagctgaatctgatcttgaccaccggcggcacaggattcgcccctagggatgtcaccccagaggccactaaggaggttatcgagagagaggcacctggaatggctctcgcaatgctaatgggctccctcaatgttacccctctaggaatgttgagcaggcccgtttgtggtatccgcggtaagaccctgattatcaatctccctgggagcaagaaggggtctcaagaatgtttccagtttattcttccggccttgcctcacgcaattgacctgctccgggacgctatagtgaaagtgaaagaagtccatgatgagttggaggaccttccctccccccctccacccttaagccccccaccaactaccagcccccacaagcagactgaggataagggtgtccagtgcgaggaggaggaagaggagaaaaaggatagtggcgtggcctccactgaggactccagctccagccatattaccgccgctgcaatcgcagcgaagaaacaccccttctatacgagccccgctgttgtgatggcacacggcgaacagcccatcccaggcctgattaattacagccaccactccaccgatgaaagaatccctgactccattatctctaggggtgtgcaggtcctccccagggataccgccagtttatccacgactccttccgagagcccacgcgcacaggcaacatcacgcctgtcgaccgcatcctgtcctacgcccaaagtccagtcccggtgctcttctaaggaaaatatcctcagggctagtcatagtgcggtcgacatcaccaaggtggccaggaggcacaggatgagcccatttcccttaacatctatggataaggcgttcatcacggttttagaaatgaccccagtactcggcacagagattattaactatcgcgatggcatgggcagagtgctggctcaggatgtttacgccaaggataatcttccacccttccccgcttctgtgaaagatggctacgccgtacgggccgctgacgggcccggcgaccggtttattataggggaatcacaagcgggggagcagccgacacagacggtcatgccagggcaggtgatgcgggtcacaacaggtgcaccgatcccatgcggggcagacgccgtggtgcaggtggaggatacagaattaattcgcgagtcggatgacggcacagaagagctcgaggtacggattctggtacaggctagacccggtcaggatatacgccctatcggacacgacatcaagcggggggagtgtgttctggccaaggggacacacatgggcccctctgaaatcggccttttagccactgttggggtgacagaggttgaagtgaacaaatttccggtggttgccgtgatgagcaccggtaatgaactgctcaaccctgaggatgatctgctgccagggaagatccgcgattctaaccgtagtaccctcttagccaccattcaggaacacggataccctacaattaatcttggcattgtcggcgataatcccgacgacctgctgaacgccttgaacgaggggatcagccgggctgacgtcattataaccagcggcggtgtgagtatgggggagaaagattatctgaaacaggtgctggacatcgacctgcatgctcagatccactttggcagagtctttatgaaaccaggcctccctacgaccttcgctacattagacatcgacggcgtcagaaagattatttttgctttgcccgggaatccagtctccgcagttgtgacttgtaacctgtttgtagtgcctgcactccgaaagatgcagggcatcctggacccccggcccactatcatcaaagcccggctgtcatgtgacgtgaaactggacccgagacccgagtatcacagatgcatcctcacatggcaccaccaggaaccactaccatgggcacaatctaccggtaaccagatgtcgagcagactcatgagcatgcggagcgctaatgggctcctgatgcttccccctaaaacagaacagtacgtcgaactgcacaaaggagaggtagtcgatgttatggtcatcgggaggctgtag

SEQ ID NO: 205928 - DNA, 4297 bp, Artificial Sequence
  derived and/or modified sequence
agcagcgctcatggcgaagaggcttaaggccacaaaaccgtgggacagcaggaggaagagaagccaggtatctccactccagctgccctgcctcagactcctcagtttcgcacgtgaggatcgtcttgcaggcactgactggagatggaatcctaaagcataggtgaagcggaaatcctccttcagggagagcccactgaggaagccagcggctagcacgaggcaggacaggatacctccctcttcgcccacggcggcctctctgtcatagtagccaccgttctgccactcatgcagctttctaagacacctctcggttccccagcgctttcagtggggcggccggccattcccgagggttgcaagaggaggcccggggtgctgagccagcctcgctgcccccgcgtagaaagccggcccgccggcgagagccagcctaaggcgcggacaaccaacgaggtgtcaggctcggcaggggattgcttctgtctggggcccggccgaggttgcgttcgtgcctcgcgcgcacacgctccgcgttcactcagccaatccggtgctactcgcgcgcccaggagcgatccgcggtcctactcaggctgggccggctccttcccgctcccaatactcagcacccgagctctcactcctcccctcactctccacgagttccacgcctaggggtgtagctccgcccttgtccccgagtccgcccccgcaacctccagagcgtgtgctatcctttcctctcagtcctgccatctagctgccttgggtctcgcgctccgcagagcgttccgacactctccggcctcgttctgccgcctccgcgcgctctccccgtgcggccaccgcgccccccaagcttgcctccttcttgccggacttggggccgcgcgccctgactccttcccctcccgcggacccgcgcactcccggcgcggcctctcccccacgcaggccaccgtgcactctgtggcctccccctccttccccgctctcctcgcgcttctctggctccctagctgtcgcgctctcctcggcgagcgcgctcccggcccgcgcgctccgggctccggtttctcccggctcctgtcagtgcggtgactgcgctgggaaacatggcgaccgagggaatgatccttactaaccacgaccatcaaatccgtgtcggagtccttacagtgagtgatagttgcttcaggaatcttgcagaagaccgcagtgggataaatctcaaagatctcgtacaagatccttctttgttgggtgggactatatcagcatacaagatagtaccagatgaaatagaagaaatcaaggaaaccctgatagattggtgtgatgaaaaggaacttaatttgatattaacaactggaggaacaggatttgcaccacgagatgtcactccagaggccacaaaagaagtaatagaacgggaagcaccagggatggccctggcaatgctgatgggatcacttaatgttacacctctgggcatgctctctaggcctgtatgtggaatcagagggaaaacgctcataattaacctgccaggtagcaagaaaggatctcaggaatgctttcaattcatactgccagctctacctcatgccattgaccttttacgtgatgccattgtaaaagtaaaggaggtgcatgatgaacttgaagatttgccttccccacctccccctctttcccctcctcctactaccagcccccataaacagacagaagacaaaggagttcaatgtgaggaagaggaagaagagaagaaagacagtggtgttgcttcaacagaagatagttcctcatcacatataactgcagcagccattgctgccaagaagcatccattctacaccagtcctgctgttgtcatggcacacggtgaacagcccatccctggtctcatcaattattcccatcattcaacagatgaacggattccagactccatcatttctcgtggtgttcaggtgctcccacgagacacagcctccctcagcactactccttcagaatcgcctcgtgctcaggctacatctcgcctctctacagcttcctgcccaacaccaaaagtccagtccaggtgcagcagcaaggagaacattctcagagccagtcacagtgctgtcgatatcaccaaggtggctagaagacatcgcatgtctccttttcctctgacatctatggacaaagcctttatcacagtcctggagatgactccggtgcttgggacagaaatcatcaattaccgagatggaatggggcgagtccttgctcaagatgtatatgcaaaagacaatttaccccccttcccagcatcagtaaaagatggctatgctgtccgagctgctgatggcccaggagatcgtttcatcattggggaatcccaagctggtgaacagccaactcagacagtaatgccaggacaagtcatgcgggttacaacaggtgctccaataccctgcggtgctgatgcagtagtacaagtggaagataccgaacttatcagggaatcagatgatggcactgaagaacttgaagtgcgaattctggtgcaagctcggccaggccaagatatcagacccatcggccatgacattaaaagaggggaatgtgttttggccaaaggaacccacatgggcccctcagagattggtcttctggcaactgtaggtgtcacagaggttgaagttaataagtttccagtggttgcagtcatgtcaacagggaatgagctgctaaatcctgaagatgacctcttaccagggaagattcgagacagcaatcgttcaactcttctagcaacaattcaggaacatggttaccccacgatcaacttgggtattgtaggagacaacccagatgacttactcaatgccttgaatgagggtatcagtcgtgctgatgtcatcatcacatcagggggtgtatccatgggggaaaaggactatctcaagcaggtgctggacattgatcttcatgctcagatccattttggcagggtttttatgaaaccaggcttgccaacaacatttgcaactttggatattgatggtgtaagaaaaataatctttgcactacctgggaatcctgtatcggctgtggtcacctgcaatctctttgttgtgcctgcactgaggaaaatgcagggcatcttggatcctcggccaaccatcatcaaagcaaggttatcatgtgatgtaaaacttgatcctcgtccagaataccatcggtgtatactaacttggcatcaccaagaaccactaccttgggcacagagtacaggtaatcaaatgagcagccgtctgatgagcatgcgcagtgccaatggattgttgatgctacctccaaagacagaacagtacgtggagctccacaaaggcgaggtggtggatgtcatggtcattggacggctatgatggtcaccagcaggagaaagctttgatgcatgtccacatatcattgactgtatcctgtaatatgcaacggcacagctagttttcccgatttggataaaagttgatctgtatagtcaacatcttgaactatatttcaaatgaatttaaatatcttttaaagaaaaaaacacctaaaaataaatcttaacagaaaattctgttctgattatatcaaggcaaatttttcctttcttgcaaattgctttgtgtgttcaatgctaggtctgatagcgatagcttttagtagacagcggtaggtgcctgcagaacttgtgtttttctcatctttaaaatacaactacttatgctcttaaatcaaggctgtctgcttatttatactagcgtaggcaacacttggatttcccttcttagtatgcttcataactgctttacagagagcttttgcttgttctttctcatgtatctcgtgtttatgtgcacagtgccaaaagaagactgactgggtggaggctctgccttgcctcaagaaccatcccctgcagagcatccagggaggtttctcgccccaatagcctcacggcacagtactcttgggcagtaactggacaccttttatttgaagaaacaaactgaagaaaaaatgcttccttaagtgctgacagcctttttaaccaatacatttaaaattgtacagaacaaaaaaataaaatcaaagactgatcttgtacagatattagtgttaccagcattcatgtggaaatcaagagcaaagacaaaataatgttaaacaattctgtaccataacattttctgtaatgatactgaaacttaatgaataaaaaaattccttgatcattatttaaaaa

SEQ ID NO: 205929 - DNA, 2310 bp, Artificial Sequence
  derived and/or modified sequence
atggccacagagggcatgatcctgaccaaccacgaccaccagatccgggtgggcgtgctgactgtgtctgacagctgcttcaggaacctggccgaggacagaagtggcatcaacctgaaggacctggtgcaggaccccagcctgctgggcggcaccatcagcgcctacaagatcgtgcctgatgaaattgaggagatcaaggagaccctgattgactggtgtgatgagaaggagctgaacctgatcctgaccactggaggcaccggctttgcccccagagatgtgaccccagaggccaccaaggaggtgattgaaagagaggcccctggcatggccctggccatgctgatgggcagcctgaatgtgacccccctgggcatgctgagcaggcctgtgtgtggcatccggggcaagaccctcatcatcaacctgcccggcagcaagaagggcagccaggagtgcttccagttcatcctgcctgccctgccccacgccatcgacctgctgagagatgccatcgtgaaggtgaaggaggtgcatgatgagctggaggacctgcccagccccccaccacccctgagccccccacccaccaccagcccccacaagcagacagaggacaagggcgtgcagtgtgaggaggaggaggaggagaagaaggacagcggcgtggccagcacagaggacagcagcagcagccacatcacagctgctgccatcgccgccaagaagcaccccttctacaccagccctgctgtggtgatggcccatggagagcagcccatccctggcctcatcaactacagccaccacagcacagatgagcgcatcccagacagcatcatcagcagaggagtgcaggtgctgccccgggacacagccagcctgagcaccaccccatctgagagcccccgggcccaggccaccagccggctgagcacagccagctgccccacccccaaggtgcagagccgctgcagcagcaaggagaacatcctgcgggccagccacagcgctgtggacatcaccaaggtggcccggcggcacaggatgagccccttccccctgacctccatggacaaggccttcatcaccgtgctggagatgacccctgtgctgggcacagagatcatcaactacagagatggcatgggccgggtgctggcccaggatgtgtatgccaaggacaacctgccccccttccctgcctctgtgaaggatggctatgctgtgcgggcagcagatggccctggggaccgcttcatcattggagagagccaggccggggagcagcccacccagacagtgatgcctggccaggtgatgagggtgaccaccggggcccccatcccctgtggggctgatgctgtggtgcaggtggaggacacagagctgatccgggagagtgatgatggaacagaggagctggaggtgcgcatcctggtgcaggcccggcccggccaggacatccggcccatcggccatgacatcaagagaggagaatgtgtgctggccaagggcacccacatgggccccagcgagatcggcctgctggccaccgtgggcgtgacagaggtggaggtgaacaagtttcctgtggtggccgtgatgagcactggaaatgagctgctgaacccagaagatgacctgctgcccgggaagatccgggacagcaacagaagcaccctgctggccaccatccaggagcacggctaccccaccatcaacctgggcatcgtgggggacaacccagatgacctgctgaatgccctgaatgaaggcatcagcagagcagatgtgatcatcaccagcggcggcgtgtccatgggagagaaggactacctgaagcaggtgctggacatcgacctgcacgcccagatccacttcggccgggtcttcatgaagccaggcctgcccaccacctttgccaccctggacattgatggagtgaggaagatcatctttgccctgcccggcaaccctgtgtctgctgtggtgacctgcaacctgtttgtggtgcctgccctgaggaagatgcagggcatcctggacccccggcccaccatcatcaaggcccggctgagctgtgatgtgaagctggaccccaggcctgagtaccaccgctgcatcctgacctggcaccaccaggagcccctgccctgggcccagagcactggaaaccagatgagcagccggctgatgtccatgaggtctgccaacggcctgctgatgctgccccccaagacagagcagtatgtggagctgcacaagggggaggtggtggatgtgatggtgattggccgcctgtag

SEQ ID NO: 205930 - DNA, 2310 bp, Artificial Sequence
  derived and/or modified sequence
atggccaccgagggcatgatcctgaccaaccacgaccaccagatccgcgtcggagttttaacggtgagcgatagctgcttcagaaatcttgcggaagatcgttcagggataaacttgaaagatttagttcaagacccgtcactgctcggaggaaccataagcgcatacaagatcgtgcccgatgagatagaggaaattaaagagacgctcatcgactggtgcgatgaaaaggaactgaatttaatcctgacaacagggggaacaggttttgctcccagagatgtgaccccagaagcaacaaaagaggtcattgagcgagaagctccaggcatggccctcgctatgctcatgggatcattaaacgttacaccacttggtatgctttctcgacctgtgtgtgggatacggggaaaaactttaatcatcaacctgcctgggtccaaaaaaggatctcaggagtgctttcagttcattctgccagccttacctcatgccatagatctcctgcgtgacgctattgtaaaggtgaaagaagttcacgatgaactggaggacctgcctagcccccccccccctctgtcgccgccaccaactacgtccccgcataaacagaccgaggataaaggagtccaatgcgaagaggaagaggaggaaaagaaggacagcggtgtagcatccaccgaagactcatcctcttcccacatcacagcagcagcaatcgcagctaagaaacatcctttttacaccagtccagctgttgtgatggcacacggtgaacagccaatccccggtctgattaattactcgcaccattcgacagatgaaagaatcccagactcaatcatttcccgtggcgtacaggtcttaccgagggataccgccagcctgtccactaccccatcagagtcaccgagagcccaggccacctctcggctctcaaccgcaagctgccccacccccaaagttcaaagtaggtgctcctctaaagagaacatccttagagcaagtcactcagcagtggacattacaaaggtcgcccggaggcacagaatgtcaccatttccactcacctctatggataaagcctttatcactgtccttgagatgacacccgtcctgggaactgagattataaactaccgcgacggcatgggccgggtgcttgcccaggacgtgtacgccaaggacaatttgcccccttttcctgcctccgtgaaagatggctacgctgtaagggcagctgacggtccaggtgacagattcatcatcggagagtcccaggcgggggagcaacccacgcagaccgtgatgcctggtcaggtgatgagggtgactacaggcgcgccaatcccttgtggggccgacgcagttgtccaggttgaagataccgagctgattcgagaaagtgacgacgggacagaggaactggaggtgaggatcttagtgcaagccaggccaggccaggacatccgccctatcggacacgacattaaacgcggcgagtgtgtgctggccaaaggtacccacatgggacctagcgagatagggctgctagccacggtgggcgtgactgaagtggaagtcaacaagtttcccgtcgttgcagttatgtctaccggcaacgagctgttgaatccggaggacgatctactgcctggcaagatcagggatagcaaccgctctacgctgctggctaccatccaagagcacggataccctactatcaacctgggaatcgtgggggacaacccagatgacctgctcaacgccctcaacgaagggatatctagagcagacgtgatcatcacctcaggaggggtgagtatgggcgaaaaggactacttgaaacaggtgcttgatatcgacctccacgcccaaatacacttcggtagagtgttcatgaagcccggccttccaaccacctttgctacacttgatattgacggagtgcgaaagataattttcgctctaccaggaaatcccgtgtcagccgtagtgacttgtaacctgttcgtagtcccggccctgagaaagatgcaggggattctagacccacgcccgactattatcaaagctagactgtcttgcgatgtcaagttggacccacgccccgagtaccaccgctgcatactgacctggcaccatcaggagcccctgccttgggcacagtctaccggtaatcagatgtcatcacggctaatgtccatgagatccgccaatggcctgctgatgctgcctcctaaaaccgaacaatacgttgaattacacaagggggaagtggtcgacgtaatggttattggccgactatag

SEQ ID NO: 205931 - DNA, 2310 bp, Artificial Sequence
  derived and/or modified sequence
atggcaacagagggaatgattctgacaaatcacgaccaccaaatccgagtcggggtgctcaccgtgtcagactcgtgttttcggaaccttgctgaagatcgttctggcatcaacctcaaggacctcgtgcaggatccttctctgcttggtgggaccattagcgcatacaagattgtccccgatgagattgaggagattaaggagaccttgatagattggtgcgacgagaaggaacttaacttgatcttgacaactgggggaaccggctttgcacctagagacgtcacccctgaggcaactaaggaagttatcgaacgagaagctccaggaatggctctggccatgcttatgggtagtctcaacgtcacccctctcggcatgcttagcagaccagtgtgcgggatccgaggaaaaaccctcatcattaacctgccaggtagtaaaaagggcagccaggagtgtttccagttcatcctgccagccctgccccacgctattgatttgctgcgcgacgcaatcgtgaaagtgaaggaggtgcacgacgagctcgaagacttaccctctcccccacccccactgagcccccctccaactacaagcccacacaagcaaaccgaggacaagggcgtacagtgcgaggaggaggaggaggagaagaaggattcaggcgtggcatctactgaagactcctcctctagccatatcacggctgccgcaattgccgctaagaagcatccattttacacatcacccgcagtggtcatggcgcacggggagcagccgattcctggcctgatcaactacagtcaccactcgaccgacgaaagaattcccgactctatcatctctcggggtgtacaggtcctgcccagagatactgcctcactgtccactacaccgagtgagtcccccagggctcaggccacctcgcgtctcagtaccgccagttgtcccactcccaaagttcagtcccggtgttctagtaaagaaaatattttaagggctagccacagtgccgtagacattacaaaagtggcaagaagacataggatgagcccgtttcctctgacatcgatggataaagcttttataacagtccttgaaatgaccccggtgctcggaaccgaaatcattaactatagggacgggatggggagggtcctggcacaggatgtatatgcgaaagacaatctccccccatttcctgcctcggttaaagatggatatgctgttcgtgcagcggatggtccaggcgacagattcatcattggagaaagccaggccggagaacagcctacccaaacagttatgcccggacaggtgatgcgggtgactactggagcccctattccatgcggcgctgatgctgtagtgcaggttgaagacacagagctgatccgtgagagcgatgatggaactgaagagctggaagtgaggatcctcgtccaggctaggcctggtcaggatataagacccatcgggcatgacatcaagcgtggagagtgcgtgctcgctaagggaacacacatgggaccctcagaaattggcctgctcgctactgtaggggtgaccgaagtggaagtgaataagtttccagtggtcgccgttatgtcaaccggtaatgagctactgaatcccgaagatgacctgctcccagggaaaatcagagattcaaatcgctcaaccctacttgccactatacaagaacatgggtatccgactataaatctgggcatcgtcggcgataatccagacgacctattgaatgccctgaatgaagggatttccagggcggacgtgataattacaagtggaggcgttagcatgggcgaaaaagactatctgaagcaagtgctggatatcgatctgcatgcccagattcacttcggacgagtgtttatgaaaccaggtttgccaacaacctttgccaccctggatattgacggcgttcgtaaaatcatcttcgccctacccggaaaccccgtgagcgccgtcgtgacttgcaacctgttcgtggtgcctgccctgcgaaagatgcagggcatcctcgatcctaggccaaccatcataaaggccaggctgtcctgtgacgtaaagctggaccctaggcccgagtaccataggtgcatcctaacttggcatcatcaggagcctctgccctgggcccagtcaactggcaatcagatgtctagcagactcatgagtatgcgttcagctaacggactcttgatgctgccgcctaaaacagaacagtatgtggagctgcacaagggcgaagtagtcgatgttatggttattggccgactgtag

SEQ ID NO: 205932 - DNA, 2310 bp, Artificial Sequence
  derived and/or modified sequence
atggccaccgagggcatgatcctgaccaaccacgaccaccagatcagagtgggcgtgctgaccgtgagcgacagctgcttcagaaacctggccgaggacagaagcggcatcaacctgaaggacctggtgcaggaccccagcctgctgggcggcaccatcagcgcctacaagatcgtgcccgacgagatcgaggagatcaaggagaccctgatcgactggtgcgacgagaaggagctgaacctgatcctgaccaccggcggcaccggcttcgcccccagagacgtgacccccgaggccaccaaggaggtgatcgagagagaggcccccggcatggccctggccatgctgatgggcagcctgaacgtgacccccctgggcatgctgagcagacccgtgtgcggcatcagaggcaagaccctgatcatcaacctgcccggcagcaagaagggcagccaggagtgcttccagttcatcctgcccgccctgccccacgccatcgacctgctgagagacgccatcgtgaaggtgaaggaggtgcacgacgagctggaggacctgcccagcccccccccccccctgagccccccccccaccaccagcccccacaagcagaccgaggacaagggcgtgcagtgcgaggaggaggaggaggagaagaaggacagcggcgtggccagcaccgaggacagcagcagcagccacatcaccgccgccgccatcgccgccaagaagcaccccttctacaccagccccgccgtggtgatggcccacggcgagcagcccatccccggcctgatcaactacagccaccacagcaccgacgagagaatccccgacagcatcatcagcagaggcgtgcaggtgctgcccagagacaccgccagcctgagcaccacccccagcgagagccccagagcccaggccaccagcagactgagcaccgccagctgccccacccccaaggtgcagagcagatgcagcagcaaggagaacatcctgagagccagccacagcgccgtggacatcaccaaggtggccagaagacacagaatgagccccttccccctgaccagcatggacaaggccttcatcaccgtgctggagatgacccccgtgctgggcaccgagatcatcaactacagagacggcatgggcagagtgctggcccaggacgtgtacgccaaggacaacctgccccccttccccgccagcgtgaaggacggctacgccgtgagagccgccgacggccccggcgacagattcatcatcggcgagagccaggccggcgagcagcccacccagaccgtgatgcccggccaggtgatgagagtgaccaccggcgcccccatcccctgcggcgccgacgccgtggtgcaggtggaggacaccgagctgatcagagagagcgacgacggcaccgaggagctggaggtgagaatcctggtgcaggccagacccggccaggacatcagacccatcggccacgacatcaagagaggcgagtgcgtgctggccaagggcacccacatgggccccagcgagatcggcctgctggccaccgtgggcgtgaccgaggtggaggtgaacaagttccccgtggtggccgtgatgagcaccggcaacgagctgctgaaccccgaggacgacctgctgcccggcaagatcagagacagcaacagaagcaccctgctggccaccatccaggagcacggctaccccaccatcaacctgggcatcgtgggcgacaaccccgacgacctgctgaacgccctgaacgagggcatcagcagagccgacgtgatcatcaccagcggcggcgtgagcatgggcgagaaggactacctgaagcaggtgctggacatcgacctgcacgcccagatccacttcggcagagtgttcatgaagcccggcctgcccaccaccttcgccaccctggacatcgacggcgtgagaaagatcatcttcgccctgcccggcaaccccgtgagcgccgtggtgacctgcaacctgttcgtggtgcccgccctgagaaagatgcagggcatcctggaccccagacccaccatcatcaaggccagactgagctgcgacgtgaagctggaccccagacccgagtaccacagatgcatcctgacctggcaccaccaggagcccctgccctgggcccagagcaccggcaaccagatgagcagcagactgatgagcatgagaagcgccaacggcctgctgatgctgccccccaagaccgagcagtacgtggagctgcacaagggcgaggtggtggacgtgatggtgatcggcagactgtag

SEQ ID NO: 205933 - protein, 1722 aa, Artificial Sequence
  derived and/or modified sequence
MSDPRQSQEEKHKLGRASSKFKDPPRIMQSDDYFARKFKAINGNMGPTTSLNASNSNETGGGGPANGTPAVPKMGVRARVSEWPPKKDCSKELTCKALWESRSQTSYESITSVLQNGQSDQSEGQQDEQLDLDFVEAKYTIGDIFVHSPQRGLHPIRQRSNSDVTISDIDAEDVLDQNAVNPNTGAALHREYGSTSSIDRQGLSGENFFAMLRGYRVENYDHKAMVPFGFPEFFRCDPAISPSLHAAAQISRGEFVRISGLDYVDSALLMGRDRDKPFKRRLKSESVETSLFRKLRTVKSEHETFKFTSELEESRLERGIRPWNCQRCFAHYDVQSILFNINEAMATRANVGKRKNITTGASAASQTQMPTGQTGNCESPLGSKEDLNSKENLDADEGDGKSNDLVLSCPYFRNETGGEGDRRIALSRANSSSFSSGESCSFESSLSSHCTNAGVSVLEVPRENQPIHREKVKRYIIEHIDLGAYYYRKFFYGKEHQNYFGIDENLGPVAVSIRREKVEDAKEKEGSQFNYRVAFRTSELTTLRGAILEDAIPSTARHGTARGLPLKEVLEYVIPELSIQCLRQASNSPKVSEQLLKLDEQGLSFQHKIGILYCKAGQSTEEEMYNNETAGPAFEEFLDLLGQRVRLKGFSKYRAQLDNKTDSTGTHSLYTTYKDYELMFHVSTLLPYMPNNRQQLLRKRHIGNDIVTIVFQEPGALPFTPKSIRSHFQHVFVIVKVHNPCTENVCYSVGVSRSKDVPPFGPPIPKGVTFPKSAVFRDFLLAKVINAENAAHKSEKFRAMATRTRQEYLKDLAENFVTTATVDTSVKFSFITLGAKKKEKVKPRKDAHLFSIGAIMWHVIARDFGQSADIECLLGISNEFIMLIEKDSKNVVFNCSCRDVIGWTSGLVSIKVFYERGECVLLSSVDNCAEDIREIVQRLVIVTRGCETVEMTLRRNGLGQLGFHVNFEGIVADVEPFGFAWKAGLRQGSRLVEICKVAVATLTHEQMIDLLRTSVTVKVVIIQPHDDGSPRRGCSELCRIPMVEYKLDSEGTPCEYKTPFRRNTTWHRVPTPALQPLSRASPIPGTPDRLPCQQLLQQAQAAIPRSTSFDRKLPDGTRSSPSNQSSSSDPGPGGSGPWRPQVGYDGCQSPLLLEHQGSGPLECDGAREREDTMEASRHPETKWHGPPSKVLGSYKERALQKDGSCKDSPNKLSHIGDKSCSSHSSSNTLSSNTSSNSDDKHFGSGDLMDPELLGLTYIKGASTDSGIDTAPCMPATILGPVHLAGSRSLIHSRAEQWADAADVSGPDDEPAKLYSVHGYASTISAGSAAEGSMGDLSEISSHSSGSHHSGSPSAHCSKSSGSLDSSKVYIVSHSSGQQVPGSMSKPYHRQGAVNKYVIGWKKSEGSPPPEEPEVTECPGMYSEMDVMSTATQHQTVVGDAVAETQHVLSKEDFLKLMLPDSPLVEEGRRKFSFYGNLSPRRSLYRTLSDESICSNRRGSSFGSSRSSVLDQALPNDILFSTTPPYHSTLPPRAHPAPSMGSLRNEFWFSDGSLSDKSKCADPGLMPLPDTATGLDWTHLVDAARAFEGLDSDEELGLLCHHTSYLDQRVASFCTLTDMQHGQDLEGAQELPLCVDPGSGKEFMDTTGERSPSPLTGKVNQLELILRQLQTDLRKEKQDKAVLQAEVQHLRQDNMRLQEESQTATAQLRKFTEWFFTTIDKKS

SEQ ID NO: 205934 - DNA, 5169 bp, Artificial Sequence
  derived and/or modified sequence
atgtctgatcctcgtcagtcacaggaagaaaaacataaactcggccgggcctcctccaagttcaaggatccaccgcgcatcatgcaaagtgacgattatttcgccaggaagtttaaagccatcaatggaaacatggggcctaccacctccctgaatgcctctaactctaatgagactggcggcggcggccccgcgaacggtaccccagccgtgcccaagatgggcgtgagagcaagggtatctgaatggccaccaaagaaagattgcagtaaagagcttacatgcaaagcactgtgggagtcccgttcccaaacaagttatgagtcaatcaccagtgtcctgcagaatggacaatctgatcagagcgagggacagcaggatgagcaactggatttagacttcgtcgaggccaagtacaccataggagatatctttgtgcactcaccccagagaggtttgcatcccatccgccagcggagtaactccgacgttactatcagcgatatcgacgccgaagacgtgttggatcagaacgccgtgaacccaaacaccggagcagctctccacagagagtatggttcaacaagcagcatcgaccggcaagggctgagcggcgaaaatttttttgctatgttacgaggctatcgcgttgaaaactatgaccacaaggccatggtgcccttcggatttcccgaattctttcgatgtgacccagctatctcgccatcgctgcatgctgcggcccagattagcaggggcgaatttgttagaatcagcggtttagattacgttgatagtgccctgctgatgggaagggatcgggacaagccatttaagcggagactgaagagcgagagcgttgaaacttcactgtttcggaagctgaggactgtaaagtcagaacatgagacctttaagtttacaagcgagctagaagagagcagattagagaggggtatccggccatggaactgtcagagatgtttcgcccattacgacgtccagtccattctctttaacattaacgaggcgatggcaacaagggctaatgtaggtaaacgtaagaacataactaccggtgccagcgcagcatctcagacacagatgcctactggccagaccggcaactgcgaatctccactgggcagcaaagaggatctgaacagtaaagaaaacctcgatgctgatgaaggggacggcaagagtaatgaccttgtgctgtcatgtccatacttcaggaacgaaacgggcggcgagggcgacagacgtattgccctgagccgggccaactcttccagtttctcaagcggggagtcttgcagcttcgagtccagtctgtctagtcactgtaccaacgctggagtctccgtgctggaggttccccgagaaaaccaaccgatccatcgcgagaaggttaagaggtacatcatagagcatatagatctgggcgcatattactaccgcaagttcttctatggaaaagaacaccaaaactactttggcattgatgaaaatctgggccccgtcgccgtgagcatccggcgggaaaaagtagaagacgcgaaagaaaaagaagggtcccagttcaactaccgtgtggcctttcgtacctctgagctcaccacactacgcggcgcgatacttgaagatgcaattccaagtaccgctcgccacgggacagcacgtggcctccctttgaaggaagtgttagaatacgtgataccagagctgtccattcagtgcctccgtcaagcctctaattcccccaaggtgagcgaacagctgctgaaattagatgaacagggcctgtcctttcagcataagatcgggatcctgtattgcaaggctggacagtctaccgaggaggaaatgtacaacaatgagaccgccggacctgccttcgaggagttcctagaccttctgggacagcgcgtgcgactgaagggcttcagtaaatatcgagcccaactcgataataagacagacagcaccggcacacactcactgtacacaacgtacaaggactacgagctcatgttccatgtctcaaccctgttgccatacatgccaaacaatcggcagcagcttctgcggaaaaggcatatcgggaacgatattgtgacaattgtatttcaggagccaggtgctttaccgtttacccccaagagcatcagaagccattttcagcacgttttcgtgatcgtcaaggtgcataacccctgcaccgaaaacgtttgctattctgtcggcgtgtccaggagtaaggacgtgccaccttttggccctccaatccctaagggtgtaacatttcccaagtcagcggtgtttagggacttcctgctagcgaaggttatcaacgccgagaatgcagcccataaaagtgaaaagtttcgcgccatggctacacgaaccagacaggagtacctgaaagatttggccgaaaactttgtaaccaccgccaccgtcgataccagcgtgaaatttagctttattaccctgggcgcaaagaagaaagagaaagtgaagcctcggaaggacgcccatctttttagcattggcgccatcatgtggcacgtgattgccagagattttggccaatctgcggatatcgagtgcctccttggcatctcaaacgaatttattatgcttattgagaaagacagtaaaaacgtggtgttcaactgcagttgtcgcgacgtaattggatggactagcggacttgtgtccataaaagtgttctatgaacgcggagaatgtgttcttctgagtagcgtggacaattgcgcggaggatatacgcgagatcgtgcaacgattagtgattgtcactcgagggtgtgagaccgtggagatgacactccgtcgtaacgggctcgggcaacttgggtttcacgtgaacttcgagggaattgtcgcagacgtcgagccatttggctttgcgtggaaagccggcctgaggcagggatcaagactggttgagatttgcaaggttgcggttgcaactctgactcatgaacagatgatcgatctcctccgaaccagcgtgactgtgaaggttgttataatccagccgcacgacgatggaagtccgcggaggggatgtagcgaattgtgtcggatcccaatggtcgagtataagctcgacagtgagggaactccctgtgaatacaagaccccgtttcggcgtaatacgacctggcatagagtgcctaccccagccctgcagcccttaagccgcgcgtctcctatcccaggcacgccggatcgtctgccctgtcaacagctcttgcagcaagctcaggccgcgatacctcggagtactagttttgaccgaaagctgcccgatgggaccaggagctctcctagtaaccaatcctcctctagtgacccaggccctgggggctccggcccttggaggccccaagttgggtacgatggctgccaatcgcctctgcttttggaacaccagggatcaggtcctctggagtgcgacggagcccgcgaacgtgaagacacaatggaggctagtcgtcacccagagactaagtggcacggccccccttccaaagtgctgggatcttataaggagagggccctgcagaaggatggcagctgcaaagattctcccaataaactgtcgcatattggcgacaaatcatgttcatcacacagttcgagcaatactctctcctccaacacaagcagcaacagcgacgacaagcattttggaagcggcgaccttatggacccggagttgttgggccttacttacatcaagggggccagtaccgactcaggtattgatactgctccatgcatgcctgccacaatattagggcccgtgcatctcgcaggcagccgcagcctgatacactcgagagccgagcagtgggcggatgcagccgatgtgagcggcccagatgacgagccagcaaaactctatagcgttcacggctacgcctccacaatcagcgccggatccgcagccgagggcagtatgggcgatctgagcgaaatctcatcgcactccagcgggtcacatcattcagggagcccatcggctcattgctccaagagctcaggatcgctcgactctagcaaagtctatattgtatctcatagtagcggccagcaggtgcctggaagtatgagcaagccctaccaccgccagggcgccgtgaacaagtatgtcatcggatggaaaaagagcgaaggcagtcctccccctgaagagcccgaggtgacagagtgcccgggcatgtactcagagatggatgtcatgagcacagctacacagcaccagaccgtggtgggcgacgccgtggctgagactcagcacgttttgtccaaggaggactttctgaaactgatgctgcctgactcaccattggtggaggaaggaagacgcaagttcagtttttacgggaatttgtctcccagaaggtcactttatcgtaccctgtctgacgagtcaatctgctcaaatagaagagggtcttccttcggctcatctcggtcgagtgtgctggaccaggctctccctaatgatatccttttttccacgacacccccttatcattctacactcccacctcgtgctcacccggcaccctctatgggatcactgcgtaacgagttttggttcagcgatggttctctgtccgacaagtccaaatgtgctgacccaggcctcatgccacttccagacacagcaactggcctggactggacccatttggtcgatgccgctagagcctttgaggggttggacagcgacgaagagttgggtcttttgtgtcaccacacaagttaccttgatcagagggtggctagcttctgtacactgacagacatgcagcatggccaggatctggaaggtgctcaggaacttcccctgtgcgtggaccctggaagtggaaaagagtttatggataccactggagagcgaagcccgagcccattaacggggaaggttaaccagcttgagctcatcttgcggcagcttcagactgatctgaggaaggagaagcaagataaagcagtcctgcaagctgaagtgcagcaccttcgtcaggacaatatgcgtctgcaggaggagagccaaacggccaccgctcagcttagaaagtttaccgagtggttctttactacgatcgataagaagtcttag

SEQ ID NO: 205935 - DNA, 5169 bp, Artificial Sequence
  derived and/or modified sequence
atgtctgacccccgacagagccaagaagagaagcataaactggggcgggcctccagcaaattcaaggatccccctcggattatgcagtcagacgactattttgcccggaagttcaaggcgataaatggcaacatgggccctactacgagtttaaacgccagtaattcgaacgagacaggcgggggtgggccggccaacggcaccccggccgttcctaagatgggggtgcgcgccagggtgtcggaatggccacctaaaaaagattgttctaaggagctgacttgtaaggccctatgggaatctcgctcccagaccagctatgaaagtattacttcggtactgcagaacgggcagtctgatcagtctgaggggcagcaggacgaacagctggatctagacttcgtggaggctaaatataccataggggacatcttcgttcacagcccacagcgtggactgcaccctattcgacagcgatccaacagtgacgtcactatttccgatatcgatgccgaggacgtattggatcagaatgctgtaaacccaaacactggtgcagctctgcacagggagtatggcagtacatcgtctatcgatcgtcagggattatctggagagaactttttcgccatgctccgagggtacagggtagagaactacgatcataaagccatggttcccttcggctttcctgagtttttcaggtgcgaccctgccataagccccagcctgcatgctgccgcccagatctcccggggggagttcgtacggatctcaggactggactacgtagactcggcccttctgatgggtcgcgaccgggataagccattcaaaagacgcctcaaaagcgaatcagtggagacatcactgttccgcaaattgaggaccgtaaaatctgaacatgaaacgtttaaatttacctcagaattggaggagtccagactagaacgcggaatacgaccgtggaattgccaacgatgttttgctcattatgatgtccaaagcatcctcttcaacatcaatgaagccatggccacacgagcgaacgtgggaaagcggaagaacattacaactggagcatccgctgcttcccaaacacagatgcccacaggacaaacaggaaactgcgagtcccccctggggtccaaggaagacctcaactcaaaggaaaaccttgatgccgatgagggcgacgggaagtctaatgatctggtgctctcttgcccttatttcagaaatgagaccggtggggagggggaccggaggatcgcattgagtagggcgaactcaagctccttctcttccggggagagctgcagcttcgaatcctcattgagcagtcactgcaccaacgctggtgtctctgttctagaagttccacgtgaaaatcagcccatacaccgggaaaaggtaaagaggtacatcatcgagcacatcgacctgggagcttactactatcggaaatttttttacggtaaggagcaccagaattattttggaattgacgaaaacctcggaccggtggcggtgagcatccggcgggagaaggtcgaggacgcaaaggaaaaggagggatcccagttcaattaccgcgtggcattccggacctccgagctgactacactgcgtggcgcaattctcgaagacgccatcccatcaacggctcgacatgggactgctagaggcttgccactgaaggaagtcctggaatatgtcattcctgaactgagtatccagtgcttgaggcaggcgtctaacagccctaaggtaagcgaacaactcctgaagctggatgagcagggcttgtctttccagcataagatcgggattctgtattgtaaagcagggcagtccactgaggaagagatgtacaataatgagactgctggtcctgcttttgaagaattcttggacttgcttggtcaacgcgtgcggttgaaggggttctccaagtatagagcccagctggacaacaaaactgactctactggtacccacagcttgtacaccacctacaaggactatgagctcatgttccacgtgtcgacattgctgccctatatgccgaacaacagacagcaacttctgcgcaaaaggcacataggaaatgacatcgtgacgatagtgtttcaggaacctggagcgctccctttcacccctaagtccattaggtcacacttccaacacgtatttgtcatcgtgaaggtacataacccttgcaccgagaatgtctgttattccgtgggggtgtctcggtcgaaagatgtgccaccatttggtcctcccattccgaaaggcgtaaccttccccaaaagcgctgtgtttcgggatttcctgttggccaaagtcattaacgctgagaacgcggcacataaatctgagaaatttagagctatggcaacacgaacccgccaggaatacttgaaggatctggctgaaaacttcgtgactaccgccaccgtcgatacatctgttaagtttagcttcataaccctgggcgccaagaagaaggaaaaggtgaaaccccgtaaagacgcccaccttttcagcatcggcgcaatcatgtggcacgtaattgccagggactttggccagtctgcagacatcgagtgtctactcgggatatcaaacgaattcataatgttgatagaaaaggacagcaaaaacgtggtatttaattgctcttgtcgcgatgtgattggctggaccagtggcttggtttcaataaaggtcttttacgagcgaggagagtgtgtgctgctgtcctcagtggacaactgcgctgaagacattagggagatagtgcagaggctcgtgatcgtgacccggggctgtgaaaccgtagagatgactctgcgcagaaatggcctgggtcaattagggttccatgtaaacttcgagggcatcgtggctgacgttgagcccttcggcttcgcctggaaagcaggtctgcggcaggggtcccggctggtggagatttgcaaagttgccgtagctactttgacccatgagcaaatgatagacctgctgcgaacctccgttacagtgaaggtggtcataattcagccacacgatgacgggtctccacgccgcggatgtagcgagctgtgccgcatccccatggttgagtacaagttggactctgaagggaccccatgtgaatacaagacgcccttccgcaggaatacaacatggcaccgcgtcccgacccctgccctgcagccactatctcgcgcatcaccaattccgggcacacccgatcgcttgccttgtcaacagctacttcagcaagcccaggctgcaatccccaggtctacctctttcgacagaaaactgcccgacggaaccagatccagtcctagtaatcaatcgtcgtcgagcgatccaggtccaggcggcagcggtccgtggcgccctcaggtagggtacgacggatgtcagtcaccgttactcctggaacatcagggttcaggccccctggaatgtgatggagcgcgggagcgagaagacaccatggaagccagcaggcatccggaaacaaaatggcatggccccccctccaaggtccttggttcatacaaggaacgcgcccttcaaaaggatggctcatgtaaggattccccgaacaagttatcccatatcggggacaaaagttgtagcagccacagtagttctaacacactgtcaagcaacacgtccagcaattccgacgataaacacttcgggtccggagatttgatggaccccgagctgcttggtcttacctacataaaaggtgcaagtacggatagtggtatcgacacagctccatgtatgcctgcaactattctcggtcctgttcacctggccggatcaaggtctttgatccactcacgcgccgagcagtgggccgacgcagccgatgtcagcggtcccgatgacgaacccgcaaagctctactcagtgcacggctacgctagtacaatttcagcggggtccgctgccgaggggagcatgggggacttaagcgagattagcagccacagctcgggttcccaccattcaggcagcccaagcgcgcactgcagtaaatcttccggtagtttagattcaagtaaggtgtacattgtaagtcattcatccggacaacaggtcccaggcagtatgtctaaaccttaccatcgtcagggtgctgtaaacaaatacgtgataggctggaagaaaagcgaaggctctcctccccccgaagagcccgaggtcaccgagtgccccgggatgtattcagagatggatgtcatgtccacggctacccaacatcagacagtggtaggagatgcagtggccgagactcagcacgtgctcagcaaagaggatttccttaagctcatgcttcccgacagcccactggtagaagagggaaggcgtaaatttagtttttacggcaatctatccccaaggaggtctctgtacaggacactgagcgacgaaagcatttgtagcaatcgacgcggttctagctttggctcctcccgctccagcgtcttggatcaggccctgcctaatgacatcctcttctccacaacccccccctaccactccaccctgcctccaagggcacacccagctccaagcatgggcagcctgagaaatgagttctggttcagcgacggtagtctgtccgataagtctaaatgtgccgaccctgggctcatgcccctccctgacaccgcaactggtctggattggacacatctggtggatgccgcacgggcattcgaggggcttgatagtgacgaggagctgggcttactctgccatcacacctcttatctcgatcagcgcgtcgcctctttctgcacattgacggacatgcagcacggccaggacttggaaggcgctcaagagcttcctctatgcgtggatcccggatctggaaaggagttcatggacactacaggtgaaaggagtccttcaccactgacggggaaggtgaaccagctagagctgattctgcggcagcttcagaccgatcttaggaaagaaaagcaggacaaagccgttcttcaggcggaggtgcaacacctgcggcaagataacatgcgcctgcaggaagaatcgcagactgccacagcacaactgagaaagtttacagagtggttctttacaaccatcgataagaaatcttag

SEQ ID NO: 205936 - DNA, 5169 bp, Artificial Sequence
  derived and/or modified sequence
atgtctgacccccggcagagccaggaggagaagcacaagctgggccgggccagcagcaagttcaaggaccccccacgcatcatgcagagtgatgactactttgccaggaagttcaaggccatcaatggaaacatgggccccaccaccagcctgaatgccagcaacagcaatgaaacaggaggcggcggccctgccaacggcaccccagctgtgcccaagatgggcgtgcgggcccgggtgtctgagtggccacccaagaaggactgcagcaaggagctgacctgcaaggccctgtgggagagccgcagccagaccagctatgagagcatcacctctgtgctgcagaatggccagagcgaccagagcgagggccagcaggatgagcagctggacctggactttgtggaggccaagtacaccatcggggacatctttgtgcacagcccccagaggggcctgcaccccatccggcagaggagcaacagtgatgtgaccatcagtgacattgatgctgaagatgtgctggaccagaatgctgtgaaccccaacacaggagctgccctgcaccgggagtatggcagcaccagcagcattgaccggcagggcctgagcggggagaacttctttgccatgctgcggggctacagagtggagaactatgaccacaaggccatggtgcccttcggcttccctgagttcttccgctgtgaccctgccatcagccccagcctgcacgccgccgcccagatcagcagaggagaatttgtgcgcatcagcggcctggactatgtggacagcgccctgctgatgggccgggaccgggacaagcccttcaagaggcggctgaagtctgagagcgtggagaccagcctcttcaggaagctgaggacagtgaagtctgagcacgagaccttcaagttcaccagcgagctggaggagagccggctggagcggggcatccggccctggaactgccagcgctgctttgcccactatgatgtgcagagcatcctcttcaacatcaatgaggccatggccacccgggccaacgtgggcaagaggaagaacatcaccactggagccagcgctgccagccagacccagatgcccaccggccagacaggcaactgtgagagccccctgggcagcaaagaagacctgaacagcaaagaaaacctggatgctgatgaaggagatggcaagagcaatgacctggtgctgagctgcccctacttcagaaatgagaccggcggggagggggaccggcgcatcgccctgagccgggccaacagcagcagcttcagcagcggggagagctgcagctttgagagcagcctgagcagccactgcaccaatgccggcgtgtctgtgctggaggtgccccgggagaaccagcccatccaccgggagaaggtgaagcgctacatcatcgagcacatcgacctgggcgcctactactacaggaagttcttctacggcaaggagcaccagaactacttcggcattgatgagaacctgggccctgtggccgtgtccatccggcgggagaaggtggaggatgccaaggagaaggagggcagccagttcaactacagagtggccttccgcaccagcgagctgaccaccctgcggggggccatcctggaggatgccatccccagcacagcccggcacggcacagcccggggcctgcccctgaaggaggtgctggagtatgtgattcctgagctgagcatccagtgcctgcggcaggccagcaacagccccaaggtgtctgagcagctgctgaagctggatgagcagggcctgtccttccagcacaagattggcatcctgtactgcaaggccggccagagcacagaggaggagatgtacaacaatgaaacagctggccctgcctttgaggagttcctggacctgctgggccagagggtgcggctgaagggcttcagcaagtaccgggcccagctggacaacaagacagacagcacaggcacccacagcctgtacaccacctacaaggactatgagctgatgtttcatgtgtccaccctgctgccctacatgcccaacaaccggcagcagctgctgaggaagaggcacatcggaaatgacatcgtgaccatcgtgttccaggagcccggggccctgcccttcacccccaagagcatccgcagccacttccagcacgtgtttgtgattgtgaaggtgcacaacccctgcacagaaaatgtgtgctacagcgtgggcgtgagccgcagcaaggatgtgccccccttcggcccccccatccccaagggcgtgaccttccccaagtctgctgtgttccgggacttcctgctggccaaggtgatcaatgcagaaaatgctgcccacaagtctgagaagttccgggccatggccaccaggacccggcaggagtacctgaaggacctggccgagaactttgtgaccacagccaccgtggacacctctgtgaagttctccttcatcaccctgggcgccaagaagaaggagaaggtgaagcccaggaaggatgcccacctgttcagcatcggggccatcatgtggcacgtgattgcccgggactttggccagagcgctgacattgaatgtctgctgggcatcagcaatgagttcatcatgctgattgagaaggacagcaagaatgtggtgttcaactgcagctgcagagatgtgattggctggaccagcggcctggtgtccatcaaggtgttctatgaaagaggagaatgtgtgctgctgagctctgtggacaactgtgccgaggacatccgggagatcgtgcagaggctggtgattgtgacccggggctgtgagaccgtggagatgaccctgcggagaaatggcctgggccagctgggcttccacgtgaactttgagggcatcgtggctgatgtggagccctttggatttgcctggaaggccggcctgcggcagggcagccggctggtggagatctgcaaggtggccgtggccaccctgacccatgagcagatgattgacctgctgcggacctctgtgacagtgaaggtggtgatcatccagccccatgatgatggcagcccccggcggggctgcagcgagctgtgccgcatccccatggtggagtacaagctggacagcgagggcaccccctgtgagtacaagacccccttcagaagaaacaccacctggcaccgggtgcccaccccagccctgcagcccctgagccgggccagccccatccctggcaccccagaccggctgccctgccagcagctgctgcagcaggcccaggccgccatccccaggagcaccagctttgacaggaagctgcctgatggcaccaggagcagccccagcaaccagagcagcagcagtgaccccggccctgggggcagcggcccctggaggccccaggtgggctatgatggctgccagagccccctgctgctggagcaccagggcagcggccccctggagtgtgatggagcccgggagcgggaggacaccatggaggccagccgccaccctgagaccaagtggcacggcccccccagcaaggtgctgggcagctacaaggagcgggccctgcagaaggatggcagctgcaaggacagccccaacaagctgagccacatcggggacaagagctgcagcagccacagcagcagcaacaccctgagcagcaacaccagcagcaacagtgatgacaagcacttcggcagcggggacctgatggaccctgagctgctgggcctgacctacatcaagggggccagcacagattctggaattgacacagccccctgcatgcctgccaccatcctgggccctgtgcacctggccggcagccgcagcctcatccacagcagagctgagcagtgggcagatgctgctgatgtgtctggcccagatgatgagcccgccaagctgtacagcgtgcacggctacgccagcaccatctctgctggcagcgctgctgagggctccatgggagacctgtctgagatcagcagccacagcagcggcagccaccacagcggcagccccagcgcccactgcagcaagagcagcggcagcctggacagcagcaaggtgtacatcgtgagccacagcagcggccagcaggtgcccggctccatgagcaagccctaccaccggcagggcgctgtgaacaagtatgtgattggctggaagaagtctgagggcagccccccacctgaggagcctgaggtgacagagtgccccggcatgtacagcgagatggatgtgatgagcacagccacccagcaccagacagtggtgggagatgctgtggccgagacccagcacgtgctgagcaaagaagacttcctgaagctgatgctgcctgacagccccctggtggaggagggccgcaggaagttctccttctacggcaacctgagcccccggcgcagcctgtaccgcaccctgagtgatgagagcatctgcagcaacagaagaggcagcagctttggcagcagccgcagctctgtgctggaccaggccctgcccaatgacatcctcttcagcaccaccccaccctaccacagcaccctgcccccccgggcccacccagcccccagcatgggcagcctgagaaatgagttctggttcagtgatggcagcctgagtgacaagagcaaatgtgccgaccccggcctgatgcccctgcctgacacagccaccggcctggactggacccacctggtggatgctgcccgggcctttgagggcctggacagtgatgaggagctgggcctgctgtgccaccacaccagctacctggaccagagggtggccagcttctgcaccctgacagacatgcagcacggccaggacctggagggcgcccaggagctgcccctgtgtgtggaccccggcagcggcaaggagttcatggacaccaccggggagaggagccccagccccctgaccgggaaggtgaaccagctggagctgatcctgcggcagctgcagacagacctgaggaaggagaagcaggacaaggctgtgctgcaggccgaggtgcagcacctgcggcaggacaacatgaggctgcaggaggagagccagacagccacagcccagctgaggaagttcacagagtggttcttcaccaccatcgacaagaagagctag

SEQ ID NO: 205937 - DNA, 5169 bp, Artificial Sequence
  derived and/or modified sequence
atgagcgacccccggcagagccaggaggagaagcacaagctgggcagagcctcgtctaaatttaaggatccgccccgcattatgcagtctgatgattacttcgcacgtaagtttaaggcaattaacgggaatatgggaccaactacgtccttaaatgcctcaaactccaacgagacagggggcggcggacccgcgaacggcacaccagccgtgcctaagatgggcgtgagggcaagggtgtcagagtggccaccgaaaaaggactgttccaaggagctcacctgtaaagcactgtgggagagcaggagtcaaacctcatacgagagcatcactagcgtgctacaaaatggtcagtcggatcagagcgagggacaacaggatgagcagctggacctggacttcgtggaagcaaagtatactattggagatatctttgtccattctccccagcgtggccttcaccctatccggcaaaggtccaacagcgacgtaactattagcgacattgacgcagaagacgtcctggaccagaacgctgttaatcccaacactggtgcggctcttcaccgggagtacgggagcaccagcagcatcgatcgccagggcctgagtggagaaaatttctttgccatgctccgcggctatcgggtcgagaattatgaccataaagctatggtccccttcggttttccggagttttttagatgcgatcccgcaatttcaccatccctccacgcagccgcccagatatctaggggagaatttgtgagaattagtgggctcgactacgtcgactctgcgctcctgatgggtcgagaccgggataaaccttttaagcggagactaaagtccgagtctgtagagacatctctgtttagaaagctgcggacagttaagagcgaacacgagactttcaagttcacctcagagctggaggagagtcggctggagcgtggtatcaggccatggaattgccagcgttgctttgcacactatgacgtgcagtctattctttttaacataaatgaggccatggcaacgagagccaatgtgggaaaaagaaagaacattaccaccggcgccagtgctgcatcccagacgcagatgccgactggacagaccgggaactgtgagtccccactgggatctaaggaggacctaaactccaaagagaatcttgatgccgacgagggggacggaaagagcaacgatctggtcctgagttgcccttattttcgtaatgaaacgggaggggaaggagacagaaggatcgcgttatcgcgggcgaattcaagtagcttctccagtggtgagagctgctctttcgaatcatccttaagcagccattgtacaaacgccggagtttccgtgctggaagttcccagggagaaccagcctattcatcgggaaaaggtgaaaagatatattattgagcacatagacttaggcgcatactactatcgaaaatttttttatggcaaggaacaccagaactactttggcattgacgagaatctcgggcccgtggccgtgagtattcggagagaaaaggtggaggacgcgaaggagaaagaggggtcccagttcaattaccgggtcgcatttcggacgagcgagctgaccactttgagaggtgcaattctcgaggacgcaatccctagcactgccagacacggaacagcccgtggactgccgcttaaggaggttctggagtacgtgatacccgaactcagcattcagtgtctgagacaagcctctaattccccaaaggtgtccgagcaactgcttaagctagatgaacagggtctgagtttccagcacaagattggaatcttgtactgcaaagcggggcagtctacagaggaggagatgtataacaacgagactgcaggtccagccttcgaggaattccttgatttgctgggccaacgagttcgcctcaagggattcagcaagtaccgtgcccagttagataacaaaacagattccaccggtacccattcactgtacaccacctacaaggactacgagctcatgttccatgtttcaaccctgttgccctacatgccgaacaatagacagcagcttctccgcaagcgccatataggtaacgatatcgtgactatcgtctttcaggagccaggggccctcccatttactcctaagtcaatccgttcacacttccaacatgttttcgtaatagtgaaggtgcacaatccctgcacagagaacgtgtgttatagtgttggcgtctcccgatcgaaagacgtgcctccttttggccctcccatcccgaagggggttacttttccgaaatccgccgtgtttcgcgatttcctgctggccaaagttataaacgcggaaaacgccgcgcacaagtcggaaaagtttagagcgatggcaacgagaacccgccaggagtacttaaaggacctcgctgagaactttgtaaccactgcgaccgttgacacaagcgtcaagttctcattcataactctcggggctaagaagaaagagaaggtgaagccgcggaaggatgcacacttgttttcaattggtgctattatgtggcatgtgattgccagagattttgggcagtctgccgatattgaatgcctccttgggattagcaatgaatttatcatgttgattgagaaagacagcaagaacgtggtgttcaactgtagctgtagagacgtgattggatggacctccggtcttgtcagcatcaaagtcttttacgagcgtggcgaatgcgtgctgttgtcttctgtggacaattgcgctgaagacatcagggagatagttcagcgtctagtaatcgttacccgcgggtgtgaaacagtggaaatgaccctgcggcggaatgggctgggtcaactgggctttcatgttaactttgaagggattgtagcagacgtggagcctttcggattcgcctggaaagccggcctcagacagggctcacgtctcgtggagatttgtaaagtggcagtggccactctgacgcacgagcagatgattgatctgctcaggacctctgtaaccgtgaaagtcgttattatacagccgcacgatgacggttctcctagaagggggtgcagcgaactctgtcggattcctatggtagaatacaagcttgactctgaagggaccccttgcgagtacaagacccctttccgccgcaatacgacatggcatagggtgcccacgcctgcgctgcaacccctctcacgggcatcacctatccccggaacacctgaccgcctaccctgtcagcaactcctgcaacaggctcaggcagccataccacggtccaccagcttcgaccgcaaattacccgacggaactcgctccagccccagtaatcagtcgtcaagctctgatccgggtcctggcggatccgggccctggcgaccccaagtcgggtacgacggatgccagagccccctactgcttgagcaccaaggttccggccccttggagtgcgacggcgccagggagagggaagacacaatggaagcatcacgtcatcctgaaacaaaatggcacgggccccctagtaaggtgttaggctcttacaaggaacgcgccctccagaaggatgggtcctgtaaagactccccgaacaagctgtcacatatcggagacaaatcatgtagttcccactcatctagcaacaccctcagcagtaacacttcatccaactctgacgataaacacttcggcagcggcgacttaatggaccccgagctgttgggactcacatatataaagggcgcttccacagacagcgggattgataccgcaccgtgcatgcctgccactattttggggcctgtgcatttagcggggtccagaagcttgatacactcaagagctgagcagtgggcagatgctgctgacgtttcaggtcctgacgatgagccggctaagctttacagtgtgcatggatacgctagcacaatttctgcaggaagcgcagccgagggatcaatgggggacctctcagaaatctccagtcacagctccggcagccaccacagcggcagcccatctgctcattgttccaagtcctctggcagcctggactccagcaaagtgtatatcgtgagtcactctagcgggcagcaagtgccaggaagcatgagcaaaccatatcacaggcagggagctgtgaataagtacgtgataggctggaagaaaagcgagggcagtcctccaccagaggagccagaggtgaccgaatgtcccggaatgtactcggaaatggatgtaatgtccactgccacacagcatcaaaccgtggtcggggacgcggtggctgagacacagcacgtgctgtccaaggaggacttcctgaaactcatgctgccggattccccactggttgaggagggacgccgtaaattcagtttctatggaaacttatctcctagaaggtcactgtatcggaccttgtctgacgagtctatttgcagcaatagacgcggaagcagctttgggagctccagaagctccgtcttagatcaagcgctgcccaatgacatcctgttctctactaccccaccctatcattctacgctccccccccgagcccatccagcgccaagcatgggcagcctgagaaacgagttttggttcagtgatgggagcctcagcgacaagtcaaaatgtgccgacccgggtctcatgccactgcctgacacagcaacaggattagattggacgcaccttgtggacgctgctagggcgtttgaaggtctggactcagacgaggagttaggacttctttgtcatcacacctcatacctggaccaacgagtggcttccttttgtacactaaccgacatgcagcacggacaggacttggaaggggcgcaggaactgcccctctgtgtcgacccaggtagcggtaaagagttcatggatactactggagaacgcagtccatctccacttactgggaaggttaatcagctggagttaatactgcggcagctccagaccgacctccgcaaggaaaagcaagacaaagcagtcctgcaggccgaggttcagcacctgcggcaagacaacatgcgcctccaagaggaaagccagaccgctaccgcgcaattacgcaaatttacagagtggtttttcaccaccatcgacaagaagtcttag

SEQ ID NO: 205938 - DNA, 5169 bp, Artificial Sequence
  derived and/or modified sequence
atgagcgacccccggcagagccaggaggagaagcacaagctgggcagggctagtagtaagtttaaagaccccccaaggatcatgcagtctgacgactacttcgcccgcaagttcaaagccatcaacggaaacatgggccccacaacatcgctcaatgcctctaattccaacgagacgggggggggagggccagcaaacggtacccccgcagttccaaagatgggtgtgcgtgcccgggtgagtgagtggcctcctaagaaggactgttcaaaggagttaacttgcaaggccctgtgggaaagccgttcgcagacaagttatgaatccattacaagcgtgctgcagaacgggcagagcgaccaatccgaagggcagcaagacgagcaactcgaccttgacttcgtagaggccaagtacacaattggcgatatattcgtgcacagccctcagcgggggctccatcctatcagacagaggtccaatagtgacgttacaatctctgacatcgacgccgaagatgtcctggaccagaacgctgtcaatccgaacacaggagctgcccttcaccgtgaatacggctcaaccagcagtattgatcgccagggcctgtccggggagaattttttcgcgatgttaagaggctacagagtagagaactacgaccacaaagctatggtgccatttgggtttcccgaatttttcaggtgtgatcctgcaatttccccttcgctacacgcggccgcccaaatctcccgcggggagtttgttcgaatctcaggcctcgactacgtggactccgctcttctcatgggtcgagaccgggacaagccttttaagcgcagactaaaatcagagtcagtcgaaacttccctgtttcgcaagctcaggaccgtgaagtccgagcacgagacctttaaattcacaagcgaactggaagaaagccggctcgaacgggggataagaccctggaactgccagcggtgctttgcccactatgacgttcagtcaattctcttcaacattaacgaagcaatggctacacgggctaacgtaggcaagaggaagaatataaccaccggagcctcagccgcaagccaaacccagatgccaacaggacagaccggtaactgtgaatctcctctgggatctaaggaggacctgaactccaaggagaacctcgacgctgatgagggggacggaaagtctaatgatctcgtgctgtcttgcccctattttagaaatgaaaccggaggcgaaggtgatcggcggattgcccttagccgtgccaatagcagctcttttagcagcggggaatcatgttcgttcgagagcagtctcagttctcattgcaccaatgcaggtgtgagcgtcttggaggtgccccgagaaaaccagcccattcatagagaaaaagtcaaacggtatattattgaacacatagatctcggcgcatactattatagaaagtttttctacggtaaagaacatcagaattacttcggaatagacgagaatttgggccctgtcgcagtctccataaggcgcgaaaaggtcgaagatgctaaagagaaagaagggagtcagttcaactaccgtgtagctttccggacaagcgagcttaccactctcagaggggccatactggaagatgccattccgtctaccgcccggcacggtacagcgcggggactcccgttgaaggaagtgttggagtacgtgattcccgagttgtcaatccaatgcctccgccaggctagcaactcgcctaaagtgagcgaacagctgctgaaactggacgagcaaggactcagcttccagcacaaaatcggcatcctgtactgcaaagccggacagagcacagaggaggagatgtataacaacgagactgcaggcccagcttttgaggaatttttagatctgcttggtcagagggtacggctgaagggattctccaaatacagagcacaattggataacaagaccgatagcaccggtacacattccctgtacacgacgtacaaagattacgagctcatgttccatgtgtctactctgctgccatacatgcccaataatcgccaacaattgctgcgtaagcgacatatcgggaacgacatagttactatagtttttcaggaacccggtgcactgccttttacacctaaatcgatacgctcccactttcaacacgtgttcgtcattgtgaaggttcacaatccatgtacagagaatgtgtgctactccgtgggagtcagccgctcaaaagacgtgcccccctttggtcctcctattccaaaaggtgtgacctttccaaagtctgcggtgttccgggatttcttgctggcaaaagtgattaacgccgaaaacgccgctcataagtctgagaaatttcgtgctatggccacccgcacaaggcaggagtacttgaaagacctcgccgaaaacttcgttaccactgcaaccgtagatacgagcgtgaagtttagcttcattaccctgggcgcgaagaagaaagagaaagtcaagccgaggaaggatgcccacctattttcgattggagcgattatgtggcatgtgattgccagggacttcggtcaatcagctgatatcgaatgcctgttgggcataagtaatgaatttataatgctgatcgagaaggactcaaagaatgtggtgtttaactgtagctgccgagatgtgattggttggacatcaggacttgtttccatcaaagttttttacgagcgcggagagtgcgtgcttttgagctcagttgacaactgtgcggaagacatccgtgagatcgttcagaggctggttatagtgactcgcgggtgcgagactgtcgaaatgaccctgagaagaaacggactggggcaattgggctttcacgtaaatttcgaaggtattgtggccgatgtggaaccctttggatttgcttggaaggcaggtcttcgtcagggctctcgactggtggagatatgtaaagtggccgtggcaacgctcacacatgaacagatgatcgacttactgcggacttccgtcacagtgaaagtggtgatcattcagccccatgacgacggatctccacgcagaggctgttccgagttgtgcaggattcccatggtcgaatataaactcgactcggagggcactccttgtgaatacaaaacaccatttcgccgcaacacaacctggcacagggtgcctacccccgctctccagcccctgagccgtgcttcacccattccaggcactcctgaccgtctaccatgccagcagttgctacagcaggcccaagcagccataccccggtctaccagcttcgaccgtaaattaccagatggtacacggtcatctccaagcaaccagtcgagcagctctgacccaggtcccggtggcagcggcccttggaggccgcaggtgggttatgatggttgccaatcgcccttactgctggaacaccaaggcagcgggcctcttgagtgtgacggagccagagagagggaagacaccatggaggcatcccgccacccagagactaagtggcacggaccaccctctaaggtgctgggctcttacaaagaacgtgctctacagaaggatggctcttgtaaagacagccccaacaaactttctcacattggggacaaaagctgctcatcccactcctcttctaatacgctctcctcaaacacttcaagcaatagcgatgataagcactttggatcgggcgacttgatggacccggaactgctggggttaacttacatcaagggagcgagcactgattccggcatcgataccgccccgtgcatgcctgccacaattctggggcctgttcatctggccgggagcaggtcactgatacattcgcgtgccgaacagtgggcagacgcagccgacgtaagcgggccagacgacgagcccgctaaactgtattccgtgcatgggtacgcaagcacaatttcagcgggcagtgcagccgagggctctatgggggatttgtcagagatttcttcacattcatcaggaagtcaccattcaggcagcccctccgcacattgcagcaaaagtagcggctcccttgactcttccaaggtgtacattgtgtctcatagctctggccagcaggtccccgggtcgatgtccaaaccataccacagacagggagctgtgaataagtacgtaattggatggaagaaatcagagggtagtccaccgccagaggagccagaagttaccgaatgcccagggatgtactccgaaatggatgtcatgtcaacagccactcagcatcaaactgttgtaggtgacgccgtggctgagacacagcacgtactcagtaaagaagactttctgaagttaatgctgcccgactcaccgcttgttgaagagggccggaggaaattcagtttttacgggaacctttctccaagacggtcactctatcggactctctccgacgagtctatttgttccaacaggcgtggaagttccttcggttcttcgagatcatccgttctggaccaggcactgcctaacgatatactcttctcaactacaccaccataccattctactctgccccctcgcgctcaccccgcccccagcatggggtcattgcgcaacgaattttggttctcagatggcagtctttccgataagtcaaaatgcgcggatcccggtctgatgcctctccctgacaccgcgaccggactcgattggacacatctcgttgatgctgcacgggcctttgaggggcttgacagtgacgaggaactgggcttactttgccatcacacatcatacttggatcagcgggtagcctccttttgtaccctaactgatatgcagcacggccaggacctcgaaggcgcgcaagagttgcctctctgcgttgatcctggatcagggaaagagtttatggacacgactggggagagatcgccgagtcctctcactggtaaggtcaatcaactcgagctcattctgcgacagctgcagaccgacctacggaaagaaaagcaggacaaggcagttttgcaggcagaggtgcagcatctgcggcaagacaacatgcgactgcaggaggaatcccaaaccgcaacggcgcaattgcgaaagttcaccgagtggtttttcaccactatcgacaaaaagtcctag

SEQ ID NO: 205939 - DNA, 5169 bp, Artificial Sequence
  derived and/or modified sequence
atgtctgacccacggcaatctcaggaggaaaagcacaagctcggtcgtgcctcaagcaaatttaaggatcctccccgaattatgcagtcagatgattacttcgcacggaagttcaaggccataaacggaaacatggggcctacaacctccctgaatgcctcaaatagtaatgagacgggcggtgggggtcccgctaacggcacacctgcagtgcctaaaatgggcgtgcgcgctagagtaagtgagtggcccccaaagaaggattgcagcaaagagctcacatgtaaggctctctgggagtcaaggtctcagacctcctacgagtcaatcacgtccgtgttacagaacggccagtctgaccaatcagaggggcagcaggatgagcaactggatcttgatttcgtggaggcaaaatatacaatcggcgacatcttcgtgcatagtccgcagcgtggcctccatcccattaggcaacgctcaaactccgacgtcacaatctccgacatagatgctgaggacgtcctcgatcagaatgccgttaatccaaacacgggagcggcactgcatcgtgaatatgggtccacctcctccatcgatagacagggactgtcaggcgaaaatttcttcgccatgctgcgcggttatagagtagaaaattatgaccataaggcgatggtcccttttggatttccagaattcttcagatgtgatcccgcaatttctccttccctgcatgctgcggctcagatttcccgcggagaattcgtaaggattagcggcctggactatgtcgattctgcgcttcttatgggcagagatcgggataaacccttcaaacggaggttaaagagcgagagcgtagaaacctctctgttccgcaagctgcgcacagtcaaatctgaacatgaaaccttcaaattcaccagcgagctggaggaatcccggctggagagaggtattaggccctggaactgccagagatgcttcgctcactacgacgtgcagtcaatactgttcaatatcaacgaggccatggccacacgggcaaatgttggtaagcggaagaacattacaaccggagccagtgcagccagtcagacgcagatgccaacggggcagactggcaattgcgaatcacccctgggatctaaggaggacttaaacagcaaagagaatctggatgccgacgagggcgacggcaaaagcaatgacctcgttctgtcatgtccctacttcagaaatgaaactgggggtgagggagataggcggattgctctgagtagggccaatagcagcagtttctcctctggggagagctgttcgtttgaatcctctctgagctcccattgcacaaacgccggtgtgtcagtgctagaggtgccacgagaaaaccaacccatccatcgagaaaaagtaaagcggtatatcattgagcatatcgacttaggtgcctactattacagaaagttcttctacgggaaggagcatcaaaattacttcgggatcgacgaaaacttgggccctgttgctgtgtccatacggagggaaaaggtggaggatgccaaggaaaaggaagggtctcagttcaactatagagtggcattcagaacgtcagagctgacaactcttcggggtgccatcctggaagacgctatcccctctactgctagacacggaactgcccgaggtctgccactgaaagaggtgttggagtacgtaatcccagagttgagcattcagtgcctccggcaggctagcaacagccctaaggtctccgaacaactgttgaaactcgatgaacagggactatccttccagcataagatcggaatcctgtattgcaaagcgggtcagagcacagaggaagagatgtacaataacgaaacggcaggaccagccttcgaggaatttttggaccttttgggccagagagtcaggctgaagggtttttccaaatatagggcacagctggataataagactgattcaactgggacccattctttatatacaacttataaagattacgagttaatgttccatgtctccacacttttgccatatatgcctaacaatcggcagcagctactgcgcaaacggcacatcggtaacgacatcgtgacaatcgttttccaggagcccggagcgctgccttttacccctaaatccatccgatcccacttccagcatgtttttgtcatcgtgaaagtacacaacccttgcacagagaacgtgtgctacagtgttggagtttctcggagcaaagacgtccccccattcgggcctccgattccaaaaggagtgacatttcccaagtctgcagtttttcgcgacttcctgctggccaaagttatcaacgccgagaacgctgcacacaagagtgagaagtttagggcgatggcgaccaggacaagacaggagtacttgaaagatcttgccgaaaacttcgtcacaaccgcaactgtcgacacatctgtcaaattctcctttattaccctgggagccaaaaagaaggagaaggtgaagccacgaaaggacgcccatcttttcagcattggcgcaataatgtggcatgtgattgctcgggactttggccagtccgccgacattgaatgcctgttaggaattagcaacgagtttataatgctgattgagaaggactccaagaatgtggtgtttaactgtagctgcagggacgtcataggctggacgtctggattggtgagtattaaagtgttttacgagaggggcgagtgtgtgctcctttcctcagtggacaactgtgcagaagacattcgcgaaatcgtgcagagattggttattgtgactcgcggatgcgagactgtcgagatgactcttagacggaatggcctgggccagctgggctttcacgtgaacttcgagggcatagtagccgacgtcgagccctttggatttgcttggaaagctgggttacgccagggctcgaggcttgtggaaatttgtaaggttgccgtcgccactctcacgcacgaacagatgattgacctgctgcggacgagcgttacagtcaaggtggttattatccaaccccacgatgacggcagtccgagacgcggatgttctgaactctgtagaattcccatggtggagtataagttagattctgagggcacaccatgcgaatataagacaccttttcgcagaaacacaacatggcaccgcgtccccacaccagctctacagccgctgtcacgcgcttcacctatcccaggcactccagatcgccttccctgccaacagttactgcagcaagcccaagccgcaattccacgctctacctcctttgatcgcaagctgcctgatggcactagatcaagccctagcaatcagagttcttcttcagacccaggcccagggggatctggcccatggcggcctcaagttggctacgatggttgtcagtctcctttgctgctcgagcaccagggcagcggccctttagagtgtgatggagcccgagaacgcgaggatactatggaggcgagtaggcacccggaaacgaagtggcacggaccccctagtaaagtgctcgggtcttataaagagcgggcactgcagaaagacgggtcttgcaaagattccccaaataagctgagccacatcggtgataagagctgcagcagccactcctcaagtaacacactcagttctaatacgtcttctaattcggacgacaaacattttgggtccggcgatcttatggaccctgagctgctgggcctcacttatatcaagggtgcttcaactgattccggcatcgacaccgcaccatgcatgcccgctacaattctgggcccagtgcaccttgccggtagccggtctcttatacactcaagggctgaacagtgggcagatgcagcagatgttagcggacctgacgacgagcctgctaaactgtactccgtccacggatacgccagtacaatctccgccggttccgctgcagagggttctatgggcgatttgtctgagattagcagccatagttccggcagccaccattccggaagcccttcagcgcattgtagtaagtcctcggggtcacttgactcttccaaagtgtatatcgtaagccactcatctggccagcaggtccccggatcaatgtctaagccctaccacagacaaggagctgtcaacaagtatgtcatcggttggaaaaagtcggagggatcgccgccacccgaggaacctgaggtcacagagtgtccagggatgtacagcgagatggacgtaatgagtactgccactcagcatcagaccgtcgtaggcgatgcagtcgccgaaacccagcacgtcctcagcaaagaagactttctaaaactgatgctgcctgacagtcctttggtggaggaagggagacgaaaattctcattctacggaaatctgtccccaagacgtagcctgtatagaacattgtccgatgaaagcatttgctctaacaggcggggtagcagcttcgggagttctaggagttctgtcttggaccaggccctacctaatgacatcttgttctccacaacaccaccctatcatagtaccctgccccctcgtgcccaccccgcaccttccatggggagtctgaggaatgaattttggtttagtgatggaagtctgtccgataaatccaagtgcgctgatcccggactgatgcctcttccagatacagccaccgggttggattggacccatctggtcgacgcggcacgcgcatttgaaggtctcgactccgatgaagagttgggcttgctttgtcaccacacttcctatctggaccagcgagtggcgagcttctgtactctcacagatatgcagcatggccaagacctagagggagcacaggagcttccgctctgcgtggatcctggtagcggtaaggagtttatggacactactggcgaaaggagccccagcccgttaactggcaaagttaaccaactggagctgatcttacgacagctgcaaaccgacctaagaaaggagaagcaggacaaggctgtgctacaggccgaagttcagcacctgcgtcaggataacatgcgtttacaggaagagtcccagacagctaccgcccagctccggaagttcactgagtggttttttaccaccattgacaagaagtcctat

SEQ ID NO: 205940 - DNA, 5168 bp, Artificial Sequence
  derived and/or modified sequence
atgtcagaccccagacagagccaggaggaaaaacacaagctcgggagagcgtctagtaagttcaaagaccccccaaggattatgcaatctgatgactacttcgcgaggaagttcaaagcaattaacggcaacatgggcccaacaacttcactgaatgcttcaaattccaatgagacagggggagggggtcccgctaatgggactcctgccgttccgaaaatgggggtgagagctcgcgtcagtgaatggcctccgaagaaggattgttcgaaggagcttacctgtaaagctctttgggagtccagatcccaaacatcctacgagagcattacatccgtcctacagaacggccagtccgaccagtccgagggacagcaggacgaacagctggatcttgattttgtcgaagcaaagtacaccatcggggacatcttcgtacacagccctcagaggggtctccatcccattaggcagcggtccaatagtgacgttacaatttccgacattgacgccgaggatgtactggaccagaatgccgttaacccgaatacaggcgctgctcttcaccgcgagtatggaagtacgagcagcatagacaggcaaggtttgtctggggaaaatttcttcgcgatgttgagagggtatcgcgtggaaaactacgaccataaggccatggtacctttcggtttccccgagttttttagatgtgacccggcaatctctccgtcgttgcacgcggctgctcagatcagtaggggcgaatttgttcgcatttccggcctggattacgtggactcggctcttctgatgggtcgggatcgtgacaaaccgttcaaacggcgactcaagtcagaaagcgtcgagacttccttgtttagaaagcttcgcactgttaagtcagaacatgagaccttcaagttcacatctgagctagaggagtctagactggaaagaggtatacgcccttggaattgccaaaggtgtttcgcccactacgatgtccaatccatcctgtttaacatcaacgaggcaatggcaacccgcgcaaatgtcggaaaacggaaaaatattacgacgggagcatctgccgcatcacagacccagatgcctacgggtcagaccggaaactgtgaatccccacttggaagcaaagaggacctgaactccaaggagaacctcgatgctgatgagggcgacggtaaatctaatgatctggtactatcttgcccctactttcgcaatgagaccggcggagaaggcgatcgaagaattgccctgtccagagcaaactcgagcagcttctcctccggagaatcctgcagctttgagagctcattgtccagccactgcaccaatgctggagtgagcgtgctggaggttccaagggagaatcagcccatacatcgcgagaaagtgaagcgttacattatagaacatatcgatctgggtgcctattattatcgcaagtttttctatgggaaggaacaccagaactacttcgggatcgatgaaaacctaggtcctgtggcggtctctatccgcagagaaaaagtagaagacgctaaagagaaggaaggctcacagtttaattaccgggtggcatttaggactagcgaactcactaccctgaggggcgctatcttagaagatgctattccctcgacagcgaggcatggtaccgccagaggcctgcctctgaaggaagttttggagtacgtcatccctgagctttccatccaatgtctgaggcaggcgagtaactctcctaaggtctctgaacagctactcaaattagacgagcaaggactgtctttccagcataagatagggatcctctattgtaaagcaggccagtcaacagaagaagaaatgtacaacaatgaaaccgccggacccgcattcgaggaattcttggatctgctcggacagagagtgcggttaaagggtttttcaaagtacagggcgcaactggataacaagaccgattcaaccggaacccattcgttgtataccacctataaagactacgaacttatgttccatgtcagcacactccttccctacatgccaaacaaccgccagcagcttttacgtaagagacatattgggaacgatattgtgacgatagtgttccaggagccgggagctttaccttttacaccgaaatccataaggagccactttcaacacgtgttcgtcatcgtaaaagtccacaacccttgtactgagaacgtatgttattctgttggcgtctcacggagcaaagatgtgcccccattcggcccacccatccccaagggagtcacctttcccaaaagtgccgtgttccgtgattttttgctggccaaagttatcaacgccgaaaacgcggcacataagagtgaaaaattccgggctatggcaacacgcacaaggcaagaatacctgaaggaccttgcagaaaacttcgtaacgaccgcaaccgtcgacaccagcgtgaagttctcatttataacactgggagccaagaaaaaggaaaaggtgaagccgaggaaagacgcacacctcttttccattggcgcaatcatgtggcatgttattgcgagagatttcgggcagtctgcagatatcgaatgtctgctgggcatatctaatgagtttataatgctgattgagaaagactccaagaacgtggtcttcaactgctcttgcagggacgtcatcggatggacttctggacttgtaagcatcaaggtgttttatgaaaggggagagtgtgtgcttttgagcagcgttgacaactgcgctgaggatattcgggaaatcgtgcaaagactggtgattgtcaccagaggttgcgagacagtggagatgacattgaggagaaacggactagggcagcttgggtttcacgtcaactttgaggggattgtcgcggacgtggaacccttcgggttcgcttggaaggccggattgcggcaaggcagcaggctcgtcgagatatgtaaagtcgctgtagccacactgacccatgagcagatgatagatctgcttagaacctcagtgacagttaaagtcgtgataatacagccccacgatgacgggtctcccagacgagggtgttccgagctatgtcggatacccatggtggaatataaactcgattctgaaggcactccttgtgaatacaaaacccccttcagacgcaatacaacatggcatcgagtcccaactcccgctcttcaacctttgtctcgggctagtccgatacccggaactccggatagactcccctgccagcagctgctgcagcaggcacaagctgcaatccccaggtccaccagcttcgaccggaaattgcctgacggaactcgttcgagtccttccaaccagtcatcatcatctgaccctggaccaggaggatctggaccttggaggccacaggtcggctatgacggatgccaatcgccactgttactggagcatcagggtagcggtcctttggagtgtgacggcgctagagagcgggaggacaccatggaggcaagtcggcatcccgaaacaaagtggcatgggcctcccagtaaggtgctcggatcctacaaggagcgcgctctccaaaaggacggctcatgcaaggactcaccaaataagctctcacacataggagataagtcgtgttcatctcatagtagtagcaacacgctcagctccaataccagctcaaactctgatgataagcacttcggttccggagatctgatggatcccgaacttctagggcttacatacattaagggtgcttcaacggacagcggcatcgacactgcaccatgtatgcctgctaccatcctcggccctgtccacttggctggatcccgatctctgatacatagtagggccgaacagtgggccgatgcagcggacgtctcaggccctgatgacgagcccgcaaagttgtacagcgtacacggttacgcctctacgatatcagcgggatccgcagccgagggctcaatgggtgatctgagcgaaatatcaagccactcttcggggtcccaccattccggatcccccagcgcccattgttcaaagtcaagcggaagtctggacagtagcaaggtatacattgtgtcccatagttccgggcaacaggtaccaggaagcatgagcaagccttaccataggcaaggcgctgtgaataaatatgtcatagggtggaagaagtcagagggatctcctccaccagaggagcccgaggtcactgagtgcccaggcatgtattctgaaatggacgtaatgtccaccgcaacccagcatcaaacggtcgtcggggatgcggtggctgaaacacaacacgtcctttccaaggaggactttctgaagcttatgttgccggatagcccacttgtggaggaaggcaggcgcaagttcagtttttatggcaatctgtctcctaggagaagtctctatcggaccctgagcgatgagtctatttgcagcaacaggaggggaagttcatttggaagttcacggtctagcgtcctcgaccaggccctgccgaatgacatcctcttctcgaccacaccgccatatcattctaccctgccacctcgcgcacatccagccccaagcatgggcagcctgcggaacgagttttggttttctgacggctctttgtctgataagtcaaaatgtgccgaccccggactcatgcccctaccagacactgctacaggccttgactggacccacttggtggacgccgctcgggcatttgaagggcttgacagcgatgaagaattgggtctgctctgccaccatactagctatctggaccaaagagttgcatccttctgtacactgacggacatgcaacatggccaggacctggagggggcacaggagttgcctctctgcgtggatcccggatcaggaaaggaattcatggacactactggtgaaagaagcccatcacctcttacagggaaggtgaatcagctggaactcatactccggcagctccaaactgacctacggaaggagaagcaggataaggctgtactgcaggccgaggtgcaacaccttagacaagacaacatgagactccaggaggaatctcagacggccacagcccaactgcgaaagttcacagagtggtttttcaccacaatcgacaagaagtcata

SEQ ID NO: 205941 - DNA, 6555 bp, Artificial Sequence
  derived and/or modified sequence
cttttgaaaagaacagaggcgtacaacattattacgacaacagagaagcaagttggctttgaagaaactgtattctgaggatgttgtttgctttgggctaagaaaagaaaaaatacaactacagacaaagcctttatatctgcaagtattatggcgtggtcggtagcaatgtaattagatttacatcagtcttcctggtgagacttggaggctcttcctcggtagacatgagtgacccaaggcagtcacaagaagagaagcacaagctaggcagagcctcttcaaagttcaaggatccccctagaatcatgcagtcagatgattattttgctcggaaatttaaagccattaatggcaacatgggacccactacttctttaaatgcctcgaattccaatgagactggcggtggtggtccggctaatggtaccccagctgtgcccaagatgggtgtgagagcaagggtgtctgaatggcctcctaaaaaggactgttccaaggagctaacatgcaaggcactgtgggaaagccggtctcagaccagttatgaaagcatcacttctgtcctgcagaatgggcagagtgaccagagtgaaggtcagcaagatgaacagctcgatctggacttcgtggaggccaagtacacaatcggagacatctttgtccattccccccaaagaggacttcaccccataagacagaggagcaatagtgatgtcactatcagtgacattgatgccgaagatgtcttagaccaaaatgcagtcaaccccaacaccggggctgccctgcacagggagtatggaagtacttcatccatcgacaggcaaggcttatctggtgaaaacttttttgctatgctcagagggtaccgagtagaaaattatgaccacaaagcaatggtcccttttgggttccctgaatttttccgctgtgaccctgcaatctctccgagccttcatgcagcagcacagatttctaggggagaatttgtccgcatctcaggattagattatgtggacagtgccctcctgatggggagagacagggacaagcctttcaaacggaggttgaaatcagagtcggtggaaacatctctcttccgaaagcttcgaactgttaaaagtgagcacgaaactttcaagttcacgtctgagctggaggagagccgactggagaggggcattcgcccttggaattgtcagcgatgttttgcacattatgatgtccagagcattttgtttaatatcaacgaagccatggctacgagggctaatgtggggaaaaggaaaaacataaccactggggcatctgcagcatcccagactcagatgcctacgggccagacaggcaactgtgagtcccctttagggagcaaggaggacctcaactccaaagagaacctggatgccgatgagggtgatgggaaaagtaacgacctcgtccttagttgtccttactttagaaatgagactggaggggaaggcgacaggcggattgcgctctctcgagccaactcatcctctttcagttctggggaaagctgctctttcgaatcgtcactcagctctcactgcacaaatgcaggtgtctccgtcttggaagtgcccagagaaaaccagcctattcacagggagaaagtgaagcgctacatcatagaacacattgaccttggggcctattattaccgcaaattcttctatgggaaagagcaccaaaactactttggaatagatgaaaaccttggtccagtagcagtcagcatccggagagagaaggtggaagatgccaaggagaaagaaggatcccagttcaactacagggtggctttcaggacaagtgagcttacaacactgagaggagcaattttagaagatgctataccctctactgctaggcatggtaccgcacgaggactacctctcaaagaagttttggaatacgtcattccagagctgagcattcagtgtttgcgacaggcttccaactcacccaaggtctcagagcagctgctcaagcttgatgaacaagggctgagctttcagcacaagatcgggatcctttattgcaaagcaggccagagcacagaggaagagatgtataacaatgagacggcgggaccagcttttgaagaattccttgatcttctgggccagagagtccgactgaaaggatttagtaaatatcgagctcagctagacaataagactgattccacgggcacgcactctctctataccacatacaaagactacgaactcatgttccacgtgtcaaccctgcttccctacatgcccaacaacagacaacagctactgaggaaaaggcacataggaaatgacatcgtcaccatcgtcttccaggagcctggggcacttccttttactccaaaaagcatccggtctcactttcagcatgtctttgtcatagtcaaagtgcataatccatgtaccgaaaatgtgtgttatagtgttggagtttccagatcaaaagatgtgccaccatttggcccaccgattcccaaaggtgtaacttttccaaagtcagccgtgttccgggacttccttttagccaaagtaatcaatgcagaaaatgcagcccataaatcagaaaagtttcgagcaatggccactcgaacgaggcaggagtacttgaaagatctggcggagaactttgtcacaaccgccaccgtggatacctctgtgaagttcagcttcattacgctgggtgcgaagaaaaaggagaaggtaaagccaaggaaggatgcccacttgtttagcattggggccatcatgtggcacgtgatagcccgggacttcggccagtctgctgacattgaatgtcttctcgggatctccaatgagttcatcatgttgattgaaaaggattccaagaatgttgtattcaactgttcctgcagggatgtgattgggtggacatctggattagtgagtatcaaagtgttttacgaaagaggagaatgtgtcctcctgtcctcggtagacaactgtgctgaagacatcagggaaattgttcagcgattagtaatagtgacgagaggctgcgagactgtggaaatgaccctgaggaggaacgggctgggccagcttggcttccatgtgaattttgaaggaattgtcgcagatgtggaaccttttggctttgcctggaaggctggccttcgccaagggagccgcctcgtggagatctgcaaagtagccgtggccactctgacccacgagcagatgatcgacctgctccgtacttctgtgactgtgaaggtggtcatcatccagccccatgatgacggctcgccccgaagagggtgttcagagctctgccggatccctatggtggaatataaactcgacagcgagggcaccccctgcgagtataaaacccccttcaggaggaacaccacgtggcaccgggtgcccactcctgccctgcagcccctctctagagcttcccccatccccggcacgcccgaccggctgccgtgccaacagctgctccagcaggcccaggctgccattcctcgaagcacctccttcgaccggaagctgcccgatggcacgagaagctcacccagcaaccagtcatcctccagcgaccctggacccggcgggagcggaccctggagaccacaagtgggctacgacgggtgccagtcccctctactgctcgaacaccagggctcaggccctttggaatgtgacggagccagggagagggaagacaccatggaagcaagcaggcacccggaaaccaaatggcatggcccaccttccaaagtcctgggttcctataaagaaagagctctgcagaaagatggaagttgcaaagattcccccaataagctttctcacattggggataaaagttgctccagtcactccagcagcaacacgctctccagcaacacctccagcaacagtgacgacaagcactttgggtctggcgacctgatggaccccgaattactggggctgacctacatcaaaggggcctccaccgacagtggcatcgacacggccccctgcatgcctgccaccatcctcggccctgtgcacctggcaggcagcaggtccctgatccacagccgggccgagcagtgggctgatgctgccgacgtctctgggcctgacgacgagccagccaagttatattctgtgcatggctacgcgtccaccatctccgccggcagtgctgcggaaggcagcatgggcgatctcagtgagatatcctctcattccagtggttctcaccattcaggaagcccttcagctcactgttcaaaaagtagtgggtctctggattcatccaaagtctacatcgtgtctcacagcagcggacaacaggttcccgggtccatgtccaagccctaccacagacaaggggcagtgaacaaatatgtcatcggctggaagaaatcggagggcagcccaccgcccgaggagcctgaagtgactgaatgtcccgggatgtatagtgagatggatgtcatgtccacagcaactcagcatcagacagtggtgggagatgctgttgcagagactcaacatgttctgtctaaagaagattttctgaaattgatgcttcctgacagccccttagtggaggaggggcgaagaaagttttcgttctatgggaacctgtctccaaggaggtcgctttaccgcacgctgtctgacgagagcatctgcagcaacaggagggggtcctcctttggcagttcccggagttccgtgcttgaccaggccctgcccaacgacattctgttcagcaccaccccaccctaccacagcacgctgcctccgcgggcccaccccgcacccagcatggggagcctgagaaatgagttctggttctccgatgggtccttatcagataagtccaagtgcgcagatcctggcctgatgcccctcccggacacagccacagggttagattggacccacctcgtggatgctgcacgggcatttgaaggtcttgactcagatgaagaactggggctgctctgtcaccacacgtcctatctagaccagagggtggcatccttctgcaccctgacagatatgcagcatgggcaggacctggaaggggcccaagagctgcccttatgtgtagatccaggcagtggcaaagagttcatggacacaactggggagcgttctccatcaccactgaccgggaaagtcaatcagctggaattaattcttcgacaactccagaccgaccttcggaaggaaaaacaagacaaggccgttctccaagcagaagtgcagcacctgagacaggacaacatgagactgcaggaggagtcccagaccgcgacagctcagctgcggaaattcacagaatggtttttcaccaccatcgacaaaaaatcttagccaatccgcacctcatcaagggaccactgggaaatgccccttgtccctttgaagtcacaaacatgtggtttttctgtgtgctttcaaccaatcgtagatgtttttgctgttccattctgtgtagcaccattcaccacagcaggatagggagcctcgactctttctcggtaaccacggcagagagcagcgccgatgtgaagatgaatgaatgtaactcctggtgtgaagatgaatgtaaaccctggcgacagttgagacctttttcttttagactctgctaaaacagtgctctggcttgggcttacctcaagagggaagatagttgagttttatttcctgtatatcaggtgacctggtagagatgtaaagcaatttaccatagtttgggctttagtattgtaaaataaacatgagaacaaataatcagacatatactttaatgttaaaggtgctctatttttttggatgtacagtagttttatttccacagccacattaccatagcaataagaaaggaggcatagtacatagttggaaaagctttgtggggggattaaaaaaaaaaaaaagcactgttgtgtttaacactagttcagatgcagttaccttagagacttatttatttgcaggaacaaatggtgcctgaatattaacagtgttctgattaaaaacaaaaaaaagatacatatgccttgtaaatggctcaccgagtggtcagtagtcacttcaactcttagttcacttttgtatagttgctctgctggaaagaaatgagagtgaatctgcttactcactagaacttccctgtgtgctgtgagccagcggaaccacttgtacaatgccagatttgtttatctttgtacagaagctttgatgaagtgtcttgtatttaacacccttatttaagcttatttaaccttaaattgttaattttataaaatttggtttggcctgcactacgatgagggatggaggtagctgcaggctcagaagagactgagcttgcacagatcagaccgagaagcagggtgagagattctaacgactggatgctgctagtaacacattgtttgtattgctttaccatttttaactgttagatttgagatgaacatacattttgcttttttaataaatgtttaaaagaagtccacataag

SEQ ID NO: 205942 - DNA, 6690 bp, Artificial Sequence
  derived and/or modified sequence
actaggggtgggcattgtgtgtggctcccctgtggtagagaaggacatcggatgaacatgtgatctgtgtatccagctccaacccaaaaggtgaaggaaatactcatgaccagccagatgtcttaaggaatgcttttgaaaagaacagaggcgtacaacattattacgacaacagagaagcaagttggctttgaagaaactgtattctgaggatgttgtttgctttgggctaagaaaagaaaaaatacaactacagacaaagcctttatatctgcaagtattatggcgtggtcggtagcaatgtaattagatttacatcagtcttcctggtgagacttggaggctcttcctcggtagacatgagtgacccaaggcagtcacaagaagagaagcacaagctaggcagagcctcttcaaagttcaaggatccccctagaatcatgcagtcagatgattattttgctcggaaatttaaagccattaatggcaacatgggacccactacttctttaaatgcctcgaattccaatgagactggcggtggtggtccggctaatggtaccccagctgtgcccaagatgggtgtgagagcaagggtgtctgaatggcctcctaaaaaggactgttccaaggagctaacatgcaaggcactgtgggaaagccggtctcagaccagttatgaaagcatcacttctgtcctgcagaatgggcagagtgaccagagtgaaggtcagcaagatgaacagctcgatctggacttcgtggaggccaagtacacaatcggagacatctttgtccattccccccaaagaggacttcaccccataagacagaggagcaatagtgatgtcactatcagtgacattgatgccgaagatgtcttagaccaaaatgcagtcaaccccaacaccggggctgccctgcacagggagtatggaagtacttcatccatcgacaggcaaggcttatctggtgaaaacttttttgctatgctcagagggtaccgagtagaaaattatgaccacaaagcaatggtcccttttgggttccctgaatttttccgctgtgaccctgcaatctctccgagccttcatgcagcagcacagatttctaggggagaatttgtccgcatctcaggattagattatgtggacagtgccctcctgatggggagagacagggacaagcctttcaaacggaggttgaaatcagagtcggtggaaacatctctcttccgaaagcttcgaactgttaaaagtgagcacgaaactttcaagttcacgtctgagctggaggagagccgactggagaggggcattcgcccttggaattgtcagcgatgttttgcacattatgatgtccagagcattttgtttaatatcaacgaagccatggctacgagggctaatgtggggaaaaggaaaaacataaccactggggcatctgcagcatcccagactcagatgcctacgggccagacaggcaactgtgagtcccctttagggagcaaggaggacctcaactccaaagagaacctggatgccgatgagggtgatgggaaaagtaacgacctcgtccttagttgtccttactttagaaatgagactggaggggaaggcgacaggcggattgcgctctctcgagccaactcatcctctttcagttctggggaaagctgctctttcgaatcgtcactcagctctcactgcacaaatgcaggtgtctccgtcttggaagtgcccagagaaaaccagcctattcacagggagaaagtgaagcgctacatcatagaacacattgaccttggggcctattattaccgcaaattcttctatgggaaagagcaccaaaactactttggaatagatgaaaaccttggtccagtagcagtcagcatccggagagagaaggtggaagatgccaaggagaaagaaggatcccagttcaactacagggtggctttcaggacaagtgagcttacaacactgagaggagcaattttagaagatgctataccctctactgctaggcatggtaccgcacgaggactacctctcaaagaagttttggaatacgtcattccagagctgagcattcagtgtttgcgacaggcttccaactcacccaaggtctcagagcagctgctcaagcttgatgaacaagggctgagctttcagcacaagatcgggatcctttattgcaaagcaggccagagcacagaggaagagatgtataacaatgagacggcgggaccagcttttgaagaattccttgatcttctgggccagagagtccgactgaaaggatttagtaaatatcgagctcagctagacaataagactgattccacgggcacgcactctctctataccacatacaaagactacgaactcatgttccacgtgtcaaccctgcttccctacatgcccaacaacagacaacagctactgaggaaaaggcacataggaaatgacatcgtcaccatcgtcttccaggagcctggggcacttccttttactccaaaaagcatccggtctcactttcagcatgtctttgtcatagtcaaagtgcataatccatgtaccgaaaatgtgtgttatagtgttggagtttccagatcaaaagatgtgccaccatttggcccaccgattcccaaaggtgtaacttttccaaagtcagccgtgttccgggacttccttttagccaaagtaatcaatgcagaaaatgcagcccataaatcagaaaagtttcgagcaatggccactcgaacgaggcaggagtacttgaaagatctggcggagaactttgtcacaaccgccaccgtggatacctctgtgaagttcagcttcattacgctgggtgcgaagaaaaaggagaaggtaaagccaaggaaggatgcccacttgtttagcattggggccatcatgtggcacgtgatagcccgggacttcggccagtctgctgacattgaatgtcttctcgggatctccaatgagttcatcatgttgattgaaaaggattccaagaatgttgtattcaactgttcctgcagggatgtgattgggtggacatctggattagtgagtatcaaagtgttttacgaaagaggagaatgtgtcctcctgtcctcggtagacaactgtgctgaagacatcagggaaattgttcagcgattagtaatagtgacgagaggctgcgagactgtggaaatgaccctgaggaggaacgggctgggccagcttggcttccatgtgaattttgaaggaattgtcgcagatgtggaaccttttggctttgcctggaaggctggccttcgccaagggagccgcctcgtggagatctgcaaagtagccgtggccactctgacccacgagcagatgatcgacctgctccgtacttctgtgactgtgaaggtggtcatcatccagccccatgatgacggctcgccccgaagagggtgttcagagctctgccggatccctatggtggaatataaactcgacagcgagggcaccccctgcgagtataaaacccccttcaggaggaacaccacgtggcaccgggtgcccactcctgccctgcagcccctctctagagcttcccccatccccggcacgcccgaccggctgccgtgccaacagctgctccagcaggcccaggctgccattcctcgaagcacctccttcgaccggaagctgcccgatggcacgagaagctcacccagcaaccagtcatcctccagcgaccctggacccggcgggagcggaccctggagaccacaagtgggctacgacgggtgccagtcccctctactgctcgaacaccagggctcaggccctttggaatgtgacggagccagggagagggaagacaccatggaagcaagcaggcacccggaaaccaaatggcatggcccaccttccaaagtcctgggttcctataaagaaagagctctgcagaaagatggaagttgcaaagattcccccaataagctttctcacattggggataaaagttgctccagtcactccagcagcaacacgctctccagcaacacctccagcaacagtgacgacaagcactttgggtctggcgacctgatggaccccgaattactggggctgacctacatcaaaggggcctccaccgacagtggcatcgacacggccccctgcatgcctgccaccatcctcggccctgtgcacctggcaggcagcaggtccctgatccacagccgggccgagcagtgggctgatgctgccgacgtctctgggcctgacgacgagccagccaagttatattctgtgcatggctacgcgtccaccatctccgccggcagtgctgcggaaggcagcatgggcgatctcagtgagatatcctctcattccagtggttctcaccattcaggaagcccttcagctcactgttcaaaaagtagtgggtctctggattcatccaaagtctacatcgtgtctcacagcagcggacaacaggttcccgggtccatgtccaagccctaccacagacaaggggcagtgaacaaatatgtcatcggctggaagaaatcggagggcagcccaccgcccgaggagcctgaagtgactgaatgtcccgggatgtatagtgagatggatgtcatgtccacagcaactcagcatcagacagtggtgggagatgctgttgcagagactcaacatgttctgtctaaagaagattttctgaaattgatgcttcctgacagccccttagtggaggaggggcgaagaaagttttcgttctatgggaacctgtctccaaggaggtcgctttaccgcacgctgtctgacgagagcatctgcagcaacaggagggggtcctcctttggcagttcccggagttccgtgcttgaccaggccctgcccaacgacattctgttcagcaccaccccaccctaccacagcacgctgcctccgcgggcccaccccgcacccagcatggggagcctgagaaatgagttctggttctccgatgggtccttatcagataagtccaagtgcgcagatcctggcctgatgcccctcccggacacagccacagggttagattggacccacctcgtggatgctgcacgggcatttgaaggtcttgactcagatgaagaactggggctgctctgtcaccacacgtcctatctagaccagagggtggcatccttctgcaccctgacagatatgcagcatgggcaggacctggaaggggcccaagagctgcccttatgtgtagatccaggcagtggcaaagagttcatggacacaactggggagcgttctccatcaccactgaccgggaaagtcaatcagctggaattaattcttcgacaactccagaccgaccttcggaaggaaaaacaagacaaggccgttctccaagcagaagtgcagcacctgagacaggacaacatgagactgcaggaggagtcccagaccgcgacagctcagctgcggaaattcacagaatggtttttcaccaccatcgacaaaaaatcttagccaatccgcacctcatcaagggaccactgggaaatgccccttgtccctttgaagtcacaaacatgtggtttttctgtgtgctttcaaccaatcgtagatgtttttgctgttccattctgtgtagcaccattcaccacagcaggatagggagcctcgactctttctcggtaaccacggcagagagcagcgccgatgtgaagatgaatgaatgtaactcctggtgtgaagatgaatgtaaaccctggcgacagttgagacctttttcttttagactctgctaaaacagtgctctggcttgggcttacctcaagagggaagatagttgagttttatttcctgtatatcaggtgacctggtagagatgtaaagcaatttaccatagtttgggctttagtattgtaaaataaacatgagaacaaataatcagacatatactttaatgttaaaggtgctctatttttttggatgtacagtagttttatttccacagccacattaccatagcaataagaaaggaggcatagtacatagttggaaaagctttgtggggggattaaaaaaaaaaaaaagcactgttgtgtttaacactagttcagatgcagttaccttagagacttatttatttgcaggaacaaatggtgcctgaatattaacagtgttctgattaaaaacaaaaaaaagatacatatgccttgtaaatggctcaccgagtggtcagtagtcacttcaactcttagttcacttttgtatagttgctctgctggaaagaaatgagagtgaatctgcttactcactagaacttccctgtgtgctgtgagccagcggaaccacttgtacaatgccagatttgtttatctttgtacagaagctttgatgaagtgtcttgtatttaacacccttatttaagcttatttaaccttaaattgttaattttataaaatttggtttggcctgcactacgatgagggatggaggtagctgcaggctcagaagagactgagcttgcacagatcagaccgagaagcagggtgagagattctaacgactggatgctgctagtaacacattgtttgtattgctttaccatttttaactgttagatttgagatgaacatacattttgcttttttaataaatgtttaaaagaagtccacataagaaa

SEQ ID NO: 205943 - DNA, 5169 bp, Artificial Sequence
  derived and/or modified sequence
atgagcgaccccagacagagccaggaggagaagcacaagctgggcagagccagcagcaagttcaaggacccccccagaatcatgcagagcgacgactacttcgccagaaagttcaaggccatcaacggcaacatgggccccaccaccagcctgaacgccagcaacagcaacgagaccggcggcggcggccccgccaacggcacccccgccgtgcccaagatgggcgtgagagccagagtgagcgagtggccccccaagaaggactgcagcaaggagctgacctgcaaggccctgtgggagagcagaagccagaccagctacgagagcatcaccagcgtgctgcagaacggccagagcgaccagagcgagggccagcaggacgagcagctggacctggacttcgtggaggccaagtacaccatcggcgacatcttcgtgcacagcccccagagaggcctgcaccccatcagacagagaagcaacagcgacgtgaccatcagcgacatcgacgccgaggacgtgctggaccagaacgccgtgaaccccaacaccggcgccgccctgcacagagagtacggcagcaccagcagcatcgacagacagggcctgagcggcgagaacttcttcgccatgctgagaggctacagagtggagaactacgaccacaaggccatggtgcccttcggcttccccgagttcttcagatgcgaccccgccatcagccccagcctgcacgccgccgcccagatcagcagaggcgagttcgtgagaatcagcggcctggactacgtggacagcgccctgctgatgggcagagacagagacaagcccttcaagagaagactgaagagcgagagcgtggagaccagcctgttcagaaagctgagaaccgtgaagagcgagcacgagaccttcaagttcaccagcgagctggaggagagcagactggagagaggcatcagaccctggaactgccagagatgcttcgcccactacgacgtgcagagcatcctgttcaacatcaacgaggccatggccaccagagccaacgtgggcaagagaaagaacatcaccaccggcgccagcgccgccagccagacccagatgcccaccggccagaccggcaactgcgagagccccctgggcagcaaggaggacctgaacagcaaggagaacctggacgccgacgagggcgacggcaagagcaacgacctggtgctgagctgcccctacttcagaaacgagaccggcggcgagggcgacagaagaatcgccctgagcagagccaacagcagcagcttcagcagcggcgagagctgcagcttcgagagcagcctgagcagccactgcaccaacgccggcgtgagcgtgctggaggtgcccagagagaaccagcccatccacagagagaaggtgaagagatacatcatcgagcacatcgacctgggcgcctactactacagaaagttcttctacggcaaggagcaccagaactacttcggcatcgacgagaacctgggccccgtggccgtgagcatcagaagagagaaggtggaggacgccaaggagaaggagggcagccagttcaactacagagtggccttcagaaccagcgagctgaccaccctgagaggcgccatcctggaggacgccatccccagcaccgccagacacggcaccgccagaggcctgcccctgaaggaggtgctggagtacgtgatccccgagctgagcatccagtgcctgagacaggccagcaacagccccaaggtgagcgagcagctgctgaagctggacgagcagggcctgagcttccagcacaagatcggcatcctgtactgcaaggccggccagagcaccgaggaggagatgtacaacaacgagaccgccggccccgccttcgaggagttcctggacctgctgggccagagagtgagactgaagggcttcagcaagtacagagcccagctggacaacaagaccgacagcaccggcacccacagcctgtacaccacctacaaggactacgagctgatgttccacgtgagcaccctgctgccctacatgcccaacaacagacagcagctgctgagaaagagacacatcggcaacgacatcgtgaccatcgtgttccaggagcccggcgccctgcccttcacccccaagagcatcagaagccacttccagcacgtgttcgtgatcgtgaaggtgcacaacccctgcaccgagaacgtgtgctacagcgtgggcgtgagcagaagcaaggacgtgccccccttcggcccccccatccccaagggcgtgaccttccccaagagcgccgtgttcagagacttcctgctggccaaggtgatcaacgccgagaacgccgcccacaagagcgagaagttcagagccatggccaccagaaccagacaggagtacctgaaggacctggccgagaacttcgtgaccaccgccaccgtggacaccagcgtgaagttcagcttcatcaccctgggcgccaagaagaaggagaaggtgaagcccagaaaggacgcccacctgttcagcatcggcgccatcatgtggcacgtgatcgccagagacttcggccagagcgccgacatcgagtgcctgctgggcatcagcaacgagttcatcatgctgatcgagaaggacagcaagaacgtggtgttcaactgcagctgcagagacgtgatcggctggaccagcggcctggtgagcatcaaggtgttctacgagagaggcgagtgcgtgctgctgagcagcgtggacaactgcgccgaggacatcagagagatcgtgcagagactggtgatcgtgaccagaggctgcgagaccgtggagatgaccctgagaagaaacggcctgggccagctgggcttccacgtgaacttcgagggcatcgtggccgacgtggagcccttcggcttcgcctggaaggccggcctgagacagggcagcagactggtggagatctgcaaggtggccgtggccaccctgacccacgagcagatgatcgacctgctgagaaccagcgtgaccgtgaaggtggtgatcatccagccccacgacgacggcagccccagaagaggctgcagcgagctgtgcagaatccccatggtggagtacaagctggacagcgagggcaccccctgcgagtacaagacccccttcagaagaaacaccacctggcacagagtgcccacccccgccctgcagcccctgagcagagccagccccatccccggcacccccgacagactgccctgccagcagctgctgcagcaggcccaggccgccatccccagaagcaccagcttcgacagaaagctgcccgacggcaccagaagcagccccagcaaccagagcagcagcagcgaccccggccccggcggcagcggcccctggagaccccaggtgggctacgacggctgccagagccccctgctgctggagcaccagggcagcggccccctggagtgcgacggcgccagagagagagaggacaccatggaggccagcagacaccccgagaccaagtggcacggcccccccagcaaggtgctgggcagctacaaggagagagccctgcagaaggacggcagctgcaaggacagccccaacaagctgagccacatcggcgacaagagctgcagcagccacagcagcagcaacaccctgagcagcaacaccagcagcaacagcgacgacaagcacttcggcagcggcgacctgatggaccccgagctgctgggcctgacctacatcaagggcgccagcaccgacagcggcatcgacaccgccccctgcatgcccgccaccatcctgggccccgtgcacctggccggcagcagaagcctgatccacagcagagccgagcagtgggccgacgccgccgacgtgagcggccccgacgacgagcccgccaagctgtacagcgtgcacggctacgccagcaccatcagcgccggcagcgccgccgagggcagcatgggcgacctgagcgagatcagcagccacagcagcggcagccaccacagcggcagccccagcgcccactgcagcaagagcagcggcagcctggacagcagcaaggtgtacatcgtgagccacagcagcggccagcaggtgcccggcagcatgagcaagccctaccacagacagggcgccgtgaacaagtacgtgatcggctggaagaagagcgagggcagccccccccccgaggagcccgaggtgaccgagtgccccggcatgtacagcgagatggacgtgatgagcaccgccacccagcaccagaccgtggtgggcgacgccgtggccgagacccagcacgtgctgagcaaggaggacttcctgaagctgatgctgcccgacagccccctggtggaggagggcagaagaaagttcagcttctacggcaacctgagccccagaagaagcctgtacagaaccctgagcgacgagagcatctgcagcaacagaagaggcagcagcttcggcagcagcagaagcagcgtgctggaccaggccctgcccaacgacatcctgttcagcaccacccccccctaccacagcaccctgccccccagagcccaccccgcccccagcatgggcagcctgagaaacgagttctggttcagcgacggcagcctgagcgacaagagcaagtgcgccgaccccggcctgatgcccctgcccgacaccgccaccggcctggactggacccacctggtggacgccgccagagccttcgagggcctggacagcgacgaggagctgggcctgctgtgccaccacaccagctacctggaccagagagtggccagcttctgcaccctgaccgacatgcagcacggccaggacctggagggcgcccaggagctgcccctgtgcgtggaccccggcagcggcaaggagttcatggacaccaccggcgagagaagccccagccccctgaccggcaaggtgaaccagctggagctgatcctgagacagctgcagaccgacctgagaaaggagaagcaggacaaggccgtgctgcaggccgaggtgcagcacctgagacaggacaacatgagactgcaggaggagagccagaccgccaccgcccagctgagaaagttcaccgagtggttcttcaccaccatcgacaagaagagctag

SEQ ID NO: 205944 - protein, 509 aa, Artificial Sequence
  derived and/or modified sequence
MVLWILWRPFGFSGRFLKLESHSITESKSLIPVAWTSLTQMLLEAPGIFLLGQRKRFSTMPETETHERETELFSPPSDVRGMTKLDRTAFKKTVNIPVLKVRKEIVSKLMRSLKRAALQRPGIRRVIEDPEDKESRLIMLDPYKIFTHDSFEKAELSVLEQLNVSPQISKYNLELTYEHFKSEEILRAVLPEGQDVTSGFSRIGHIAHLNLRDHQLSFKHLIGQVMIDKNPGITSAVNKINNIDNMYRNFQMEVLSGEQNMMTKVRENNYTYEFDFSKVYWNPRLSTEHSRITELLKPGDVLFDVFAGVGPFAIPVAKKNCTVFANDLNPESHKWLLYNCKLNKVDQKVKVFNLDGKDFLQGPVKEELMQLLGLSKERKPSVHVVMNLPAKAIEFLSAFKWLLDGQPCSSEFLPIVHCYSFSKDANPAEDVRQRAGAVLGISLEACSSVHLVRNVAPNKEMLCITFQIPASVLYKNQTRNPENHEDPPLKRQRTAEAFSDEKTQIVSNT

SEQ ID NO: 205945 - DNA, 1530 bp, Artificial Sequence
  derived and/or modified sequence
atggtgctgtggatcctgtggagacccttcggcttcagcggcagattcctgaagctggagagccacagcatcaccgagagcaagagcctgatccccgtggcctggaccagcctgacccagatgctgctggaggcccccggcatcttcctgctgggccagagaaagagattcagcaccatgcccgagaccgagacccacgagagagagaccgagctgttcagcccccccagcgacgtgagaggcatgaccaagctggacagaaccgccttcaagaagaccgtgaacatccccgtgctgaaggtgagaaaggagatcgtgagcaagctgatgagaagcctgaagagagccgccctgcagagacccggcatcagaagagtgatcgaggaccccgaggacaaggagagcagactgatcatgctggacccctacaagatcttcacccacgacagcttcgagaaggccgagctgagcgtgctggagcagctgaacgtgagcccccagatcagcaagtacaacctggagctgacctacgagcacttcaagagcgaggagatcctgagagccgtgctgcccgagggccaggacgtgaccagcggcttcagcagaatcggccacatcgcccacctgaacctgagagaccaccagctgagcttcaagcacctgatcggccaggtgatgatcgacaagaaccccggcatcaccagcgccgtgaacaagatcaacaacatcgacaacatgtacagaaacttccagatggaggtgctgagcggcgagcagaacatgatgaccaaggtgagagagaacaactacacctacgagttcgacttcagcaaggtgtactggaaccccagactgagcaccgagcacagcagaatcaccgagctgctgaagcccggcgacgtgctgttcgacgtgttcgccggcgtgggccccttcgccatccccgtggccaagaagaactgcaccgtgttcgccaacgacctgaaccccgagagccacaagtggctgctgtacaactgcaagctgaacaaggtggaccagaaggtgaaggtgttcaacctggacggcaaggacttcctgcagggccccgtgaaggaggagctgatgcagctgctgggcctgagcaaggagagaaagcccagcgtgcacgtggtgatgaacctgcccgccaaggccatcgagttcctgagcgccttcaagtggctgctggacggccagccctgcagcagcgagttcctgcccatcgtgcactgctacagcttcagcaaggacgccaaccccgccgaggacgtgagacagagagccggcgccgtgctgggcatcagcctggaggcctgcagcagcgtgcacctggtgagaaacgtggcccccaacaaggagatgctgtgcatcaccttccagatccccgccagcgtgctgtacaagaaccagaccagaaaccccgagaaccacgaggacccccccctgaagagacagagaaccgccgaggccttcagcgacgagaagacccagatcgtgagcaacacctag

SEQ ID NO: 205946 - DNA, 1530 bp, Artificial Sequence
  derived and/or modified sequence
atggtgctctggatcctatggcgacctttcggcttttcgggccggttcctgaaactggagagtcatagcatcactgagtcaaagagcctaattcctgtggcatggacatcgctgacacagatgctgttggaagcccctggtatcttccttctcgggcagagaaagagattctcaaccatgcctgagactgagactcacgaacgggaaaccgagttattcagtcctccatcggatgttagagggatgacaaagctggatcgaactgcttttaaaaagactgttaacattccggtgctgaaggtgcgcaaggagattgtgtcgaagctcatgaggtctctgaagcgggctgctctccaaaggcccggcattaggagggttatcgaggaccccgaagacaaagagagcaggctcatcatgcttgatccatataagatctttacccatgacagctttgagaaagcagagctgtcagtgctggaacaattaaacgtgagtcctcagatctccaaatataatctggaactcacgtacgaacacttcaaatccgaagagattttacgcgccgttctgcccgagggacaagatgtcacctccggatttagccgaattgggcatatagcacacctcaaccttcgcgaccatcaattgagcttcaagcatctaatcggccaggttatgatcgacaagaacccaggaattacaagcgcagttaataagattaataacatagataatatgtaccggaattttcaaatggaagtgctctctggtgagcagaacatgatgactaaggtccgagagaacaattacacctatgagttcgacttctcgaaggtgtactggaatccccgcctgtctacggaacacagtaggatcaccgagctcctgaagcccggagacgttttgtttgacgttttcgctggagtgggcccatttgccatccctgtcgctaagaagaattgtaccgtgtttgcaaacgatctaaacccagagagccataagtggttgctctataattgtaagctgaacaaggtggaccagaaagtaaaagtgtttaatttggacgggaaggatttcctgcagggtcccgtgaaggaggagttgatgcaactcctcgggctatccaaggagcggaagcctagtgtgcacgtggtgatgaacctgccagctaaggctattgagttcctcagtgctttcaagtggctccttgatggccagccatgtagcagtgaattcttaccgattgtccattgttactccttcagcaaggatgcaaaccctgcagaagatgtgcgtcagagggccggcgccgttctgggcattagtctcgaggcttgtagttccgtgcacctggtgaggaacgtggctcccaacaaagaaatgctttgtatcactttccaaatccccgccagtgtgctatataaaaatcaaacacgcaatcccgaaaaccatgaggatccccctttgaaacgccagcggaccgcggaggcattctctgacgaaaagacgcagattgtttctaatacctag

SEQ ID NO: 205947 - DNA, 1530 bp, Artificial Sequence
  derived and/or modified sequence
atggtgctgtggatcctgtggaggcccttcggcttcagcggccgcttcctgaagctggagagccacagcatcacagagagcaagagcctcatccctgtggcctggaccagcctgacccagatgctgctggaggcccctggcatcttcctgctgggccagaggaagcgcttcagcaccatgcctgagacagagacccatgagcgggagacagagctgttcagccccccatctgatgtgcggggcatgaccaagctggacagaacagccttcaagaagacagtgaacatccctgtgctgaaggtgaggaaggagatcgtgtccaagctgatgaggagcctgaagagagctgccctgcagaggcctggcatccggcgggtgattgaggaccctgaggacaaggagagccgcctcatcatgctggacccctacaagatcttcacccatgacagctttgagaaggccgagctgtctgtgctggagcagctgaatgtgagcccccagatcagcaagtacaacctggagctgacctatgagcacttcaagtctgaggagatcctgcgggctgtgctgcctgagggccaggatgtgaccagcggcttcagcagaattggccacatcgcccacctgaacctgcgggaccaccagctgtccttcaagcacctgattggccaggtgatgattgacaagaaccctggcatcaccagcgctgtgaacaagatcaacaacatcgacaacatgtacagaaacttccagatggaggtgctgagcggggagcagaacatgatgaccaaggtgcgggagaacaactacacctatgaatttgacttcagcaaggtgtactggaacccccggctgagcacagagcacagccgcatcacagagctgctgaagccaggagatgtgctgtttgatgtgtttgctggggtgggcccctttgccatccctgtggccaagaagaactgcaccgtgtttgccaatgacctgaaccctgagagccacaagtggctgctgtacaactgcaagctgaacaaggtggaccagaaggtgaaggtgttcaacctggatggcaaggacttcctgcagggccctgtgaaggaggagctgatgcagctgctgggcctgagcaaggagaggaagcccagcgtgcacgtggtgatgaacctgcctgccaaggccatcgagttcctgagcgccttcaagtggctgctggatggccagccctgcagcagcgagttcctgcccatcgtgcactgctacagcttcagcaaggatgccaacccagcagaagatgtgcggcagagagctggagctgtgctgggcatcagcctggaggcctgcagctctgtgcacctggtgagaaatgtggcccccaacaaggagatgctgtgcatcaccttccagatcccagcctctgtgctgtacaagaaccagaccagaaatcctgagaaccatgaagatcctcccctgaagaggcagaggacagctgaggccttcagtgatgagaagacccagatcgtgagcaacacctag

SEQ ID NO: 205948 - DNA, 1530 bp, Artificial Sequence
  derived and/or modified sequence
atggtgctgtggatcctgtggcggcccttcggcttcagcggccggttcctcaagctcgaatcacactcaataaccgagagtaagtcactaattcctgtggcctggacatcattaactcagatgctcctcgaagcgccaggtatctttctgcttggacagaggaagcgtttctcgacaatgccggaaaccgaaacccacgaaagagagaccgagctcttttcgcctccgtccgatgtgagaggcatgaccaagttggaccggactgccttcaaaaagaccgtcaacattccggtgcttaaggtgagaaaggaaatcgtgtcgaagctcatgagaagccttaaaagggcagccctacagcgccccggaattcgtcgggtgatcgaggaccccgaggacaaggaaagtcgactaattatgctcgacccatacaaaattttcacacatgacagctttgaaaaagctgaattgtcggtgctggagcagttaaatgtatctccgcagatatctaagtacaatttagagctgacgtacgaacatttcaaatcagaggaaattctaagggctgtgttgccggaaggtcaggacgtgacttctgggttcagccgaatcggccacattgctcatttaaatttaagggatcaccaactttctttcaagcacctcatcgggcaagtaatgatagacaagaatcctggcatcacatcagctgttaataaaattaataacatcgacaatatgtaccgaaatttccagatggaggtgctctccggggagcagaatatgatgacgaaggtccgggagaacaactacacctacgagttcgacttttccaaggtgtattggaacccgcgcttgtcaactgaacatagtcgaatcactgagctcctcaagcctggggacgtgctctttgatgtttttgctggggtggggccttttgctattcccgtagctaaaaagaactgcactgtgtttgccaatgaccttaaccctgaatcccacaagtggctcctgtataactgtaaactcaacaaggtggatcagaaagttaaggtgttcaacctggacgggaaggattttttgcagggcccagttaaagaagaactcatgcagcttctgggcctgtcaaaagaacgaaaaccctctgtacatgtcgtaatgaatttgcccgctaaagcaatcgaatttctgtctgcttttaagtggctgcttgacggccagccatgctcgagtgagttccttccgatcgtccactgctactccttcagtaaagatgctaaccctgctgaggatgtcaggcagcgtgctggagccgtattgggaatcagtcttgaagcctgttcgtctgtccatctcgtccggaatgtcgctcctaacaaggagatgttgtgcatcacatttcagattcctgctagcgtgctgtacaagaatcagactcgtaatcccgagaatcatgaggacccgccactgaaaagacagagaacagccgaagctttctctgacgagaagactcagatcgtcagtaatacctag

SEQ ID NO: 205949 - DNA, 1530 bp, Artificial Sequence
  derived and/or modified sequence
atggtgttgtggatattatggcgccctttcggcttctctggtcgattcctgaaactagagagccactccataacagagtccaagagcctgattccggttgcctggaccagcctcacacagatgttgttggaggcgccaggcatatttctcttgggccagcgaaagcgcttttccaccatgcctgaaaccgaaactcacgaacgcgagaccgaactgttcagccccccaagcgatgtccgcggaatgaccaaactggaccgtaccgcatttaaaaaaaccgtgaacatcccggtgctgaaagtgcggaaagaaatagtcagcaaactgatgagaagcctcaagcgggctgccctacagcgcccagggattcgacgagtcatagaggatcccgaggacaaggagagcagactgatcatgcttgatccgtacaaaatcttcacccacgattcattcgagaaggcagaacttagtgtgctcgagcagcttaacgtcagtcctcagataagcaaatataacctggagcttacatacgaacacttcaagtcagaagaaatcttgcgggcagtgcttccagaggggcaggatgtgactagcggcttctcacggatcgggcacatcgcccacctcaacctgcgcgaccaccagctttctttcaaacatctgattggccaggtgatgatagacaaaaacccaggaattacgtcagccgttaacaaaatcaacaacatcgacaatatgtacaggaacttccagatggaggttctttcgggtgaacagaacatgatgacaaaagtacgcgaaaacaattatacttatgaattcgacttcagcaaggtctactggaatccacgcctgagcaccgagcattccaggattactgaactactgaaaccgggtgatgtcctgttcgacgtatttgcaggcgttggacccttcgcaatccccgtggcgaaaaagaactgtacagtcttcgccaatgatctgaaccccgaatctcacaaatggctcctttacaactgcaagctgaacaaggtcgaccagaaggtcaaagtgttcaatctggatgggaaggacttcctgcagggcccagtcaaggaggaactgatgcagctgttgggcctgtctaaagagaggaagccctctgtacacgtggtgatgaatctgcccgcaaaagccattgaatttttgagtgcctttaaatggctactcgatgggcaaccctgcagcagcgagttcctgcctatcgtgcactgctactcattctccaaagacgccaatcctgctgaggatgtgagacagcgagcgggagccgtgctcggcatctcactggaggcctgcagtagcgttcacttggtcagaaatgtggctcccaacaaggagatgttatgcatcacttttcagataccagcctcagtgttgtacaagaaccagactcggaatccagagaatcatgaagatccaccgctgaagcgacagaggacagcggaggcgttttcagatgagaagacccagatcgtttctaacacttag

SEQ ID NO: 205950 - DNA, 5573 bp, Artificial Sequence
  derived and/or modified sequence
ttcggcctccgcttcttcaggctgctggacagagacataccagccccgctcagcgttgaagctcccccaggacgcctccatgctgctctccagctgactaccagttccatctacgagcctctacccctgccctgcgctccagtcgtcggtcgcgccagaggcggagctttgagcccggcccttccggcattccgtacttcaccagggcctggaaggagaggagcgagtcgacttgatctgatgacgcgcgccctcttcgcggcgaacagtgatgatgtcatagaagacccgcccatccacccgcgacccacatccgatcggtaccggagcgggaggtgaggggtcggctcgcggatccagctgcagagcgacgtggggaattggaatggtgctttggatcttatggaggccatttggattctcaggaagatttctgaaactggaaagccatagcataactgaatcaaaatcgttgattccagtagcttggacatccctgacacagatgcttttggaagcacctggtattttcttattgggtcaaagaaaaagattctcaaccatgccagaaacagaaacacatgagagagagactgaattgttttcaccaccttctgatgtccgaggcatgacaaaacttgatagaacagcttttaaaaagacagtcaacattccagtgcttaaagtgaggaaagaaatagtcagtaaattgatgcgatccctaaaaagggcagcattgcagcgcccaggcataagacgtgtgattgaagatccggaagataaagaaagtagactaatcatgttggatccctataaaatatttactcatgattcctttgagaaagcagaactcagtgttttagagcagcttaatgtcagtccacagatctctaaatacaatttggaactaacatatgaacactttaagtcagaagaaatcttgagagctgtgcttcctgaaggtcaagatgtaacttcagggtttagcaggattggacatattgcacacctaaaccttcgagatcatcagctgtctttcaaacatttaattggccaggttatgattgacaaaaatccaggaatcacctcagcagtaaataaaataaataatattgacaatatgtaccgaaatttccaaatggaagtgctatctggagagcagaacatgatgacaaaggttcgagaaaacaactacacctatgaatttgatttttcaaaagtctattggaatcctcgtctgtctacagaacacagccgtatcacagaacttctcaaacctggggatgtcctatttgatgtttttgctggggttgggccctttgccattccagtagcaaagaaaaactgcactgtatttgccaatgatctcaatcctgaatctcataaatggctgttgtacaactgtaaattaaataaagtggaccaaaaggtgaaagtcttcaacttggatgggaaagacttcctccaaggaccagtcaaagaagagttaatgcagctgctgggtctgtcaaaagaaagaaaaccctctgtgcacgttgtcatgaacttgccagcaaaagctatagagtttcttagtgctttcaagtggcttttagatgggcagccatgcagcagtgagttccttcccatagtgcattgttatagcttttccaaagatgctaaccctgctgaggatgttcggcaaagggctggagctgtgttaggcatttctctggaggcatgcagttcagttcacctggtaagaaatgtggccccaaacaaggaaatgctgtgcatcacgtttcagattcctgcctctgtcctctacaagaaccagaccagaaatccagagaatcatgaagatccacctcttaaaaggcagaggacggctgaagccttttcagacgaaaaaacacaaattgtttcaaacacttaattggaaatgttttctccatctccctaccagacttacatgtagtgaaatagaatttgtattatttaataaaattttagggtttggtttttactattgaacccttgtactttgccttattttacaaattgaggattaccaattaaactttaactgaactaaggctaccaaatacattccctgttatctaaattataacatacaattattttataacaaaatatatctaatttttattggataaatatgaataaatattttctctcagggaaaataatttttgaaagtagggtgattgagtactaactaggaaggtattaacaccactttgtagttgtcctttacgtaactactcctttactgccaattaactatcaccataaaagtaataaaaaatgaaattatttagaacggggcaggcaaactacatcctgcaggccaaatctgtcccaccacctgttttcatatggcctgtggcctaataatgttcttacgttttccattggttgaaaaataatcaaaagaacattttgtgacgtgaaaattttatgacatctattatgtatcagttttaaaaattagaattgtatgaaattaagagtttcagagttcataaagtttgattggaacataccatgctcatttgtttacatatcatctgcagctgttttttgtttttaatatggaacgcttcacgaatttgcatgtcatccttgcgcagggaccattctgatcttctctgtaccattccagttttttagtatatgtgctgctgaagtgaggactgcagctgctttcttgaacaatagcagagttgagtggttgcaacacacactgaatgtgactgtcatcacttcacactgctgtttgacacatcacaaatcactgatgtggttgtaacgacagcattttgagtgccatgtatatcacatgaacccacattttattttttattaccagagcatatctattatagcaaaacaagaaaagtggactttgttgttatttttaaagtacagtagggtgtgaattattttgatgttgaattagacgacaaagcatctatatagctaagctaaaagaataaccattgacattaccagacaaaccactcatcacagtattcccaactcacaggcaagcaactgttagaaaaattagaaaatttaaaatggaaataacaaagcagaatttcttcacaaaatgaaaatgaggctgcaacaacagtaagtctctaagtcaatcatttgttagccaagcaaagccatttattgatggtgtgaattaattatgtttggatgcagcagctgaatatatccagagaaaataaacttaagattactggcctttggcaagaacagttgcttaaagagttaaggacattgaaagcgacataaatagtcactttaaaaaggaaatgattctggatggttctttgactctatttttatttttacttagagacagggtcttgctctgttgcccaggctggagtgtagagacacagttacacctcaatgtaaccttgaactcctaggcttgagatcttcccatctcggcttcccaatgtgtgaaggttacaggtgtgagcccttatatgtggccctcgtgaatggtttagcactatccccttggtggtgtccttaagataatgagttatgagatcttgttgtttcaaagtatgtggcactcgccccccacactctcttgctcctgccttcgccatgtgaagtgccttctcctattttgccttctaccatgagtaaaagcttcctgaggcttccccagaagcagatgccagtgctatgcttcctatagcctggagaactgtgagccaattatacctcttttcttataaattacccagtatcaagtatttctttatagcaatgcaagaatggcctaaaacacaaggcaaaacaactttgatatggtacagtcattttgacaatcgatatttgaatcacaatatttgatgacaatatccttacacatttgtcatactatcaaagagaaagaaacaagatttccattcccacaaattttagtgagtatattttctgagttcagcatttttagggacctaggtgcaagtgcaaaggaaatttccctgtttcaaaatctatttaactgcaattgaggtgattcaacctaattttcagtaagaagtgattaaaataatgacatgctaaaaggcaaatttcaagggaagaaatgtaaaagaattttacaaatgctttccaagtgatgaatatgctcagttaatttcatatgctcctggattgatagcagtatttggcaatacctatctgtatgagaagacatttttaaagatgaaatgtgtaaaatcttattaccattagtattaatggttaatgatggttaatgataaccattaataggcaatcatttacaactgattttgatcacagggaacacttacttagaaccctgattagaggcaatgttattctcaccaaaaaaggcattacaaaaaattgggctatattttgaattttgtcaattaaaaaagcgtgggagcagtgtgaaggagaagaggcaagaacgacccctggaccgaccaaagcccgcgcgctgctgcgtcccacacccggtgcccacatcccgccgccgccgccgccgccatgcccaagagaaagactgaaggggatgctaaaggagataaagccaaggtgaaggatgaatcacagagaagatctgcgaggttgtctgctaaacctgctcctccaaagccagagcccaagcctaaaaaggcccctgcaaagaagggagagaaggtacccaaagggaaaaagagaaaagctgatgctggcaaggagcgggaaggtgctggagatcccaagtgaagtgtgtgcattttttataactgtacttctggtgactgtacagtttgaaatattctttatcaagttttataaaaatgcagaattttgttttactttttttaagctatgttgttagcacacagaacacttcattgttgtttttgggggaaggggtatgtgtcactaatagaatatctctgaagctggattgatacggggaaaacatctttcccttctagttttgagagacttcctcttggctcccaggaggagggatttcctgactttgacacacatggccaccttggcacaaaagccttgtggtatggaaaaacaaattcgtttttatgtcttcttttccctttccatctttcagcatagacttaatccccttaagcccagacatctgttgggacctgacccccggtcattggttaccagtgtgtctggcaatctggactttccagtgatgccactgagatggcacctgtcaaaagagcagtggttccatttctagattatggatcttcggataaattctgccattttcatttcacttcctgaaagtcagggttggcttgtgaaaagttgttaaacaacatgctaaatgtgaaatgttaaccctctaaactttccctgttcagagcatcagatgaggacttcattgggttttatagcggctgatttttggtagtccattgaagaagagagtttgaaagttgtatactgttaatgactgtctgcccatgtcctgcctgaaataccatgattgtttatggaaagtatctttaataaagctggatacagtttgaaag

SEQ ID NO: 205951 - protein, 2047 aa, Artificial Sequence
  derived and/or modified sequence
MAASERRAFAHKINRTVAAEVRKQVSRERSGSPHSSRRCSSSLGVPLTEVVEPLDFEDVLLSRPPDAEPGPLRDLVEFPADDLELLLQPRECRTTEPGIPKDEKLDAQVRAAVEMYIEDWVIVHRRYQYLSAAYSPVTTDTQRERQKGLPRQVFEQDASGDERSGPEDSNDSRRGSGSPEDTPRSSGASSIFDLRNLAADSLLPSLLERAAPEDVDRRNETLRRQHRPPALLTLYPAPDEDEAVERCSRPEPPREHFGQRILVKCLSLKFEIEIEPIFGILALYDVREKKKISENFYFDLNSDSMKGLLRAHGTHPAISTLARSAIFSVTYPSPDIFLVIKLEKVLQQGDISECCEPYMVLKEVDTAKNKEKLEKLRLAAEQFCTRLGRYRMPFAWTAVHLANIVSSAGQLDRDSDSEGERRPAWTDRRRRGPQDRASSGDDACSFSGFRPATLTVTNFFKQEAERLSDEDLFKFLADMRRPSSLLRRLRPVTAQLKIDISPAPENPHFCLSPELLHIKPYPDPRGRPTKEILEFPAREVYAPHTSYRNLLYVYPHSLNFSSRQGSVRNLAVRVQYMTGEDPSQALPVIFGKSSCSEFTREAFTPVVYHNKSPEFYEEFKLHLPACVTENHHLLFTFYHVSCQPRPGTALETPVGFTWIPLLQHGRLRTGPFCLPVSVDQPPPSYSVLTPDVALPGMRWVDGHKGVFSVELTAVSSVHPQDPYLDKFFTLVHVLEEGAFPFRLKDTVLSEGNVEQELRASLAALRLASPEPLVAFSHHVLDKLVRLVIRPPIISGQIVNLGRGAFEAMAHVVSLVHRSLEAAQDARGHCPQLAAYVHYAFRLPGTEPSLPDGAPPVTVQAATLARGSGRPASLYLARSKSISSSNPDLAVAPGSVDDEVSRILASKLLHEELALQWVVSSSAVREAILQHAWFFFQLMVKSMALHLLLGQRLDTPRKLRFPGRFLDDITALVGSVGLEVITRVHKDVELAEHLNASLAFFLSDLLSLVDRGFVFSLVRAHYKQVATRLQSSPNPAALLTLRMEFTRILCSHEHYVTLNLPCCPLSPPASPSPSVSSTTSQSSTFSSQAPDPKVTSMFELSGPFRQQHFLAGLLLTELALALEPEAEGAFLLHKKAISAVHSLLCGHDTDPRYAEATVKARVAELYLPLLSIARDTLPRLHDFAEGPGQRSRLASMLDSDTEGEGDIAGTINPSVAMAIAGGPLAPGSRASISQGPPTASRAGCALSAESSRTLLACVLWVLKNTEPALLQRWATDLTLPQLGRLLDLLYLCLAAFEYKGKKAFERINSLTFKKSLDMKARLEEAILGTIGARQEMVRRSRERSPFGNPENVRWRKSVTHWKQTSDRVDKTKDEMEHEALVEGNLATEASLVVLDTLEIIVQTVMLSEARESVLGAVLKVVLYSLGSAQSALFLQHGLATQRALVSKFPELLFEEDTELCADLCLRLLRHCGSRISTIRTHASASLYLLMRQNFEIGHNFARVKMQVTMSLSSLVGTTQNFSEEHLRRSLKTILTYAEEDMGLRDSTFAEQVQDLMFNLHMILTDTVKMKEHQEDPEMLIDLMYRIARGYQGSPDLRLTWLQNMAGKHAELGNHAEAAQCMVHAAALVAEYLALLEDHRHLPVGCVSFQNISSNVLEESAISDDILSPDEEGFCSGKHFTELGLVGLLEQAAGYFTMGGLYEAVNEVYKNLIPILEAHRDYKKLAAVHGKLQEAFTKIMHQSSGWERVFGTYFRVGFYGAHFGDLDEQEFVYKEPSITKLAEISHRLEEFYTERFGDDVVEIIKDSNPVDKSKLDSQKAYIQITYVEPYFDTYELKDRVTYFDRNYGLRTFLFCTPFTPDGRAHGELPEQHKRKTLLSTDHAFPYIKTRIRVCHREETVLTPVEVAIEDMQKKTRELAFATEQDPPDAKMLQMVLQGSVGPTVNQGPLEVAQVFLAEIPEDPKLFRHHNKLRLCFKDFCKKCEDALRKNKALIGPDQKEYHRELERNYCRLREALQPLLTQRLPQLMAPTPPGLRNSLNRASFRKADL

SEQ ID NO: 205952 - DNA, 6144 bp, Artificial Sequence
  derived and/or modified sequence
atggcagcctctgaaaggcgagcattcgcccacaagattaatagaaccgtagctgcagaggtgcgtaaacaagtctctagagaacgtagcggatctccacacagcagtcggcgatgcagtagctcactgggggtgccactaacagaagttgtcgagcctcttgatttcgaggacgtgctgctgtctcggccccccgacgctgagccaggccctcttcgcgacctcgtcgagtttcccgcagatgatctcgaattgctgctgcaacctcgagaatgcagaacaacagaacccggtatacctaaggacgaaaagcttgacgcacaagttagagccgccgtcgagatgtatattgaagattgggtcatagtccaccggcgttaccagtacctctcagccgcgtatagcccagtcactaccgacacgcaaagggaacggcagaagggattgcctcggcaggtgtttgaacaagatgccagtggtgacgaaagatctggccctgaggatagcaatgacagtagaaggggtagcggatcacctgaggacacgcctcgcagctctggtgccagctctatctttgatttgcggaacctcgcagccgacagtctgttaccaagcctgctcgagcgcgcagcacctgaagacgtcgaccgtcggaatgagactctccgcaggcagcacaggccccccgctcttctgacactgtacccagcacccgatgaggatgaggccgtcgagagatgtagtaggccagagccaccccgtgagcacttcggtcaacgcatattggtgaaatgtttatccctgaagtttgaaattgagatcgagcctatcttcggtatcctggcactgtatgatgtgagagagaagaaaaaaatatcggaaaacttttacttcgatctgaatagtgactctatgaaagggctgttgagagcccatggaacgcaccctgcaatttctacactggcaaggtccgccatatttagtgtgacctacccttcaccagacattttcctggtgatcaaacttgaaaaggtgctccagcaaggtgatattagcgagtgctgcgaaccgtacatggtgttaaaggaagttgacacggctaagaataaagagaagttggagaagttaagactggccgccgaacagttttgcactcggttggggcggtaccgcatgcctttcgcttggaccgccgtccatctagcaaatatagtcagctccgccgggcagctcgatagagattccgatagcgagggagaaagacgacccgcttggactgatcggcggagaagggggccccaggatcgggcgtccagcggcgatgatgcttgttccttcagtggctttaggcctgcaactctgacagtcacaaatttctttaaacaggaggcggaaagactctcagacgaggacctttttaaattcctcgctgacatgcggcgcccatcatcattgctcaggcgcctgcgccccgtgaccgcccaactgaaaattgacatctccccagctccagaaaacccccatttctgcctgtcaccagagctgcttcacatcaaaccttaccccgaccccagagggaggccaaccaaggaaatcctcgaatttcctgcacgcgaggtttatgctcctcatacaagctaccgcaatctgctttacgtctaccctcactctctcaattttagtagccgacaaggctctgtcaggaatcttgcagtgagggtgcagtatatgaccggagaagatccaagccaggcattgcccgtgatatttgggaaaagctcatgctccgaatttacacgagaggcgttcacacccgtcgtttatcacaataaaagcccggagttctatgaggaatttaaactgcatctgcccgcctgcgtcacagagaaccaccacctcctctttaccttctaccacgttagctgtcagccacgccccggcactgcactggaaacaccggtgggatttacctggattcctctgcttcaacacggcagattacgcacagggccattttgcctgcctgtctcagtcgaccaaccccccccttcttattcggtcctgacccccgacgtggcccttcctggcatgcgctgggttgacgggcacaaaggtgtgttcagtgtagagctaactgccgtgagcagcgtccatcctcaagatccttacctggacaagttttttacactcgtccatgtgctcgaagagggggccttcccatttcggctgaaagacacggtgttgagcgaggggaatgttgaacaggagctgagagcctccctcgcagctctcaggctggccagccccgagcctctcgtggcattctcacaccatgtgttagacaagctcgttagactggttataagaccccccattattagcgggcagatcgtgaacctgggccggggcgccttcgaggccatggcgcacgtggtgtcattggtgcatcggtccctggaggccgcacaggatgcacgcggtcattgcccccagctggccgcatacgtgcattacgcttttagactccctggaacagagccatcattgcctgatggggcgccacctgtcaccgtccaggccgccacgctggcccgaggatccggcagaccagcatcattatatctggccagatctaaaagcatttcaagcagcaatcctgacttggccgtggcgccaggcagcgtggacgacgaagttagcaggatactggcctcaaaactgctccatgaagagctggctctgcaatgggtcgtgtcttcttcagccgttagagaagcaattctgcagcacgcctggttctttttccaactaatggtgaagtccatggctctgcacctcctgctcggtcaaaggttggacactccacgcaaactgcgcttcccagggaggtttcttgacgatatcaccgccttagtgggttctgtggggcttgaggtgattacccgggtgcacaaggacgttgaactggctgagcatctgaacgccagcctggccttctttctgtctgatctcctatcactggtcgaccgtgggttcgtgttctccctggtacgagcacactataaacaagtagcaactcgcctccagagttctccgaatcccgccgctctgctgacactccgcatggagtttaccaggattctgtgttcccatgaacactacgtgacgctgaacctgccttgctgtccgttgagtcctcccgcgagtcccagcccatctgtctcctcaacaacgtcccagagctctaccttttcaagtcaggctcccgatcctaaggtcacgtccatgtttgagctatccgggccctttaggcaacaacactttctggctggccttctactgaccgagctggccttggccttagagcctgaagccgagggagccttcctcctgcataagaaggcaatttccgcggtgcattctctgctctgcggccacgacactgaccctcgttacgccgaggccacagtcaaggcgcgcgtagcagaactctatctgccactcctgagtatagcaagagacactctcccgaggctgcacgactttgctgaaggaccagggcagcgcagtcggctggcctccatgctggattcagacaccgagggggagggagacattgctgggactatcaatccgtctgtcgccatggctattgctggaggacctctagctccaggctctcgcgcaagcatctcccagggtcctcctactgcctcccgagccgggtgcgcactgtcggcggagtctagccgtactttgctagcatgcgtgctctgggtcttaaagaatacggaaccagcccttctgcagcgctgggccaccgatctgactcttcctcagctggggcgtctgctcgatctgctgtatctctgcctcgcagcgttcgagtacaaaggaaagaaggcgttcgaaaggattaatagcctaacatttaagaaaagtttggatatgaaagctaggctggaggaagcaatcttgggtacaataggtgcaaggcaggagatggttaggagaagccgggagcggtctcctttcggcaatcccgagaatgtaagatggaggaaatcagtaacacattggaaacagacaagcgaccgtgtggacaaaacaaaggacgagatggagcacgaagcgctcgttgagggcaacctggcaacagaagcttctctggttgttttagataccctggaaataatcgtgcaaaccgttatgttgtccgaggcgagggagtccgtgctcggcgccgttctaaaggtggtgctatactctttgggttcagcccagtccgcgctgttccttcaacacggactcgccacacaacgcgcactggtcagcaaattccctgaactgctgttcgaagaagatacggagctctgcgctgacttgtgtctgagactgcttcgccattgtgggagtaggatatctactattcgcactcatgcttcggcttctctttatctattgatgagacagaatttcgaaataggacataacttcgctagagtgaagatgcaggttacaatgtctttgtcaagcctggtaggtaccactcaaaatttcagtgaagagcatttgagacggagcctgaaaaccatcctcacttacgctgaagaggacatgggcctacgagactccacatttgcagaacaggtgcaggacctgatgtttaatctacacatgattctcacagacacagtcaaaatgaaagaacatcaggaagaccccgagatgctgattgatctcatgtatcggattgccagggggtatcaaggcagcccggatctgaggttaacatggttacaaaacatggctgggaaacatgctgaactgggcaaccacgccgaggccgctcagtgcatggtgcatgcagctgcactcgtagctgaatacctggccctcctagaagaccaccggcatctgcctgttggatgtgtgtcctttcagaacatttcctccaatgtcctggaggagtctgctatttccgatgatattctgtccccagacgaagagggtttctgcagcggaaaacatttcacagaattgggactcgtcggccttttggagcaggccgccggatacttcactatgggcggactgtacgaggccgttaatgaggtgtataagaacctgatccctatcctggaggcccatcgggattataagaagctagcggctgtgcatggcaaactgcaggaggcctttacgaagattatgcaccagtccagcggctgggagcgcgtctttggaacatactttcgtgtgggattttacggcgctcacttcggtgacctagatgaacaggagtttgtctacaaggagcctagcatcactaagctagcagagatttctcatagacttgaagaattttacacagagcggtttggagacgacgtggtcgagattattaaggattcaaatcccgtagacaagagtaagctcgactcacaaaaggcctacatacagatcacatacgtggaaccttattttgacacctatgagctgaaggaccgtgtgacatactttgatcgcaactacggactgcggacctttctattttgcaccccttttacaccagacggcagggcccatggcgaacttccagagcagcacaagaggaagaccttgctcagcaccgaccacgcgtttccctacatcaaaacccggattcgtgtatgccacagggaggagactgtcctgacccctgtcgaggtggccattgaggacatgcagaagaagaccagagaactggcttttgcgacagagcaggatcctcccgatgccaaaatgttacaaatggtactccagggttctgtgggcccgaccgtaaatcagggccccctggaagtggcccaggtgttcctcgccgagatacctgaggaccccaagctgtttcgccaccacaacaaactgcgtctgtgtttcaaagacttttgtaagaagtgtgaggatgctctccggaaaaataaggcactgataggacctgatcagaaagagtaccaccgagagttggagagaaattactgcaggttgagggaggccctgcagccattactaacacagcgcctgccccagttgatggcccccacacctcccgggctgaggaactcactcaatcgcgcctcttttcggaaagctgatctgtag

SEQ ID NO: 205953 - DNA, 6144 bp, Artificial Sequence
  derived and/or modified sequence
atggccgccagcgagcggcgggcctttgcccacaagatcaacagaacagtggccgctgaggtgaggaagcaggtgtcccgggagaggagcggcagcccccacagcagccgccgctgcagcagcagcctgggcgtgcccctgacagaggtggtggagcccctggactttgaagatgtgctgctgagccggcccccagatgctgagcccggccccctgcgggacctggtggagttcccagcagatgacctggagctgctgctgcagcccagagaatgtaggaccacagagcccggcatccccaaggatgagaagctggatgcccaggtgcgggctgctgtggagatgtacatcgaggactgggtgattgtgcaccggcgctaccagtacctgtctgctgcctacagccctgtgaccacagacacccagcgggagcggcagaagggcctgccccggcaggtgtttgagcaggatgccagcggagatgagaggagcggccctgaggacagcaatgacagcagaagaggcagcggcagccctgaggacacccccaggagcagcggggccagcagcatctttgacctgaggaacctggccgctgacagcctgctgcccagcctgctggagcgggccgccccagaagatgtggacagaagaaatgagaccctgcggcggcagcaccggcccccagccctgctgaccctgtacccagccccagatgaagatgaagctgtggagcgctgcagcaggcctgagcccccccgggagcacttcggccagaggatcctggtgaagtgcctgagcctgaagtttgaaattgaaattgagcccatcttcggcatcctggccctgtatgatgtgcgggagaagaagaagatcagcgagaacttctactttgacctgaacagcgacagcatgaagggcctgctgcgggcccacggcacccacccagccatcagcaccctggcccggagcgccatcttctctgtgacctaccccagcccagacatcttcctggtgatcaagctggagaaggtgctgcagcagggcgacatcagcgagtgctgtgagccctacatggtgctgaaggaggtggacacagccaagaacaaggagaagctggagaagctgcggctggccgctgagcagttctgcacccggctgggccgctacaggatgccctttgcctggacagctgtgcacctggccaacatcgtgtcctctgctggccagctggaccgggacagcgacagcgagggggagaggaggcctgcctggacagacagaagaagaagaggcccccaggaccgggccagcagtggagatgatgcctgcagcttcagcggcttccggcctgccaccctgactgtgaccaacttcttcaagcaggaggccgagcggctgagtgatgaggacctcttcaagttcctggccgacatgaggcggcccagcagcctgctgcggcggctgcggcctgtgacagcccagctgaagattgacatcagccctgcccctgagaacccccacttctgcctgagccctgagctgctgcacatcaagccctacccagacccccggggccggcccaccaaggagatcctggagttccctgcccgggaggtgtatgccccccacaccagctacagaaacctgctgtatgtgtacccccacagcctgaacttcagcagccggcagggctctgtgaggaacctggccgtgcgggtgcagtacatgaccggggaggaccccagccaggccctgcctgtgatctttgggaagagcagctgcagcgagttcacccgggaggccttcacccctgtggtgtaccacaacaagagccctgagttctatgaggagttcaagctgcacctgcctgcctgtgtgacagagaaccaccacctgctcttcaccttctaccacgtgtcctgccagccccggcccggcacagccctggagacccctgtgggcttcacctggatccccctgctgcagcacggccgcctgaggacaggccccttctgcctgcctgtgtctgtggaccagcccccacccagctacagcgtgctgaccccagatgtggccctgcccggcatgcgctgggtggatggccacaagggcgtcttctctgtggagctgacagctgtgtcctctgtgcacccccaggacccctacctggacaagttcttcaccctggtgcacgtgctggaggagggcgccttccccttccggctgaaggacacagtgctgtctgagggcaatgtggagcaggagctgcgggccagcctggccgccctgcggctggccagccctgagcccctggtggccttcagccaccacgtgctggacaagctggtgcggctggtgatccggccccccatcatcagcggccagatcgtgaacctgggccgcggggcctttgaggccatggcccacgtggtgtccctggtgcacaggagcctggaggccgcccaggatgcccggggccactgcccccagctggccgcctacgtgcactacgccttccggctgcctggaacagagcccagcctgcctgatggagcccctcctgtgacagtgcaggccgccaccctggcccggggcagcggccggcctgccagcctgtacctggcccggagcaagagcatcagcagcagcaacccagacctggccgtggcccctggctctgtggatgatgaggtgagccgcatcctggccagcaagctgctgcacgaggagctggccctgcagtgggtggtgagcagcagcgctgtgcgggaggccatcctgcagcacgcctggttcttcttccagctgatggtgaagtccatggccctgcacctgctgctgggccagaggctggacacccccaggaagctgcgcttccctggccgcttcctggatgacatcacagccctggtgggctctgtgggcctggaggtgatcaccagggtgcacaaggatgtggagctggccgagcacctgaatgccagcctggccttcttcctgagtgacctgctgagcctggtggaccggggctttgtgttcagcctggtgcgggcccactacaagcaggtggccacccggctgcagagcagccccaacccagctgccctgctgaccctgaggatggagttcacccgcatcctgtgcagccatgagcactacgtgaccctgaacctgccctgctgccccctgagccccccagccagccccagccccagcgtgagcagcaccaccagccagagcagcaccttcagcagccaggccccagaccccaaggtgacctccatgtttgagctgagcggccccttccggcagcagcacttcctggccggcctgctgctgacagagctggccctggccctggagcctgaggccgagggcgccttcctgctgcacaagaaggccatctctgctgtgcacagcctgctgtgtggccatgacacagaccccaggtatgcagaggccaccgtgaaggcccgggtggccgagctgtacctgcccctgctgagcatcgcccgggacaccctgccccggctgcatgactttgctgagggccctggccagaggagccggctggcctccatgctggacagcgacacagaaggagagggggacattgctggcaccatcaaccccagcgtggccatggccatcgccggcggccccctggcccctggcagccgggccagcatcagccagggccccccaacagccagcagagctggctgtgccctgtctgctgagagcagcaggaccctgctggcctgtgtgctgtgggtgctgaagaacacagagcccgccctgctgcagcgctgggccacagacctgaccctgccccagctgggccgcctgctggacctgctgtacctgtgcctggccgcctttgagtacaagggcaagaaggcctttgagcgcatcaacagcctgaccttcaagaagagcctggacatgaaggcccggctggaggaggccatcctgggcaccatcggggcccggcaggagatggtgagaagaagccgggagaggagcccctttggaaatccagaaaatgtgcgctggaggaagtctgtgacccactggaagcagaccagtgacagagtggacaagaccaaggatgagatggagcacgaggccctggtggagggcaacctggccacagaggccagcctggtggtgctggacaccctggagatcatcgtgcagacagtgatgctgtctgaggcccgggagagcgtgctgggcgctgtgctgaaggtggtgctgtacagcctgggcagcgcccagagcgccctcttcctgcagcacggcctggccacccagagggccctggtgtccaagtttcctgagctgctgtttgaggaggacacagagctgtgtgccgacctgtgcctgcggctgctgcggcactgcggcagccgcatcagcaccatccgcacccacgccagcgccagcctgtacctgctgatgaggcagaactttgaaattggccacaactttgcccgggtgaagatgcaggtgaccatgagcctgagcagcctggtgggcaccacccagaacttcagcgaggagcacctgcggcgcagcctgaagaccatcctgacctacgccgaggaggacatgggcctgcgggacagcacctttgctgagcaggtgcaggacctgatgttcaacctgcacatgatcctgacagacacagtgaagatgaaggagcaccaggaggaccctgagatgctgattgacctgatgtacagaattgcccggggctaccagggcagcccagacctgcggctgacctggctgcagaacatggccggcaagcacgccgagctgggcaaccacgccgaggccgcccagtgcatggtgcatgctgctgccctggtggccgagtacctggccctgctggaggaccaccgccacctgcctgtgggctgtgtgtccttccagaacatcagcagcaatgtgctggaggagagcgccatcagtgatgacatcctgagcccagatgaggagggcttctgcagcggcaagcacttcacagagctgggcctggtgggcctgctggagcaggccgccggctacttcaccatgggcggcctgtatgaggccgtgaatgaggtgtacaagaacctgatccccatcctggaggcccaccgggactacaagaagctggccgctgtgcacggcaagctgcaggaggccttcaccaagatcatgcaccagagcagcggctgggagcgggtgtttggcacctacttccgggtgggcttctatggagcccactttggagacctggatgagcaggagtttgtgtacaaggagcccagcatcaccaagctggccgagatcagccaccggctggaggagttctacacagaaagatttggagatgatgtggtggagatcatcaaggacagcaaccctgtggacaagagcaagctggacagccagaaggcctacatccagatcacctacgtggagccctactttgacacctatgagctgaaggacagagtgacctactttgacagaaattatggcctgcggaccttcctgttctgcacccccttcaccccagatggccgggcccatggagagctgcctgagcagcacaagaggaagaccctgctgagcacagaccacgccttcccctacatcaagacccgcatccgggtgtgccaccgggaggagaccgtgctgacccctgtggaggtggccatcgaggacatgcagaagaagacccgggagctggcctttgccacagagcaggaccccccagatgccaagatgctgcagatggtgctgcagggctctgtgggccccaccgtgaaccagggccccctggaggtggcccaggtgttcctggccgagatccctgaggaccccaagctgttccgccaccacaacaagctgcggctgtgcttcaaggacttctgcaagaagtgtgaagatgccctgaggaagaacaaggccctgattggccctgaccagaaggagtaccaccgggagctggagaggaactactgccgcctgcgggaggccctgcagcccctgctgacccagaggctgccccagctgatggcccccaccccacctggcctgaggaacagcctgaacagagccagcttcaggaaggctgacctgtag

SEQ ID NO: 205954 - DNA, 6144 bp, Artificial Sequence
  derived and/or modified sequence
atggccgccagcgagcggcgggccttcgcccacaagatcaaccggactgtagcagcggaggtgaggaaacaggtgtcccgtgagcgcagtggtagtccccacagtagtcgaaggtgctcaagctctctcggcgtcccattaacagaggtcgtcgaacccctggatttcgaagatgtgttgctaagcagacctcctgatgcagaacctggaccccttagggacctggtggaattccccgcggatgatctggagctcctcttacagcctcgcgaatgcaggacaacagaaccagggatcccaaaagacgagaaactggacgctcaggtgcgagccgccgttgaaatgtatattgaggattgggtaatcgtccaccgaagatatcagtacctgtcagcagcctatagcccagtcactaccgatactcagcgggagcggcagaaagggctgcctagacaggtgtttgagcaggatgccagcggcgatgagcggagtggccccgaagactctaacgactccagaaggggatcaggcagccccgaggatacccctaggagttccggagcgagctccattttcgacctcaggaacctcgcggcggattctttgctgccttcgcttcttgaacgcgcggctcctgaggacgtggaccggcgcaacgagaccctgcgcaggcagcatcgcccaccggccctgctcaccttgtacccagcgcctgacgaagatgaggcggtggaacggtgctctaggcccgaaccaccccgggaacactttggacagagaattttagttaaatgtctgtccctgaagttcgaaatcgagattgagccaatctttgggatcttggcactctacgacgtgagggagaagaaaaagatctccgaaaacttttattttgacctgaattcggacagcatgaaaggcctgctgagagctcacggaacccatcccgctatttctactctcgctaggtccgctattttctccgtcacctacccttctccagacatattccttgtcatcaagctggagaaagtgctccaacaaggcgacatttcggagtgttgcgagccatatatggtgctcaaagaggtggacacggctaagaataaagagaaattagaaaaactacggctggcagcagagcagttttgcacaagactggggcgatacagaatgccgttcgcatggaccgccgtgcacttggccaacattgtttcctccgctggccagctggacagggattcagacagcgagggcgagaggaggcccgcgtggacagacagacggcggagaggtccccaggatcgggcaagctctggtgacgacgcctgctcattttcaggcttcaggccggccacactgacagttactaacttctttaaacaggaggcagaacgcctcagcgacgaagaccttttcaagttccttgcggatatgcgtcggccctccagtctactacgtcggctgagaccagtaaccgcccagctaaagattgacattagtcctgccccagagaacccacacttttgcctctcccctgaacttctgcatatcaaaccataccccgatcctcgtggcagacccactaaggaaattctggagttccctgcgcgtgaagtgtatgcgccacacacatcctatcgaaatctgctgtacgtgtacccccactccttgaatttctcctcacgacagggttctgtccggaacttggccgttcgggtgcagtatatgacaggcgaagacccaagccaggccttgccggtgatctttggtaaatcttcctgttccgagttcacaagagaggcctttaccccagtggtctaccacaataagtcaccagaattctatgaagaattcaaactccatcttcctgcctgcgtgaccgagaaccaccatctgctgtttactttttatcatgtgtcttgccagccccgaccaggcaccgctctagagactcccgtgggctttacatggatccccctcttgcagcatggaagattaaggacaggaccattctgcctgcccgtgagtgtggatcagccccctccatcctattccgtcctaactccagacgtggccttacccggcatgcgctgggtggacgggcataaaggcgtgtttagtgtagagctgactgccgtgtcctcagtgcatccccaggacccgtatttggacaagttcttcactctcgtgcacgtgctcgaggaaggagcgtttccatttcgcctgaaggacacggtattgtccgaggggaacgtggaacaggagttgagagcgagtttggccgccctcaggctcgcctcccccgagccactcgtagcctttagtcatcatgttctcgataaactagtaagactggtcatccggcctcccatcatcagcgggcagatagtgaacctgggcagaggagcctttgaggccatggctcacgtggtgtcacttgtccaccgcagccttgaggccgctcaggacgcccggggacactgcccacagttggcagcatatgtccattacgcgtttcggttacccggcacagaacccagcctgcccgatggggcgccacctgtcaccgtgcaagcagccacactcgctagaggatctgggcgccccgcatctctgtaccttgcccggtccaagtcaatatcttcaagtaacccagatctagccgtggctcctggatccgttgatgacgaggtatcccggattctggcttcgaaactcctgcatgaagaactagccctccagtgggtcgtctccagctccgcggtgcgggaagccattctgcagcacgcctggtttttctttcagctcatggtcaaatcaatggcacttcacttattgctgggtcagcgccttgatacacctaggaaacttagattccctgggcggtttctagatgatatcactgccctcgtgggcagtgtcggacttgaagtcattactcgggtgcataaagatgtggagctggctgagcatctgaatgcctctctggctttcttcctgtccgatttactatcccttgtggaccgcggatttgtcttctccttggttagggcccactataagcaagtggctacacggcttcagtcgagcccaaaccctgcagctctgctgaccttgaggatggaattcaccaggattctgtgcagccacgaacactatgtaactctgaatctgccctgttgccctctgtcccctccagcatcaccttcaccttcggttagcagcaccacgtcccagtcttctacctttagctcccaggcgcctgatcctaaagtaactagcatgtttgagctcagcggacccttccggcagcagcatttccttgccgggctgctcctgactgagttggccctggccctggagcctgaggccgagggcgcttttctgctgcacaagaaggccataagcgcagtccatagtctcctctgcggccatgacactgaccctcgctacgcagaggccactgtcaaggccagagtggcagagctctaccttcctcttctctcgattgcacgcgacaccctcccaagattgcacgatttcgcggaaggcccagggcagcggtctagactcgcgagcatgcttgactcagatacagagggggagggcgatattgcaggcaccataaacccctcagttgcaatggcgattgccggtgggcccctggccccaggtagtcgcgcctcgatcagccagggaccaccgacagcttctcgggctggctgcgccctttcagccgaatcgtcacggaccttacttgcctgtgtgctgtgggtcctgaaaaataccgagcccgccttactccagaggtgggccaccgacctgacattgccgcagctgggccgattgctggacctactatatctgtgtctcgcggccttcgaatacaaaggcaaaaaagcctttgagcgcataaattcactgacctttaaaaagtccctagacatgaaagctaggctggaggaggctattctgggtaccattggggcacgccaagaaatggtccgccgcagcagagagcggtcaccctttgggaatccggagaacgtccggtggaggaagagcgtcacccactggaagcagaccagtgatcgagtggataaaacgaaggacgagatggaacatgaggccttggtcgagggtaacttggctactgaggcaagcttggttgtgctcgatacgcttgagatcattgtgcagaccgtgatgctttccgaggcgcgtgaatcagtccttggggcagtgctgaaggtcgtcctgtactctctcggctcggcccagtccgctctttttctccaacatgggttagccactcagagagccctggtctcaaagtttccagagctcctctttgaagaggacacagagttgtgcgcagacctctgcctcaggctgttacgccattgcggatccaggataagcaccatccgaacccacgccagtgccagcctgtacctgcttatgagacagaatttcgagatagggcacaatttcgctcgggtgaagatgcaggtcacgatgagcctatcaagcttagtcggtactactcagaacttcagtgaggaacacctgcgcaggtctctgaaaacaatcctgacttatgccgaagaagatatgggtttacgagatagtacattcgcagaacaggtgcaggatctcatgttcaatcttcatatgatcttgacggacacagttaaaatgaaggagcaccaggaagaccctgaaatgctcattgatctgatgtatcgaatagcacgcggctatcagggcagccccgacctgcggctgacatggctccagaatatggcaggcaaacatgccgagctgggaaatcatgctgaggccgcacagtgcatggtgcacgccgcagccttagtagctgaatatctcgccttactggaagaccatcgccatctgcctgtggggtgcgtaagttttcagaacatatccagtaacgtcctggaggaaagcgccatttctgatgatatcctcagtccagacgaggaggggttctgtagcggaaagcatttcaccgagctagggctagtcgggctcctcgagcaggccgctggatactttacgatgggaggtttgtacgaggccgtgaatgaagtatataagaacctgatccctattctggaggcccaccgggattataagaagctggctgctgtgcacggcaaactccaagaggcctttactaagattatgcaccagtcaagcggttgggagagggtttttggaacttactttagggtgggattttatggcgcacacttcggtgacctggatgagcaggaatttgtatacaaggagccctctatcacaaaactcgctgagatctctcaccggttggaagagttttatactgaacggttcggggacgacgtggttgaaataatcaaagattccaatcccgtggacaaatcaaaactagatagccaaaaggcatatatccagatcacctacgtcgaaccctacttcgatacgtatgaactgaaggatcgggtgacctacttcgatcgcaattacgggctgcgcacttttctgttctgtacaccatttacacctgacggacgggcacacggcgagctccctgagcagcacaagcgaaagactctattatctaccgatcacgctttcccttacattaaaacccggattcgcgtctgccatcgggaagaaaccgtgctgacacccgtcgaggtggccatcgaggacatgcagaagaaaacaagggagctggcattcgccacggagcaggatccgcccgacgcaaagatgttgcaaatggtactgcagggctcagtgggccccaccgttaaccaggggccactcgaggtcgcccaggtgttcctggcagagatccctgaagaccccaagctgtttcgccaccacaataaactccgcctctgcttcaaggatttctgcaagaagtgtgaagatgcccttcggaaaaataaggccctgatcggcccggatcagaaggagtaccatcgggagcttgaacgaaactactgtcgcctcagggaggccctacagccattactgacacagcgccttccacagttgatggcaccaacaccccccggactcagaaattccctcaaccgggcaagctttagaaaagctgatctttag

SEQ ID NO: 205955 - DNA, 6144 bp, Artificial Sequence
  derived and/or modified sequence
atggcagcatccgaacgccgagcatttgcgcacaagataaacagaactgtcgccgctgaggtgcgaaagcaggtttctagagagcgcagcggcagcccccacagcagccgaaggtgctcatctagtctcggggtcccactcaccgaggttgtcgaacccctggacttcgaggacgtactgctctcccggccacctgacgctgaaccaggccctctgagggatctggtggaattccccgcagatgatttagagcttctgctccagcccagggaatgcaggaccaccgagccgggaattcctaaggacgagaaactcgacgcccaagtgagagctgccgtcgagatgtatatcgaggattgggtgatcgtgcatcggcgataccaatatttgtccgccgcatatagccccgtgacgacggacacacaaagggagcgccagaagggcctgcctagacaggttttcgagcaggacgcttccggcgacgagaggagtggcccagaagattctaatgacagccggaggggttcaggatcaccagaggacacaccaagatcaagtggtgctagcagcatcttcgatttgagaaatctcgccgcagactccctccttcctagcctcctagaaagggccgcacctgaagatgtagatcgaagaaatgaaacgctccgaagacaacatcgtccgcctgctctgctgactctctatcccgcaccagatgaagacgaagccgtggagcggtgtagccggccagagcctcctagagaacacttcggtcagcgcatcctggtcaagtgcctgagcctgaaatttgagattgagattgaaccaatctttggcatcctcgctctgtacgacgtccgggagaaaaaaaaaatcagtgagaatttctactttgatctgaactctgatagcatgaagggattacttagggctcatggaacccacccggcaatctccaccctcgcacgaagtgccatcttcagtgtcacataccccagtcctgatatctttctcgttatcaaactggaaaaagttttgcagcaaggagatatatctgagtgttgtgaaccctacatggtactcaaagaggtcgacacggccaagaataaagaaaagctggagaaactccggctggccgctgagcagttttgcactcgtctgggcagatatcggatgccttttgcatggaccgccgtgcatctggccaatatagtttcctccgctggacagctcgaccgcgactccgactcagagggggagcgtcgacctgcctggactgaccggcgtcgcaggggaccccaggaccgggcatcgtccggcgatgacgcatgttcattcagtggttttcgcccagctaccctgactgtgacgaacttttttaagcaggaggccgagcggctgagtgatgaggacctcttcaaattcctggcagacatgcgccgtccctccagcctgcttcgcagactacgtcctgttaccgctcaactcaagatcgacatctctccagctccagagaaccctcatttctgcctttcccccgaactgttgcatatcaagccctatcctgaccccaggggccgacctaccaaggagatcctggagttcccggcacgggaggtgtacgcccctcacacctcttatcgaaacttactatatgtctatccccactcattgaatttttcctcgcggcaggggtctgtccggaatctagctgtgagggtacagtacatgacgggggaagacccttcccaagcacttcctgttatcttcggaaaatcttcttgttccgagttcaccagggaggccttcacaccagttgtgtaccataacaagtctccagaattctatgaagagttcaagctgcacctaccggcttgtgtcactgagaatcaccacctgctgttcacattctaccacgtgtcctgtcagccaagacccggtacggctctagaaacccctgtcgggttcacatggatacctctattgcagcacggacgcctgcgcaccgggccattctgcctcccagtgtcggtggatcagccgcctccgagttattcagtgctgacgccggacgttgccctgcccggtatgcggtgggtggacggacataaaggcgtgtttagcgtggagctgaccgcggtctcttctgtccacccacaggacccctacctggacaaattttttacactcgtgcacgtgctggaagagggagctttcccatttcgattaaaagataccgtactctcggaagggaatgtagaacaagagttaagagccagtctcgccgcacttcggctcgcgtctcccgagcctttagtggcattctcacatcatgtattggataaactagttcggctcgtgattaggccccctattatcagcggccagattgtcaacttggggagaggcgctttcgaggccatggcacacgtcgtctcacttgttcacaggtccctggaagcagcacaggatgcccgaggacactgtcctcagctcgccgcatacgtacattatgcctttcggctccctggtacagagccatcattacccgacggagcccctcctgtgaccgttcaggctgcaactctcgcccgtggaagtggcagacctgcctccctgtatcttgcccgatccaaaagcatctcttcttctaatcctgatctggccgtggcgcctggctccgttgatgacgaagttagtaggatccttgctagcaaactcttgcatgaggaattggcactccaatgggtggtctcctcatccgctgtgcgcgaagccatactacagcacgcatggttcttttttcagctgatggtgaaaagcatggccttacacttactgctcggacagcgtctggatacgcctaggaaactccggtttcccggtcgctttctcgatgatattactgccctggtagggagcgtggggctagaggtgattacccgggttcacaaggacgttgaactggcagagcaccttaatgcaagtctggcttttttcttatcagacttactgtctctggtggatcgtggattcgtctttagcttggttcgagctcactataagcaggtagctaccagactgcagagttcccccaaccccgctgccctcttgactttgcgcatggagttcactagaatactttgctcgcatgagcactacgtgacacttaatttgccatgttgccctctgagcccccctgctagcccatcaccaagtgtgtcatccaccaccagtcagtctagcaccttctcttctcaggccccagaccctaaggtaacatctatgtttgagctgagtggaccattcaggcaacagcatttcctggccggtctcctcctcaccgagctggcgctggccctggagccggaagcagagggtgctttcctgttacataagaaggccatctcagcagtgcattctctgctctgcggccatgacacggatcccaggtacgccgaagccacagtcaaagctagggtcgcagagctctacctgcctttattaagcatcgctagggataccttaccacggctgcatgatttcgctgaagggcctggccagcggtcccgcctggcttccatgcttgactccgacacagaaggtgaaggcgacattgctggaaccattaacccttccgttgcgatggccattgccggaggacccctggccccaggctcacgagccagcattagccagggacctccgacggcttctcgtgccggttgcgccttatccgcagagtccagcaggactctcctggcctgcgtgctctgggttttgaaaaacacagaacctgctttactgcagcgatgggccacagatttaaccttgccccagctgggtagacttctggatctgctgtacctgtgtctggccgcttttgagtacaagggtaagaaagcctttgaaagaatcaattccctgacttttaagaagagcctcgacatgaaggcacggctcgaagaagcgatactcggcactattggtgcaagacaggagatggttcgaaggtcaagggaaaggagtccctttgggaatcccgagaacgtgagatggcgcaaatcagtcacacattggaaacagaccagtgaccgcgtagataagacaaaagacgagatggagcatgaggcgctggtcgaggggaacctagctaccgaagcttctcttgtggtcctggacaccctggagatcattgtgcagactgtgatgctgtcggaagccagggagtcagtacttggggctgttctgaaggttgtgttgtactcgctgggctctgcacagtcagcccttttcctacagcatggtctggcaactcagagggctcttgtgagcaagtttcctgagctcctgttcgaagaagataccgagctgtgtgccgatctctgcttacggctgctgcgccactgcggatcgagaatttctactattagaacccacgcctccgctagtctatacctgctgatgagacagaactttgagatcgggcataactttgccagggttaaaatgcaggtgacaatgagtctgagcagcctcgtggggaccactcagaatttcagcgaggaacacctgcgtcgatctttaaaaaccattctcacctatgctgaggaggatatgggcctgagggattcgacattcgctgaacaggtgcaggatctgatgtttaatctccacatgatcctgaccgatacggttaaaatgaaagaacaccaggaggaccccgagatgctgattgacctcatgtatcggattgccagggggtaccagggctccccagatcttaggctgacatggctgcagaatatggccggaaagcatgccgagttgggcaatcacgctgaggcagcacaatgtatggtacacgccgctgccctcgtggccgagtacttagcactcttagaagaccaccggcacctcccagtcgggtgcgtaagcttccagaatatctcttccaacgtgttggaggaaagtgccatcagcgacgacatcttgagtcccgacgaagagggattttgctccgggaaacactttacggaactaggactggtcggcttactcgaacaggccgctggatacttcactatgggtggcctgtatgaagcagtcaatgaggtgtacaaaaatctcatccctatactagaggcgcacagggattacaaaaagctcgccgctgtgcacggcaagctgcaggaagcctttactaagatcatgcaccagagctcgggttgggagagggttttcgggacttacttccgggtgggtttctacggggctcacttcggtgatctggacgaacaggaattcgtttataaggagccctcgatcaccaaacttgccgagatttctcataggttggaagagttttacactgaacgattcggagatgatgtggttgagatcatcaaggacagcaatcccgtggacaagtcaaaactagattctcaaaaggcttacatccagattacttatgtggagccctactttgacacttatgaactgaaagatcgcgtcacctattttgatcggaactatggcctcagaacttttctgttctgtacccctttcacgccagatgggcgtgctcacggagagctgcctgaacaacacaaaaggaaaacactgcttagcaccgaccacgccttcccttacatcaagacccgcatccgggtctgccacagagaagaaactgtgctcacaccagttgaggtggctatcgaggatatgcaaaaaaaaactagggaactggcattcgctacagagcaggatcctcctgacgccaaaatgctacagatggtccttcaaggctcagtgggacctactgttaatcaggggcctctggaggtggcccaggtgtttctggccgaaattccagaagaccctaagttgttccgccaccacaacaagctgaggttgtgctttaaggacttctgcaaaaaatgcgaagatgccctgcgaaaaaataaggctcttattggtcctgatcaaaaggagtaccatagggaactggaacgaaactattgcagactgcgggaggcccttcaacccctgctgacacagaggctgccccagctcatggcaccaacaccccctggtcttcgaaactctctgaacagagcaagctttcggaaggccgatctctac

SEQ ID NO: 205956 - DNA, 6144 bp, Artificial Sequence
  derived and/or modified sequence
atggccgccagcgagagaagagccttcgcccacaagatcaacagaaccgtggccgccgaggtgagaaagcaggtgagcagagagagaagcggcagcccccacagcagcagaagatgcagcagcagcctgggcgtgcccctgaccgaggtggtggagcccctggacttcgaggacgtgctgctgagcagaccccccgacgccgagcccggccccctgagagacctggtggagttccccgccgacgacctggagctgctgctgcagcccagagagtgcagaaccaccgagcccggcatccccaaggacgagaagctggacgcccaggtgagagccgccgtggagatgtacatcgaggactgggtgatcgtgcacagaagataccagtacctgagcgccgcctacagccccgtgaccaccgacacccagagagagagacagaagggcctgcccagacaggtgttcgagcaggacgccagcggcgacgagagaagcggccccgaggacagcaacgacagcagaagaggcagcggcagccccgaggacacccccagaagcagcggcgccagcagcatcttcgacctgagaaacctggccgccgacagcctgctgcccagcctgctggagagagccgcccccgaggacgtggacagaagaaacgagaccctgagaagacagcacagaccccccgccctgctgaccctgtaccccgcccccgacgaggacgaggccgtggagagatgcagcagacccgagccccccagagagcacttcggccagagaatcctggtgaagtgcctgagcctgaagttcgagatcgagatcgagcccatcttcggcatcctggccctgtacgacgtgagagagaagaagaagatcagcgagaacttctacttcgacctgaacagcgacagcatgaagggcctgctgagagcccacggcacccaccccgccatcagcaccctggccagaagcgccatcttcagcgtgacctaccccagccccgacatcttcctggtgatcaagctggagaaggtgctgcagcagggcgacatcagcgagtgctgcgagccctacatggtgctgaaggaggtggacaccgccaagaacaaggagaagctggagaagctgagactggccgccgagcagttctgcaccagactgggcagatacagaatgcccttcgcctggaccgccgtgcacctggccaacatcgtgagcagcgccggccagctggacagagacagcgacagcgagggcgagagaagacccgcctggaccgacagaagaagaagaggcccccaggacagagccagcagcggcgacgacgcctgcagcttcagcggcttcagacccgccaccctgaccgtgaccaacttcttcaagcaggaggccgagagactgagcgacgaggacctgttcaagttcctggccgacatgagaagacccagcagcctgctgagaagactgagacccgtgaccgcccagctgaagatcgacatcagccccgcccccgagaacccccacttctgcctgagccccgagctgctgcacatcaagccctaccccgaccccagaggcagacccaccaaggagatcctggagttccccgccagagaggtgtacgccccccacaccagctacagaaacctgctgtacgtgtacccccacagcctgaacttcagcagcagacagggcagcgtgagaaacctggccgtgagagtgcagtacatgaccggcgaggaccccagccaggccctgcccgtgatcttcggcaagagcagctgcagcgagttcaccagagaggccttcacccccgtggtgtaccacaacaagagccccgagttctacgaggagttcaagctgcacctgcccgcctgcgtgaccgagaaccaccacctgctgttcaccttctaccacgtgagctgccagcccagacccggcaccgccctggagacccccgtgggcttcacctggatccccctgctgcagcacggcagactgagaaccggccccttctgcctgcccgtgagcgtggaccagcccccccccagctacagcgtgctgacccccgacgtggccctgcccggcatgagatgggtggacggccacaagggcgtgttcagcgtggagctgaccgccgtgagcagcgtgcacccccaggacccctacctggacaagttcttcaccctggtgcacgtgctggaggagggcgccttccccttcagactgaaggacaccgtgctgagcgagggcaacgtggagcaggagctgagagccagcctggccgccctgagactggccagccccgagcccctggtggccttcagccaccacgtgctggacaagctggtgagactggtgatcagaccccccatcatcagcggccagatcgtgaacctgggcagaggcgccttcgaggccatggcccacgtggtgagcctggtgcacagaagcctggaggccgcccaggacgccagaggccactgcccccagctggccgcctacgtgcactacgccttcagactgcccggcaccgagcccagcctgcccgacggcgccccccccgtgaccgtgcaggccgccaccctggccagaggcagcggcagacccgccagcctgtacctggccagaagcaagagcatcagcagcagcaaccccgacctggccgtggcccccggcagcgtggacgacgaggtgagcagaatcctggccagcaagctgctgcacgaggagctggccctgcagtgggtggtgagcagcagcgccgtgagagaggccatcctgcagcacgcctggttcttcttccagctgatggtgaagagcatggccctgcacctgctgctgggccagagactggacacccccagaaagctgagattccccggcagattcctggacgacatcaccgccctggtgggcagcgtgggcctggaggtgatcaccagagtgcacaaggacgtggagctggccgagcacctgaacgccagcctggccttcttcctgagcgacctgctgagcctggtggacagaggcttcgtgttcagcctggtgagagcccactacaagcaggtggccaccagactgcagagcagccccaaccccgccgccctgctgaccctgagaatggagttcaccagaatcctgtgcagccacgagcactacgtgaccctgaacctgccctgctgccccctgagcccccccgccagccccagccccagcgtgagcagcaccaccagccagagcagcaccttcagcagccaggcccccgaccccaaggtgaccagcatgttcgagctgagcggccccttcagacagcagcacttcctggccggcctgctgctgaccgagctggccctggccctggagcccgaggccgagggcgccttcctgctgcacaagaaggccatcagcgccgtgcacagcctgctgtgcggccacgacaccgaccccagatacgccgaggccaccgtgaaggccagagtggccgagctgtacctgcccctgctgagcatcgccagagacaccctgcccagactgcacgacttcgccgagggccccggccagagaagcagactggccagcatgctggacagcgacaccgagggcgagggcgacatcgccggcaccatcaaccccagcgtggccatggccatcgccggcggccccctggcccccggcagcagagccagcatcagccagggcccccccaccgccagcagagccggctgcgccctgagcgccgagagcagcagaaccctgctggcctgcgtgctgtgggtgctgaagaacaccgagcccgccctgctgcagagatgggccaccgacctgaccctgccccagctgggcagactgctggacctgctgtacctgtgcctggccgccttcgagtacaagggcaagaaggccttcgagagaatcaacagcctgaccttcaagaagagcctggacatgaaggccagactggaggaggccatcctgggcaccatcggcgccagacaggagatggtgagaagaagcagagagagaagccccttcggcaaccccgagaacgtgagatggagaaagagcgtgacccactggaagcagaccagcgacagagtggacaagaccaaggacgagatggagcacgaggccctggtggagggcaacctggccaccgaggccagcctggtggtgctggacaccctggagatcatcgtgcagaccgtgatgctgagcgaggccagagagagcgtgctgggcgccgtgctgaaggtggtgctgtacagcctgggcagcgcccagagcgccctgttcctgcagcacggcctggccacccagagagccctggtgagcaagttccccgagctgctgttcgaggaggacaccgagctgtgcgccgacctgtgcctgagactgctgagacactgcggcagcagaatcagcaccatcagaacccacgccagcgccagcctgtacctgctgatgagacagaacttcgagatcggccacaacttcgccagagtgaagatgcaggtgaccatgagcctgagcagcctggtgggcaccacccagaacttcagcgaggagcacctgagaagaagcctgaagaccatcctgacctacgccgaggaggacatgggcctgagagacagcaccttcgccgagcaggtgcaggacctgatgttcaacctgcacatgatcctgaccgacaccgtgaagatgaaggagcaccaggaggaccccgagatgctgatcgacctgatgtacagaatcgccagaggctaccagggcagccccgacctgagactgacctggctgcagaacatggccggcaagcacgccgagctgggcaaccacgccgaggccgcccagtgcatggtgcacgccgccgccctggtggccgagtacctggccctgctggaggaccacagacacctgcccgtgggctgcgtgagcttccagaacatcagcagcaacgtgctggaggagagcgccatcagcgacgacatcctgagccccgacgaggagggcttctgcagcggcaagcacttcaccgagctgggcctggtgggcctgctggagcaggccgccggctacttcaccatgggcggcctgtacgaggccgtgaacgaggtgtacaagaacctgatccccatcctggaggcccacagagactacaagaagctggccgccgtgcacggcaagctgcaggaggccttcaccaagatcatgcaccagagcagcggctgggagagagtgttcggcacctacttcagagtgggcttctacggcgcccacttcggcgacctggacgagcaggagttcgtgtacaaggagcccagcatcaccaagctggccgagatcagccacagactggaggagttctacaccgagagattcggcgacgacgtggtggagatcatcaaggacagcaaccccgtggacaagagcaagctggacagccagaaggcctacatccagatcacctacgtggagccctacttcgacacctacgagctgaaggacagagtgacctacttcgacagaaactacggcctgagaaccttcctgttctgcacccccttcacccccgacggcagagcccacggcgagctgcccgagcagcacaagagaaagaccctgctgagcaccgaccacgccttcccctacatcaagaccagaatcagagtgtgccacagagaggagaccgtgctgacccccgtggaggtggccatcgaggacatgcagaagaagaccagagagctggccttcgccaccgagcaggacccccccgacgccaagatgctgcagatggtgctgcagggcagcgtgggccccaccgtgaaccagggccccctggaggtggcccaggtgttcctggccgagatccccgaggaccccaagctgttcagacaccacaacaagctgagactgtgcttcaaggacttctgcaagaagtgcgaggacgccctgagaaagaacaaggccctgatcggccccgaccagaaggagtaccacagagagctggagagaaactactgcagactgagagaggccctgcagcccctgctgacccagagactgccccagctgatggcccccaccccccccggcctgagaaacagcctgaacagagccagcttcagaaaggccgacctgtag

SEQ ID NO: 205957 - DNA, 6385 bp, Artificial Sequence
  derived and/or modified sequence
ggggccggggcccggggcggcggcggcgggacgcgaggaccatggctgcctccgagcgccgcgccttcgcgcacaagatcaacaggacggtggccgcagaggtgcggaagcaggtgtcccgggaacgcagtggctccccccactccagcaggcgctgcagcagctccctgggggtcccactgactgaagttgtcgagcccctggactttgaggatgtacttctgagccggccaccagatgctgagcccgggcccctcagggacctggtagaattcccagctgatgacttggagctgctgctgcagccccgggaatgccggaccacggagcccgggatccccaaggatgaaaaactggatgcccaggtgagggccgcggtggagatgtatattgaggactgggtcattgtccacagaaggtatcagtacctgagtgcagcatacagccccgtcaccacagacacacagcgggagcgacagaagggcctcccccgccaggtctttgagcaggatgcttctggagacgagaggtccggccctgaggactcgaatgactcccggcgtggctcgggctccccggaagacacccctcgaagcagtggtgcctctagcatcttcgacctgaggaacctggcagctgactcattgctgccctctctgctagagcgggcggccccagaagatgtggaccggcgcaatgaaacccttcgacggcagcaccggcccccggccctgctcaccctctacccggcacctgacgaggatgaagccgtggaacgctgtagccgcccagagccaccccgcgagcactttggacaaaggatcttggtcaagtgtctgtcgctcaagttcgagattgaaattgagcccatctttgggatcttggctctgtatgatgtgcgggagaaaaagaagatctcggagaacttctacttcgacctgaactcggactccatgaaggggctgcttcgggctcatggcacccaccctgccatctccaccctggcccgctctgccatcttctctgtgacctacccctcacctgacatcttcctggtcatcaagttggagaaggtgcttcagcaaggggacatcagtgagtgctgtgagccttacatggtgttgaaagaagtggacacagccaagaacaaagagaagctagagaagctgcgcctggcggccgagcagttctgcacccgcctgggccgctaccgcatgcccttcgcctggacggccgtgcacttggccaacatcgtgagcagcgctgggcagctggaccgggactctgactcggagggcgagcgccggccagcctggacagaccgccgccgtcgggggccccaggaccgggcgagtagtggggacgacgcctgcagcttctctggcttccgtccagccacgctaactgtcacaaacttctttaagcaggaggctgagcgactcagtgacgaggacctcttcaagttcctggctgacatgaggcgcccgtcgtccctgctgcggcgactacgtcctgtgactgcccagctcaagatcgacatttctccggctcctgaaaatccccacttctgcctctcccctgagctgcttcatatcaagccctacccggaccccaggggccggcccaccaaggagattctggagttccccgcccgcgaagtctatgccccccataccagctacaggaacctgctgtacgtgtacccgcacagcctcaacttcagcagccgccagggctccgtgcgcaaccttgctgtgcgagtgcagtacatgacaggcgaggaccccagccaggctctgccggtcatctttggcaagtccagctgcagtgaatttacccgcgaggccttcacaccggtggtctaccataacaagtcccccgagttctacgaggagttcaagctgcatcttccagcctgcgtgacagagaaccatcacctgctgttcaccttctaccatgtcagctgccagccccggccgggcactgccctggagacacccgtgggctttacttggatcccactgctgcagcacgggcgcctgaggaccggccccttctgtctcccagtgtctgtggaccagccgccgcccagctattccgtgctcacacccgatgtggcgcttccgggcatgcgctgggtggacggtcacaagggcgtgttcagtgtggagctcacagccgtgtcctctgtgcacccccaggacccctacctggacaaattcttcaccctggtgcacgtcctggaggagggagccttcccattccggctcaaggacactgtgctgagcgagggcaacgtggagcaggagctgcgggccagtcttgcagcactgcgcctggccagccccgaaccccttgtggccttctcccaccacgtgctggacaagctcgtgcgtctggtcatcaggcccccgatcatcagtggccagattgtgaacctgggccgtggagcctttgaagcaatggcccatgtagtcagccttgttcaccggagcctggaggcagcccaggatgcccgcggtcactgcccacagctggctgcctacgtccactacgcctttcgccttcctggcactgagcccagcctcccggatggggcccctccagtgacagtgcaggctgccacactggcccgtggctctggtcgccccgcaagcctctacctggcgcgttccaagagcatcagcagcagcaaccctgacctcgccgtggcccctggctctgtggatgacgaggtttcccgcatcctggccagcaagctgcttcacgaggagctggctctgcagtgggtggtcagcagcagtgccgtacgcgaggccatcctccagcacgcctggttcttcttccagctcatggtgaagagtatggcgctgcacctgctgcttggccagcgactagacacaccccgcaagctgcgcttccccggacgcttcctggacgacatcactgccttggtgggctctgtgggcctggaggtcatcacccgtgtccacaaggatgtggagctggccgagcacctcaacgccagcctggctttcttcctcagtgaccttctgtccctggtggaccggggctttgtcttcagcctggtccgggcccactacaagcaggtggccacgcggctccagtcgtcccctaatccagcagccctgctgaccctgcgcatggaattcacccgcatcctgtgcagccacgagcactacgtgaccctcaacctcccctgctgccccctgtcacctccagcctcgccctccccctctgtgtcctccaccacctcccagagctccaccttctccagccaagccccggaccccaaggtgaccagcatgttcgaactgagtggaccattccggcagcagcacttcctagctgggctcctgctgacggagctggcactggccctcgaacctgaggctgaaggggcattcctgttgcacaagaaggccatcagtgctgtgcacagcctgctatgtggccatgacactgacccccgctacgccgaggccactgtgaaggctcgtgtggccgagctgtacctgccactgctatcgattgcacgggataccttgccacggctgcatgactttgctgagggcccaggtcagcggtcaagactggcctcaatgcttgactcagacacagaaggcgaaggggacattgcgggtaccatcaacccctctgtggccatggccattgctggtggccccctagcccctggctcccgggccagcatctcccaggggccaccaacggcttctcgcgcaggctgtgccctctctgctgagtcaagccggaccttgctggcgtgtgtgctgtgggtgctgaaaaacaccgagccggcgctcctgcagcgctgggccactgacctgacactcccccagctgggacgtctgttggatttgctgtacctttgcctagctgcctttgagtacaaggggaaaaaggcctttgaacgcatcaacagcctcacattcaaaaaatctctggatatgaaggcgcggctagaggaagccattctgggtaccatcggagctcgacaagaaatggttcggcgaagtcgtgagaggagcccgtttgggaatccggagaatgtgcgctggcggaagagcgtcacacactggaagcaaacctcagaccgcgtggacaagaccaaggatgaaatggaacacgaggccttggtggaagggaacctggcaaccgaggcaagcctagtggttctggacacactggagatcatcgtgcagacggtgatgctttcagaagcccgggagagcgtcttgggggcagtgctgaaggttgtgctgtacagcctgggcagtgcccagagtgccctcttcttgcagcatggcctggccacccagagggcccttgtgtccaagttcccggagctgctgttcgaggaggacacggagctgtgtgccgacctgtgcctgaggctcctacgacactgtggcagccgcatcagcaccatccgcacgcacgccagcgcctcgctgtacctgctcatgcgacagaacttcgagatcggccacaactttgcccgtgtgaagatgcaggtcaccatgtctctctcgtccctggtggggacgacgcagaacttcagtgaagagcacctgcgacgttcactcaaaaccatcctcacctatgctgaggaggacatggggctgcgggacagcaccttcgcagagcaggtccaggacctgatgttcaacctgcacatgatcctgacggacacggtgaagatgaaggaacaccaggaggaccctgagatgctcatcgacctcatgtacagaattgcccggggctaccagggctcaccggaccttcggctgacctggttgcagaacatggccgggaagcacgcggagctgggcaaccacgccgaggccgcccagtgcatggtgcacgcggccgccctcgtggctgagtacctcgccctgctcgaggaccaccgccacctgcccgtgggctgcgtttccttccagaacatctcatccaacgtgctagaggagtccgccatctccgacgacatcctgtcgcccgacgaggagggcttctgctccgggaagcacttcactgagctggggctggtagggttgctggaacaggcagccggctacttcaccatgggcgggctctacgaggcggtgaatgaggtctacaagaacctcatccccatcctggaagcccaccgtgactacaagaagctggccgcggtgcacggcaaactgcaggaggccttcaccaagatcatgcaccagagttccggctgggagcgcgtgttcgggacgtatttccgcgtgggcttctacggcgcccacttcggtgacctggatgagcaggagtttgtgtacaaggagccatcgatcacgaagctggcagagatctcacaccggctggaggagttctacacggagagatttggcgacgacgtcgttgagattatcaaagactctaaccctgtggacaagtccaagcttgactcacaaaaggcctacatccagatcacgtatgtggaaccgtactttgatacctacgagctcaaggaccgggtgacctactttgaccgcaactatgggcttcgcacattcctgttctgcacgccgttcacgccggatgggcgcgcacacggggagctgcccgagcaacacaagcgtaagacgctgctcagcaccgaccacgccttcccctacatcaagactcgcatccgtgtgtgccaccgggaggagacggtgctgacgccagtggaggtggccatcgaggacatgcagaagaagacacgggagctggcctttgccaccgagcaggacccaccagatgctaagatgctacagatggtgcttcagggctctgtagggcccaccgtgaaccagggtcccctggaggtggcccaggtgtttttagcagagatcccggaagaccccaagctcttccggcatcacaacaaattgcggctctgcttcaaggacttctgcaagaaatgtgaggatgcgctgcggaaaaataaggccctgattgggccggaccagaaggagtaccaccgtgagctggagcgcaactactgccgcctgcgggaggctctgcagcccctgcttacccagcgcctgccccagctgatggcacccaccccacccggcctcaggaactccttgaacagagcaagtttccgaaaggcagacctctgagcccacaaggaccaaagctgtacctagaggaaccagcacccgggcctcagctgtctgtgctgcgaggggagtctgccctggtgcccactgggctgtggggtgaccacactgtacttggggctgggccctctgcccctgtgtccccatctgtgtgcactgatgcttcctcccttttttaatttaaaatggtttttataagc

SEQ ID NO: 205958 - protein, 2458 aa, Artificial Sequence
  derived and/or modified sequence
MISTLATFPPFLHKDIIEYLSTSFLPMAILGSSRREGVPAHVNLSASSMLMIAMQYTSNPVYHCQLLECLMKYKQEVWKDLLYVIAYGPSQVKPPAVQMLFHYWPNLKPPGAISEYRGLQYTAWNPIHCQHIECHNAINKPAVKMCIDPSLSVALGDKPPPLYLCEECSERIAGDHSEWLIDVLLPQAEISAICQKKNCSSHVRRAVVTCFSAGCCGRHGNRPVRYCKRCHSNHHSNEVGAAAETHLYQTSPPPINTRECGAEELVCAVEAVISLLKEAEFHAEQREHELNRRRQLGLSSSHHSLDNADFDNKDDDKHDQRLLSQFGIWFLVSLCTPSENTPTESLARLVAMVFQWFHSTAYMMDDEVGSLVEKLKPQFVTKWLKTVCDVRFDVMVMCLLPKPMEFARVGGYWDKSCSTVTQLKEGLNRILCLIPYNVINQSVWECIMPEWLEAIRTEVPDNQLKEFREVLSKMFDIELCPLPFSMEEMFGFISCRFTGYPSSVQEQALLWLHVLSELDIMVPLQLLISMFSDGVNSVKELANQRKSRVSELAGNLASRRVSVASDPGRRVQHNMLSPFHSPFQSPFRSPLRSPFRSPFKNFGHPGGRTIDFDCEDDEMNLNCFILMFDLLLKQMELQDDGITMGLEHSLSKDIISIINNVFQAPWGGSHTCQKDEKAIECNLCQSSILCYQLACELLERLAPKEESRLVEPTDSLEDSLLSSRPEFIIGPEGEEEENPASKHGENPGNCTEPVEHAAVKNDTERKFCYQQLPVTLRLIYTIFQEMAKFEEPDILFNMLNCLKILCLHGECLYIARKDHPQFLAYIQDHMLIASLWRVVKSEFSQLSSLAVPLLLHALSLPHGADIFWTIINGNFNSKDWKMRFEAVEKVAVICRFLDIHSVTKNHLLKYSLAHAFCCFLTAVEDVNPAVATRAGLLLDTIKRPALQGLCLCLDFQFDTVVKDRPTILSKLLLLHFLKQDIPALSWEFFVNRFETLSLEAQLHLDCNKEFPFPTTITAVRTNVANLSDAALWKIKRARFARNRQKSVRSLRDSVKGPVESKRALSLPETLTSKIRQQSPENDNTIKDLLPEDAGIDHQTVHQLITVLMKFMAKDESSAESDISSAKAFNTVKRHLYVLLGYDQQEGCFMIAPQKMRLSTCFNAFIAGIAQVMDYNINLGKHLLPLVVQVLKYCSCPQLRHYFQQPPRCSLWSLKPHIRQMWLKALLVILYKYPYRDCDISKILLHLIHITVNTLNAQYHSCKPHATAGPLYSDNSNISRYSEKEKGEIELAEYRETGALQDSLLHCVREESIPKKKLRSFKQKSLDIGNADSLLFTLDEHRRKSCIDRCDIEKPPTQAAYIAQRPNDPGRSRQNSATRPDNSEIPENPAMEGFPDARRPVIPEVRLNCMETFEVKVDSPVKPAPKEDLDLIDLSSDSTSGPEKHSILSTSDSDSLVFEPLPPLRIVESDEEEETMNQGDDGPSGKNAASSPSVPSHPSVLSLSTAPLVQVSVEDCSKDFSSKDSGNNQSAGNTDSALITLEDPMDAEGSSKPEELPEFSCGSPLTLKQKRDLLQKSFALPEMSLDDHPDPGTEGEKPGELMPSSGAKTVLLKVPEDAENPTESEKPDTSAESDTEQNPERKVEEDGAEESEFKIQIVPRQRKQRKIAVSAIQREYLDISFNILDKLGEQKDPDPSTKGLSTLEMPRESSSAPTLDAGVPETSSHSSISTQYRQMKRGSLGVLTMSQLMKRQLEHQSSAPHNISNWDTEQIQPGKRQCNVPTCLNPDLEGQPLRMRGATKSSLLSAPSIVSMFVPAPEEFTDEQPTVMTDKCHDCGAILEEYDEETLGLAIVVLSTFIHLSPDLAAPLLLDIMQSVGRLASSTTFSNQAESMMVPGNAAGVAKQFLRCIFHQLAPNGIFPQLFQSTIKDGTFLRTLASSLMDFNELSSIAALSQLLEGLNNKKNLPAGGAMIRCLENIATFMEALPMDSPSSLWTTISNQFQTFFAKLPCVLPLKCSLDSSLRIMICLLKIPSTNATRSLLEPFSKLLSFVIQNAVFTLAYLVELCGLCYRAFTKERDKFYLSRSVVLELLQALKLKSPLPDTNLLLLVQFICADAGTKLAESTILSKQMIASVPGCGTAAMECVRQYINEVLDFMADMHTLTKLKSHMKTCSQPLHEDTFGGHLKVGLAQIAAMDISRGNHRDNKAVIRYLPWLYHPPSAMQQGPKEFIECVSHIRLLSWLLLGSLTHNAVCPNASSPCLPIPLDAGSHVADHLIVILIGFPEQSKTSVLHMCSLFHAFIFAQLWTVYCEQSAVATNLQNQNEFSFTAILTALEFWSRVTPSILQLMAHNKVMVEMVCLHVISLMEALQECNSTIFVKLIPMWLPMIQSNIKHLSAGLQLRLQAIQNHVNHHSLRTLPGSGQSSAGLAALRKWLQCTQFKMAQVEIQSSEAASQFYPL

SEQ ID NO: 205959 - DNA, 7377 bp, Artificial Sequence
  derived and/or modified sequence
atgatcagcaccctggccaccttcccccccttcctgcacaaggacatcatcgagtacctgagcaccagcttcctgcccatggccatcctgggcagcagcagaagagagggcgtgcccgcccacgtgaacctgagcgccagcagcatgctgatgatcgccatgcagtacaccagcaaccccgtgtaccactgccagctgctggagtgcctgatgaagtacaagcaggaggtgtggaaggacctgctgtacgtgatcgcctacggccccagccaggtgaagccccccgccgtgcagatgctgttccactactggcccaacctgaagccccccggcgccatcagcgagtacagaggcctgcagtacaccgcctggaaccccatccactgccagcacatcgagtgccacaacgccatcaacaagcccgccgtgaagatgtgcatcgaccccagcctgagcgtggccctgggcgacaagcccccccccctgtacctgtgcgaggagtgcagcgagagaatcgccggcgaccacagcgagtggctgatcgacgtgctgctgccccaggccgagatcagcgccatctgccagaagaagaactgcagcagccacgtgagaagagccgtggtgacctgcttcagcgccggctgctgcggcagacacggcaacagacccgtgagatactgcaagagatgccacagcaaccaccacagcaacgaggtgggcgccgccgccgagacccacctgtaccagaccagccccccccccatcaacaccagagagtgcggcgccgaggagctggtgtgcgccgtggaggccgtgatcagcctgctgaaggaggccgagttccacgccgagcagagagagcacgagctgaacagaagaagacagctgggcctgagcagcagccaccacagcctggacaacgccgacttcgacaacaaggacgacgacaagcacgaccagagactgctgagccagttcggcatctggttcctggtgagcctgtgcacccccagcgagaacacccccaccgagagcctggccagactggtggccatggtgttccagtggttccacagcaccgcctacatgatggacgacgaggtgggcagcctggtggagaagctgaagccccagttcgtgaccaagtggctgaagaccgtgtgcgacgtgagattcgacgtgatggtgatgtgcctgctgcccaagcccatggagttcgccagagtgggcggctactgggacaagagctgcagcaccgtgacccagctgaaggagggcctgaacagaatcctgtgcctgatcccctacaacgtgatcaaccagagcgtgtgggagtgcatcatgcccgagtggctggaggccatcagaaccgaggtgcccgacaaccagctgaaggagttcagagaggtgctgagcaagatgttcgacatcgagctgtgccccctgcccttcagcatggaggagatgttcggcttcatcagctgcagattcaccggctaccccagcagcgtgcaggagcaggccctgctgtggctgcacgtgctgagcgagctggacatcatggtgcccctgcagctgctgatcagcatgttcagcgacggcgtgaacagcgtgaaggagctggccaaccagagaaagagcagagtgagcgagctggccggcaacctggccagcagaagagtgagcgtggccagcgaccccggcagaagagtgcagcacaacatgctgagccccttccacagccccttccagagccccttcagaagccccctgagaagccccttcagaagccccttcaagaacttcggccaccccggcggcagaaccatcgacttcgactgcgaggacgacgagatgaacctgaactgcttcatcctgatgttcgacctgctgctgaagcagatggagctgcaggacgacggcatcaccatgggcctggagcacagcctgagcaaggacatcatcagcatcatcaacaacgtgttccaggccccctggggcggcagccacacctgccagaaggacgagaaggccatcgagtgcaacctgtgccagagcagcatcctgtgctaccagctggcctgcgagctgctggagagactggcccccaaggaggagagcagactggtggagcccaccgacagcctggaggacagcctgctgagcagcagacccgagttcatcatcggccccgagggcgaggaggaggagaaccccgccagcaagcacggcgagaaccccggcaactgcaccgagcccgtggagcacgccgccgtgaagaacgacaccgagagaaagttctgctaccagcagctgcccgtgaccctgagactgatctacaccatcttccaggagatggccaagttcgaggagcccgacatcctgttcaacatgctgaactgcctgaagatcctgtgcctgcacggcgagtgcctgtacatcgccagaaaggaccacccccagttcctggcctacatccaggaccacatgctgatcgccagcctgtggagagtggtgaagagcgagttcagccagctgagcagcctggccgtgcccctgctgctgcacgccctgagcctgccccacggcgccgacatcttctggaccatcatcaacggcaacttcaacagcaaggactggaagatgagattcgaggccgtggagaaggtggccgtgatctgcagattcctggacatccacagcgtgaccaagaaccacctgctgaagtacagcctggcccacgccttctgctgcttcctgaccgccgtggaggacgtgaaccccgccgtggccaccagagccggcctgctgctggacaccatcaagagacccgccctgcagggcctgtgcctgtgcctggacttccagttcgacaccgtggtgaaggacagacccaccatcctgagcaagctgctgctgctgcacttcctgaagcaggacatccccgccctgagctgggagttcttcgtgaacagattcgagaccctgagcctggaggcccagctgcacctggactgcaacaaggagttccccttccccaccaccatcaccgccgtgagaaccaacgtggccaacctgagcgacgccgccctgtggaagatcaagagagccagattcgccagaaacagacagaagagcgtgagaagcctgagagacagcgtgaagggccccgtggagagcaagagagccctgagcctgcccgagaccctgaccagcaagatcagacagcagagccccgagaacgacaacaccatcaaggacctgctgcccgaggacgccggcatcgaccaccagaccgtgcaccagctgatcaccgtgctgatgaagttcatggccaaggacgagagcagcgccgagagcgacatcagcagcgccaaggccttcaacaccgtgaagagacacctgtacgtgctgctgggctacgaccagcaggagggctgcttcatgatcgccccccagaagatgagactgagcacctgcttcaacgccttcatcgccggcatcgcccaggtgatggactacaacatcaacctgggcaagcacctgctgcccctggtggtgcaggtgctgaagtactgcagctgcccccagctgagacactacttccagcagccccccagatgcagcctgtggagcctgaagccccacatcagacagatgtggctgaaggccctgctggtgatcctgtacaagtacccctacagagactgcgacatcagcaagatcctgctgcacctgatccacatcaccgtgaacaccctgaacgcccagtaccacagctgcaagccccacgccaccgccggccccctgtacagcgacaacagcaacatcagcagatacagcgagaaggagaagggcgagatcgagctggccgagtacagagagaccggcgccctgcaggacagcctgctgcactgcgtgagagaggagagcatccccaagaagaagctgagaagcttcaagcagaagagcctggacatcggcaacgccgacagcctgctgttcaccctggacgagcacagaagaaagagctgcatcgacagatgcgacatcgagaagccccccacccaggccgcctacatcgcccagagacccaacgaccccggcagaagcagacagaacagcgccaccagacccgacaacagcgagatccccgagaaccccgccatggagggcttccccgacgccagaagacccgtgatccccgaggtgagactgaactgcatggagaccttcgaggtgaaggtggacagccccgtgaagcccgcccccaaggaggacctggacctgatcgacctgagcagcgacagcaccagcggccccgagaagcacagcatcctgagcaccagcgacagcgacagcctggtgttcgagcccctgccccccctgagaatcgtggagagcgacgaggaggaggagaccatgaaccagggcgacgacggccccagcggcaagaacgccgccagcagccccagcgtgcccagccaccccagcgtgctgagcctgagcaccgcccccctggtgcaggtgagcgtggaggactgcagcaaggacttcagcagcaaggacagcggcaacaaccagagcgccggcaacaccgacagcgccctgatcaccctggaggaccccatggacgccgagggcagcagcaagcccgaggagctgcccgagttcagctgcggcagccccctgaccctgaagcagaagagagacctgctgcagaagagcttcgccctgcccgagatgagcctggacgaccaccccgaccccggcaccgagggcgagaagcccggcgagctgatgcccagcagcggcgccaagaccgtgctgctgaaggtgcccgaggacgccgagaaccccaccgagagcgagaagcccgacaccagcgccgagagcgacaccgagcagaaccccgagagaaaggtggaggaggacggcgccgaggagagcgagttcaagatccagatcgtgcccagacagagaaagcagagaaagatcgccgtgagcgccatccagagagagtacctggacatcagcttcaacatcctggacaagctgggcgagcagaaggaccccgaccccagcaccaagggcctgagcaccctggagatgcccagagagagcagcagcgcccccaccctggacgccggcgtgcccgagaccagcagccacagcagcatcagcacccagtacagacagatgaagagaggcagcctgggcgtgctgaccatgagccagctgatgaagagacagctggagcaccagagcagcgccccccacaacatcagcaactgggacaccgagcagatccagcccggcaagagacagtgcaacgtgcccacctgcctgaaccccgacctggagggccagcccctgagaatgagaggcgccaccaagagcagcctgctgagcgcccccagcatcgtgagcatgttcgtgcccgcccccgaggagttcaccgacgagcagcccaccgtgatgaccgacaagtgccacgactgcggcgccatcctggaggagtacgacgaggagaccctgggcctggccatcgtggtgctgagcaccttcatccacctgagccccgacctggccgcccccctgctgctggacatcatgcagagcgtgggcagactggccagcagcaccaccttcagcaaccaggccgagagcatgatggtgcccggcaacgccgccggcgtggccaagcagttcctgagatgcatcttccaccagctggcccccaacggcatcttcccccagctgttccagagcaccatcaaggacggcaccttcctgagaaccctggccagcagcctgatggacttcaacgagctgagcagcatcgccgccctgagccagctgctggagggcctgaacaacaagaagaacctgcccgccggcggcgccatgatcagatgcctggagaacatcgccaccttcatggaggccctgcccatggacagccccagcagcctgtggaccaccatcagcaaccagttccagaccttcttcgccaagctgccctgcgtgctgcccctgaagtgcagcctggacagcagcctgagaatcatgatctgcctgctgaagatccccagcaccaacgccaccagaagcctgctggagcccttcagcaagctgctgagcttcgtgatccagaacgccgtgttcaccctggcctacctggtggagctgtgcggcctgtgctacagagccttcaccaaggagagagacaagttctacctgagcagaagcgtggtgctggagctgctgcaggccctgaagctgaagagccccctgcccgacaccaacctgctgctgctggtgcagttcatctgcgccgacgccggcaccaagctggccgagagcaccatcctgagcaagcagatgatcgccagcgtgcccggctgcggcaccgccgccatggagtgcgtgagacagtacatcaacgaggtgctggacttcatggccgacatgcacaccctgaccaagctgaagagccacatgaagacctgcagccagcccctgcacgaggacaccttcggcggccacctgaaggtgggcctggcccagatcgccgccatggacatcagcagaggcaaccacagagacaacaaggccgtgatcagatacctgccctggctgtaccacccccccagcgccatgcagcagggccccaaggagttcatcgagtgcgtgagccacatcagactgctgagctggctgctgctgggcagcctgacccacaacgccgtgtgccccaacgccagcagcccctgcctgcccatccccctggacgccggcagccacgtggccgaccacctgatcgtgatcctgatcggcttccccgagcagagcaagaccagcgtgctgcacatgtgcagcctgttccacgccttcatcttcgcccagctgtggaccgtgtactgcgagcagagcgccgtggccaccaacctgcagaaccagaacgagttcagcttcaccgccatcctgaccgccctggagttctggagcagagtgacccccagcatcctgcagctgatggcccacaacaaggtgatggtggagatggtgtgcctgcacgtgatcagcctgatggaggccctgcaggagtgcaacagcaccatcttcgtgaagctgatccccatgtggctgcccatgatccagagcaacatcaagcacctgagcgccggcctgcagctgagactgcaggccatccagaaccacgtgaaccaccacagcctgagaaccctgcccggcagcggccagagcagcgccggcctggccgccctgagaaagtggctgcagtgcacccagttcaagatggcccaggtggagatccagagcagcgaggccgccagccagttctaccccctgtag

SEQ ID NO: 205960 - DNA, 7377 bp, Artificial Sequence
  derived and/or modified sequence
atgatctccactctggctacttttccacccttcctgcataaggacattattgagtatctgtcgaccagctttctgcccatggccatattaggatctagtcggcgcgagggcgtcccagcgcacgtgaatctaagcgcgtcttctatgctgatgatcgctatgcaatatacttccaaccctgtttaccactgccagcttctcgagtgcctgatgaagtacaagcaggaggtatggaaagaccttctctatgtgattgcttacgggccctcacaggttaagccccccgccgtgcagatgctcttccattattggccaaacctcaaaccccctggggccatctccgaatatagaggcctgcagtacaccgcctggaatccgattcattgccagcacattgagtgtcacaacgccatcaacaaaccggcagtgaaaatgtgcatcgatcctagtctcagtgtcgccctgggggacaaacctcccccactgtatctgtgcgaagagtgctccgagcgcatagccggcgatcacagcgagtggcttattgatgtgctccttccccaggctgaaatatccgcaatttgtcaaaaaaaaaactgcagcagtcatgtgagaagagccgtggttacatgtttttcagcagggtgctgtgggcgccatggcaaccgccctgtccggtactgtaagcgatgccattccaaccatcactcgaacgaggtgggagcagctgccgagactcatttataccagacctccccacccccgattaacacgcgggagtgcggagctgaggagctggtatgcgcggtggaagctgtcatcagtctactgaaggaggccgagtttcacgctgagcagagggagcatgagctgaacagaaggcggcagctcggcctgagtagtagccaccactccctggacaacgccgacttcgataacaaagacgacgacaaacacgatcagagactgcttagccaattcgggatttggtttttagtgagcctctgcacccccagtgagaatacccccaccgagagcttagcaaggctggtcgctatggtctttcagtggttccatagcacagcctatatgatggatgatgaagttggctcgttggtcgagaaattaaaacctcagtttgtgaccaagtggctgaaaacagtctgcgacgtacgatttgacgtcatggtgatgtgtctgctgcctaaacctatggagtttgccagagtgggaggatactgggacaagagttgctcaacagttacacagctgaaggagggacttaataggatcctatgccttatcccgtacaacgtgatcaaccaaagcgtgtgggaatgtattatgcccgagtggctagaggccatacgaaccgaggtccccgataatcaactaaaggaattccgagaggtgctgagcaagatgttcgacattgagctttgtccactccccttctctatggaagagatgtttgggttcatcagttgccgctttaccggttatccttccagcgtgcaggagcaagctctgctgtggctgcacgtgttatctgaattggacatcatggtacctctgcagctgctgatctcgatgtttagcgatggtgtcaattctgttaaggaactggctaatcaaaggaagtcgagggtgtcagagcttgccggcaaccttgcgtcccgacgcgtgtctgttgcctcggatccaggccgacgggtgcaacataacatgctatcacctttccactccccgtttcagtcaccgtttaggtcacctctcagaagcccattccgttcaccattcaaaaacttcggacacccaggaggccggactatagacttcgattgcgaggatgacgagatgaacttgaactgcttcattcttatgttcgacctgttgctgaaacaaatggagctgcaggacgacggcattaccatgggcctagagcattcactttccaaggacatcatttccattattaataatgttttccaggcaccctggggggggtcccacacctgccagaaagatgaaaaggccatcgagtgtaacctgtgtcagagcagcattctgtgctatcaattagcctgtgaactcttggaacggctggcccccaaagaagagagtcgcctggtggaaccgactgactcactggaagattctcttctttcatcccgcccagaattcattatcgggcccgagggggaggaggaggagaatcctgcctcaaagcacggtgaaaaccctggaaactgcacagaacccgtagaacacgctgccgtaaagaatgacacggagcgtaagttttgctaccagcagctgccggtgactttgaggttaatctacacaatttttcaggaaatggcgaaatttgaggagcccgacatcctgtttaacatgctgaactgtctgaaaattctgtgtttgcacggcgagtgcctgtacatcgctagaaaggaccatcctcagttcttagcctatattcaagatcatatgcttatagcgtcactgtggcgggtggtaaaatccgaatttagccagctgagtagcctcgccgtacccttgttactgcatgccctgtctttgccccacggtgctgacatcttttggaccattatcaatggaaacttcaacagcaaggactggaagatgaggttcgaggcagttgaaaaggtggcggtgatttgtcgctttcttgacatacattcggtaactaagaaccatctgttgaaatacagcctggcacatgcattctgttgcttcctgacagcagtggaggatgtcaatccggctgtggccactcgtgctggtttactgctagacaccatcaaaaggcctgctctccagggcctgtgcctctgtctcgactttcagtttgatacagtggttaaggaccgtcctaccatcttgtccaagctgctgcttttgcacttcctgaagcaggacattccagctttgagctgggagttctttgtgaataggttcgagacactaagcctagaggcccaactccaccttgattgtaacaaagaattccctttccccactactataactgctgtccgcactaatgtggcaaacctgtctgacgccgcgctttggaaaattaaaagggccaggtttgcgagaaataggcagaaaagcgtgaggtccctgagggattccgtgaaaggtcccgtggagtctaaaagagcactgagtttaccagagacgttgaccagcaaaatccggcagcagtctcccgagaatgataataccattaaggatttgctgccggaggatgccggcattgatcatcagaccgttcaccagctgattaccgtgctcatgaaatttatggctaaggacgagtcaagtgctgaatctgacataagctccgctaaagcattcaacaccgtaaagcgtcacctctatgtgttgcttggatacgatcagcaggaaggatgctttatgatcgctccacagaagatgagactgtcaacctgtttcaacgcgttcatcgctggcatcgctcaggtcatggattataacatcaaccttggtaaacatctgcttccattagtggtgcaggtgttaaaatattgttcttgtcctcaacttagacactatttccagcagcctcctcggtgtagcctttggagcctgaagcctcacataagacaaatgtggttaaaagctttattggtgattttgtataaatacccatatagggattgcgatatcagtaaaatcctgctccatctcattcatattacggtgaatactttgaatgcccagtatcatagttgcaagccacacgccaccgccgggcctctgtactcggataatagcaacatctcccgatattctgaaaaggagaagggagagatagaactagcggaatatcgagaaacaggcgcgctccaggactcactgctgcactgcgtccgcgaggagagtattcccaagaagaagctgcggtcattcaaacagaagtctttagacatcgggaatgcagatagtctgctgttcacactggacgaacataggagaaagagctgcattgatagatgtgatatcgagaagccgccaacccaggctgcttatattgctcaacgtcctaacgatcctggacggtccagacagaattccgcaacgcggcccgacaattcagagattcctgagaatcctgcgatggaagggtttccggatgctcgacggccagtgattccggaggtgcgcctgaattgcatggaaacctttgaggtgaaagtagactcaccggtcaaaccagctcccaaagaggatctcgacctgattgatttatccagcgattccaccagcggacctgagaagcactccatactttccacgtcagattctgatagcttggtgttcgagccattgccaccactgaggatcgttgagagtgatgaggaggaagagacaatgaatcagggcgacgacggtccgagtggcaagaatgccgcctcatcccctagcgtccctagccatccgtccgtgttatcattaagtacagctccactcgtccaggtgtctgtggaggactgttccaaggacttctcttcaaaagactccggcaacaatcaaagcgctgggaatacagattctgcattgattaccctcgaagaccctatggacgccgagggatcttcaaaacccgaagaactccctgagttctcttgtggaagcccactgacattgaaacagaaaagagacttgttacagaaatcctttgccctgccagaaatgtcactggatgaccacccagatccaggcactgaaggcgaaaaacccggggagttaatgcccagttcaggcgctaagacagtgctcctgaaggtccctgaagacgccgagaatcccactgagtcagaaaagcccgacaccagcgccgaaagtgatacagagcagaatcccgagaggaaggtggaagaggatggagctgaagagagtgagtttaaaattcagattgtgcctcgacagaggaagcagaggaaaattgcagtgtcagcaatacagcgtgagtatctggacattagttttaacattctggacaaactcggagaacagaaggatccagaccctagtacgaagggtctatcaactctggaaatgcctcgcgagtcttcatccgcccctacactggacgcaggagtacccgagaccagctcccattcttcaatttccactcagtaccggcagatgaagcgcgggtctcttggcgtgttaactatgagccagctaatgaagagacagctagaacatcagagtagtgctccacacaacatcagtaattgggacactgaacagattcagccaggcaagcgacagtgcaacgttcccacatgcctaaaccccgatctggaaggccagcccctgcggatgcgaggagcaacgaaatcatccctcctgagcgcaccgtccattgtctcaatgttcgtccctgcacctgaggaatttactgacgaacagccgacagtgatgacagacaaatgtcacgactgcggagccatccttgaggagtacgatgaggagactttgggactagccatcgttgtactgtctacatttatacacttatcccccgacctggcggcgccactgctgctcgacatcatgcagagcgttggcagactagcttcctccacaacattctcaaatcaagccgagagcatgatggtccctggtaacgctgcaggggttgccaaacaatttttacgctgtatttttcaccaactggcgcccaatgggatcttcccccagctcttccagagtacaattaaggatggtactttcctgcgtacgcttgcttcaagccttatggactttaacgaactttcatctattgcagcactgtctcagctactggaaggattgaacaacaaaaagaacctgcccgccgggggagctatgattcggtgcctcgagaacatcgcaacctttatggaagccttgccaatggattctccttcttctctctggactaccatttcaaatcagtttcagacattttttgcaaaactgccatgtgtgctcccccttaaatgcagtcttgattcatccctgcgtataatgatttgcctcctgaagatcccatccacaaacgcgacacgaagcctgctggagcctttctcgaagctgctgtccttcgtgatccagaacgctgtgttcactctcgcttatctagttgaactgtgcggactttgctacagagccttcactaaagagagagacaaattttatttgtccagatccgtcgtgttagaactgctccaagctttaaagttgaaaagtccgttgccagacaccaatctgttactcctggttcagtttatatgcgcagatgcagggaccaaacttgctgaatccacgattttgtctaaacagatgatcgcttcggtccctgggtgcggtaccgcggctatggagtgtgtgaggcagtatatcaacgaggtactcgactttatggcagacatgcatactttaacaaaactgaagagccacatgaaaacttgttcgcagccattgcacgaggatacatttggcggccatttgaaagttggcttagcacaaatagctgccatggatatatcgcgtggcaaccaccgcgacaacaaggcagttatccgatatttaccatggctgtaccacccccccagcgcaatgcagcagggccctaaggaatttattgagtgcgtgagccacatccggctgctctcttggctgctgctgggttctcttacacacaacgccgtgtgtcccaacgccagctctccctgcctgcccattcctctagacgccggatcgcatgtagctgaccatctgatcgtaatcctgataggttttccggaacagagcaagacaagcgtgctgcacatgtgcagtctgtttcatgctttcatttttgcccagctatggacggtatactgcgagcagtccgcagtggccactaacctgcagaatcagaacgagttctcctttactgcaatcctgacagcacttgagttctggagccgtgtgaccccatcaatcctgcagctcatggcccataataaagttatggtagaaatggtgtgtctgcacgttatatctttaatggaagcattgcaggagtgtaacagcactattttcgttaagctcattccaatgtggcttccaatgatccagtcaaatataaaacacctctctgccggcttgcagttgcggctccaggcaattcaaaatcatgtgaaccaccactctttgcggaccctacccggatccggccagtccagcgccggacttgccgcactgcgtaaatggcttcagtgtactcagttcaaaatggcccaagtcgagatccagagcagcgaagctgcaagccagttttaccctctgtag

SEQ ID NO: 205961 - DNA, 7377 bp, Artificial Sequence
  derived and/or modified sequence
atgatcagcaccctggccaccttcccccccttcctgcacaaggacatcatcgagtacctgagcaccagcttcctgcccatggccatcctgggcagcagccggcgggagggcgtgcctgcccacgtgaacctgagcgccagctccatgctgatgattgccatgcagtacaccagcaaccctgtgtaccactgccagctgctggagtgcctgatgaagtacaagcaggaggtgtggaaggacctgctgtatgtgattgcctacggccccagccaggtgaagcccccagctgtgcagatgctgttccactactggcccaacctgaagcccccaggggccatcagcgagtaccggggcctgcagtacacagcctggaaccccatccactgccagcacatcgagtgccacaatgccatcaacaagccagctgtgaagatgtgcatcgaccccagcctgtctgtggccctgggggacaagcccccacccctgtacctgtgtgaagaatgttctgaaagaattgctggggaccacagcgagtggctgattgatgtgctgctgccccaggccgagatcagcgccatctgccagaagaagaactgcagcagccacgtgcggcgggctgtggtgacctgcttctctgctggctgctgcggcagacatggcaacagacctgtgcgctactgcaagcgctgccacagcaaccaccacagcaatgaggtgggcgctgctgctgagacccacctgtaccagaccagccccccacccatcaacaccagagaatgtggggctgaggagctggtgtgtgctgtggaggccgtcatcagcctgctgaaggaggccgagttccacgccgagcagcgggagcacgagctgaacagaagacggcagctgggcctgagcagcagccaccacagcctggacaatgctgactttgacaacaaggatgatgacaagcatgaccagaggctgctgagccagtttggcatctggttcctggtgtccctgtgcacccccagcgagaacacccccacagagagcctggcccggctggtggccatggtgttccagtggttccacagcacagcctacatgatggatgatgaggtgggcagcctggtggagaagctgaagccccagtttgtgaccaagtggctgaagacagtgtgtgatgtgcgctttgatgtgatggtgatgtgcctgctgcccaagcccatggagtttgcccgggtgggcggctactgggacaagagctgcagcacagtgacccagctgaaggagggcctgaaccgcatcctgtgcctgatcccctacaacgtcatcaaccagagcgtgtgggagtgcatcatgcctgagtggctggaggccatcagaacagaggtgcctgacaaccagctgaaggagttccgggaggtgctgagcaagatgtttgatattgagctgtgccccctgcccttctccatggaggagatgtttggcttcatcagctgccgcttcaccggctaccccagctctgtgcaggagcaggccctgctgtggctgcacgtgctgtctgagctggacatcatggtgcccctgcagctgctgatctccatgttcagtgatggagtgaacagcgtgaaggagctggccaaccagaggaagagccgggtgtctgagctggccggcaacctggccagcagaagagtgtctgtggccagtgaccctggaagaagagtgcagcacaacatgctgagccccttccacagccccttccagagccccttccgcagccccctgcggagccccttccgcagccccttcaagaactttggccaccctgggggccgcaccatcgactttgactgtgaagatgatgagatgaacctgaactgcttcatcctgatgtttgacctgctgctgaagcagatggagctgcaggatgatggcatcaccatgggcctggagcacagcctgagcaaggacatcatcagcatcatcaacaacgtgttccaggccccctggggcggcagccacacctgccagaaggatgagaaggccatcgagtgcaacctgtgccagagcagcatcctgtgctaccagctggcctgtgagctgctggagcggctggcccccaaggaggagagccggctggtggagcccacagacagcctggaggacagcctgctgagcagcaggcctgagttcatcatcggccctgagggggaggaggaggagaacccagccagcaagcatggagaaaatcctggcaactgcacagagcctgtggagcacgccgctgtgaagaatgacacagagaggaagttctgctaccagcagctgcctgtgaccctgcggctcatctacaccatcttccaggagatggccaagtttgaggagccagacatcctcttcaacatgctgaactgcctgaagatcctgtgcctgcacggggagtgcctgtacatcgccaggaaggaccacccccagttcctggcctacatccaggaccacatgctgattgccagcctgtggagggtggtgaagtctgagttcagccagctgagcagcctggccgtgcccctgctgctgcacgccctgagcctgccccacggggctgacatcttctggaccatcatcaatggaaacttcaacagcaaggactggaagatgagatttgaggccgtggagaaggtggccgtcatctgccgcttcctggacatccacagcgtgaccaagaaccacctgctgaagtacagcctggcccacgccttctgctgcttcctgacagctgtggaggatgtgaacccagctgtggccacccgggccggcctgctgctggacaccatcaagaggcctgccctgcagggcctgtgcctgtgcctggacttccagtttgacacagtggtgaaggaccggcccaccatcctgagcaagctgctgctgctgcacttcctgaagcaggacatcccagccctgtcctgggagttctttgtgaacagatttgagaccctgagcctggaggcccagctgcacctggactgcaacaaggagttccccttccccaccaccatcacagctgtgaggaccaacgtggccaacctgagtgatgctgccctgtggaagatcaagagggccaggtttgccaggaaccggcagaagtctgtgcgcagcctgcgggacagcgtgaagggccctgtggagagcaagagggccctgagcctgcctgagaccctgaccagcaagatccggcagcagagcccagaaaatgacaacaccatcaaggacctgctgcctgaagatgctggcatcgaccaccagacagtgcaccagctgatcaccgtgctgatgaagttcatggccaaggatgagagcagcgctgagagtgacatcagcagcgccaaggccttcaacacagtgaagaggcacctgtatgtgctgctgggctatgaccagcaggagggctgcttcatgattgccccccagaagatgaggctgagcacctgcttcaatgccttcatcgccggcatcgcccaggtgatggactacaacatcaacctgggcaagcacctgctgcccctggtggtgcaggtgctgaagtactgcagctgcccccagctgcggcactacttccagcagcccccacgctgcagcctgtggagcctgaagccccacatccggcagatgtggctgaaggccctgctggtgatcctgtacaagtacccctacagagactgtgacatcagcaagatcctgctgcacctgatccacatcaccgtgaacaccctgaatgcccagtaccacagctgcaagccccacgccacagctggccccctgtacagcgacaacagcaacatcagccgctacagcgagaaggagaagggggagattgagctggccgagtaccgggagaccggggccctgcaggacagcctgctgcactgtgtgcgggaggagagcatccccaagaagaagctgcgctccttcaagcagaagagcctggacattggaaatgctgacagcctgctcttcaccctggatgagcacaggaggaagagctgcatcgacagatgtgacatcgagaagccacccacccaggccgcctacatcgcccagaggcccaatgaccccggccgcagccggcagaacagcgccaccaggccagacaacagcgagatccctgagaacccagccatggagggcttcccagatgcccggcggcctgtgattcctgaggtgcggctgaactgcatggagacctttgaggtgaaggtggacagccctgtgaagccagcccccaaggaggacctggacctgattgacctgagcagtgacagcaccagcggccctgagaagcacagcatcctgagcaccagtgacagcgacagcctggtgtttgagcccctgccccccctgagaattgtggagagtgatgaggaggaggagaccatgaaccagggagatgatggccccagcggcaagaatgctgccagcagccccagcgtgcccagccaccccagcgtgctgagcctgagcacagcccccctggtgcaggtgtctgtggaggactgcagcaaggacttcagcagcaaggacagcggcaacaaccagagcgctggcaacacagattctgccctgatcaccctggaggaccccatggatgctgagggcagcagcaagccagaggagctgcctgagttcagctgtggcagccccctgaccctgaagcagaagagggacctgctgcagaagagctttgccctgcctgagatgagcctggatgaccacccagaccccggcacagaaggagagaagccaggagagctgatgcccagcagcggggccaagacagtgctgctgaaggtgcctgaagatgctgagaaccccacagaaagtgagaagccagacaccagcgctgagagtgacacagagcagaaccctgagaggaaggtggaggaggatggagctgaggagagcgagttcaagatccagatcgtgccccggcagaggaagcagaggaagattgctgtgtctgccatccagcgggagtacctggacatctccttcaacatcctggacaagctgggggagcagaaggaccctgaccccagcaccaagggcctgagcaccctggagatgccccgggagagcagcagcgcccccaccctggatgctggggtgcctgagaccagcagccacagcagcatcagcacccagtaccggcagatgaagaggggcagcctgggcgtgctgaccatgagccagctgatgaagaggcagctggagcaccagagcagcgccccccacaacatcagcaactgggacacagagcagatccagcccgggaagaggcagtgcaatgtgcccacctgcctgaacccagacctggagggccagcccctgaggatgagaggagccaccaagagcagcctgctgagcgcccccagcatcgtgtccatgtttgtgcctgcccctgaggagttcacagatgagcagcccaccgtgatgacagacaagtgccacgactgtggggccatcctggaggagtatgatgaggagaccctgggcctggccatcgtggtgctgagcaccttcatccacctgagcccagacctggccgcccccctgctgctggacatcatgcagagcgtgggccgcctggccagcagcaccaccttcagcaaccaggccgagagcatgatggtgcctggaaatgctgctggggtggccaagcagttcctgcgctgcatcttccaccagctggccccaaatggcatcttcccccagctgttccagagcaccatcaaggatggcaccttcctgcggaccctggccagcagcctgatggacttcaatgagctgagcagcattgctgccctgagccagctgctggagggcctgaacaacaagaagaacctgcctgctgggggcgccatgatccgctgcctggagaacatcgccaccttcatggaggccctgcccatggacagccccagcagcctgtggaccaccatcagcaaccagttccagaccttctttgccaagctgccctgtgtgctgcccctgaagtgcagcctggacagcagcctgcgcatcatgatctgcctgctgaagatccccagcaccaatgccaccaggagcctgctggagcccttcagcaagctgctgagctttgtgatccagaatgctgtgttcaccctggcctacctggtggagctgtgtggcctgtgctaccgggccttcaccaaggagcgggacaagttctacctgagccgctctgtggtgctggagctgctgcaggccctgaagctgaagagccccctgcctgacaccaacctgctgctgctggtgcagttcatctgtgctgatgctggcaccaagctggccgagagcaccatcctgagcaagcagatgattgcctctgtgcccggctgcggcacagctgccatggagtgtgtgcggcagtacatcaatgaggtgctggacttcatggctgacatgcacaccctgaccaagctgaagagccacatgaagacctgcagccagcccctgcacgaggacaccttcggcggccacctgaaggtgggcctggcccagattgctgccatggacatcagccggggcaaccaccgggacaacaaggccgtcatccgctacctgccctggctgtaccaccccccatctgccatgcagcagggccccaaggagttcattgaatgtgtgagccacatccggctgctgtcctggctgctgctgggcagcctgacccacaatgctgtgtgccccaatgccagcagcccctgcctgcccatccccctggatgctggcagccacgtggccgaccacctgattgtcatcctgattggcttccctgagcagagcaagacctctgtgctgcacatgtgcagcctcttccacgccttcatctttgcccagctgtggacagtgtactgtgagcagagcgctgtggccaccaacctgcagaaccagaatgagttctccttcaccgccatcctgacagccctggagttctggagccgggtgacccccagcatcctgcagctgatggcccacaacaaggtgatggtggagatggtgtgcctgcacgtgatcagcctgatggaggccctgcaggagtgcaacagcaccatctttgtgaagctgatccccatgtggctgcccatgatccagagcaacatcaagcacctgtctgctggcctgcagctgcggctgcaggccatccagaaccacgtgaaccaccacagcctgcggaccctgcccggcagcggccagagcagcgctggcctggccgccctgaggaagtggctgcagtgcacccagttcaagatggcccaggtggagatccagagcagcgaggccgccagccagttctaccccctgtag

SEQ ID NO: 205962 - DNA, 7377 bp, Artificial Sequence
  derived and/or modified sequence
atgatcagcaccctggccaccttcccccccttcctgcacaaggacatcatcgagtatctgtccacttcctttctgcccatggctatcctgggtagttcgagacgtgagggggtccccgcccacgtcaacctctccgcatctagcatgctaatgatcgccatgcagtacactagtaatcctgtgtatcactgccagttgcttgagtgccttatgaagtacaagcaggaggtgtggaaagacctgctgtatgtcatcgcctacggccccagtcaagttaagccaccagccgtgcagatgctttttcattactggcccaacctcaagcccccaggagctatcagcgagtatcgggggctgcagtacaccgcttggaaccctattcactgccagcacatcgaatgccacaatgccatcaataagcctgccgtgaaaatgtgtatcgatcccagtctatctgtggccttgggagacaaacccccccctctgtatctgtgcgaagagtgctcagaacggatcgctggagaccacagtgagtggttgatcgatgtgctcctgccccaggcggagatctctgctatttgtcagaagaagaactgtagttcacacgtgcggcgcgcggtcgtgacctgctttagcgccggctgctgcggtcggcatggaaaccggccagtgaggtactgtaagagatgccactcaaaccatcatagtaacgaggtcggcgcagccgccgagacacacttgtaccagacttccccccctccgattaacacaagggagtgcggagctgaagaactagtttgtgccgtcgaagcggtcatctctctcttaaaagaagccgaattccacgctgagcagcgggagcacgaactcaatcgtcgtcgccagttgggccttagtagttcacaccatagtctggataacgccgatttcgacaacaaggatgatgacaagcacgaccaaaggttattgagccaatttggcatctggtttcttgtgagcctctgcactcccagtgagaacaccccaacagagtccctggcccggctagtggccatggtgttccagtggttccactctaccgcttatatgatggatgacgaagtcggttccttagtggaaaaactgaagccccagtttgttacaaaatggctgaagacggtctgcgatgtacgcttcgatgtaatggtcatgtgtctgttaccaaaacctatggaattcgctcgcgtggggggctactgggataagtcctgttctaccgtaacacagctcaaggagggtctgaatcgaattctgtgtcttatcccatacaacgtgatcaatcagtctgtgtgggagtgtataatgcctgaatggctggaagccatccggaccgaagttcctgacaaccagttaaaggagtttcgtgaggtactctctaagatgtttgacattgagctctgtcctttgcctttctcaatggaggaaatgttcggctttatttcatgtcggttcactgggtatccctcctccgttcaggagcaggccctgttatggcttcatgtcctgtctgagctggacatcatggtacccctgcagttgttaatttccatgttttcagacggcgtgaattctgtgaaagagttagcaaatcagcggaagagccgcgtgtcagaactggccggtaatttggcatctcgcagggttagtgtggcttcggatcctggcagaagagttcagcacaacatgctgtcgcccttccacagcccattccaaagccctttcaggagccctcttcggtccccttttcgatccccttttaaaaattttggtcaccccggcggtaggacaattgatttcgactgtgaggatgatgagatgaatctgaattgctttatcctgatgtttgatcttctgctcaagcagatggagcttcaagacgacggcattacgatgggtctggaacactccctctctaaggacatcatttccatcatcaacaatgttttccaagccccatggggtggatcccacacttgtcagaaagacgagaaggctatcgaatgtaacctttgccagtcctcaatcctgtgctaccagctggcgtgtgaactgttagaacgcttagcccctaaagaagaatcaagactggtagaacctacagactccctggaagattctctgcttagctccaggcctgagttcatcatagggcccgagggcgaggaagaggagaatcctgcttccaagcatggggaaaatcctgggaattgtacagagcccgtcgagcacgccgccgtgaagaatgatacggagcggaagttctgctaccagcagctgccagtgaccttgcgcctcatctatactatctttcaagagatggctaaattcgaagaacccgacattctgttcaacatgctgaactgtctgaagatcctctgtttgcatggcgaatgtctctacattgcacgtaaggaccatccccagtttttggcatacattcaagatcatatgctcatagcgagcctctggcgtgttgttaagtctgaattctcccagcttagctcattagctgtccctttgctgctgcatgccctttccctgcctcacggagccgacatcttttggaccatcattaacggtaattttaactccaaggactggaagatgcggtttgaggctgtggagaaggtcgccgttatatgcaggtttctcgatatacatagtgtgacaaaaaaccacctcctaaagtatagtctagcgcatgcattctgctgtttcctgactgcggtggaggacgtgaaccccgcggttgcaaccagggccggtctcctcctggacacaataaaaagaccggcattacagggattgtgcctttgtctggatttccagtttgacactgtcgtaaaagacagacccactatcttatctaaacttttgctcttgcacttcctgaaacaggatataccagcattgtcgtgggaattcttcgttaatagattcgagactctgagcctggaagcccagcttcacctcgattgcaataaagaattccctttcccaacaacaatcacagctgtccggaccaacgttgcaaatttgtcagacgccgcgctttggaagatcaagcgagcaagattcgctaggaatagacagaaatctgtgcgcagtctgagagactcagtgaagggcccagtggaaagtaagagagccctgagcctgcccgagaccctgacctcaaagatccgacagcaaagcccggaaaacgataacacgataaaagatctgctgcctgaggacgcgggcatagatcatcagactgtccaccagctcattactgtactaatgaagttcatggccaaagacgagagcagcgccgaaagcgatatttcttcagcgaaagcgttcaacacggtgaagcgacacctgtatgtgttactcggatacgatcagcaagagggctgtttcatgattgctccccagaaaatgcgcctaagtacgtgctttaacgcctttatcgctgggattgcacaggttatggattacaatataaacctggggaagcacctgctgccactggtggtgcaggtgcttaaatattgttcatgtccgcaactgcgtcactattttcagcaacccccgcggtgttctctgtggagcctgaaacctcatatacgtcagatgtggctcaaggcattgctcgtcatcctttataagtacccttatcgtgattgcgacatctctaagatcttgcttcatctgatccacatcaccgtgaatacgctgaatgcacagtaccactcctgcaaaccgcacgccacagctggacctctctatagtgataattctaacatcagccggtattctgagaaagaaaaaggagagatcgaattagccgagtaccgggagactggagccctgcaggatagcctcctgcattgtgtgcgggaggagagtatccctaagaagaagcttcgctccttcaaacaaaagtccctggatatcgggaacgccgattccctgctctttactcttgacgagcatcgccgaaagtcttgtatcgacagatgcgacatcgagaaacctccaactcaggctgcatatattgcccagcggccaaatgacccaggccgctccaggcagaacagcgccaccaggcctgataacagcgaaatccctgaaaaccctgctatggaaggcttccccgacgcacgacggccagtaatccctgaggtgaggctgaattgcatggaaacatttgaagtgaaggtcgattcacccgtgaagcctgcacccaaggaagatctggacctgatagacctgtcctccgattccacctccggaccagagaaacatagcatattgtcaacgtcagattctgacagtctagtgtttgagcctctgccgccccttcgcattgttgagagcgatgaggaagaagaaaccatgaatcaaggtgatgacggtccgtctggaaagaacgccgcatcatcaccaagcgtccctagccaccctagtgtgttaagcctctcgacagcacctcttgtccaggtcagcgtggaggactgtagcaaagattttagttcaaaggattctggaaacaaccaatcagctgggaatactgactccgccctcatcacgttagaggatccgatggacgccgaaggcagctccaagcccgaagagctacccgagttctcctgtggatccccactcaccctcaagcagaagagggaccttctgcaaaaatctttcgccttgcccgagatgagcctggatgaccaccctgaccccggcaccgaaggcgagaagcccggtgagctgatgcccagctctggagccaaaacagtgctgttaaaggttcccgaggatgcagaaaaccctaccgagagcgaaaagccagatacgagcgcagagtccgatactgagcagaaccctgagcgtaaggtggaggaagatggagcagaggagtcagagtttaaaatccagatagtgcctcgccaacgcaaacagaggaaaattgctgtgtccgcgattcagcgagagtaccttgatattagttttaatatacttgacaagctcggcgaacagaaagatccagatcctagtaccaaaggcctgagtaccctggagatgcccagagagagtagcagcgccccaacacttgacgcgggcgtgccagagaccagttcccatagttctattagtacccaataccggcagatgaaaaggggcagtctgggtgtcctgaccatgagccaactcatgaaaagacaactggagcaccagagcagcgctccacacaacattagcaactgggataccgaacagatccaacccgggaagcggcagtgtaacgtcccaacatgcttgaaccccgatctggaaggtcagcccctgaggatgcggggagccactaaatcttcgctgttatcggccccctccatagtcagcatgttcgtgcccgccccggaagaattcactgacgaacaacctactgtgatgaccgataagtgccacgactgcggggctatcttagaggagtacgacgaagagacactcggactggcaatagtggtgctgagtaccttcattcacctgtcaccggatcttgccgctccactgctgctggacatcatgcagagcgtggggagactggcttccagcaccacattctcgaaccaggctgagtcaatgatggtccccgggaatgccgccggagtcgccaaacagttcctgcgctgtatcttccatcagttagctcctaacggtatatttcctcagctatttcagtctaccatcaaggatggaacattccttcgcacacttgcctcttccctaatggactttaacgagttatcatcaatcgccgctttgtctcagcttctggaggggctgaacaacaagaaaaacctgccagccggaggggctatgattcgttgtctggagaacattgccacatttatggaggctctcccaatggatagcccctcctccctttggactactatctcaaatcagttccagaccttctttgctaaactcccatgcgtgctgcccctcaagtgctcactggatagctcactgcggataatgatctgcctcctgaagattccatctactaacgccacgcgcagtttgctggagccattttccaaactcctgtctttcgtgatccagaacgccgtgtttaccttagcatacctcgtggaactctgcgggctctgttaccgtgcgttcaccaaggaaagggataaattttaccttagccggtccgtggtcttggaattactgcaagccctgaagctcaagtccccactccctgacacaaatctgctgctgttagtgcagtttatctgcgcagatgcggggactaagctcgccgagtcaactatcctctccaagcagatgattgcaagcgtgccgggctgtggcaccgcagcgatggagtgtgtgaggcaatacattaacgaggtgctggacttcatggcagacatgcatactctaactaaactgaagagccacatgaaaacttgcagtcagccactgcacgaggacactttcggaggacacctgaaagttggactcgcccagatagctgccatggatatctccagagggaaccatagggataataaggccgtgattaggtatctgccatggttatatcatcccccgtctgctatgcaacaggggccaaaggaattcatcgagtgtgtgtctcacatccggctgctaagctggttgttgctgggctcccttacacacaacgccgtttgtccaaacgcgagctccccgtgtttacctatacctcttgacgccggaagtcacgtggctgatcacctgatcgtaattcttattggcttcccagagcaatccaagacaagcgttcttcacatgtgttcactgtttcatgcatttatttttgctcagctttggaccgtctattgcgaacagagcgctgtggccacaaacttgcagaatcaaaacgaatttagctttaccgccattctgacagctctagagttctggagcagggttaccccctcaattctgcaactgatggcccataataaggtgatggtcgagatggtgtgccttcacgtaatctccttaatggaagctctccaggaatgtaattcaaccatttttgtaaaattaattccaatgtggctcccgatgatccagtctaacatcaaacatctttctgctgggctccagctacgccttcaagcgatacagaatcacgttaatcatcattccctccgaaccttgccaggcagcggccaatcttccgccggtttggccgccttgcgcaaatggcttcagtgcacccagttcaaaatggcgcaagttgagattcagtcgtcagaggcagctagccaattctaccccctctag

SEQ ID NO: 205963 - DNA, 7377 bp, Artificial Sequence
  derived and/or modified sequence
atgatcagtactctggcgacctttcccccattccttcataaggacattatcgagtatctctcaacatccttcctccccatggctatcttgggatcaagtcggagagaaggcgtgccagcgcacgtcaacctgtcagcgtcaagtatgcttatgatcgctatgcagtacaccagcaatccggtataccactgccagctgctcgagtgtttaatgaagtacaaacaggaggtttggaaagacctgttatacgtgatcgcttatgggccttcacaagtgaaaccccctgccgtgcaaatgcttttccactactggcctaacttaaaacctccaggcgcaatcagtgagtacagagggctgcaatacactgcttggaaccccatccattgtcagcacattgagtgtcacaacgcaatcaataagcccgcagtcaagatgtgtatcgatcccagcctgtccgtcgctcttggagataagcccccacccctttacttatgtgaggaatgttccgagcgcatagccggagatcactctgagtggctgatcgacgtgctgcttccccaggccgagatcagtgcaatttgccagaaaaagaactgctcctcacatgttcggagagctgtggtcacatgtttctctgccggttgctgcggaagacacgggaacagaccagtccggtattgtaagcgatgtcactcaaatcatcatagcaacgaggtcggcgcagcagctgaaacccacttgtaccagacatcgcccccaccgatcaacacgagggagtgcggggctgaggaattggtctgcgccgtcgaagcagtgatatctctgctcaaagaagctgaatttcatgctgaacaaagagagcacgaattgaataggcggaggcagttaggcctgagcagctcgcatcattctctggataacgcggactttgacaacaaggatgatgacaaacacgatcagcggctgttgtcccagttcggtatttggtttttggttagcctgtgtacgccttccgaaaacacaccaaccgagtctctggcgagactcgtcgcaatggtcttccagtggtttcacagcaccgcgtacatgatggatgacgaggtcggcagcctagtggaaaaactaaagccccagtttgtgactaaatggcttaaaacggtttgtgacgtcaggttcgacgtcatggtcatgtgcctgcttcccaaacccatggagttcgctcgggtgggcggatattgggataagtcttgttccacagtcacacagttgaaggagggactaaatcgcattctatgtctgataccttacaatgtcattaaccagtcagtatgggagtgtattatgccggaatggctcgaagcaatccgaaccgaagtccccgataaccaactgaaagaattccgggaagttctcagtaagatgttcgacatcgaactttgtcccctacctttcagcatggaagagatgttcggatttatctcatgtagattcacgggttacccatccagcgtgcaggaacaggctcttctttggctccatgtgctgtccgaactggatattatggtgccattgcagttgctgatctcaatgttcagcgacggcgttaattccgtcaaagaactggcaaatcagaggaagtctcgtgtgtctgagcttgctggaaatttagccagccgacgtgtctctgtggcatcagacccagggagacgcgttcaacacaacatgctgagtcctttccactcaccatttcagagccctttcaggtcacctcttcgatcgcccttcaggagtcctttcaaaaacttcggccaccctggcggtaggaccatcgactttgattgcgaggacgatgagatgaacttgaactgttttattttaatgttcgacctactgctgaaacagatggagctgcaagacgatggcataacaatgggcctcgaacactccctgtcaaaggatatcattagcatcatcaataacgtgttccaggccccatggggaggaagtcatacgtgtcagaaagacgaaaaagcaatcgaatgcaacctctgccagtcgagcatcctctgctaccagcttgcctgcgagttactggaaaggctcgctcctaaggaggagagtcgcctggtagagcctaccgactccctggaggactcactcctgagtagtcgccctgaatttattatcggacccgaaggcgaagaggaggagaacccggctagcaaacacggcgagaatcccggaaactgtacggagcctgtggagcatgcagccgtcaagaatgacaccgagcggaagttttgttatcagcagcttccggtgactctcagactaatctacacaatctttcaggagatggcgaaattcgaggaaccggatattctctttaatatgttgaactgcctcaagatcctgtgcctccatggcgaatgtctgtatatcgccagaaaggaccacccccaattcttagcctatatccaagaccacatgctgattgcatccctttggcgcgtggtcaaatccgagttctcccagctttcttccttggcagtcccacttctgttgcacgccctttctctgccccacggggcagatattttctggacgataattaacggcaacttcaattcgaaagactggaaaatgaggttcgaggcagtggagaaagtggctgtcatatgtaggtttctagacatccattccgtgaccaaaaatcatttgttgaagtattcattggcccatgctttctgttgtttcctgactgctgttgaggatgtgaacccagctgtcgccacacgagcaggtctcctgttggacacaattaagagaccagcactgcagggactctgcttgtgcctggactttcagttcgatacagtagtcaaggatcggccaaccatcctgagtaaactgctgttgctccacttcctgaagcaggatattccagccctgtcctgggaattctttgtgaatcgcttcgaaacgctttcactcgaagctcagctgcacctggattgcaataaagaattcccctttcccaccactatcacagccgtcagaaccaatgtcgctaacctgtctgacgctgccctctggaagatcaagcgcgcacgctttgccagaaacagacagaagtccgtccgatctttaagggactcagtgaagggccctgtagagtccaaacgagcattaagcttgccagaaactcttacttcaaaaatacgtcagcagtccccagaaaacgataatacaatcaaggaccttctgcccgaggacgccggtatcgaccatcagaccgtgcaccagctaataacagtcctgatgaagttcatggctaaagacgaatctagcgcagaaagcgacatctcatcagcaaaagcatttaacactgtgaaacgccatttatacgttctgctagggtatgatcagcaggaggggtgttttatgatcgcccctcagaagatgcggctgagcacctgttttaacgcatttattgccggtatcgcccaggtcatggattataacattaatctgggcaagcacctcttgcccctggtagtgcaagtcctcaaatattgcagctgcccccagctgcgacactactttcagcagccgcctagatgttccctgtggagtctcaaaccacatatacggcagatgtggctgaaagccttattggtaattctgtacaaatatccataccgagattgcgatataagcaagatcttacttcacttaatacacattacagttaacacactcaatgctcagtatcattcctgcaaaccacacgcaactgcaggtcctctgtattccgataatagcaatatcagtaggtattccgagaaggaaaagggcgaaatcgagcttgccgagtaccgagagaccggggctcttcaggactcccttctgcactgcgtacgggaggagtctattccaaagaagaaactgcgctcgtttaagcagaagtccctggatattgggaacgccgattccctcttatttacccttgacgaacatcgtcggaagagttgcatagatcgctgcgacattgagaaacccccaacccaggctgcgtatattgcacagcgacctaatgacccgggacgttcaaggcagaattctgcaactcggcctgacaactccgaaattcccgagaatccggctatggaagggtttcctgatgccagacgacctgtgattccggaggtgagactgaactgtatggagacattcgaggtgaaggtggatagcccggtcaaacccgcaccaaaagaggacctcgatctgattgacctctccagtgattcaacctctggtccggagaagcactcaatcttgtcgactagtgacagcgattctctcgttttcgaacccctccctccattgcgtattgtcgagagtgacgaggaggaggagactatgaaccagggagacgacggcccatccggtaagaacgcagcaagttcacctagcgtcccctcccatcctagcgtgttgagcctgtcaactgcccctctggttcaggtgagcgttgaggactgcagtaaggatttctcatcaaaagacagtggtaacaaccaaagtgctggaaacaccgattcagcattaatcaccttggaggatccgatggacgcggaggggtccagtaagcccgaagagttgccggagttttcttgtgggagccctctcaccctcaagcagaaaagggacctattacaaaagagctttgcccttccagagatgtccctggacgatcacccagacccaggcaccgagggcgaaaagcctggagagttaatgccatcctccggggctaaaaccgttctgctgaaggttcccgaagatgctgagaatcccacagagagtgaaaagccagacacgagtgccgagtccgacaccgaacaaaaccctgagcggaaggtcgaagaggatggagccgaggagtcggagttcaaaatccagattgtgcctagacagcggaaacagagaaagatcgcagtgagcgccatccagagagagtacctcgatatttccttcaatatcctggataaattgggagagcagaaggaccccgatccttccacgaaaggcttgtccacactcgagatgccccgtgaaagcagtagcgctcctacactcgacgcgggagttccggaaaccagctcccattcaagcatcagtacacaatatagacagatgaaacgcggatccttgggagttctcacaatgtcccagcttatgaagcgccaactcgaacaccagagcagcgcgccacacaatatcagcaattgggataccgagcaaattcaacccggaaaacgccagtgtaatgtccccacctgccttaaccccgatctcgagggacagccactgaggatgcgaggggcaacaaaatccagtctgctgtcagctccaagtatcgtgtctatgttcgtgcctgcacccgaggagttcaccgatgagcagccgacagtcatgaccgataaatgccacgactgtggcgctattcttgaggagtatgacgaggagaccttaggcttggccatcgtggtgctgagcaccttcatccacctatctcccgacttggctgcaccgctacttcttgatatcatgcaatcggtgggaaggcttgccagctccaccacttttagcaaccaggccgagtccatgatggtgcccggaaatgctgcaggcgtggcgaaacagttcttacggtgcatatttcaccagctggcgccaaatgggatattccctcagctcttccaaagcacaattaaagatggtacttttctgaggaccctggcaagctcgctaatggacttcaacgagctgtcatcaatcgctgcactgagtcagctgctcgaaggtctcaacaataagaaaaacctccctgccggtggcgcaatgatccgctgtctggaaaacatcgccacattcatggaggctttacccatggattccccttctagtctgtggactaccatatccaatcaattccagacattcttcgcgaagttgccctgcgtgcttccactgaaatgtagcttggactcatccctgcgcattatgatttgtctccttaaaattccttcgaccaatgccacgcggtctctgcttgagccattcagtaagttactgtctttcgtcatccagaatgccgtgtttactcttgcatatctggttgaactgtgcgggctctgctatagagctttcacaaaagagcgcgataagttttatctcagtagatcggtagttttggaactcctgcaagccctgaagctgaaaagccccctgcccgacacaaatctcctacttctggtgcagttcatttgcgcggacgccggaacgaaactggctgaatctaccatcctgagcaagcagatgattgcctccgttccaggctgtgggaccgccgctatggaatgcgtccgccagtacatcaacgaggttttggactttatggcggatatgcacacactcaccaagctcaagtcacacatgaaaacttgttcacagccgttgcacgaggatacctttggaggacatctgaaagtggggctggctcagatcgcggctatggacatttcgcgtgggaatcaccgagacaataaagcggttattcgttacttgccatggctctatcaccctccttccgccatgcaacaaggacccaaagagttcatagagtgtgtgagccacattcgcctcctctcatggcttctactgggcagtctcacgcataatgctgtttgccccaacgcctcttctccatgtttaccgatcccgcttgacgcagggtcccatgtggcagaccacctgatcgtaattctcattgggtttccagagcagagcaaaacttccgtgttgcacatgtgttcactgtttcacgcattcatctttgcacaactgtggacagtctattgtgagcagagcgccgttgccaccaaccttcagaaccagaacgaattctctttcacagcaattctaacagctctcgagttttggtctagagtgactccgtcaatcctgcagctgatggctcacaacaaggtgatggtagagatggtttgcctacatgtgatttcactgatggaggcgcttcaggaatgcaacagtaccatatttgtcaagctaatcccaatgtggctgcccatgattcagtcgaacatcaaacatctcagcgcaggactgcaactgcgacttcaggccatccagaatcacgtgaaccaccactccctccggacactcccagggtctggacaatcatcagccggtctggccgctcttaggaagtggctgcagtgtacccagtttaagatggctcaggtcgaaattcagtcttcggaagctgctagccagttctacccactgtaa

SEQ ID NO: 205964 - protein, 1302 aa, Artificial Sequence
  derived and/or modified sequence
MTEVQAMVEFSVELNKFYNVDLFQRGKTFQILYKNEEVVLNDVMIFKVKMLLDERKIEETLEEMNFLLSLDLHFTDGDYSADDLNALQLISSRTLKLHFSPHRGLHHHVNVMFDYFHLSVVSVTVHASLVALHQPLISFPRPVKTTWLNRNAPAQNKDSVIPTLESVVFGINYTKQLSPDGCSFIIADSFLHHAYRFHYTLCATLLLAFKGLHSYFITVTEEIPSCQKLELAKANMQLLYERLLRRKQLRTQKDNHLEEMDVEARLTELCEEVKKIENPDELAELINMNLAQLCSLLMALWGQFLEVITLHEELRILLAQEHHTLRVRRFSEAFFCFEHPREAAIAYQELHAQSHLQMCTAIKNTSFCSSLPPLPIECSELDGDLNSLPIIFEDRYLDSVTEGKLDISQDDSEITQMEHNLASRRSSDDCHDHQTTPSLGVRTIEIKPSNKDPFSGENITVKLGPWTELRQEEILVDNLLPNFESLESNGKSKSIEITFEKEALQEAKCLSIGESLTKLRSNLPAPSTKEYHVVVSGDTIKLPDISATYASSRFSDSGVESEPSSFATHPNTDLVFETVQGQGPCNSERLFPQLLMKPDYNVKFSLGNHCTESTSAISEIQSSLTSINSLPSDDELSPDENSKKSVVPECHLNDSKTVLNLGTTDLPKCDDTKKSSITLQQQSVVFSGNLDNETVAIHSLNSSIKDPLQFVFSDEETSSDVKSSCSSKPNLDTMCKGFQSPDKSNNSTGTAITLNSKLICLGTPCVISGSISSNTDVSEDRTMKKNSDVLNLTQMYSEIPTVESETHLGTSDPFSASTDIVKQGLVENYFGSQSSTDISDTCAVSYSNALSPQKETSEKEISNLQQEQDKEDEEEEQDQQMVQNGYYEETDYSALDGTINAHYTSRDELMEERLTKSEKINSDYLRDGINMPTVCTSGCLSFPSAPRESPCNVKYSSKSKFDAITKQPSSTSYNFTSSISWYESSPKPQIQAFLQAKEELKLLKLPGFMYSEVPLLASSVPYFSVEEEDGSEDGVHLIVCVHGLDGNSADLRLVKTYIELGLPGGRIDFLMSERNQNDTFADFDSMTDRLLDEIIQYIQIYSLTVSKISFIGHSLGNLIIRSVLTRPRFKYYLNKLHTFLSLSGPHLGTLYNSSALVNTGLWFMQKWKKSGSLLQLTCRDHSDPRQTFLYKLSNKAGLHYFKNVVLVGSLQDRYVPYHSARIEMCKTALKDKQSGQIYSEMIHNLLRPVLQSKDCNLVRYNVINALPNTADSLIGRAAHIAVLDSEIFLEKFFLVAALKYFQ

SEQ ID NO: 205965 - DNA, 3909 bp, Artificial Sequence
  derived and/or modified sequence
atgaccgaggtgcaggccatggtggagttcagcgtggagctgaacaagttctacaacgtggacctgttccagagaggcaagaccttccagatcctgtacaagaacgaggaggtggtgctgaacgacgtgatgatcttcaaggtgaagatgctgctggacgagagaaagatcgaggagaccctggaggagatgaacttcctgctgagcctggacctgcacttcaccgacggcgactacagcgccgacgacctgaacgccctgcagctgatcagcagcagaaccctgaagctgcacttcagcccccacagaggcctgcaccaccacgtgaacgtgatgttcgactacttccacctgagcgtggtgagcgtgaccgtgcacgccagcctggtggccctgcaccagcccctgatcagcttccccagacccgtgaagaccacctggctgaacagaaacgcccccgcccagaacaaggacagcgtgatccccaccctggagagcgtggtgttcggcatcaactacaccaagcagctgagccccgacggctgcagcttcatcatcgccgacagcttcctgcaccacgcctacagattccactacaccctgtgcgccaccctgctgctggccttcaagggcctgcacagctacttcatcaccgtgaccgaggagatccccagctgccagaagctggagctggccaaggccaacatgcagctgctgtacgagagactgctgagaagaaagcagctgagaacccagaaggacaaccacctggaggagatggacgtggaggccagactgaccgagctgtgcgaggaggtgaagaagatcgagaaccccgacgagctggccgagctgatcaacatgaacctggcccagctgtgcagcctgctgatggccctgtggggccagttcctggaggtgatcaccctgcacgaggagctgagaatcctgctggcccaggagcaccacaccctgagagtgagaagattcagcgaggccttcttctgcttcgagcaccccagagaggccgccatcgcctaccaggagctgcacgcccagagccacctgcagatgtgcaccgccatcaagaacaccagcttctgcagcagcctgccccccctgcccatcgagtgcagcgagctggacggcgacctgaacagcctgcccatcatcttcgaggacagatacctggacagcgtgaccgagggcaagctggacatcagccaggacgacagcgagatcacccagatggagcacaacctggccagcagaagaagcagcgacgactgccacgaccaccagaccacccccagcctgggcgtgagaaccatcgagatcaagcccagcaacaaggaccccttcagcggcgagaacatcaccgtgaagctgggcccctggaccgagctgagacaggaggagatcctggtggacaacctgctgcccaacttcgagagcctggagagcaacggcaagagcaagagcatcgagatcaccttcgagaaggaggccctgcaggaggccaagtgcctgagcatcggcgagagcctgaccaagctgagaagcaacctgcccgcccccagcaccaaggagtaccacgtggtggtgagcggcgacaccatcaagctgcccgacatcagcgccacctacgccagcagcagattcagcgacagcggcgtggagagcgagcccagcagcttcgccacccaccccaacaccgacctggtgttcgagaccgtgcagggccagggcccctgcaacagcgagagactgttcccccagctgctgatgaagcccgactacaacgtgaagttcagcctgggcaaccactgcaccgagagcaccagcgccatcagcgagatccagagcagcctgaccagcatcaacagcctgcccagcgacgacgagctgagccccgacgagaacagcaagaagagcgtggtgcccgagtgccacctgaacgacagcaagaccgtgctgaacctgggcaccaccgacctgcccaagtgcgacgacaccaagaagagcagcatcaccctgcagcagcagagcgtggtgttcagcggcaacctggacaacgagaccgtggccatccacagcctgaacagcagcatcaaggaccccctgcagttcgtgttcagcgacgaggagaccagcagcgacgtgaagagcagctgcagcagcaagcccaacctggacaccatgtgcaagggcttccagagccccgacaagagcaacaacagcaccggcaccgccatcaccctgaacagcaagctgatctgcctgggcaccccctgcgtgatcagcggcagcatcagcagcaacaccgacgtgagcgaggacagaaccatgaagaagaacagcgacgtgctgaacctgacccagatgtacagcgagatccccaccgtggagagcgagacccacctgggcaccagcgaccccttcagcgccagcaccgacatcgtgaagcagggcctggtggagaactacttcggcagccagagcagcaccgacatcagcgacacctgcgccgtgagctacagcaacgccctgagcccccagaaggagaccagcgagaaggagatcagcaacctgcagcaggagcaggacaaggaggacgaggaggaggagcaggaccagcagatggtgcagaacggctactacgaggagaccgactacagcgccctggacggcaccatcaacgcccactacaccagcagagacgagctgatggaggagagactgaccaagagcgagaagatcaacagcgactacctgagagacggcatcaacatgcccaccgtgtgcaccagcggctgcctgagcttccccagcgcccccagagagagcccctgcaacgtgaagtacagcagcaagagcaagttcgacgccatcaccaagcagcccagcagcaccagctacaacttcaccagcagcatcagctggtacgagagcagccccaagccccagatccaggccttcctgcaggccaaggaggagctgaagctgctgaagctgcccggcttcatgtacagcgaggtgcccctgctggccagcagcgtgccctacttcagcgtggaggaggaggacggcagcgaggacggcgtgcacctgatcgtgtgcgtgcacggcctggacggcaacagcgccgacctgagactggtgaagacctacatcgagctgggcctgcccggcggcagaatcgacttcctgatgagcgagagaaaccagaacgacaccttcgccgacttcgacagcatgaccgacagactgctggacgagatcatccagtacatccagatctacagcctgaccgtgagcaagatcagcttcatcggccacagcctgggcaacctgatcatcagaagcgtgctgaccagacccagattcaagtactacctgaacaagctgcacaccttcctgagcctgagcggcccccacctgggcaccctgtacaacagcagcgccctggtgaacaccggcctgtggttcatgcagaagtggaagaagagcggcagcctgctgcagctgacctgcagagaccacagcgaccccagacagaccttcctgtacaagctgagcaacaaggccggcctgcactacttcaagaacgtggtgctggtgggcagcctgcaggacagatacgtgccctaccacagcgccagaatcgagatgtgcaagaccgccctgaaggacaagcagagcggccagatctacagcgagatgatccacaacctgctgagacccgtgctgcagagcaaggactgcaacctggtgagatacaacgtgatcaacgccctgcccaacaccgccgacagcctgatcggcagagccgcccacatcgccgtgctggacagcgagatcttcctggagaagttcttcctggtggccgccctgaagtacttccagtag

SEQ ID NO: 205966 - DNA, 5676 bp, Artificial Sequence
  derived and/or modified sequence
ggtgagagaggccgggggcggggccgtgcggccggggacctgttgatcgcaggtatagccggctggcccgggctccctcgggactggggcgactgcgcatgctcgctggccgcgctgggccagtagccgagccgcggtgacgaaccggctccgcggttgcggtgtttgcggttgctgtgatggcgatgtgagggggcccggggcgggatggtgctgacccgggtcgggccgtcttcttgcagctggacaacgagctcctccgttcgacaggcgggggaagaggccgagccgggcgagagggttgaagatcaactggattatgtatttggttctggaatctcaaagcagtccacaaacaaattcttccttatgttgtctgtgtcagggggaacggtgtatttttaacaacgggaatcagtaactggaagtacaagattggttatttaataatgttaaaaatgaggctttgaaaagcagaggtgctgttatcagaatagtcttctgggtataaattaaaaatgactgaagttcaagcaatggtagaattctctgtggagctaaacaagttctacaatgtggatttgtttcagagaggtaaaacatttcaaattttgtacaaaaatgaagaggttgttttaaatgatgttatgatcttcaaagtaaaaatgctattggatgaaagaaagattgaagaaacccttgaggaaatgaattttctattatccttggatctacacttcacagatggagattattcggcagatgatctgaatgccttgcaactaataagtagccgaacattgaagctgcactttagcccccatagaggccttcatcatcatgttaatgttatgtttgattacttccacctttctgttgtgtctgttacagttcatgcatcattggttgcactacaccagccactaataagctttcctcgccctgtgaagacaacttggttaaatagaaatgcaccagcacaaaacaaagattccgtgattcctactcttgaaagtgtggtctttggtattaactacacaaaacagttatcaccagatggttgtagcttcatcattgcagactccttcctacatcatgcgtatcgttttcattatacactttgtgccactttgctgctagccttcaagggattgcacagctacttcattacagtaacagaagagattccttcttgtcagaaactagaactggccaaggccaacatgcagctcctatatgagcgtcttctcagaagaaaacagctacgaacacagaaagacaaccatctagaggaaatggatgtagaagctcgacttactgaactatgtgaagaagttaagaaaatagagaatcctgatgaactggcagaacttataaatatgaatcttgcgcaactttgctcacttttgatggctttatggggacagtttctggaagttataacgctacacgaagaactaagaatattattagcacaagagcaccatactttgagggtacgcagattttctgaggcattcttttgttttgagcatccaagagaagctgccattgcataccaggaacttcatgctcagagtcatctacagatgtgcaccgctatcaaaaatacttccttctgcagttctcttccacccttacctattgaatgtagtgaattagatggagatctcaattcattacctataatctttgaagataggtatttagattcagttactgaaggtaaacttgatatctcccaggacgatagtgaaattacacaaatggaacacaatctggcatccagaaggtcatcagacgattgccatgatcatcaaacaaccccatctttgggagttagaacaattgaaataaagcccagtaataaagatcctttcagtggagagaatataactgtcaaactaggaccttggacagagcttcgacaagaggaaatacttgtggataatttactacccaactttgagtccttagaatctaatggtaaatctaaatctatagaaataacatttgaaaaggaagctttgcaagaagcaaagtgtctttctattggagaatcattaactaaattacgaagtaatctacctgccccttctacaaaagaatatcatgttgtagtaagtggagatacaattaagttaccagatattagtgccacatatgcctcatctagattttcagattcaggtgttgaaagtgaaccgagttcttttgcgacacatccaaacactgatttagtctttgaaactgtgcaagggcaaggtccttgcaatagtgaaagattatttcctcagcttttgatgaaacctgattataatgtaaaattttcattaggaaatcattgtactgagagtacaagtgctataagtgaaatacagtcatctttgacatccataaactctctaccctccgatgatgaactgtcacctgatgaaaattctaagaaatctgttgtacctgaatgccatctaaatgatagcaaaactgtattaaatctaggaacgactgatttgccaaaatgtgatgatactaaaaagtcaagtatcactttgcaacagcagagtgttgtattttcagggaacttggacaatgaaactgtagcaatacattccttaaattcaagcattaaagaccctttacaatttgttttttcagatgaagagacttccagtgatgtgaaaagtagttgcagctccaaacctaacttggatactatgtgtaaaggcttccagagtcctgataaatctaataactctacagggacagcaattacattaaattcaaaactgatttgtttaggcactccttgtgtcatttcaggttccatttctagtaatacagatgttagtgaagatagaactatgaaaaaaaatagtgatgtattaaatctcacacagatgtattcagaaatccctacagttgaaagtgaaactcatctgggtacaagtgatcctttttcagccagtactgatatagtaaagcaagggcttgtggaaaattattttggttctcaaagcagtacggatatttctgacacatgtgctgttagctacagcaatgcacttagccctcagaaggaaacttctgaaaaagaaattagtaatcttcagcaggaacaggataaagaggatgaggaggaagagcaggatcaacaaatggttcaaaatgggtactatgaagaaacagattattcagctttggatggaacaataaatgctcactatacaagcagagatgaactaatggaagaaagacttacaaaatctgaaaaaataaacagtgactatctgagagatggtataaacatgcctactgtctgtacttctggttgtttgtccttcccgtctgcaccacgagagtctccttgtaatgttaaatattcttccaaaagtaaatttgatgccattacaaagcagccaagcagtacttcttacaacttcacttcttcgatttcctggtatgaaagttcaccaaaacctcaaatacaagccttccttcaggcaaaagaagaactgaagctactaaaacttcctgggttcatgtacagtgaagttcctctgctggcatcctcagtaccttattttagtgtagaagaagaggatggttctgaagatggagtacatctgattgtctgtgtgcacggtttagatggaaacagtgcagatctccgattagtaaaaacttacattgaacttggattgcctgggggaagaattgattttcttatgtctgagagaaatcagaatgatacttttgctgattttgatagcatgactgatcgtcttttggatgagataatacagtatattcagatatatagtctaacagtctcaaaaataagctttattggacattcgttgggcaatttaataattcgttcagtgcttacaaggccaaggtttaaatattacctcaacaaacttcatacctttctgtctctttctggacctcaccttggtacactctacaacagcagtgctcttgttaatacaggtctctggtttatgcagaaatggaaaaaatcaggttcgcttttgcagctgacatgtcgagatcactcagaccctcgccaaacttttttatataagcttagtaacaaagcagggcttcattatttcaaaaatgttgtgctagtgggatccctacaggatcgctatgttccttatcactctgcccgcattgaaatgtgtaaaacagctttaaaggacaaacagtcaggacagatctattcagaaatgatccacaacttgcttcgacccgttctgcaaagcaaggactgtaatttggttcgctataatgtcatcaatgcattgcccaatacagctgattcactcattgggagagctgcacatatagctgttcttgattcggaaatatttttagagaaattctttctggttgctgccctcaaatatttccaatagtataaaagcattgttagcgactggacaattacctcattcaacaatgtttcaaataatgtattatattaaaatgtagatgctgataagttctaagaaatatttatacctttttatatggaagataatttatatcatccatgtttagtgctttttaaacatcaactttactttctaggtaatgtggctgtgcaatatttttttaattttatctttttacttttctattactttttcatatattttgctacctaagtatttcagtgaaactttaagcccatacctgtgtctgattgtttattattggctttccacaattcttacatcagactacattatattagagaccattattgctagaatagcatgggatttaaaattttctaatactgggggtattatttagttaattataaatttttcttttcacattttactgtgttttaactggaaataaaattatggctgctacaatatattttttgaaatcaacttctgtagttctaaaatacaactttatcatacaatcaaaccaggtagttcatataaaacagtgtaatacaagttttctataaagtcattactgttgcttaaacatatttcatgcctattaaaatatattttctactggtgatttcaacattatttctcatactgacttttattactggaaatgttcctgtacatgttggcagcagataaagatttttgaatgtttgaatgccctctgccttgatttggttggaatttttgctaaattggtaatgttgcttgaactttatgactacattttcttttaacttttttcatggacttccttatatgtacataataattaaatgttgaaatttatgaaatacttttatgaatttagataatttttaaatattgttaaaatttattgaactaaaaagtaatgtaaataaaataattcatgttaaagatggaacaaaataattaactttacatgtttggtgatacagatgcaaatgtttttgatatatggagatgttgagtcttttgactttactaaaggtgctgaatagcattaaattcactattttccttttctgttttacttgtgaaaataaaaatgcactaaggttgggtagaagttctgtttgcactcactaattgtgacagacagaggtttttgtaagtatttattgtacaattgatgcatgtttatttttagcgttgttattgcctctggtgttaataaatgaacaaatggctatctggaggaacagct

SEQ ID NO: 205967 - DNA, 5282 bp, Artificial Sequence
  derived and/or modified sequence
tgtttgcggttgctgtgatggcgatgtgagggggcccggggcgggatggtgctgacccgggtcgggccgtcttcttgcagctggacaacgagctcctccgttcgacaggcgggggaagaggccgagccgggcgagagggggaacggtgtatttttaacaacgggaatcagtaactggaagtacaagattggttatttaataatgttaaaaatgaggctttgaaaagcagaggtgctgttatcagaatagtcttctgggtataaattaaaaatgactgaagttcaagcaatggtagaattctctgtggagctaaacaagttctacaatgtggatttgtttcagagaggtaaaacatttcaaattttgtacaaaaatgaagaggttgttttaaatgatgttatgatcttcaaagtaaaaatgctattggatgaaagaaagattgaagaaacccttgaggaaatgaattttctattatccttggatctacacttcacagatggagattattcggcagatgatctgaatgccttgcaactaataagtagccgaacattgaagctgcactttagcccccatagaggccttcatcatcatgttaatgttatgtttgattacttccacctttctgttgtgtctgttacagttcatgcatcattggttgcactacaccagccactaataagctttcctcgccctgtgaagacaacttggttaaatagaaatgcaccagcacaaaacaaagattccgtgattcctactcttgaaagtgtggtctttggtattaactacacaaaacagttatcaccagatggttgtagcttcatcattgcagactccttcctacatcatgcgtatcgttttcattatacactttgtgccactttgctgctagccttcaagggattgcacagctacttcattacagtaacagaagagattccttcttgtcagaaactagaactggccaaggccaacatgcagctcctatatgagcgtcttctcagaagaaaacagctacgaacacagaaagacaaccatctagaggaaatggatgtagaagctcgacttactgaactatgtgaagaagttaagaaaatagagaatcctgatgaactggcagaacttataaatatgaatcttgcgcaactttgctcacttttgatggctttatggggacagtttctggaagttataacgctacacgaagaactaagaatattattagcacaagagcaccatactttgagggtacgcagattttctgaggcattcttttgttttgagcatccaagagaagctgccattgcataccaggaacttcatgctcagagtcatctacagatgtgcaccgctatcaaaaatacttccttctgcagttctcttccacccttacctattgaatgtagtgaattagatggagatctcaattcattacctataatctttgaagataggtatttagattcagttactgaaggtaaacttgatatctcccaggacgatagtgaaattacacaaatggaacacaatctggcatccagaaggtcatcagacgattgccatgatcatcaaacaaccccatctttgggagttagaacaattgaaataaagcccagtaataaagatcctttcagtggagagaatataactgtcaaactaggaccttggacagagcttcgacaagaggaaatacttgtggataatttactacccaactttgagtccttagaatctaatggtaaatctaaatctatagaaataacatttgaaaaggaagctttgcaagaagcaaagtgtctttctattggagaatcattaactaaattacgaagtaatctacctgccccttctacaaaagaatatcatgttgtagtaagtggagatacaattaagttaccagatattagtgccacatatgcctcatctagattttcagattcaggtgttgaaagtgaaccgagttcttttgcgacacatccaaacactgatttagtctttgaaactgtgcaagggcaaggtccttgcaatagtgaaagattatttcctcagcttttgatgaaacctgattataatgtaaaattttcattaggaaatcattgtactgagagtacaagtgctataagtgaaatacagtcatctttgacatccataaactctctaccctccgatgatgaactgtcacctgatgaaaattctaagaaatctgttgtacctgaatgccatctaaatgatagcaaaactgtattaaatctaggaacgactgatttgccaaaatgtgatgatactaaaaagtcaagtatcactttgcaacagcagagtgttgtattttcagggaacttggacaatgaaactgtagcaatacattccttaaattcaagcattaaagaccctttacaatttgttttttcagatgaagagacttccagtgatgtgaaaagtagttgcagctccaaacctaacttggatactatgtgtaaaggcttccagagtcctgataaatctaataactctacagggacagcaattacattaaattcaaaactgatttgtttaggcactccttgtgtcatttcaggttccatttctagtaatacagatgttagtgaagatagaactatgaaaaaaaatagtgatgtattaaatctcacacagatgtattcagaaatccctacagttgaaagtgaaactcatctgggtacaagtgatcctttttcagccagtactgatatagtaaagcaagggcttgtggaaaattattttggttctcaaagcagtacggatatttctgacacatgtgctgttagctacagcaatgcacttagccctcagaaggaaacttctgaaaaagaaattagtaatcttcagcaggaacaggataaagaggatgaggaggaagagcaggatcaacaaatggttcaaaatgggtactatgaagaaacagattattcagctttggatggaacaataaatgctcactatacaagcagagatgaactaatggaagaaagacttacaaaatctgaaaaaataaacagtgactatctgagagatggtataaacatgcctactgtctgtacttctggttgtttgtccttcccgtctgcaccacgagagtctccttgtaatgttaaatattcttccaaaagtaaatttgatgccattacaaagcagccaagcagtacttcttacaacttcacttcttcgatttcctggtatgaaagttcaccaaaacctcaaatacaagccttccttcaggcaaaagaagaactgaagctactaaaacttcctgggttcatgtacagtgaagttcctctgctggcatcctcagtaccttattttagtgtagaagaagaggatggttctgaagatggagtacatctgattgtctgtgtgcacggtttagatggaaacagtgcagatctccgattagtaaaaacttacattgaacttggattgcctgggggaagaattgattttcttatgtctgagagaaatcagaatgatacttttgctgattttgatagcatgactgatcgtcttttggatgagataatacagtatattcagatatatagtctaacagtctcaaaaataagctttattggacattcgttgggcaatttaataattcgttcagtgcttacaaggccaaggtttaaatattacctcaacaaacttcatacctttctgtctctttctggacctcaccttggtacactctacaacagcagtgctcttgttaatacaggtctctggtttatgcagaaatggaaaaaatcaggttcgcttttgcagctgacatgtcgagatcactcagaccctcgccaaacttttttatataagcttagtaacaaagcagggcttcattatttcaaaaatgttgtgctagtgggatccctacaggatcgctatgttccttatcactctgcccgcattgaaatgtgtaaaacagctttaaaggacaaacagtcaggacagatctattcagaaatgatccacaacttgcttcgacccgttctgcaaagcaaggactgtaatttggttcgctataatgtcatcaatgcattgcccaatacagctgattcactcattgggagagctgcacatatagctgttcttgattcggaaatatttttagagaaattctttctggttgctgccctcaaatatttccaatagtataaaagcattgttagcgactggacaattacctcattcaacaatgtttcaaataatgtattatattaaaatgtagatgctgataagttctaagaaatatttatacctttttatatggaagataatttatatcatccatgtttagtgctttttaaacatcaactttactttctaggtaatgtggctgtgcaatatttttttaattttatctttttacttttctattactttttcatatattttgctacctaagtatttcagtgaaactttaagcccatacctgtgtctgattgtttattattggctttccacaattcttacatcagactacattatattagagaccattattgctagaatagcatgggatttaaaattttctaatactgggggtattatttagttaattataaatttttcttttcacattttactgtgttttaactggaaataaaattatggctgctacaatatattttttgaaatcaacttctgtagttctaaaatacaactttatcatacaatcaaaccaggtagttcatataaaacagtgtaatacaagttttctataaagtcattactgttgcttaaacatatttcatgcctattaaaatatattttctactggtgatttcaacattatttctcatactgacttttattactggaaatgttcctgtacatgttggcagcagataaagatttttgaatgtttgaatgccctctgccttgatttggttggaatttttgctaaattggtaatgttgcttgaactttatgactacattttcttttaacttttttcatggacttccttatatgtacataataattaaatgttgaaatttatgaaatacttttatgaatttagataatttttaaatattgttaaaatttattgaactaaaaagtaatgtaaataaaataattcatgttaaagatggaacaaaataattaactttacatgtttggtgatacagatgcaaatgtttttgatatatggagatgttgagtcttttgactttactaaaggtgctgaatagcattaaattcactattttccttttctgttttacttgtgaaaataaaaatgcactaaggtt

SEQ ID NO: 205968 - DNA, 3909 bp, Artificial Sequence
  derived and/or modified sequence
atgaccgaggtgcaggcaatggtcgaattttccgttgagctcaataaattttataacgttgatctgttccagcgggggaagactttccagatcctgtataagaacgaagaagtggtgctgaatgacgtcatgattttcaaggtgaaaatgctgctcgacgagagaaagatcgaagagacgctcgaagaaatgaatttcctgctgtctctggaccttcactttacggatggcgattattctgctgacgacctcaatgccctccagctgattagttccaggacactgaaactccatttctcccctcataggggacttcaccaccatgtgaacgtgatgttcgactatttccacctctcagtggtaagtgtgaccgtccacgcaagtctcgtcgcgctccatcagccacttataagcttccctcgaccagtcaaaactacctggttgaaccgcaacgccccagcccagaataaggattcagtcatacccaccctagagtccgtggtgttcggcataaattatacaaagcaactgtccccggatggctgcagtttcatcattgctgatagttttcttcaccacgcctatcggttccactatacattatgcgctacactcctgctggcattcaaaggacttcatagttacttcattaccgtgaccgaggagatccctagctgccaaaaactggagttggcgaaggcaaacatgcaactcctgtacgaacgactcttgaggcgaaaacagctgcgcacccagaaagataaccacctggaagagatggatgtagaggcacgcttaaccgaactgtgcgaggaagtaaagaaaattgagaaccccgatgagctggcagaactgatcaatatgaacctcgcccagctgtgctcactcttaatggctctatggggacagtttttggaagtgataaccctgcacgaggaactcagaattttgctcgcacaggaacaccacacactgcgagtgcgcagatttagtgaggccttcttttgctttgagcatcccagggaagccgctattgcttaccaggagctgcatgcgcaatcccacctacagatgtgcacagctatcaaaaatacgtcattctgttctagcttacctcctttacccatagaatgttcagagttggacggggatctgaactcgctgcccattatctttgaggaccggtacctggattcagtaactgagggtaagctggacatttcccaggacgactcagagatcacacaaatggagcataatcttgcctccagacggagctcggacgactgtcatgaccatcagacaacgcccagcttgggtgtgagaactattgagattaaaccctcgaataaagatcccttttctggagagaatatcacggtaaagctggggccctggaccgagctccgtcaagaagagatacttgtggacaacctcctgcctaacttcgagagtctggagtctaacggcaagagtaagtccattgaaatcacctttgaaaaagaagctctgcaggaggctaagtgccttagcatcggagagagcctgaccaagcttcgttcaaacttgccagcaccctctacgaaggagtaccacgtcgtggtcagcggggatacaataaagctacctgatatcagcgctacttatgcttccagccgcttcagcgatagcggagtagagtctgagccgagttcattcgctacacacccaaataccgacctggttttcgaaacggtccaggggcaggggccttgtaattccgagaggctctttcctcaattgttaatgaagccagactacaatgtcaaattcagcctggggaaccattgcacagagtcaacgtcggctatttctgagattcagagttctcttactagcatcaactcattgccatccgatgacgaactgtctcccgatgagaacagcaaaaaatccgtcgtccctgagtgccatctcaacgacagcaagacggtgctgaatttgggaactactgacctaccaaagtgcgacgacaccaagaagagcagtattacgctccagcagcagtcggtggttttttctgggaatctggacaacgaaacggtggctatccactcgcttaattcctcaatcaaggacccactccaatttgtgttttcggatgaagaaacatcctccgatgtcaagtccagctgctcctcaaagccgaacctagatactatgtgtaaggggttccagtctcccgacaaatctaataactctaccggcacagcaattacactaaactctaagttgatttgtctgggcacaccatgcgtgattagcggttccatcagctcaaataccgacgtcagtgaagaccgcaccatgaagaaaaactctgacgttttgaatctcactcagatgtattccgagattcctacggtggagagtgaaacccacctcggcacctctgatcccttctcagcctcaaccgacatcgtgaaacagggtctggtggagaactacttcggctcccagtcatccactgatatctccgatacctgcgccgtcagttacagtaatgccctctccccacagaaggaaacatccgagaaagaaatttccaacttacagcaggagcaggataaagaggacgaggaagaggaacaagatcagcagatggtgcaaaatggatactacgaggaaaccgactacagcgccctcgatggaacaatcaacgctcactacacatccagggatgaactcatggaggagagactgactaagagtgagaagatcaattctgactacctgcgagacggcataaacatgccgactgtctgtactagtggctgtctgtcttttccctctgccccgagagaatcgccctgcaatgtgaagtactcgtccaaatcaaaattcgacgccattacaaaacagccgagttccactagttataacttcacttcctcaattagctggtacgaatcttcaccgaaaccccaaattcaggccttcctgcaggctaaagaggagctcaagctgttgaagttacctggctttatgtattctgaggtgcccttgcttgcatcttccgtgccttatttctctgtggaagaggaggacgggtcggaggatggggtgcacctcatcgtgtgcgtccatggactggatgggaatagtgccgatttaagactagtgaaaacctacattgagttgggactgcccggcggacgcatcgactttctcatgtcagaaaggaaccagaatgacactttcgcagattttgacagcatgaccgacaggctgctagacgagatcatccagtatatccagatctactctctgactgtgagcaaaatcagcttcattgggcacagcctgggcaacctgattatcaggagcgtgcttactcgtcccagatttaagtactacctgaacaagctccatacgtttctctcactaagcggaccccacctcggcacgttatataatagctcagcacttgtcaataccgggctgtggtttatgcagaaatggaaaaagtccggctctttgttgcagttaacctgccgcgaccattctgatccacggcagacattcttatacaaactttccaataaagctgggctgcactactttaaaaacgtggtactcgttggctctctgcaggaccggtacgtcccctatcacagtgctcggatcgagatgtgtaaaacggctctcaaggacaagcagagtggtcagatatactctgaaatgatccataacctgttgagacccgtgctgcagagtaaggattgcaacctcgtgcgctacaatgttataaatgcactcccgaatactgcagatagtttgatcggacgcgcagcacacattgctgtcctagatagtgaaatctttctagagaagttcttcctggtggctgccctgaaatatttccagtag

SEQ ID NO: 205969 - DNA, 3909 bp, Artificial Sequence
  derived and/or modified sequence
atgactgaggtgcaggccatggtagaattcagcgtggagctcaataagttttataacgtcgacttgtttcagagggggaaaacgtttcaaatactgtacaagaatgaggaggtagtgcttaatgatgtcatgatcttcaaagtgaaaatgctcttggatgagcggaagattgaggagactctggaagaaatgaatttcttgctcagcctggacctccatttcacagatggtgattactcagcagacgatctcaatgcgctccagttgataagtagcaggacgctgaagctacatttctctcctcaccggggcctgcatcatcacgtgaatgtgatgttcgattacttccacctgagtgttgtttcagtgaccgtacatgccagcttggtggctctgcaccagcctctgatatcattcccccgaccagttaagactacttggcttaaccgcaatgctcctgcacagaataaagactctgttattccaactcttgaaagtgtcgtgttcggcatcaactacaccaagcaattaagtcctgacggctgctccttcatcatcgccgattcattcctgcatcatgcttataggtttcattacactttgtgcgcaaccctgctcttggcatttaaagggttgcacagttacttcattacagttaccgaagagatccccagctgccagaagctggaactagccaaggcaaatatgcaactgctatacgagcgactcctgaggcgcaagcaattgcgcactcagaaggacaatcacctcgaagaaatggacgtggaagctaggctgaccgaattgtgtgaggaggtgaagaaaatcgaaaacccagacgaactggccgagttgataaacatgaatttagcccagttgtgctctctgctcatggctctttggggacagttcctcgaggtgatcacgttacacgaggaattacgcatactgttggctcaggagcaccataccctgcgggtgcgccgattttcagaagccttcttctgtttcgagcatcctcgtgaagctgcaattgcttatcaggaactccatgctcagagccacctccagatgtgcaccgccatcaaaaacacatcattctgctcttctctgccccccttacctattgaatgtagcgagttggacggcgacctgaactctctccccatcatctttgaggatcggtatttggatagtgtgacagagggtaaactagatatctcccaggacgattccgaaatcacacagatggaacataacctcgccagccgcagatcatcagacgactgtcacgaccaccaaacaacccctagtctcggagtgcgcaccatagaaattaagccctccaacaaagacccattctccggcgaaaatatcaccgttaagctgggtccctggacggaactaaggcaggaagagattctcgtggacaatcttctgccaaattttgaatctctggaaagtaatgggaagtctaagagcatcgaaatcacatttgagaaggaggcccttcaggaagcaaagtgtctgtcaattggggaaagtttgactaaactgcgctccaatctccccgcccccagcaccaaagaatatcacgtcgtggtgtccggcgacactatcaagctaccagatatcagtgcgacttacgcctccagccggttcagcgactcgggtgttgagagtgagccctctagctttgccactcatccaaataccgacttagtgttcgaaactgttcagggccaggggccttgcaactctgaaagactttttcctcagctccttatgaagcctgattataacgttaagttttcccttggaaaccactgcaccgagtccacaagcgctattagcgaaatccagagttctctgacttctatcaatagtttgccttcagacgacgagctcagccccgatgagaacagcaagaaatctgtagtgcccgagtgccacctcaacgattcgaagactgtgttgaatctggggaccactgacctgcctaagtgtgacgacacgaagaaaagctcgattacattgcagcagcagtccgtcgtttttagcggtaatcttgacaatgagactgtcgccattcattccttgaattctagcattaaggatccattgcagtttgtcttcagtgacgaagagacctcaagtgacgttaagtcatcttgttccagcaagccaaatctggacactatgtgcaagggcttccagtccccagacaaatctaataactcaactggaaccgcaattacattgaacagtaaactcatctgccttgggacaccctgcgtgatctctggctccataagctccaatactgacgtcagtgaggaccgaactatgaaaaaaaacagtgacgtgcttaatctgacacagatgtactccgaaataccaacagtggagtctgaaactcacctgggtacctcagatccttttagcgcatccacagacatcgtgaagcagggtcttgttgagaactatttcggctcccagagtagcaccgacatctctgatacttgcgcggtgagctactcaaatgcactttcaccacagaaggaaacctctgaaaaggaaatcagcaacctccagcaggaacaggataaggaggacgaggaagaggagcaggaccaacagatggtccagaacggatactatgaggagactgactattctgcccttgacggcaccattaatgctcactatacctcgcgcgatgagttgatggaagagcggttgacaaaatcagagaaaattaatagcgattacctgcgcgacggtataaatatgcctacggtgtgtacatctggatgcttgagcttcccgagcgcccctcgtgagagtccttgcaacgtgaaatatagcagcaaaagcaagttcgacgctatcacaaagcagccgtcatcaacctcctacaatttcacctctagtataagttggtatgagtcttcccccaaaccacagattcaggcgtttctgcaagctaaggaggagctgaaattgctgaagttaccgggctttatgtactctgaagttccactccttgcgtccagcgtcccatactttagcgttgaagaagaggacgggagtgaagatggggttcaccttatcgtgtgcgtccatggcttggacgggaatagcgccgatctgcggttggtcaaaacctacattgaactcggacttcctggcggcagaatcgactttctgatgtccgagcgcaaccagaacgatacatttgccgatttcgacagcatgaccgataggttattggatgagatcatccaatatatccaaatctacagcctgacggtatccaaaatcagcttcattggacatagtctcgggaatcttatcattaggtccgtattgacacggccacgttttaagtactacctgaataagctgcatacctttttgtccctgagtggcccccatcttggaacgctgtataatagttcagcattagtgaacacgggcttgtggtttatgcagaaatggaaaaaaagtggatctttgttgcagttgacttgtagagaccattctgacccgagacagactttcttgtacaaactctccaataaagcgggccttcactacttcaaaaatgtggttcttgtcggcagcttgcaggaccggtatgttccctatcactcagccaggatagaaatgtgtaagacggctctcaaagataaacagagcgggcagatctacagtgaaatgattcataacttgctgcggcccgtgctccaatcaaaggactgcaacctagtgcgatacaacgtgatcaacgccctccccaacacggccgattctctcattggcagagcggctcacatcgctgttctggattccgaaatatttctggagaaattttttctcgtagccgcattgaaatacttccagtag

SEQ ID NO: 205970 - DNA, 3909 bp, Artificial Sequence
  derived and/or modified sequence
atgacagaggtgcaggccatggtggagttctctgtggagctgaacaagttctacaacgtggacctcttccagaggggcaagaccttccagatcctgtacaagaatgaggaggtggtgctgaatgatgtgatgatcttcaaggtgaagatgctgctggatgagaggaagattgaggagaccctggaggagatgaacttcctgctgagcctggacctgcacttcacagatggagactacagcgcagatgacctgaatgccctgcagctgatcagcagcaggaccctgaagctgcacttcagcccccaccggggcctgcaccaccacgtgaatgtgatgtttgactacttccacctgtctgtggtgtctgtgacagtgcacgccagcctggtggccctgcaccagcccctcatctccttccccaggcctgtgaagaccacctggctgaacagaaatgccccagcccagaacaaggacagcgtcatccccaccctggagagcgtggtgtttggcatcaactacaccaagcagctgagcccagatggctgcagcttcatcatcgctgacagcttcctgcaccacgcctaccgcttccactacaccctgtgtgccaccctgctgctggccttcaagggcctgcacagctacttcatcaccgtgacagaggagatccccagctgccagaagctggagctggccaaggccaacatgcagctgctgtatgaaaggctgctgcggaggaagcagctgcggacccagaaggacaaccacctggaggagatggatgtggaggcccggctgacagagctgtgtgaggaggtgaagaagattgaaaatccagatgagctggccgagctgatcaacatgaacctggcccagctgtgcagcctgctgatggccctgtggggccagttcctggaggtgatcaccctgcacgaggagctgcgcatcctgctggcccaggagcaccacaccctgcgggtgcggcgcttcagcgaggccttcttctgctttgagcacccccgggaggccgccatcgcctaccaggagctgcacgcccagagccacctgcagatgtgcacagccatcaagaacaccagcttctgcagcagcctgccccccctgcccattgaatgttctgagctggatggagacctgaacagcctgcccatcatctttgaagatcgctacctggacagcgtgacagagggcaagctggacatcagccaggatgacagcgagatcacccagatggagcacaacctggccagccgccgcagcagtgatgactgccacgaccaccagaccacccccagcctgggcgtgaggaccatcgagatcaagcccagcaacaaggaccccttctctggagagaacatcaccgtgaagctgggcccctggacagagctgcggcaggaggagatcctggtggacaacctgctgcccaactttgagagcctggagagcaatggcaagagcaagagcattgagatcacctttgagaaggaggccctgcaggaggccaagtgcctgagcatcggggagagcctgaccaagctgcggagcaacctgcctgcccccagcaccaaggagtaccacgtggtggtgtctggggacaccatcaagctgcctgacatcagcgccacctacgccagcagccgcttcagtgacagcggcgtggagagcgagcccagcagctttgccacccaccccaacacagacctggtgtttgagaccgtgcagggccagggcccctgcaacagcgagcggctcttcccccagctgctgatgaagccagactacaacgtgaagttcagcctgggcaaccactgcacagagagcaccagcgccatcagcgagatccagagcagcctgaccagcatcaacagcctgcccagtgatgatgagctgagcccagatgagaacagcaagaagtctgtggtgcctgagtgccacctgaatgacagcaagacagtgctgaacctgggcaccacagacctgcccaagtgtgatgacaccaagaagagcagcatcaccctgcagcagcagagcgtggtgttttctggcaacctggacaatgagaccgtggccatccacagcctgaacagcagcatcaaggaccccctgcagtttgtgttcagtgatgaggagaccagcagtgatgtgaagagcagctgcagcagcaagcccaacctggacaccatgtgcaagggcttccagagcccagacaagagcaacaacagcactggaacagccatcaccctgaacagcaagctgatctgcctgggcaccccctgtgtgatcagcggcagcatcagcagcaacacagatgtgtctgaggacaggaccatgaagaagaacagtgatgtgctgaacctgacccagatgtacagcgagatccccaccgtggagagcgagacccacctgggcaccagtgaccccttcagcgccagcacagacatcgtgaagcagggcctggtggagaactacttcggcagccagagcagcacagacatcagtgacacctgtgctgtgtcctacagcaatgccctgagcccccagaaggagaccagcgagaaggagatcagcaacctgcagcaggagcaggacaaggaggatgaggaggaggagcaggaccagcagatggtgcagaatggctactatgaggagacagactacagcgccctggatggcaccatcaatgcccactacaccagcagagatgagctgatggaggagcggctgaccaagtctgagaagatcaacagcgactacctgagagatggcatcaacatgcccaccgtgtgcaccagcggctgcctgtccttccccagcgccccccgggagagcccctgcaatgtgaagtacagcagcaagagcaagtttgatgccatcaccaagcagcccagcagcaccagctacaacttcaccagcagcatctcctggtatgagagcagccccaagccccagatccaggccttcctgcaggccaaggaggagctgaagctgctgaagctgcccggcttcatgtacagcgaggtgcccctgctggccagctctgtgccctacttctctgtggaggaggaggatggctctgaagatggagtgcacctgattgtgtgtgtgcacggcctggatggcaacagcgctgacctgcggctggtgaagacctacatcgagctgggcctgcccggcggcagaattgacttcctgatgtctgagaggaaccagaatgacacctttgctgactttgacagcatgacagaccggctgctggatgagatcatccagtacatccagatctacagcctgactgtgtccaagatctccttcatcggccacagcctgggcaacctgatcatccgctctgtgctgacccggccccgcttcaagtactacctgaacaagctgcacaccttcctgagcctgagcggcccccacctgggcaccctgtacaacagcagcgccctggtgaacacaggcctgtggttcatgcagaagtggaagaagagcggcagcctgctgcagctgacctgccgggaccacagcgacccccggcagaccttcctgtacaagctgagcaacaaggccggcctgcactacttcaagaatgtggtgctggtgggcagcctgcaggaccgctacgtgccctaccacagcgcccgcatcgagatgtgcaagacagccctgaaggacaagcagagcggccagatctacagcgagatgatccacaacctgctgcggcctgtgctgcagagcaaggactgcaacctggtgcgctacaacgtcatcaatgccctgcccaacacagctgacagcctcatcggccgggccgcccacatcgctgtgctggacagcgagatcttcctggagaagttcttcctggtggccgccctgaagtacttccagtag

SEQ ID NO: 205971 - DNA, 3909 bp, Artificial Sequence
  derived and/or modified sequence
atgaccgaggtgcaggccatggtggagttcagcgtggagctgaacaagttctacaacgtggatctgttccagcgtggaaagaccttccagatcctttacaagaacgaggaagtggtgttgaatgatgtgatgatttttaaggtgaagatgttactagacgagcgcaagattgaagagaccttagaggaaatgaatttccttctcagcctggacttgcacttcaccgatggggattacagcgcggacgatcttaatgctctgcaactgatatcgtcccggacactgaagctccactttagtcctcaccgaggattgcaccaccatgttaacgtcatgttcgattactttcatttgtcagtcgtgagtgtgacagtccatgcctcgttggttgccctccaccagcctctgatttcctttcccagacccgttaagacaacatggctgaaccgcaacgcccccgctcagaataaagattcggtgatcccaacccttgagagcgtcgtgtttgggatcaattacacgaagcaacttagcccagacgggtgctccttcattattgcggatagtttcctacaccacgcgtatcgcttccactacaccctatgtgcaactttgctgcttgcctttaagggtctgcattcatacttcattacagttaccgaagagattccaagctgccagaaactcgagctcgctaaagcaaacatgcagctcctgtacgaaaggctgctgaggaggaagcagctcagaacacagaaggacaaccatctggaggagatggatgtggaggctagacttacggaactgtgcgaggaggtcaaaaagatagagaatccggacgagctcgctgagctaatcaacatgaacctcgcccaactttgctctctgctgatggctctgtgggggcaatttctggaagtgatcacgttacatgaggagctcaggattctgctggctcaggagcatcacaccttgagagtacgaagattcagtgaggcgttcttctgctttgaacacccacgcgaagctgctattgcttatcaggagctccacgcacagtcacacttgcaaatgtgcaccgccattaagaacacatctttttgcagtagcctgcccccacttccaattgagtgtagcgagctggatggggaccttaattccctgcccatcattttcgaagatagatatctggattcagtgaccgagggcaagcttgacatctctcaagatgacagcgagatcacccagatggagcataacctggcctctcgtagatcctccgacgactgtcatgaccaccagacaacgcctagcctgggtgtgcgtactatcgaaatcaagcctagtaataaggaccctttttctggggagaacattacagtcaagctgggcccttggaccgagctacggcaggaggagattctcgtggataatttactccctaatttcgagagtctagagagcaatggcaagtctaagagtatagaaattacgtttgagaaggaagcacttcaggaagccaaatgcctctctattggtgagagcctcacaaagctgaggtctaacctgcctgcacccagcactaaagagtaccatgtggtggtgtcaggggacactatcaagctgcccgacatatctgcgacatatgcctcatccaggttctctgattcaggcgtcgaaagcgaaccaagttccttcgctactcaccccaacaccgacttggtgttcgaaacagtccagggacagggaccgtgtaactccgagcggctgttcccccagctgctcatgaaaccagattataatgtgaaattcagccttggcaatcactgcaccgaatctacctcggcaatctctgaaattcagagcagccttacttctattaacagcctgcccagcgacgacgaactctcacccgatgagaacagtaaaaagtctgtcgtgcccgaatgccatcttaatgactctaagacggtgctgaaccttggcaccacagatcttcctaagtgtgacgataccaagaagtcctcaataactctgcagcagcagagcgtcgtattcagtggtaatctggacaatgaaaccgtcgctatccattcacttaattcatcgatcaaagatcccctgcagttcgtgttttcggacgaagaaactagttcagacgtcaagagctcctgctccagtaagccgaacttggatacgatgtgtaaaggcttccagtctccggataagagtaataacagcaccgggacggctatcactctcaattctaagctaatatgccttggtacaccttgcgtcatatccgggtccatatcttccaacacggacgttagtgaggaccgtaccatgaagaaaaattcagatgttctaaatctgactcaaatgtacagcgagattccaactgtagaatcagagacccacctcggcacgtccgaccccttttctgcctcaaccgacatcgtgaagcaaggtttagtggagaactatttcggatcccagtctagtaccgatatatcagacacctgtgctgtcagttacagtaacgctctgtccccacagaaggaaacctctgagaaggaaattagcaatctccaacaggagcaggataaagaagatgaggaggaggagcaggatcagcagatggtgcagaatgggtattacgaagagactgattacagtgccctggatgggactattaacgcgcactacacctctcgcgacgagctgatggaggagcggttgactaaatccgaaaaaattaatagtgattatttgcgggatgggatcaatatgcccactgtttgtacatccgggtgtctcagcttcccatctgcgccccgggagagtccatgtaacgttaagtacagcagcaaatccaagttcgatgccataacaaaacagccatcgagcacaagctacaacttcactagctccattagctggtacgagagctcgccaaagccacagattcaagcctttcttcaagcgaaggaagagctgaagctcctgaagcttcctggttttatgtacagcgaagtgcccctgcttgcatccagcgtgccttatttctctgtcgaggaagaggatggatctgaggacggcgtgcatctgatcgtgtgtgtgcatgggctcgatggtaatagtgccgacttgaggttggtgaagacctacatagagctgggcttgcctggaggacggatcgatttcctgatgagtgaaaggaaccagaatgacacttttgctgactttgacagcatgacagataggctgctagatgagatcatccagtatattcagatctacagcctgaccgtctccaaaatctcgttcatcggccacagtctgggcaatttgatcatccggtccgtgcttactagaccaagattcaagtactacctcaataagttgcacactttcctgagcctgagcggcccccatctaggcactctatataactcgtccgccctggtgaacaccggtctgtggttcatgcagaaatggaagaagagtggcagtctgctccaacttacatgcagggatcacagcgacccacgacaaacatttttgtataagctgagtaataaggctggtctccattacttcaagaacgtagtcctcgttgggtccctccaggacagatatgtcccatatcactcagctaggattgagatgtgcaaaacagcgcttaaagataaacaaagtgggcagatatacagcgaaatgatccacaatctgttgagacccgttctgcagtccaaggattgtaacctcgtgcgttacaacgttattaacgcattacccaatacagccgacagcctgattggacgggccgcccacatcgctgtactggactccgagatctttctggagaaattcttccttgtggccgcattgaagtatttccagtag

SEQ ID NO: 205972 - DNA, 3909 bp, Artificial Sequence
  derived and/or modified sequence
atgaccgaggtgcaggccatggtggagttcagcgtggagctgaacaagttttataacgtggatcttttccagcgggggaagacgtttcaaatcctttataagaacgaagaggtcgtgctaaacgacgtgatgatcttcaaagtaaagatgcttctcgacgaacgcaaaatcgaggaaacactggaggagatgaatttcctgctctcactggatcttcacttcacggacggcgactattctgctgacgatcttaatgctctgcaactgatctcttctcggacactgaaacttcatttctctccccaccgcgggttgcatcaccacgtaaatgtgatgttcgactactttcatctgagtgtagtctctgtgaccgttcatgcttccttggtcgccctgcaccagcctttgatcagtttccctaggccagttaagactacatggctgaatcgcaatgccccagcacaaaataaggactccgtgatacctacccttgagtccgttgttttcgggatcaattataccaaacagttgtcaccggatggttgctcgtttatcatagcagacagcttcctgcatcacgcataccgcttccactatactctttgcgcaacactgctgctggcctttaaagggttgcacagctactttattacagtaaccgaggagataccatcatgccagaagctcgagctggcaaaagcaaacatgcagctgctctacgagcggctcctgagacgcaagcaattaaggacgcaaaaggataatcacctcgaggaaatggatgtggaggcccgccttactgaactgtgcgaagaggtgaaaaagatcgaaaatcccgacgagctggctgagctgataaacatgaatcttgcccagctgtgctccctgctcatggccctgtggggacagtttctagaggtaatcacactccacgaggagctgaggatactcctcgcccaggaacatcataccctccgggtgcgacgcttcagtgaggcgtttttctgtttcgagcatcctcgggaagccgctatcgcctatcaggagttacatgctcagagtcaccttcagatgtgtacagctatcaaaaatacctcattttgttcttccctgccaccactccctattgagtgcagtgaattagatggggacctcaacagtctgcctattatctttgaggaccgataccttgactcagtcaccgaaggaaagctggatatcagccaggacgacagcgagatcactcaaatggaacacaacctggcaagtcgacggtctagtgacgattgccacgatcaccagacaacacctagcctcggcgtacggaccatcgagatcaagcctagcaataaagatcccttctctggagagaatattaccgtcaaactcgggccttggactgaattgaggcaggaggaaatcttggtcgataacctgctgcctaactttgaatcgctcgaaagtaacggcaagtcaaaaagtatcgaaattacatttgaaaaggaagctctgcaggaagccaagtgcctttctataggtgagtctttaactaaactaaggagcaatttgccagccccgagcaccaaggagtatcacgtcgttgttagtggcgacaccattaaactgcccgatatttccgcaacgtacgcatcatcaaggttttcagactcgggtgttgaaagcgagccctctagtttcgcaacacacccgaatacagatctagtctttgagacagtgcagggccaggggccctgtaactccgagcggctgttccctcagttgttaatgaaacctgattacaacgtgaaattcagcctagggaaccattgcacagagagcacaagcgccatttccgagatacagtcctccctgacatcaatcaattctcttccctccgatgacgagttgtctcccgatgaaaacagcaaaaaatctgtggtgccagaatgtcaccttaacgactcgaagaccgtgcttaaccttgggaccactgacctgccaaagtgtgatgacacgaagaagtcatccattacactgcaacagcagtccgtggtcttttccgggaacctagacaacgagacggtggctatccattcccttaatagttccattaaagatccgctccagttcgtattttcggatgaggagacgagctctgatgtaaagagcagttgcagttcaaagccaaatctggataccatgtgcaaggggtttcagtccccggacaaatctaacaattccactgggaccgctattaccctcaatagcaaactgatatgtctggggactccgtgtgtcatctccggaagcatcagctccaacaccgacgtatcagaagaccgaactatgaagaagaactctgacgtattaaacttgacacagatgtactcagaaattccaactgtggaaagcgaaacccacctggggaccagtgatcctttttccgcttccactgatatcgtaaagcagggcttggtggaaaattacttcgggagccagtctagtactgacatctccgatacttgcgcagtgtcttacagtaacgctctgtccccccagaaggaaacttcagagaaagagatttccaacctgcagcaggaacaagataaggaagatgaggaggaggagcaggaccagcagatggttcagaatggctattacgaggaaactgactattccgctctcgatggcaccataaatgctcactacacatcccgggacgaattaatggaagagcgacttactaagagtgaaaagatcaacagtgactacctccgggacgggatcaacatgcctaccgtttgcacgtccggctgcctatcctttcctagcgccccaagagaaagcccttgcaatgtgaagtatagttcaaagtcaaaatttgacgcaattacgaaacaaccgtctagcacaagttacaatttcactagctccatttcgtggtacgaatccagccctaagccacagatccaggcttttctacaggccaaagaggaacttaagctgctgaagctcccagggtttatgtatagtgaagtaccactcctcgcctcgtcagtcccatatttcagcgtcgaagaggaggacggcagtgaagacggagtccatctgatagtctgtgtccatggattggacggaaactccgctgacctccgcctggtcaagacttacattgagctgggcttgcctggcggccgcatcgatttcctcatgagcgagaggaatcagaacgacacattcgccgactttgactctatgaccgatcgactccttgatgaaattattcagtatatacaaatctactccttaaccgtgtctaaaatatcttttatcggtcattctctcggaaacctcattattcggtccgtgttaacacggccacgcttcaaatactacttgaataagttgcacaccttcctgagcctgtccggtcctcacctgggtaccctgtacaattcaagtgccttagtgaataccgggctgtggtttatgcagaagtggaagaaatccggatctctgctgcagctgacttgtcgggatcactccgacccccggcagacatttctgtataagctgtccaataaggctggcctgcattacttcaagaacgtggttctcgttggatcattgcaagatcgttatgtgccataccactcggcccggatagagatgtgcaagactgccctcaaagataaacagtcaggacagatctacagtgaaatgattcataacttgttgcgtcctgtgctccagagcaaggattgtaatctggtgcgctacaatgtgatcaacgccctccctaatacggccgatagcctgattggcagggctgctcacatcgccgttctggacagcgagattttcctggaaaagttttttttggtcgccgctctgaagtactttcagtag

SEQ ID NO: 205973 - DNA, 3909 bp, Artificial Sequence
  derived and/or modified sequence
atgaccgaggttcaggctatggtcgagttttctgtggaacttaacaaattttacaacgtagacctatttcagcgaggcaagactttccagattctgtacaaaaatgaggaggtggtcttgaatgatgtgatgattttcaaagtgaagatgttgctagatgaaaggaaaatagaggagaccctcgaagaaatgaacttcctcttatccctagacctccacttcaccgatggggactactccgccgacgacctgaatgccttacaactgatctcttcacgcaccctcaagctgcatttttctccccatcggggtcttcaccatcacgtgaatgtgatgttcgattacttccacttgtcagtcgtcagcgtcactgtccacgcttccctcgtggctctccatcagcccctcatctctttcccacgccctgtgaagactacctggcttaatcgtaacgctccggctcaaaacaaagattcggtgatacctactctggagtccgtagtcttcggcatcaattacacaaagcaactaagccccgacggatgttctttcatcattgcggatagcttccttcatcacgcttacagattccactataccctttgtgccacactattactggctttcaagggtttacattcctacttcattactgttactgaagagataccctcctgccaaaagctggaactcgctaaagccaacatgcagctgttgtatgagcgtttgctccgtcggaaacaattgcgtactcagaaggacaaccatctggaagaaatggacgtggaagcgaggctgactgagctctgtgaggaggtcaagaaaattgaaaacccagatgaactggccgaactgattaacatgaacctcgctcaactgtgttcgctcctcatggcactgtggggtcagtttctggaagttataaccctgcatgaggaactgagaatcctcttggcccaagaacaccacacgcttagggtccggagatttagcgaggcatttttttgcttcgaacacccaagagaagctgccatcgcctaccaggagctccacgcccagagccacttgcaaatgtgcaccgccatcaagaataccagcttttgttcttctctgccaccactgcccatcgagtgctccgagctggatggcgatctcaattccctgccaattattttcgaagatcgctatctggattcagtgacagagggaaagctggacatcagccaagatgactctgagatcacacagatggagcacaacctcgctagccggagatctagtgacgactgccacgaccatcagactactccaagcctgggtgtccgcacaatcgaaatcaaaccgtcaaacaaggacccgttttcaggcgagaacatcaccgtcaaactgggcccatggaccgaattacggcaggaagaaattctggtggacaacctactccctaactttgagtccctggaaagcaatggaaagtcaaaatccatcgaaattaccttcgagaaggaggctttacaagaggccaaatgcttgtctattggagagagcttaactaaactgaggtcaaatctgcctgccccatcaactaaggaataccatgtcgttgtatctggggataccattaagcttccagacatctctgccacgtacgccagctctcgatttagtgactccggtgtggagagcgagcctagcagttttgccactcatcccaataccgatttggtgtttgaaactgttcagggtcagggcccatgcaattctgaacgattatttccacagctgttgatgaagccagactataacgtaaagttttcccttggtaatcattgtaccgagagtacatctgcaatctccgagattcagagctctctcacctccatcaactccctcccaagcgacgacgagctctctcccgacgagaactccaagaagtctgtagtgccggagtgccacctgaatgattctaaaacagtcttgaatttgggcaccactgaccttcctaaatgtgacgacactaagaagtccagcatcactctgcaacagcagtctgtggtgttttcaggaaaccttgacaacgagacagtggcaattcatagcctcaattcttctatcaaggatccactgcagtttgtgttttctgatgaagaaacaagctctgatgtgaagtccagttgcagctccaaaccaaacctggatacaatgtgcaagggattccaaagcccagataaaagcaataacagcacaggcaccgcgatcacactgaacagtaaattgatatgtttagggactccatgtgtgatttctggaagtattagtagtaatactgacgtgagtgaagacagaacaatgaaaaagaacagcgatgtacttaatctgacccagatgtacagtgagattcccactgtggagagcgagacacaccttgggacatctgaccctttttctgcctcaaccgatattgttaagcagggactggtcgagaactatttcggaagtcaaagcagcacagacatctcagatacctgcgccgtgtcatactcgaacgccttgtcaccacaaaaggagaccagcgagaaggaaatctctaacctgcagcaagagcaggataaggaggatgaggaagaagaacaagaccagcagatggtgcagaatggatactatgaggagaccgattattctgctctggacgggaccattaatgcacactacacgtcccgtgacgagctaatggaggagcgactcacgaaaagcgagaagatcaatagcgactacctccgggacggaattaacatgcctaccgtgtgtacgagtggttgcctgagctttcccagcgccccaagggagagcccttgtaatgttaaatactctagcaaatccaagttcgacgctatcactaagcagccctccagcaccagctataatttcacttcttcgatcagttggtacgaaagtagccctaagcctcagatccaggcgttcctccaggctaaggaggagctgaaattgttgaagttaccaggatttatgtactcggaggttcctctcctggcctcctctgtgccttatttttcagtcgaggaggaagatggcagcgaggacggagtgcacctgatcgtctgtgtccatggactcgacggcaattcggccgacctcaggctggtaaagacttatatcgagcttggtctccccggaggacggatcgactttctgatgagtgaacggaatcagaacgacactttcgctgactttgattcaatgaccgatcggcttctggatgagattatacagtatatccagatttactccctgacagtttctaaaatctcatttataggccatagtctgggcaaccttattattcgttccgtgctgactagaccccgtttcaaatactatctcaataaacttcacacctttctaagcctgtctggaccccatttagggacactgtataatagctcagccttggtaaacacaggcctttggtttatgcagaagtggaaaaagagtgggagcctgctgcagctgacgtgccgcgaccactccgatccgaggcaaacattcctgtacaaactgtcaaataaagcaggactccactactttaaaaatgtcgtcttagttggttctttacaggatcggtatgtcccctatcacagtgcaagaattgagatgtgtaagacagccctcaaggataaacagtctgggcagatctatagtgagatgatccacaatctgctaaggcccgtcctgcaatcaaaggactgcaatttagtgcgctacaatgtgatcaacgccttgccaaacacggcagacagccttatcggacgagcagcacacattgccgtgttggatagtgaaattttcctggagaagtttttcttggtcgcagctctgaaatattttcagtag

SEQ ID NO: 205974 - DNA, 3909 bp, Artificial Sequence
  derived and/or modified sequence
atgaccgaggtccaggcaatggtggaattttccgtggaacttaataagttttacaacgtggatttgttccagagagggaaaactttccaaatcttatacaagaatgaggaagtggtgctgaatgacgtgatgatttttaaggtcaaaatgctgttggatgagagaaagatcgaagagacactcgaggaaatgaacttcctcctgagcctcgacttgcacttcacagatggggattattccgctgacgacttgaacgcactgcagctgatttccagccgaaccttgaaactgcattttagccctcatcggggactgcaccaccacgtcaacgtgatgttcgattatttccatctgtctgtggtctccgttactgtgcatgctagccttgttgctttacaccagcccctgatatcattccctcggcctgtaaaaacgacctggctgaataggaatgctcctgcacagaataaggactctgtgatcccgacattagaatcagtggtgtttggcattaattacactaaacagctgtcgcccgatgggtgtagctttattatcgcagacagctttctgcaccacgcctataggttccattacactctgtgcgctacgctgctgctagcctttaaaggcttgcactcctacttcataaccgtgacagaggagattccctcttgtcaaaagctagagcttgcgaaggctaacatgcaactgctctatgagagattgcttaggcgcaagcagctaagaacgcagaaagataaccacctcgaagaaatggacgtcgaagcccgtctgacggagctttgtgaagaagtaaagaaaatagagaaccctgacgaacttgcagagttgatcaatatgaacctggcccagttgtgtagcctcttaatggcgctatgggggcagttcctggaggtaatcactctccacgaggagctaagaattttgcttgcccaggagcaccatactcttcgcgtgcgcagatttagcgaggcgttcttctgttttgaacaccctcgagaagcagcgatcgcctaccaggagctgcacgcccagagccatctccagatgtgtacagctattaagaatactagtttttgttcctctctcccaccactcccaatcgaatgtagcgaactggacggcgatctgaattctctacctatcatttttgaagaccgttatctggacagtgtgaccgaaggtaagctcgatattagtcaggacgacagtgagatcacccagatggaacacaatctggcatctcgccgttcttccgacgactgtcacgatcaccaaacaactccttctctgggagtgcggactattgagattaaaccctccaacaaggacccatttagcggagaaaacatcaccgtcaagctggggccttggaccgagctgaggcaggaagagatcctggtggacaacctgctgcctaatttcgaaagcctcgagagcaacggaaagagcaaatccattgaaatcactttcgagaaggaggcactccaggaggctaaatgcctctcaatcggcgaatctcttacaaaactgaggagtaatttgccagctccttcgacaaaagagtaccacgtggttgtgtcaggtgataccattaagctgccagacattagcgcaacgtacgcctcttcccgcttctctgacagcggcgtggaatcagagccaagctcttttgctacacaccctaatacggatctggtgttcgaaactgtacagggccaaggcccatgtaattctgagagattatttccccagctgctgatgaagcctgactataacgttaagttcagcctgggaaatcactgtactgaatctacctccgccattagcgagattcagagttcactcacaagcataaacagtctgccatcagacgatgagctatctcccgatgaaaatagcaagaagtctgtggtgcccgagtgtcacctgaacgacagtaagaccgtgctgaatttgggaaccacagacctccccaaatgcgatgatactaagaagtccagtattactctccaacagcagtccgtagtgttcagtggaaatctcgacaacgagacagtggccattcacagcctcaacagctccataaaggatccgttgcagttcgtattctccgacgaggaaacctcatctgacgtgaaaagcagttgttctagtaaacctaacctggacaccatgtgtaagggattccagtcccccgacaaaagcaacaactccactggcaccgcgataacactaaacagcaaactgatctgccttggaacgccatgcgtgatctccggcagcatcagtagtaacactgacgtgtctgaagacagaacaatgaagaagaattcagacgtcctcaatctaacccagatgtactctgagattcccaccgtggaatccgagacccacctgggaacaagtgatcccttttctgctagcacagatatcgtaaagcagggcttagttgaaaattatttcgggagccaatcctctacagatatcagtgatacatgtgccgtcagttactcaaacgccctgagcccacagaaggagacttcagagaaagagatcagcaatctccagcaggagcaagacaaagaggacgaagaggaggaacaggaccaacaaatggtgcagaacgggtattacgaggagactgattatagcgccctagatggcaccattaacgcacactacacatccagagacgaactcatggaggaacgcctgacaaagagcgagaaaataaacagcgattaccttagagatggtatcaacatgccaactgtatgcacttctggctgtttatccttccccagtgcacctagagagagcccgtgtaacgtaaagtactcctcaaaatccaaatttgatgcgataacaaagcagccaagctccactagttacaatttcacaagcagtatttcatggtatgaatcttcccctaaaccccagatacaggcctttttacaggccaaggaggagcttaaactgctgaaactgccaggctttatgtattctgaggtcccactcctagctagtagtgtcccatatttttcagtggaagaggaggatgggagcgaggacggtgtacacttaatcgtttgcgtccacggactggatggcaacagtgccgacttaaggttggtgaaaacttatatcgaattaggcctccctggagggcgaatcgactttctgatgtcagagcgcaaccagaatgacacgtttgcagacttcgattccatgactgaccgccttctggacgaaataatccagtatatccagatctacagtctcaccgtgtcaaaaatctcattcatcggccactctttgggcaaccttattattagatctgtgctaacgagacctcgcttcaaatactatttgaacaagctccacacctttctatccctgagcgggccacatctggggacgctgtacaactctagcgctcttgtcaatacaggcttatggtttatgcagaaatggaagaaaagtggttctcttctgcagctcacatgcagggaccactctgatcccaggcagaccttcttgtacaaacttagcaataaggctggcctgcattattttaagaacgtggtcttagttgggagtctccaggatcgctatgtgccgtatcacagtgcaagaatcgagatgtgcaaaaccgccctgaaggacaagcagtctggtcaaatctatagcgaaatgatccacaacctgcttagaccagttctacaaagcaaggattgtaatctcgtccggtacaacgtgattaacgcactcccaaatactgcggactccctcattggacgtgcggctcatattgcggtgttggattccgagatttttctggaaaagttcttcctcgtggccgcactaaaatactttcagtag

SEQ ID NO: 205975 - protein, 1659 aa, Artificial Sequence
  derived and/or modified sequence
MEAPSGSEPGGDGAGDCAHPDPRAPGAAAPSSGPGPCAAARESERQLRLRLCVLNEILGTERDYVGTLRFLQSAFLHRIRQNVADSVEKGLTEENVKVLFSNIEDILEVHKDFLAALEYCLHPEPQSQHELGNVFLKFKDKFCVYEEYCSNHEKALRLLVELNKIPTVRAFLLSCMLLGGRKTTDIPLEGYLLSPIQRICKYPLLLKELAKRTPGKHPDHPAVQSALQAMKTVCSNINETKRQMEKLEALEQLQSHIEGWEGSNLTDICTQLLLQGTLLKISAGNIQERAFFLFDNLLVYCKRKSRVTGSKKSTKRTKSINGSLYIFRGRINTEVMEVENVEDGTADYHSNGYTVTNGWKIHNTAKNKWFVCMAKTAEEKQKWLDAIIREREQRESLKLGMERDAYVMIAEKGEKLYHMMMNKKVNLIKDRRRKLSTVPKCFLGNEFVAWLLEIGEISKTEEGVNLGQALLENGIIHHVSDKHQFKNEQVMYRFRYDDGTYKARSELEDIMSKGVRLYCRLHSLYTPVIKDRDYHLKTYKSVLPGSKLVDWLLAQGDCQTREEAVALGVGLCNNGFMHHVLEKSEFRDESQYFRFHADEEMEGTSSKNKQLRNDFKLVENILAKRLLILPQEEDYGFDIEEKNKAVVVKSVQRGSLAEVAGLQVGRKIYSINEDLVFLRPFSEVESILNQSFCSRRPLRLLVATKAKEIIKIPDQPDTLCFQIRGAAPPYVYAVGRGSEAMAAGLCAGQCILKVNGSNVMNDGAPEVLEHFQAFRSRREEALGLYQWIYHTHEDAQEARASQEASTEDPSGEQAQEEDQADSAFPLLSLGPRLSLCEDSPMVTLTVDNVHLEHGVVYEYVSTAGVRCHVLEKIVEPRGCFGLTAKILEAFAANDSVFVENCRRLMALSSAIVTMPHFEFRNICDTKLESIGQRIACYQEFAAQLKSRVSPPFKQAPLEPHPLCGLDFCPTNCHINLMEVSYPKTTPSVGRSFSIRFGRKPSLIGLDPEQGHLNPMSYTQHCITTMAAPSWKCLPAAEGDPQGQGLHDGSFGPASGTLGQEDRGLSFLLKQEDREIQDAYLQLFTKLDVALKEMKQYVTQINRLLSTITEPTSGGSCDASLAEEASSLPLVSEESEMDRSDHGGIKKVCFKVAEEDQEDSGHDTMSYRDSYSECNSNRDSVLSYTSVRSNSSYLGSDEMGSGDELPCDMRIPSDKQDKLHGCLEHLFNQVDSINALLKGPVMSRAFEETKHFPMNHSLQEFKQKEECTIRGRSLIQISIQEDPWNLPNSIKTLVDNIQRYVEDGKNQLLLALLKCTDTELQLRRDAIFCQALVAAVCTFSKQLLAALGYRYNNNGEYEESSRDASRKWLEQVAATGVLLHCQSLLSPATVKEERTMLEDIWVTLSELDNVTFSFKQLDENYVANTNVFYHIEGSRQALKVIFYLDSYHFSKLPSRLEGGASLRLHTALFTKVLENVEGLPSPGSQAAEDLQQDINAQSLEKVQQYYRKLRAFYLERSNLPTDASTTAVKIDQLIRPINALDELCRLMKSFVHPKPGAAGSVGAGLIPISSELCYRLGACQMVMCGTGMQRSTLSVSLEQAAILARSHGLLPKCIMQATDIMRKQGPRVEILAKNLRVKDQMPQGAPRLYRLCQPPVDGDL

SEQ ID NO: 205976 - protein, 1561 aa, Artificial Sequence
  derived and/or modified sequence
MEAPSGSEPGGDGAGDCAHPDPRAPGAAAPSSGPGPCAAARESERQLRLRLCVLNEILGTERDYVGTLRFLQSAFLHRIRQNVADSVEKGLTEENVKVLFSNIEDILEVHKDFLAALEYCLHPEPQSQHELGNVFLKFKDKFCVYEEYCSNHEKALRLLVELNKIPTVRAFLLSCMLLGGRKTTDIPLEGYLLSPIQRICKYPLLLKELAKRTPGKHPDHPAVQSALQAMKTVCSNINETKRQMEKLEALEQLQSHIEGWEGSNLTDICTQLLLQGTLLKISAGNIQERAFFLFDNLLVYCKRKSRVTGSKKSTKRTKSINGSLYIFRGRINTEVMEVENVEDGTADYHSNGYTVTNGWKIHNTAKNKWFVCMAKTAEEKQKWLDAIIREREQRESLKLGMERDAYVMIAEKGEKLYHMMMNKKVNLIKDRRRKLSTVPKCFLGNEFVAWLLEIGEISKTEEGVNLGQALLENGIIHHVSDKHQFKNEQVMYRFRYDDGTYKARSELEDIMSKGVRLYCRLHSLYTPVIKDRDYHLKTYKSVLPGSKLVDWLLAQGDCQTREEAVALGVGLCNNGFMHHVLEKSEFRDESQYFRFHADEEMEGTSSKNKQLRNDFKLVENILAKRLLILPQEEDYGFDIEEKNKAVVVKSVQRGSLAEVAGLQVGRKIYSINEDLVFLRPFSEVESILNQSFCSRRPLRLLVATKAKEIIKIPDQPDTLCFQIRGAAPPYVYAVGRGSEAMAAGLCAGQCILKVNGSNVMNDGAPEVLEHFQAFRSRREEALGLYQWIYHTHEDAQEARASQEASTEDPSGEQAQEEDQADSAFPLLSLGPRLSLCEDSPMVTLTVDNVHLEHGVVYEYVSTAGVRCHVLEKIVEPRGCFGLTAKILEAFAANDSVFVENCRRLMALSSAIVTMPHFEFRNICDTKLESIGQRIACYQEFAAQLKSRVSPPFKQAPLEPHPLCGLDFCPTNCHINLMEVSYPKTTPSVGRSFSIRFGRKPSLIGLDPEQGHLNPMSYTQHCITTMAAPSWKCLPAAEGDPQGQGLHDGSFGPASGTLGQEDRGLSFLLKQEDREIQDAYLQLFTKLDVALKEMKQYVTQINRLLSTITEPTSGGSCDASLAEEASSLPLVSEESEMDRSDHGGIKKVCFKVAEEDQEDSGHDTMSYRDSYSECNSNRDSVLSYTSVRSNSSYLGSDEMGSGDELPCDMRIPSDKQDKLHGCLEHLFNQVDSINALLKGPVMSRAFEETKHFPMNHSLQEFKQKEECTIRGRSLIQISIQEDPWNLPNSIKTLVDNIQRYVEDGKNQLLLALLKCTDTELQLRRDAIFCQALVAAVCTFSKQLLAALGYRYNNNGEYEESSRDASRKWLEQVAATGVLLHCQSLLSPATVKEERTMLEDIWVTLSELDNVTFSFKQLDENYVANTNVFYHIEGSRQALKVIFYLDSYHFSKLPSRLEGGASLRLHTALFTKGELQAWGREDHGGRAKATKHTGSQPPARPRHLPSQCWRTWRGCLLQAARPRRICSRTSTRSPWRKFSSITANSGHFTWSGLTCPRMPAPRR

SEQ ID NO: 205977 - DNA, 4980 bp, Artificial Sequence
  derived and/or modified sequence
atggaggcaccctcgggatccgagcctggcggcgatggcgccggagattgcgctcatcccgaccccagggcaccgggagccgccgcacccagttcaggtcccggtccatgcgccgccgcccgggaaagtgaaagacagttgagactgaggctctgcgtgctcaacgagatcctaggcaccgaaagggactacgttggcaccctgcgtttcctgcaaagcgcgttcctgcacaggatcaggcagaatgtcgccgattccgtggagaaaggactcaccgaggagaatgttaaggtgctcttttccaacatcgaagatatcctggaggtgcataaggatttcctggccgctctggagtactgcctgcacccagagccacagagccagcacgaactgggcaatgtgttccttaagttcaaggacaagttttgcgtgtacgaagagtactgttctaaccacgagaaggccctgcgcttgctcgtagaattgaacaagatccctacagttagagcattcctgttatcctgtatgcttctgggcggccggaagaccacagatatccccctggaaggatatctgttatcacctatccaacgcatctgtaagtatcctctgctattgaaagagctcgcaaagcgaactcccgggaagcacccggaccatcctgccgtgcagagtgcccttcaggctatgaagacagtatgctctaacataaatgagacaaaacgccaaatggaaaagcttgaagctttagaacagctccagagccacatcgagggatgggaaggcagcaacctcaccgacatttgtacccaactactgctccaaggtacactcctgaagatttctgcagggaatatccaggaacgcgctttcttcctgttcgataacctcttagtgtactgtaaaaggaaaagcagggtgacgggctctaagaagagcactaagcgcacgaagtctattaatggctccctctatattttccgcggtcgaatcaacactgaggtgatggaagtggagaatgtggaagatgggacggccgattaccacagcaatggttatactgtgaccaatggttggaagatacacaacactgcaaagaacaagtggttcgtctgtatggcaaagaccgccgaggagaagcagaaatggctggacgcgatcattagggagcgcgaacagcgggaatcactcaagcttgggatggagagagatgcgtacgttatgattgccgaaaaaggcgaaaagctgtaccatatgatgatgaacaagaaggtgaatctcataaaagaccggcggaggaaactgagcactgtccccaaatgttttctgggaaatgagttcgtggcttggctactagagataggcgaaatcagtaagaccgaggaaggagtgaacctgggccaggccctcttggagaacgggatcatccatcacgtctcggataaacaccaatttaagaatgaacaggtgatgtacaggtttaggtacgacgatggaacctacaaagctagaagcgagctggaggacattatgtctaaaggagtgagactgtactgccggctccactccttgtatacacctgtgatcaaggaccgcgattaccaccttaagacttataagtcggtgctccctggtagtaagctggtcgactggttgctggcccagggcgactgtcagaccagagaggaagcggtggctttaggcgtagggctctgcaacaacggattcatgcaccatgttctggagaagtccgaattcagagacgagtcacagtatttccgttttcacgccgatgaagagatggagggcaccagctctaaaaataagcagctgaggaacgatttcaagcttgtggagaacattcttgccaaaagactgctgattctgcctcaggaggaggactacggcttcgacatagaagaaaaaaataaagccgttgttgtcaagagcgtgcagagaggctcactcgcggaggtggctggccttcaggtcgggcgcaagatctactccatcaacgaagatttagtattcctgcgaccattttctgaggtcgagagtatactgaaccagtctttctgtagccgccggccattgcgtttactagttgcgaccaaggctaaagagatcatcaaaatcccagatcaacccgatacactttgttttcagattagaggtgcagcccccccctatgtgtatgcagttggacgggggagcgaggccatggctgccggactgtgtgccggccaatgtatcttgaaggtaaatggatcgaatgttatgaacgatggcgcaccagaggtgctggagcatttccaggcctttcgctctcgaagagaggaggcgctggggctttatcagtggatttaccacacacatgaagacgcgcaagaggcccgtgccagtcaagaggcatcaacggaggaccccagcggtgaacaggcacaagaggaggaccaagcagacagtgccttccctttgctgagcctcggccctcgattgtcactgtgtgaagatagtcccatggtgaccctgacagtcgacaatgtccatctggaacatggagtggtttatgaatacgtgagtactgccggcgtccggtgccacgtgctggaaaagatagtggaacccaggggttgcttcggcttgactgctaaaatattggaggccttcgcagccaacgacagtgtttttgtcgagaactgccggaggctaatggccctaagctccgcgatcgtgactatgccccatttcgagttcagaaatatctgtgacacaaaattagagtctatcggccagcggatcgcctgctatcaggaatttgccgctcagttaaagagccgcgttagcccgccgttcaagcaggcacccttggaaccccaccctctgtgtggcctcgacttctgccccaccaactgtcatatcaacctgatggaggtgtcctatcctaagactaccccttccgtgggtcgatccttctcgatacgtttcggacgcaagccatctctaatcggccttgatccagagcaaggccacctgaatcccatgtcttatacccagcactgtatcaccacaatggcggccccctcttggaaatgtttgcccgcagccgaaggcgatccacagggtcagggcctgcacgacggaagttttggccctgccagtgggactctgggacaggaagatagaggtctgtccttcctcctgaagcaggaggaccgcgagattcaggatgcatacttgcaactatttactaagctggacgtggcgctcaaggagatgaaacagtacgtgacacagattaatcggctgctgtctactatcacagagcctactagcgggggatcatgcgacgcctcccttgccgaggaggccagctccctgcccttagtatcagaggaaagcgaaatggatcgatctgaccacgggggaattaagaaggtgtgttttaaagtagcggaggaagatcaggaggactccgggcacgacacaatgtcttatagggacagctatagcgagtgcaatagcaacagggacagtgtcctgtcctatacatctgtgcgatcaaacagcagctacctgggatctgacgagatgggtagtggggacgagctgccctgtgatatgcgcatcccatccgacaagcaggacaagttgcatggctgtctggaacacctattcaaccaggtcgactctattaacgccctgctgaagggacccgtcatgagtcgagccttcgaggaaaccaagcatttcccaatgaaccattcccttcaagagtttaagcaaaaggaagagtgcaccattcgcgggcgatccctgatccagatctccattcaggaagacccatggaacctgccgaacagcatcaagaccctggtggacaacatccagaggtatgtcgaggatggtaagaatcaattactgctggccttactcaaatgtactgacaccgaattacaactgaggagggatgccattttttgccaggccttggtcgccgcggtctgtacattcagtaagcagctgcttgccgcgctcggatacagatacaacaacaacggagaatatgaggaatcctcacgcgacgcatctagaaaatggctggagcaggtggccgctaccggagttttgttgcattgccagtccctgctatcccctgccactgtgaaagaggaacgcacaatgctggaagatatctgggtaaccctttccgaactggacaacgtcaccttttctttcaagcaactcgacgagaactatgtggccaatacgaatgtgttctaccatatcgagggctctagacaggcactcaaggtcatcttctacctggactcataccattttagtaagctgcctagtagactggagggaggtgctagcttacggctacatacagccctgttcactaaggtgctggagaatgtggagggtctgccaagcccaggctcacaagccgcagaggatcttcagcaagatataaacgcccagagcttggagaaagtgcaacagtattatcggaagctcagggcattttatcttgagaggtctaatctgcccactgatgcctctacgaccgccgtgaagattgaccaattgatccgtcccataaatgcgctggacgagctgtgccggctcatgaagagcttcgttcatcctaaaccaggagcggccggctccgtgggggccggcctgattcccatctcctccgagctgtgctatagattgggtgcctgccagatggtaatgtgcggcacaggaatgcagcggagtacactgagtgtatccctggaacaagcagccatactagcccgctcccatggactcctgcctaaatgcattatgcaggccacagacatcatgaggaagcaaggtccccgggttgagattctcgccaagaacctcagggtaaaggaccagatgccccagggggctccaaggctctatcgcctctgccaacccccagtggatggtgatctgtag

SEQ ID NO: 205978 - DNA, 4686 bp, Artificial Sequence
  derived and/or modified sequence
atggaagcgcccagtggtagtgaacccggcggtgatggtgccggagactgtgcccacccagaccctagggcgcccggcgcagccgctccctctagtggaccaggcccctgcgctgcagcgcgtgagtctgagaggcagttgcggctgcgcctctgcgtgcttaacgagattctggggacagaacgagattacgtgggtaccctgagattcttgcaatctgcttttctccatcgcattcgacagaatgtagccgacagtgttgagaagggacttaccgaggaaaacgtaaaggttctgttttccaatatcgaggatatattggaagtccataaggattttttggcagcactagagtattgccttcaccctgagccccaatcgcagcatgaactcggtaacgtcttcttgaagttcaaagataagttttgtgtgtacgaggagtactgttctaatcacgaaaaggccctgcggttactggtggaactcaacaaaataccaaccgtaagagcgttcctcttgtcctgcatgctgttgggcgggcgtaaaacgacggacattcccctggagggataccttttgagccctatccagcgaatctgcaaatacccacttctgctgaaggagttggccaaacggactcctggcaagcaccctgatcatccagccgtgcagagcgccctacaggccatgaaaacagtgtgttcaaatatcaacgagacaaagagacagatggagaagttagaggctctagaacaattgcagtcgcatatcgaaggttgggaaggttcaaacttaaccgacatatgcacccagctcctgctgcaggggactctgctgaaaatttctgcgggcaatatccaggagcgggcattttttctgttcgataatctgctcgtgtactgcaaacggaaaagccgcgtgaccggctcaaagaagtcgacaaagaggaccaaatcaattaatggatctctgtacatattcagaggaagaattaatacagaagtaatggaggtagagaacgtggaggacggcactgctgattatcattctaacgggtacaccgtcaccaatggctggaagatccacaataccgcgaagaacaaatggtttgtttgtatggcaaagaccgccgaggaaaagcagaaatggctggatgccattatccgagagagggaacaacgcgaaagcctaaagttgggcatggagagagacgcctatgtaatgattgccgagaaaggcgagaagctgtaccacatgatgatgaacaagaaagtaaacctgatcaaggataggcgacgcaaactgagcactgtgcccaaatgtttcttaggcaatgagtttgtagcctggttgctggagattggagaaatctctaaaacagaagagggagtaaatctgggccaggcactgctggaaaatgggatcatccaccacgtctctgataaacatcagttcaagaacgagcaagtgatgtatcggtttcgttatgacgatggtacttataaggccaggtccgaacttgaagacataatgtctaagggcgtccgtctttactgcaggctgcactctctatatacgccagtgataaaggatcgggattaccaccttaaaacctacaagtctgtactccctggatcaaagctagtggactggctgctggcccaaggcgactgccagaccagggaagaagccgtggcactgggtgtggggttgtgcaacaacgggtttatgcatcacgtgctggagaaaagtgaatttcgggacgagagccagtacttccgcttccatgcggacgaagaaatggaaggtacatcttcaaagaacaagcagttgagaaatgatttcaaactagtagagaacatcttggccaaacgacttctaatactgccccaggaggaggattatggattcgacattgaagaaaagaacaaagccgtggtggtgaagtcggttcagcgcggttccctcgcagaagtggctggcctacaggtgggccgtaagatctacagtatcaatgaggaccttgtttttctgcgaccattcagcgaggtagagtctattcttaatcaaagcttctgcagtagacgccctctgaggcttctggtagccacaaaggctaaagaaattattaaaatccccgatcaaccagacactctgtgctttcaaattagaggcgcggctccaccatacgtgtatgcagtcgggcgcggctctgaggctatggccgctgggctttgtgcgggccagtgcattttaaaggtcaatgggtccaatgtgatgaatgatggggcgcccgaagtgttggagcactttcaggccttccgatcccgtcgagaagaggccctggggttgtaccaatggatctaccatacccacgaagatgcacaagaagcccgtgcatctcaagaagcctctacggaggaccctagtggcgaacaagcgcaagaagaagaccaggctgacagtgcttttcctctccttagtctgggtcccagactatccctgtgtgaagactctcctatggttaccctcaccgtcgacaacgtccatctggagcatggagttgtgtacgagtacgtttcaactgctggagttcggtgccatgttctcgagaagattgttgaaccacggggttgcttcggcttgactgctaagatcttagaggcttttgcagccaatgatagcgtcttcgtagagaactgtaggaggctgatggcactgtcctccgccatagttaccatgcctcacttcgagtttagaaacatttgtgacaccaaactcgaaagcataggacagcgtatcgcctgctatcaggaatttgcagcccagctcaaatcccgggtgtccccacccttcaagcaggctcccctggaaccccaccccctgtgtggtctcgacttttgccccacaaactgccacattaatctaatggaggtctcatatccgaagacaaccccctcagtggggagatcattttctatccgctttggaaggaagccatcccttatcggacttgaccccgaacagggccacctcaaccccatgagctacacccagcactgtataaccactatggccgctccctcctggaagtgcttgccggcggctgagggtgatcctcagggacagggcctccatgacggttcattcggccctgcctctggtactcttggacaggaagatcgcggcctctctttcctgctcaagcaggaggacagagagattcaggatgcttatctccaactctttacaaaactagatgtggcactcaaggagatgaagcagtacgtgacacaaataaatcgtctcttgtctacaatcaccgagccaacatctggtggctcctgtgatgccagtcttgccgaagaggccagttccctgcccttggtatccgaggagtccgagatggaccgcagcgaccacgggggcattaaaaaagtgtgctttaaagtagcagaagaggaccaggaggactctgggcacgatacaatgagctacagagattcctactccgagtgcaactccaatagagactcagtcctgagttacacctcagttaggagcaacagttcatatcttgggagcgacgaaatgggctctggtgacgaactgccatgtgacatgcgtatccctagcgataaacaggacaaacttcacgggtgtctcgagcatcttttcaatcaggtggattccattaatgcactgttgaaggggccggtgatgtctagggcctttgaagagactaagcacttccccatgaatcacagcctgcaagagttcaaacagaaagaggaatgcacaattcgcgggagatctcttatccagatctcaatccaggaagatccctggaacctgcccaactctattaagaccttggtggacaatattcagaggtacgtggaggacggcaagaaccagcttctgctcgcactgctaaagtgtacggacacagaattgcagctacggcgagacgcgatcttctgccaagcactcgtcgccgccgtttgtacattcagcaagcagcttctggccgccctgggatacagatacaacaacaatggagagtatgaggaatcatcccgtgacgcatccagaaaatggctcgagcaagtggccgcaactggagtacttctgcattgccagagcctgcttagccccgctaccgttaaagaggagcggactatgctcgaagatatctgggttacgctgagcgagctcgataatgtgactttctctttcaaacagctcgatgagaattacgttgcgaacacaaacgtgttctaccatatcgaaggctccagacaggcgctaaaagtaatcttctatctcgactcttaccacttttcaaagttgccatcacggttggagggaggtgcatccctgcggctgcataccgctttgtttactaaaggggaactccaagcctggggtcgtgaggaccacggaggacgcgccaaagccaccaagcacaccgggtcacaaccgcctgcacggcctcgccatctcccctcgcaatgttggaggacttggagaggctgtcttctgcaagccgctagaccacgtcgcatctgcagtagaacctccactaggtccccctggaggaaatttagcagtatcactgcaaactctggtcatttcacatggtccggcctcacctgcccgcggatgccagcgcctagacgttag

SEQ ID NO: 205979 - DNA, 4980 bp, Artificial Sequence
  derived and/or modified sequence
atggaggcccccagcggcagcgagcctggaggagatggagctggggactgtgcccacccagacccccgggcccctggagctgctgcccccagcagcggccctggcccctgtgccgccgcccgggagagcgagcggcagctgcggctgcggctgtgtgtgctgaatgagatcctgggcacagagcgggactatgtgggcaccctgcgcttcctgcagagcgccttcctgcaccgcatccggcagaatgtggccgacagcgtggagaagggcctgacagaggagaatgtgaaggtgctcttcagcaacatcgaggacatcctggaggtgcacaaggacttcctggccgccctggagtactgcctgcaccctgagccccagagccagcacgagctgggcaatgtgttcctgaagttcaaggacaagttctgtgtgtatgaggagtactgcagcaaccacgagaaggccctgcggctgctggtggagctgaacaagatccccaccgtgcgggccttcctgctgagctgcatgctgctgggcggcaggaagaccacagacatccccctggagggctacctgctgagccccatccagaggatctgcaagtaccccctgctgctgaaggagctggccaagaggacccctgggaagcacccagaccaccctgctgtgcagagcgccctgcaggccatgaagacagtgtgcagcaacatcaatgagaccaagaggcagatggagaagctggaggccctggagcagctgcagagccacatcgagggctgggagggcagcaacctgacagacatctgcacccagctgctgctgcagggcaccctgctgaagatctctgctggcaacatccaggagcgggccttcttcctgtttgacaacctgctggtgtactgcaagaggaagagccgggtgacaggcagcaagaagagcaccaagaggaccaagagcatcaatggcagcctgtacatcttccggggccgcatcaacacagaggtgatggaggtggagaatgtggaggatggaacagctgactaccacagcaatggctacacagtgaccaacggctggaagatccacaacacagccaagaacaagtggtttgtgtgcatggccaagacagctgaggagaagcagaagtggctggatgccatcatccgggagcgggagcagcgggagagcctgaagctgggcatggagagagatgcctacgtgatgattgctgagaagggggagaagctgtaccacatgatgatgaacaagaaggtgaacctgatcaaggacagaagaaggaagctgagcacagtgcccaagtgcttcctgggcaatgaatttgtggcctggctgctggagatcggggagatcagcaagacagaggagggcgtgaacctgggccaggccctgctggagaatggcatcatccaccacgtgtctgacaagcaccagttcaagaatgagcaggtgatgtaccgcttccgctatgatgatggcacctacaaggcccggtctgagctggaggacatcatgagcaaaggagtgcggctgtactgccgcctgcacagcctgtacacccctgtgatcaaggaccgggactaccacctgaagacctacaagtctgtgctgcccggcagcaagctggtggactggctgctggcccagggcgactgccagacccgggaggaggccgtggccctgggcgtgggcctgtgcaacaacggcttcatgcaccacgtgctggagaagtctgagttcagagatgagagccagtacttccgcttccacgcagatgaggagatggagggcaccagcagcaagaacaagcagctgagaaatgacttcaagctggtggagaacatcctggccaagaggctgctgatcctgccccaggaggaggactatggctttgatattgaggagaagaacaaggctgtggtggtgaagtctgtgcagaggggcagcctggccgaggtggccggcctgcaggtgggcaggaagatctacagcatcaatgaagacctggtgttcctgcggcccttcagcgaggtggagagcatcctgaaccagagcttctgcagcagaagacccctgcggctgctggtggccaccaaggccaaggagatcatcaagatcccagaccagcctgacaccctgtgcttccagatccggggggccgccccaccctacgtgtatgctgtgggccggggcagcgaggccatggctgctggcctgtgtgccggccagtgcatcctgaaggtgaatggcagcaatgtgatgaatgatggagcccctgaggtgctggagcacttccaggccttccgcagcagaagagaggaggccctgggcctgtaccagtggatctaccacacccatgaagatgcccaggaggcccgggccagccaggaggccagcacagaggaccccagcggggagcaggcccaggaggaggaccaggccgacagcgccttccccctgctgagcctgggcccccggctgagcctgtgtgaggacagccccatggtgaccctgactgtggacaacgtgcacctggagcacggcgtggtgtatgaatatgtgtccacagctggggtgcgctgccacgtgctggagaagatcgtggagccccggggctgcttcggcctgacagccaagatcctggaggcctttgctgccaatgattctgtgtttgtggagaactgccggcggctgatggccctgagcagcgccatcgtgaccatgccccactttgagttcaggaacatctgtgacaccaagctggagagcatcggccagagaattgcctgctaccaggagtttgctgcccagctgaagagccgggtgagcccccccttcaagcaggcccccctggagccccaccccctgtgtggcctggacttctgccccaccaactgccacatcaacctgatggaggtgtcctaccccaagaccaccccatctgtgggccgctccttcagcatccgcttcggcaggaagcccagcctgattggcctggaccctgagcagggccacctgaaccccatgagctacacccagcactgcatcaccaccatggccgcccccagctggaagtgcctgcctgctgctgagggggacccccagggccagggcctgcatgatggcagctttggacctgccagcggcaccctgggccaggaggaccggggcctgtccttcctgctgaagcaggaggaccgggagatccaggatgcctacctgcagctgttcaccaagctggatgtggccctgaaggagatgaagcagtatgtgacccagatcaaccggctgctgagcaccatcacagagcccaccagcggcggcagctgtgatgccagcctggccgaggaggccagcagcctgcccctggtgtctgaggagagcgagatggacagaagtgaccatggaggcatcaagaaggtgtgcttcaaggtggccgaggaggaccaggaggacagcggccatgacaccatgagctacagagacagctacagcgagtgcaacagcaacagagattctgtgctgagctacacctctgtgcgcagcaacagcagctacctgggcagtgatgagatgggcagcggagatgagctgccctgtgacatgaggatccccagcgacaagcaggacaagctgcacggctgcctggagcacctgttcaaccaggtggacagcatcaatgccctgctgaagggccctgtgatgagccgggcctttgaggagaccaagcacttccccatgaaccacagcctgcaggagttcaagcagaaggaggagtgcaccatccggggccgcagcctcatccagatcagcatccaggaggacccctggaacctgcccaacagcatcaagaccctggtggacaacatccagagatatgtggaggatggcaagaaccagctgctgctggccctgctgaagtgcacagacacagagctgcagctgcggagagatgccatcttctgccaggccctggtggccgctgtgtgcaccttcagcaagcagctgctggccgccctgggctaccgctacaacaacaatggagaatatgaggagagcagcagagatgccagcaggaagtggctggagcaggtggccgccaccggggtgctgctgcactgccagagcctgctgagccctgccaccgtgaaggaggagaggaccatgctggaggacatctgggtgaccctgtctgagctggacaacgtgaccttctccttcaagcagctggatgagaactacgtggccaacaccaacgtgttctaccacatcgagggcagccggcaggccctgaaggtgatcttctacctggacagctaccacttcagcaagctgcccagccggctggagggcggggccagcctgcggctgcacacagccctcttcaccaaggtgctggagaatgtggagggcctgcccagccctggcagccaggccgctgaggacctgcagcaggacatcaatgcccagagcctggagaaggtgcagcagtactacaggaagctgcgggccttctacctggagaggagcaacctgcccacagatgccagcaccacagctgtgaagattgaccagctgatccggcccatcaatgccctggatgagctgtgccgcctgatgaagagctttgtgcaccccaagccaggagctgctggctctgtgggcgccggcctcatccccatcagcagcgagctgtgctaccgcctgggcgcctgccagatggtgatgtgtggcaccggcatgcagaggagcaccctgtctgtgtccctggagcaggccgccatcctggcccggagccacggcctgctgcccaagtgcatcatgcaggccacagacatcatgaggaagcagggcccccgggtggagatcctggccaagaacctgcgggtgaaggaccagatgccccagggcgccccccggctgtaccgcctgtgccagccccctgtggatggagacctgtag

SEQ ID NO: 205980 - DNA, 4686 bp, Artificial Sequence
  derived and/or modified sequence
atggaggcccccagcggcagcgagcctggaggagatggagctggggactgtgcccacccagacccccgggcccctggagctgctgcccccagcagcggccctggcccctgtgccgccgcccgggagagcgagcggcagctgcggctgcggctgtgtgtgctgaatgagatcctgggcacagagcgggactatgtgggcaccctgcgcttcctgcagagcgccttcctgcaccgcatccggcagaatgtggccgacagcgtggagaagggcctgacagaggagaatgtgaaggtgctcttcagcaacatcgaggacatcctggaggtgcacaaggacttcctggccgccctggagtactgcctgcaccctgagccccagagccagcacgagctgggcaatgtgttcctgaagttcaaggacaagttctgtgtgtatgaggagtactgcagcaaccacgagaaggccctgcggctgctggtggagctgaacaagatccccaccgtgcgggccttcctgctgagctgcatgctgctgggcggcaggaagaccacagacatccccctggagggctacctgctgagccccatccagaggatctgcaagtaccccctgctgctgaaggagctggccaagaggacccctgggaagcacccagaccaccctgctgtgcagagcgccctgcaggccatgaagacagtgtgcagcaacatcaatgagaccaagaggcagatggagaagctggaggccctggagcagctgcagagccacatcgagggctgggagggcagcaacctgacagacatctgcacccagctgctgctgcagggcaccctgctgaagatctctgctggcaacatccaggagcgggccttcttcctgtttgacaacctgctggtgtactgcaagaggaagagccgggtgacaggcagcaagaagagcaccaagaggaccaagagcatcaatggcagcctgtacatcttccggggccgcatcaacacagaggtgatggaggtggagaatgtggaggatggaacagctgactaccacagcaatggctacacagtgaccaacggctggaagatccacaacacagccaagaacaagtggtttgtgtgcatggccaagacagctgaggagaagcagaagtggctggatgccatcatccgggagcgggagcagcgggagagcctgaagctgggcatggagagagatgcctacgtgatgattgctgagaagggggagaagctgtaccacatgatgatgaacaagaaggtgaacctgatcaaggacagaagaaggaagctgagcacagtgcccaagtgcttcctgggcaatgaatttgtggcctggctgctggagatcggggagatcagcaagacagaggagggcgtgaacctgggccaggccctgctggagaatggcatcatccaccacgtgtctgacaagcaccagttcaagaatgagcaggtgatgtaccgcttccgctatgatgatggcacctacaaggcccggtctgagctggaggacatcatgagcaaaggagtgcggctgtactgccgcctgcacagcctgtacacccctgtgatcaaggaccgggactaccacctgaagacctacaagtctgtgctgcccggcagcaagctggtggactggctgctggcccagggcgactgccagacccgggaggaggccgtggccctgggcgtgggcctgtgcaacaacggcttcatgcaccacgtgctggagaagtctgagttcagagatgagagccagtacttccgcttccacgcagatgaggagatggagggcaccagcagcaagaacaagcagctgagaaatgacttcaagctggtggagaacatcctggccaagaggctgctgatcctgccccaggaggaggactatggctttgatattgaggagaagaacaaggctgtggtggtgaagtctgtgcagaggggcagcctggccgaggtggccggcctgcaggtgggcaggaagatctacagcatcaatgaagacctggtgttcctgcggcccttcagcgaggtggagagcatcctgaaccagagcttctgcagcagaagacccctgcggctgctggtggccaccaaggccaaggagatcatcaagatcccagaccagcctgacaccctgtgcttccagatccggggggccgccccaccctacgtgtatgctgtgggccggggcagcgaggccatggctgctggcctgtgtgccggccagtgcatcctgaaggtgaatggcagcaatgtgatgaatgatggagcccctgaggtgctggagcacttccaggccttccgcagcagaagagaggaggccctgggcctgtaccagtggatctaccacacccatgaagatgcccaggaggcccgggccagccaggaggccagcacagaggaccccagcggggagcaggcccaggaggaggaccaggccgacagcgccttccccctgctgagcctgggcccccggctgagcctgtgtgaggacagccccatggtgaccctgactgtggacaacgtgcacctggagcacggcgtggtgtatgaatatgtgtccacagctggggtgcgctgccacgtgctggagaagatcgtggagccccggggctgcttcggcctgacagccaagatcctggaggcctttgctgccaatgattctgtgtttgtggagaactgccggcggctgatggccctgagcagcgccatcgtgaccatgccccactttgagttcaggaacatctgtgacaccaagctggagagcatcggccagagaattgcctgctaccaggagtttgctgcccagctgaagagccgggtgagcccccccttcaagcaggcccccctggagccccaccccctgtgtggcctggacttctgccccaccaactgccacatcaacctgatggaggtgtcctaccccaagaccaccccatctgtgggccgctccttcagcatccgcttcggcaggaagcccagcctgattggcctggaccctgagcagggccacctgaaccccatgagctacacccagcactgcatcaccaccatggccgcccccagctggaagtgcctgcctgctgctgagggggacccccagggccagggcctgcatgatggcagctttggacctgccagcggcaccctgggccaggaggaccggggcctgtccttcctgctgaagcaggaggaccgggagatccaggatgcctacctgcagctgttcaccaagctggatgtggccctgaaggagatgaagcagtatgtgacccagatcaaccggctgctgagcaccatcacagagcccaccagcggcggcagctgtgatgccagcctggccgaggaggccagcagcctgcccctggtgtctgaggagagcgagatggacagaagtgaccatggaggcatcaagaaggtgtgcttcaaggtggccgaggaggaccaggaggacagcggccatgacaccatgagctacagagacagctacagcgagtgcaacagcaacagagattctgtgctgagctacacctctgtgcgcagcaacagcagctacctgggcagtgatgagatgggcagcggagatgagctgccctgtgacatgaggatccccagcgacaagcaggacaagctgcacggctgcctggagcacctgttcaaccaggtggacagcatcaatgccctgctgaagggccctgtgatgagccgggcctttgaggagaccaagcacttccccatgaaccacagcctgcaggagttcaagcagaaggaggagtgcaccatccggggccgcagcctcatccagatcagcatccaggaggacccctggaacctgcccaacagcatcaagaccctggtggacaacatccagagatatgtggaggatggcaagaaccagctgctgctggccctgctgaagtgcacagacacagagctgcagctgcggagagatgccatcttctgccaggccctggtggccgctgtgtgcaccttcagcaagcagctgctggccgccctgggctaccgctacaacaacaatggagaatatgaggagagcagcagagatgccagcaggaagtggctggagcaggtggccgccaccggggtgctgctgcactgccagagcctgctgagccctgccaccgtgaaggaggagaggaccatgctggaggacatctgggtgaccctgtctgagctggacaacgtgaccttctccttcaagcagctggatgagaactacgtggccaacaccaacgtgttctaccacatcgagggcagccggcaggccctgaaggtgatcttctacctggacagctaccacttcagcaagctgcccagccggctggagggcggggccagcctgcggctgcacacagccctcttcaccaagggggagctgcaggcctggggcagagaagatcatggaggccgggccaaggccaccaagcacacaggcagccagcccccagcccggcccaggcacctgcccagccagtgctggaggacctggaggggctgcctgctgcaggccgcccggccccggcgcatctgcagcaggaccagcaccaggagcccctggaggaagttcagcagcatcacagccaacagcggccacttcacctggagcggcctgacctgccccaggatgcctgcccccaggaggtag

SEQ ID NO: 205981 - DNA, 4980 bp, Artificial Sequence
  derived and/or modified sequence
atggaggcccccagcggcagcgagcccggcggcgacggcgccggcgattgtgcgcaccctgatccaagggccccaggtgccgccgccccatcctcaggccctggaccctgtgcagcagcacgggaatcagagagacagctcaggttgagattgtgcgtgctgaatgagattctgggaacagaacgcgactatgtgggaacacttcgtttcttacagagtgcttttctgcacagaatccgacagaatgttgcagattcagtagaaaagggtctcaccgaagaaaatgttaaggtgctcttctcgaatatcgaggatattctcgaagtgcacaaggacttcctggcggctttagaatactgcctccatccagagccccagtcccagcacgaactcgggaatgtgttcctcaagttcaaggataagttttgtgtctacgaggaatactgtagcaaccacgaaaaagctctcaggctgctggtggaactgaataaaattcccacagttcgcgcgttcctgcttagctgcatgctgttaggtggtcgcaaaactacggacattcctctggagggctatttattgagccctatccagcgaatctgtaaatatcccctgcttttgaaagagctggctaaaagaacccccggcaagcacccggaccaccccgccgtccagtctgcccttcaagcgatgaagacagtgtgttctaacattaacgaaactaaacgacaaatggagaaactcgaagcccttgagcagctgcagtcccatatcgagggctgggaaggaagtaaccttacagatatttgtacccagctcttgttgcagggtaccctactcaaaatcagcgccggaaacattcaggagcgggcgttttttctgtttgataatctcctcgtgtactgcaaaaggaagagtagggtgaccggctcaaagaagtctacaaaacgcactaagagcattaacggttcactgtacattttccgaggtcgaattaataccgaagtgatggaggtcgaaaatgtcgaggatggaaccgcagactaccacagcaatggctataccgtgacaaatggatggaagatacacaatacagctaaaaataagtggttcgtttgtatggccaaaaccgcggaggagaaacagaaatggctggatgccataattcgggaaagggagcaaagggaaagcctcaagctgggaatggaacgagatgcctacgtcatgattgctgaaaagggtgagaagctgtaccacatgatgatgaataaaaaggtcaaccttatcaaggatcgacgacgaaaactctctacggtgcctaaatgtttcttggggaacgagtttgttgcatggctgctggagattggggagatcagcaaaacggaggagggtgttaacctggggcaagccctattggagaatggcattattcaccatgttagcgacaagcatcagtttaaaaacgagcaagtgatgtatcgattccgctatgatgacggcacttataaagcccgcagcgaactagaagacataatgtctaagggcgttcggctctattgccgcctgcatagcctctacacgcccgtgataaaagatcgtgactaccacttaaagacctacaaaagtgtcctgccaggctcgaagttggtggactggcttctggcacaaggtgactgtcagacacgggaggaggctgtggctctcggcgtaggcctctgcaacaatggatttatgcaccatgttctggagaagtctgaattcagagacgagtcccagtatttccgcttccacgccgacgaggaaatggagggcacttctagtaagaacaaacaactgagaaacgactttaaacttgttgagaacatcctggccaaacgactgcttatactgccacaggaagaggattacggcttcgatatcgaggagaagaacaaggccgtggtggtcaagagtgtgcagcgcggcagtctggctgaagtggctggcttacaagtagggcggaaaatctactccatcaacgaagatctggtgtttctgagacccttctctgaagtggaatcaatacttaatcagagcttctgctctcgtcgacccctgaggctgttggttgctactaaagccaaagaaatcatcaagatccccgaccagccagatacactctgctttcaaattaggggcgccgcaccaccatatgtctacgcggttggcagaggatccgaagccatggcagccggcctgtgcgcaggacagtgcatcctgaaggtgaacggatctaatgtcatgaatgacggggcccccgaagtcttagaacattttcaggcattccggagtcgtagggaggaggccctcggcctgtatcagtggatctatcatacgcacgaagatgcccaggaggctagagcgagtcaggaggctagtacagaagacccaagtggagaacaggcccaagaagaggaccaggccgactcggcattccctctgttgtccctcggcccgaggctgtcgctgtgtgaggattccccaatggtgaccctgactgtggataacgtgcatctggagcacggcgtggtctatgaatacgtgtctaccgcgggggtaaggtgtcatgttttagaaaagatcgtggaaccccgtggatgcttcggactgactgccaaaatcctggaggccttcgccgccaatgactctgtcttcgtggaaaactgtagaaggcttatggccctgagttctgccatcgtaactatgccgcactttgagttcaggaacatctgtgacacaaagctcgagagcataggccaaagaatcgcttgctaccaagaatttgcagctcaactcaagagccgagtgtctccgccatttaagcaggcaccacttgagccacaccctctgtgcggcctagatttctgcccaacaaactgccacatcaacctgatggaagtgtcatatccaaagaccacacccagtgtcggccgctctttctcaatcaggtttgggcgcaaaccaagccttatcggcctggaccctgaacaaggccacctaaatcccatgtcctacacccagcactgcattacgaccatggccgcgccatcgtggaagtgcttaccagctgcagagggcgaccctcaaggccagggtctacatgatggcagctttgggccggccagcgggactttggggcaggaagatagaggccttagctttttgctgaagcaggaggatcgcgaaatccaggacgcctatctgcagctattcactaagcttgatgtggccctcaaggagatgaagcaatatgtcactcagattaatcgtctgctgagcacaatcacggagccaacttcgggcgggagctgcgatgcatcgctggctgaggaagcatcttccctgccactggtttcagaggagagcgagatggaccgtagcgaccatggaggcatcaagaaagtctgctttaaggtggcagaagaggatcaagaggactctggccacgatacaatgtcctaccgggactcatacagcgaatgcaatagcaaccgggattcggtccttagctacactagtgtgagatccaattcctcataccttgggtctgatgaaatgggaagtggagacgaactgccttgcgacatgcgcatccccagtgacaagcaggataagctgcacggctgtctagagcaccttttcaaccaagtggatagtatcaacgcccttttaaaagggcccgtgatgagccgcgccttcgaagagactaagcactttccaatgaatcacagtttacaggaatttaaacagaaggaggaatgtactattagaggccggtccctgatccagatttccattcaggaggacccatggaatttaccaaactctataaaaacactggtagacaacatacagcgatacgttgaagatgggaagaatcaactgcttctagcccttctcaaatgtactgataccgagctccagcttaggagggacgctatattttgtcaggcactggttgccgctgtgtgtacttttagtaagcaattactagcagcactcggttatcgctacaataataatggggagtacgaagagtcctcacgggacgcctcccgcaagtggttggaacaggtcgctgcgacgggcgtgttgctgcactgccagtcactgctgtcgcccgccaccgtgaaggaagagcgtaccatgttggaagacatttgggtgacactgagcgaattagataatgtgacattttccttcaaacagctggatgaaaattacgtcgcaaacaccaacgtgttctaccatattgaaggcagcaggcaggctttaaaggtgatcttctatctggactcataccacttcagcaagttaccaagcaggctggagggtggggcctctctgaggttgcatacagcactgtttacgaaggtactggaaaatgtcgaggggctcccaagtcctggcagtcaggccgccgaggacctccagcaggacatcaacgcacagagtctggaaaaagtccagcagtattatcgcaaactgcgggctttctatttggagaggtctaacctccccactgacgcctccaccactgctgtgaagatagatcagcttatccgccccatcaacgcacttgacgaactgtgtcgtctgatgaagtcatttgtgcaccctaaacctggagccgcgggaagtgtgggcgcaggcctcattccaataagttcagagttgtgctatcgactgggagcctgccagatggtcatgtgtggtactggaatgcagcgtagtacactctctgtgagcttggagcaggcagctatcttggccaggtctcacggattgctacccaagtgtatcatgcaagcaacagatatcatgcgaaagcagggcccccgcgtggagattttggccaaaaatctcagggtgaaagatcaaatgccccagggagcaccgcgtctctacagattgtgccagccaccagtggacggcgatctctag

SEQ ID NO: 205982 - DNA, 4686 bp, Artificial Sequence
  derived and/or modified sequence
atggaggcccccagcggcagcgagcccggcggcgacggcgccggcgattgcgcccaccctgatcccagggcacccggcgccgctgctccgagcagtggaccaggaccctgtgcggctgcaagagagtccgagcggcaactgagactcagactgtgtgttctgaatgagattctgggcactgagagagattatgtgggcaccctccggttcctgcagagtgcctttctgcaccgaatcagacagaacgtcgcagactccgtggagaaaggcctcacggaggagaatgtcaaagtgctcttctctaacatcgaggacatcctcgaagttcacaaggatttcctggccgccctagagtattgcctgcatccagagccccagtctcaacatgagttgggaaatgttttccttaaatttaaagataagttttgcgtctatgaggagtattgtagcaatcacgagaaggcgctgcggctactggtggaactgaacaaaatacccactgtccgggccttcttattgtcttgtatgcttctcggggggcgaaagacaaccgatatccccctggaagggtacctcttgtctcccatccaaagaatttgtaagtaccctctgctcctgaaagagctggccaagagaactccgggaaagcatccggaccaccctgcagtccagagtgctctgcaggctatgaagaccgtgtgctccaatataaacgagacaaaacggcagatggaaaagctcgaagcactcgagcagttgcagtcccacattgaaggatgggagggtagtaatttgaccgacatctgcactcaactcttgctccaaggcacccttctgaaaatatctgccgggaatattcaggagcgtgcctttttcctgtttgacaacttactggtgtattgcaagcggaaatcaagggtgaccggtagtaagaagtcaactaaaagaacaaaatcgattaatgggtctctgtacattttccgcggccggataaacacggaagtgatggaggtcgaaaatgttgaggatggcactgcagattatcactctaacgggtatacagtcacaaacggttggaagattcacaacacggccaagaacaagtggttcgtatgcatggcaaaaacagctgaggaaaaacagaaatggctggacgcaatcatccgcgagcgtgagcagcgtgaaagcctaaaacttggaatggaacgggacgcatacgtgatgatcgccgagaagggtgaaaagctgtaccacatgatgatgaataagaaggtgaacctcatcaaagaccgacggaggaagctttccaccgtccctaagtgctttctgggaaatgagtttgttgcttggctattagaaataggtgaaatttccaaaaccgaagaaggcgtcaatctcggccaggctctgttggagaatggaataatccatcatgtgagtgataaacaccagttcaagaatgagcaggtaatgtacaggttcagatatgacgatggtacatacaaagccagatccgagctggaggacataatgtcaaaaggcgtcaggctttactgtcgtcttcatagcctgtacaccccagtgatcaaggatagagattaccacttgaagacgtataagtcggtgctcccaggctcaaaattggttgactggctgctggcccagggtgactgtcagaccagggaagaggcggtggcactgggcgtgggactgtgcaataacggctttatgcaccacgtccttgaaaagtctgagtttcgagatgagtcccagtatttccgctttcacgccgacgaggagatggaagggacatcaagtaagaacaaacaactgagaaatgacttcaaactcgtggaaaacattctggctaagcggctgctgatcctgccccaggaggaggactacggatttgacattgaagagaaaaataaggccgtggtggttaagtccgtccaaagaggctccttggctgaagtggcaggcctgcaggtcggtcggaaaatttacagtatcaacgaggacctggtttttctgaggccgttcagcgaagtagaatctattttaaatcagtcattttgctctcggagacctctcaggttactcgtagccactaaagctaaggaaattattaaaatacccgatcaaccagacactctttgcttccagattaggggggcagcccccccttacgtctacgccgtaggacggggatccgaagctatggcagcagggttgtgcgctggacagtgtatcctgaaggttaatgggagtaatgtgatgaatgatggagctcccgaggtgctggaacacttccaggccttccgcagcagacgcgaggaggctctcgggctgtaccagtggatttaccacacccatgaggacgcacaagaagcacgcgccagtcaggaagctagcactgaggaccccagcggagagcaggctcaggaagaggatcaagcagatagcgcattcccactccttagtctcggccctcgactcagtttgtgcgaggattcgcctatggtgaccctcactgtggacaacgtgcacttggagcacggagtggtatacgaatacgtaagcactgctggcgtcagatgccatgtgcttgagaagatcgtggaacccagggggtgttttggcttaaccgccaagatactggaggccttcgccgctaacgactctgttttcgtagagaactgtcgacgcttgatggccctctcttcggctatcgtgaccatgcctcacttcgaattccgcaacatctgcgacactaagctggaaagcatcgggcagcgcatcgcatgctaccaggaatttgctgctcagcttaagagccgggtttcacccccttttaaacaggctccactagaacctcatcccctgtgcggtctcgacttttgcccaaccaactgccacatcaacctgatggaagtctcttatcccaagacgactccgtcggtgggacggtccttttctattaggtttgggagaaaaccttccttgatcggcctcgatccagaacagggacacctaaacccaatgagctacacccagcattgtattacgactatggccgctccatcatggaagtgtctgccggcggccgagggcgatcctcaggggcaggggctccacgacggcagttttggcccagctagtggaactctggggcaggaggaccgcggcctgtcttttctgctcaagcaagaggatagagagattcaggacgcctacctacagcttttcaccaaacttgacgtggcccttaaagagatgaaacagtacgtgacacaaattaaccgccttctctcaacaatcacagaacccacttcgggaggatcttgcgatgctagtttagccgaggaagcttcctccctcccattagtcagtgaggagagcgaaatggaccgatcagatcacggcggaatcaaaaaggtttgctttaaggtcgctgaagaggatcaagaggattcgggtcacgataccatgtcttatagggactcttattccgaatgtaactccaaccgcgattcagtcttgagctacacaagcgttcggtcaaactctagttacctgggatctgatgagatgggcagtggggatgagctgccttgtgacatgagaatcccgtctgataagcaggataaactacacggatgcttagaacatttgtttaatcaggtggattcgatcaacgccctgctgaagggccccgtcatgagccgcgcattcgaagaaacaaagcattttccaatgaatcacagtctgcaggaatttaagcagaaagaggaatgcactatccggggacggtctctgattcaaatctcaattcaggaagacccctggaatctaccaaattcaataaagacactcgtggacaacattcagcgctacgtcgaggatgggaagaatcaattgttgctggcgctactgaagtgtaccgacaccgaactccaactaagaagggatgctatcttctgccaagccttagtagccgctgtgtgcactttttctaagcagctgctcgccgccctcgggtatagatataacaacaatggagaatacgaggagtcgagtcgcgatgcatctaggaagtggctggagcaggtagcagcgacaggggtcctgctacactgccagtcattactgtcccctgccactgtgaaggaagagaggaccatgcttgaggatatttgggtgaccttatctgaactggataatgtaacgttctcttttaaacagctggacgaaaattacgttgcaaacacaaacgtgttttaccacatcgaaggctctcgccaagcattgaaagttatattctacctggactcataccacttttccaaattgcctagcaggctggagggaggtgcgtccctccggcttcacacagctctgtttactaagggggaactacaggcctggggaagagaagaccatgggggaagggccaaggctactaagcataccggaagtcagcctccagctagaccgaggcacctgcctagccagtgctggagaacgtggcgagggtgtctgttgcaggctgcacgcccgaggcgcatttgttcccgcacaagcacaaggtctccatggcgaaagttcagttcaataaccgccaattctggacacttcacctggtctggattgacatgcccacgcatgccagctcctaggcgttag

SEQ ID NO: 205983 - DNA, 6636 bp, Artificial Sequence
  derived and/or modified sequence
cggcgccgcgcggccgcgctagaatggaggcgcccagcggcagcgagcccggcggcgacggggccggggactgcgcccacccggacccccgggcccctggcgccgcggcgcccagctccggccccggcccgtgcgcggccgcccgggagtccgagcgccagctgcgcctccgcctctgcgtcctcaacgagatcttgggcaccgagagggactacgtgggcaccttgcgcttcttgcagtcggcattcctgcatcgcatccggcagaacgtggccgactcagtggagaagggcctcacggaggagaatgtcaaggtcctgttctcgaacatcgaagacatcctggaagttcataaggatttcttggccgccttggagtattgtttacacccggagccgcagtctcagcatgaacttgggaatgttttcttaaaattcaaggacaagttctgcgtgtacgaggagtattgcagcaaccatgagaaagccctgaggctgctggtggagctgaacaagatccctaccgtgcgcgccttccttttgagctgcatgcttctgggaggccggaagaccacggacatccctttggaaggctacctgttgtctccgatccagaggatctgcaagtacccgctcctccttaaggagctggccaagaggactcccggcaagcacccagaccaccccgcggtccagagtgccctgcaggccatgaagaccgtttgctccaacatcaatgagaccaagcggcagatggagaagctggaagccctggagcagctgcagtcccacatcgaaggctgggagggttccaacctcacagacatctgcactcagctcctcctgcaagggactttgttaaagatctctgcgggcaacatccaggaaagggccttcttcctcttcgacaaccttctcgtctactgcaagcggaaatccagggtcaccgggagcaagaagtccaccaagaggaccaaatccatcaacggctccctctacatcttcaggggtcgaatcaacactgaagtcatggaggtggagaatgtggaagatgggacagcggattaccatagcaacggctataccgtcaccaacggctggaagatccacaacacggccaagaataagtggtttgtctgcatggccaagacggcagaggagaagcagaagtggctggatgccatcatccgcgagcgggagcagcgcgagagcctgaagctgggcatggagcgtgatgcctacgtcatgattgcggagaagggggagaagctgtaccacatgatgatgaacaagaaggtgaacctcatcaaggaccgccggagaaagctgagcactgtccccaagtgctttcttggcaatgagttcgttgcctggctcctagaaattggtgaaatcagcaagacggaagaaggagtcaacttgggccaagccctgttggagaatggcatcatccaccatgtttccgacaagcaccagttcaagaatgagcaggtgatgtatcgcttccgctacgacgatggcacctacaaggcccgaagtgagctggaggacatcatgtccaagggtgtgaggctttactgccgtcttcacagcctctacaccccggtgatcaaagaccgtgattaccacctgaagacctacaagtcagtgcttcccgggagcaagctggtggactggctgctggctcagggagactgccagactcgggaggaggcagtggcgctcggcgtgggtctgtgcaacaatggcttcatgcaccacgtgctggagaagagcgagttcagggatgagtcccagtacttccgctttcatgctgacgaggagatggaggggaccagcagcaagaacaaacagcttcgcaacgacttcaagctggtggagaacattctggccaagcgcctgctgatcctgccccaggaggaggactatggctttgacatcgaggagaagaacaaggctgtggtggtgaagtccgtccagaggggctcgctggctgaggtggctggcctgcaggtggggaggaagatctactccatcaatgaggacctggtgttcctgcggccgttttcagaggtggagtccatcctcaaccagtccttctgctcccgccgccctctgcgcctcctggtggccacgaaggccaaagagatcatcaaaatccccgaccagccggacacactgtgcttccagattcgtggagctgccccaccgtacgtctatgctgtggggagaggctctgaggccatggctgcagggctctgtgctggtcagtgcattctgaaggtcaatggcagcaacgtgatgaacgatggtgcccctgaggtcctggagcacttccaggcattccggagtcggcgcgaagaggccctgggcctgtaccagtggatctaccacacccatgaggatgcccaggaagcacgagccagtcaggaggcctccactgaggaccccagtggcgagcaggcccaggaggaagaccaggctgattcagccttcccactgctgtccctgggtccccggctgagcctgtgtgaggacagccccatggtcaccctgactgtggacaacgtgcacctggaacacggcgtggtgtatgagtatgtgagcacggcaggcgtcaggtgccatgtgctggagaagatcgtggagccccgcggctgcttcggcctcaccgccaagatcctcgaggcctttgctgccaatgacagcgtcttcgtggagaactgcaggcggctcatggccctgagcagcgccatcgtgaccatgccccactttgagttccgcaacatctgtgacaccaagctggagagcattggccagaggattgcctgctaccaggagtttgcagcccaactgaagagcagggtcagcccacccttcaaacaagcccccctggagccccacccgctgtgtggcctggacttctgccccaccaattgccacatcaacctcatggaagtgtcctaccccaagaccaccccctcagtgggcaggtccttcagcatccgctttggacgcaaaccctccctcatcggccttgacccggagcaaggccacctgaaccccatgtcgtacacccagcactgcatcaccaccatggctgctccctcctggaagtgcttgcctgctgcagagggtgatccccaaggccagggtctccatgatggcagcttcgggccagccagtgggacccttggtcaggaagaccggggcctcagcttcctactcaagcaggaggaccgtgagatccaggatgcctacctgcagctcttcaccaagctggatgtggccctgaaggagatgaagcaatatgtcacccagatcaacaggctgctgtccaccatcacagagcccacctcgggtgggtcctgcgacgcatccttggctgaggaggcctcctccctgcccctggtcagtgaagagagcgagatggacaggagtgaccatgggggcatcaagaaggtgtgcttcaaggtggccgaggaggaccaggaggactcaggccacgacaccatgagttatcgcgactcctacagcgagtgtaacagcaatcgagactcggtcctgtcctacaccagcgtgagaagtaacagctcctacttgggcagcgacgagatggggtctggagatgagctgccctgtgacatgcggatcccatctgacaagcaggacaagcttcatggctgcctggagcacctctttaaccaggtggactccatcaatgctctcctcaaggggccagtcatgagccgggctttcgaagagaccaagcatttccctatgaaccacagcttacaagagtttaaacagaaagaagagtgtacaatccgtggccggagcctgatccagattagcatccaggaggacccctggaacctccccaactccatcaagaccctggtggacaacattcagagatatgtggaagatgggaagaaccagctgctcctggccttgctgaagtgcacagacacggagctgcagctgcgcagagacgcgatcttctgccaggccctggtggccgccgtgtgcaccttctccaagcagctgctggcggccctgggctaccgctacaacaacaatggcgagtacgaggagagcagccgcgacgccagccgcaagtggctggagcaggtggcggccacgggcgtcctgctgcactgccagtccctgctctcgccagccacagtgaaggaggaacggaccatgctggaggacatctgggtgacgctgtcagagctggacaatgtcaccttctcctttaagcagctggacgagaactatgtggccaacaccaacgtcttctaccacattgagggcagccggcaggcgctgaaggtcatcttctacctcgacagctaccacttctccaagctgccctcccgcctggagggtggggccagcctgaggctgcacacagcgctgttcacgaaagtgctggagaacgtggaggggctgccttctccaggcagccaggccgcggaggatttgcagcaggacatcaacgcgcagtccctggagaaagttcagcagtattaccgcaaactcagggcattttacctggagcggtctaacctgcccacggatgccagcaccacggcggtaaagatagaccagctgatccgccccatcaatgccctggatgagctctgccgcctcatgaagtcctttgtccacccaaagcctggtgctgctgggagtgtgggcgccggcctcatccccatctcctcggagctctgctaccgcctgggggcctgccagatggtcatgtgtggcacaggcatgcagaggagcaccctgagcgtgtccctggagcaggcggccatcttggcacggagccacgggttgctgcccaagtgcatcatgcaggccacggacatcatgcggaagcagggcccaagggtggagattctggccaaaaacctgcgagtcaaggaccagatgccccagggtgctccgcgcctctaccgcctctgccagccgccggtggatggggacctctgaacacccaaatgccccacgctgggccgcggcctctggagctgggatttgggaggacacagcaggcagcgctggccttctccagggatggcccaaggcttccgcagccgcccgttccgggacctgcccagcgtcctccctgcctccttccgggacaagcctggccaccctcgctgtgatgacgagctggctgattggccctgggccggcccattcttcacacgcctgccagaagctggaggggtgctggagacccatagagctgatgggagcagctggtgcctggccttcggctcctgcgtccccagaacccaagggaacgtcatggaggccacatggggccacccggctccctcgggatggctccgcctgcacttttgaaaccccggtttccttcaacgtccacattccaggtgaccacacgtgtctcctcctcctcatcttagcttccaggttcaccctaaccctgtactaacctgcttggtggacttggaaaagacttggctctgtcgggaaaggagagacggggcctccatcacgcctgttaccagaggatccccgagagccacaccagctctggacatcaccgcccctggaactggggccaccagccctgggcacgagatttgctctgactttatttatatggcatgaaatctctggtttattttgggattttttgttgttggtgttgtcaaagtttgttttttctaaagttgtgtgattatatatttgacattttacatttcaaagaaaggtatgttgtctaacaggggaccaacagaaggtagtattgacaactgttcctgcttctactaaaaaaaaaagagcacaaaagaaaaactaaattattgaaaaattaaaaaatgtcattgtttcctgtttgttaatattagggttgtaaggtgtcgttttgaggtatcgactgtgattccttcccccaccctccattctccagcggttggccggtgttagaactcgctctctttgagtgactggctacaagggcctgagaggtggccagccagggttggagctggaggggatggagccccacctgaggtgccgtgtcacacgggttagagggtcactgggaaacaccgggcggtggcttctgtgatttattttcttgatggtaacttctcagagcagggcgattgggacatcaccagccagagcacaggaagccaccctgcctgctggggaggagggacccacacaagccccctcggcagtttgtccccccagcttcggtatgccttcagggaaaggtcacagctggggaggaagcggggggacgcctgtcacccctggcaggtggtgagttcaggtgggggctccctgctgcccccaggcctgggagcttgaagccctcccggcatctggcatccgagcctcccgccctccagggtgcgcttccctctcttgccgcagcatacacgagggcaggcagtggccttgtcactgtatcttgcatcagagacaaaggaggacccgctttagccctgctgcgggaaatgggggagggcccagggccagcgcattgtgcactggtttactttaaaatgtacagattcttctcgttaaattcttgatagattttttattattattaaaagtcagtttataatacaaa

SEQ ID NO: 205984 - DNA, 6737 bp, Artificial Sequence
  derived and/or modified sequence
cggcgccgcgcggccgcgctagaatggaggcgcccagcggcagcgagcccggcggcgacggggccggggactgcgcccacccggacccccgggcccctggcgccgcggcgcccagctccggccccggcccgtgcgcggccgcccgggagtccgagcgccagctgcgcctccgcctctgcgtcctcaacgagatcttgggcaccgagagggactacgtgggcaccttgcgcttcttgcagtcggcattcctgcatcgcatccggcagaacgtggccgactcagtggagaagggcctcacggaggagaatgtcaaggtcctgttctcgaacatcgaagacatcctggaagttcataaggatttcttggccgccttggagtattgtttacacccggagccgcagtctcagcatgaacttgggaatgttttcttaaaattcaaggacaagttctgcgtgtacgaggagtattgcagcaaccatgagaaagccctgaggctgctggtggagctgaacaagatccctaccgtgcgcgccttccttttgagctgcatgcttctgggaggccggaagaccacggacatccctttggaaggctacctgttgtctccgatccagaggatctgcaagtacccgctcctccttaaggagctggccaagaggactcccggcaagcacccagaccaccccgcggtccagagtgccctgcaggccatgaagaccgtttgctccaacatcaatgagaccaagcggcagatggagaagctggaagccctggagcagctgcagtcccacatcgaaggctgggagggttccaacctcacagacatctgcactcagctcctcctgcaagggactttgttaaagatctctgcgggcaacatccaggaaagggccttcttcctcttcgacaaccttctcgtctactgcaagcggaaatccagggtcaccgggagcaagaagtccaccaagaggaccaaatccatcaacggctccctctacatcttcaggggtcgaatcaacactgaagtcatggaggtggagaatgtggaagatgggacagcggattaccatagcaacggctataccgtcaccaacggctggaagatccacaacacggccaagaataagtggtttgtctgcatggccaagacggcagaggagaagcagaagtggctggatgccatcatccgcgagcgggagcagcgcgagagcctgaagctgggcatggagcgtgatgcctacgtcatgattgcggagaagggggagaagctgtaccacatgatgatgaacaagaaggtgaacctcatcaaggaccgccggagaaagctgagcactgtccccaagtgctttcttggcaatgagttcgttgcctggctcctagaaattggtgaaatcagcaagacggaagaaggagtcaacttgggccaagccctgttggagaatggcatcatccaccatgtttccgacaagcaccagttcaagaatgagcaggtgatgtatcgcttccgctacgacgatggcacctacaaggcccgaagtgagctggaggacatcatgtccaagggtgtgaggctttactgccgtcttcacagcctctacaccccggtgatcaaagaccgtgattaccacctgaagacctacaagtcagtgcttcccgggagcaagctggtggactggctgctggctcagggagactgccagactcgggaggaggcagtggcgctcggcgtgggtctgtgcaacaatggcttcatgcaccacgtgctggagaagagcgagttcagggatgagtcccagtacttccgctttcatgctgacgaggagatggaggggaccagcagcaagaacaaacagcttcgcaacgacttcaagctggtggagaacattctggccaagcgcctgctgatcctgccccaggaggaggactatggctttgacatcgaggagaagaacaaggctgtggtggtgaagtccgtccagaggggctcgctggctgaggtggctggcctgcaggtggggaggaagatctactccatcaatgaggacctggtgttcctgcggccgttttcagaggtggagtccatcctcaaccagtccttctgctcccgccgccctctgcgcctcctggtggccacgaaggccaaagagatcatcaaaatccccgaccagccggacacactgtgcttccagattcgtggagctgccccaccgtacgtctatgctgtggggagaggctctgaggccatggctgcagggctctgtgctggtcagtgcattctgaaggtcaatggcagcaacgtgatgaacgatggtgcccctgaggtcctggagcacttccaggcattccggagtcggcgcgaagaggccctgggcctgtaccagtggatctaccacacccatgaggatgcccaggaagcacgagccagtcaggaggcctccactgaggaccccagtggcgagcaggcccaggaggaagaccaggctgattcagccttcccactgctgtccctgggtccccggctgagcctgtgtgaggacagccccatggtcaccctgactgtggacaacgtgcacctggaacacggcgtggtgtatgagtatgtgagcacggcaggcgtcaggtgccatgtgctggagaagatcgtggagccccgcggctgcttcggcctcaccgccaagatcctcgaggcctttgctgccaatgacagcgtcttcgtggagaactgcaggcggctcatggccctgagcagcgccatcgtgaccatgccccactttgagttccgcaacatctgtgacaccaagctggagagcattggccagaggattgcctgctaccaggagtttgcagcccaactgaagagcagggtcagcccacccttcaaacaagcccccctggagccccacccgctgtgtggcctggacttctgccccaccaattgccacatcaacctcatggaagtgtcctaccccaagaccaccccctcagtgggcaggtccttcagcatccgctttggacgcaaaccctccctcatcggccttgacccggagcaaggccacctgaaccccatgtcgtacacccagcactgcatcaccaccatggctgctccctcctggaagtgcttgcctgctgcagagggtgatccccaaggccagggtctccatgatggcagcttcgggccagccagtgggacccttggtcaggaagaccggggcctcagcttcctactcaagcaggaggaccgtgagatccaggatgcctacctgcagctcttcaccaagctggatgtggccctgaaggagatgaagcaatatgtcacccagatcaacaggctgctgtccaccatcacagagcccacctcgggtgggtcctgcgacgcatccttggctgaggaggcctcctccctgcccctggtcagtgaagagagcgagatggacaggagtgaccatgggggcatcaagaaggtgtgcttcaaggtggccgaggaggaccaggaggactcaggccacgacaccatgagttatcgcgactcctacagcgagtgtaacagcaatcgagactcggtcctgtcctacaccagcgtgagaagtaacagctcctacttgggcagcgacgagatggggtctggagatgagctgccctgtgacatgcggatcccatctgacaagcaggacaagcttcatggctgcctggagcacctctttaaccaggtggactccatcaatgctctcctcaaggggccagtcatgagccgggctttcgaagagaccaagcatttccctatgaaccacagcttacaagagtttaaacagaaagaagagtgtacaatccgtggccggagcctgatccagattagcatccaggaggacccctggaacctccccaactccatcaagaccctggtggacaacattcagagatatgtggaagatgggaagaaccagctgctcctggccttgctgaagtgcacagacacggagctgcagctgcgcagagacgcgatcttctgccaggccctggtggccgccgtgtgcaccttctccaagcagctgctggcggccctgggctaccgctacaacaacaatggcgagtacgaggagagcagccgcgacgccagccgcaagtggctggagcaggtggcggccacgggcgtcctgctgcactgccagtccctgctctcgccagccacagtgaaggaggaacggaccatgctggaggacatctgggtgacgctgtcagagctggacaatgtcaccttctcctttaagcagctggacgagaactatgtggccaacaccaacgtcttctaccacattgagggcagccggcaggcgctgaaggtcatcttctacctcgacagctaccacttctccaagctgccctcccgcctggagggtggggccagcctgaggctgcacacagcgctgttcacgaaaggtgagcttcaggcctggggcagggaggaccacgggggccgggccaaggccaccaagcacaccggctcccaaccgcctgcccgcccccgacatctcccctcccagtgctggagaacgtggaggggctgccttctccaggcagccaggccgcggaggatttgcagcaggacatcaacgcgcagtccctggagaaagttcagcagtattaccgcaaactcagggcattttacctggagcggtctaacctgcccacggatgccagcaccacggcggtaaagatagaccagctgatccgccccatcaatgccctggatgagctctgccgcctcatgaagtcctttgtccacccaaagcctggtgctgctgggagtgtgggcgccggcctcatccccatctcctcggagctctgctaccgcctgggggcctgccagatggtcatgtgtggcacaggcatgcagaggagcaccctgagcgtgtccctggagcaggcggccatcttggcacggagccacgggttgctgcccaagtgcatcatgcaggccacggacatcatgcggaagcagggcccaagggtggagattctggccaaaaacctgcgagtcaaggaccagatgccccagggtgctccgcgcctctaccgcctctgccagccgccggtggatggggacctctgaacacccaaatgccccacgctgggccgcggcctctggagctgggatttgggaggacacagcaggcagcgctggccttctccagggatggcccaaggcttccgcagccgcccgttccgggacctgcccagcgtcctccctgcctccttccgggacaagcctggccaccctcgctgtgatgacgagctggctgattggccctgggccggcccattcttcacacgcctgccagaagctggaggggtgctggagacccatagagctgatgggagcagctggtgcctggccttcggctcctgcgtccccagaacccaagggaacgtcatggaggccacatggggccacccggctccctcgggatggctccgcctgcacttttgaaaccccggtttccttcaacgtccacattccaggtgaccacacgtgtctcctcctcctcatcttagcttccaggttcaccctaaccctgtactaacctgcttggtggacttggaaaagacttggctctgtcgggaaaggagagacggggcctccatcacgcctgttaccagaggatccccgagagccacaccagctctggacatcaccgcccctggaactggggccaccagccctgggcacgagatttgctctgactttatttatatggcatgaaatctctggtttattttgggattttttgttgttggtgttgtcaaagtttgttttttctaaagttgtgtgattatatatttgacattttacatttcaaagaaaggtatgttgtctaacaggggaccaacagaaggtagtattgacaactgttcctgcttctactaaaaaaaaaagagcacaaaagaaaaactaaattattgaaaaattaaaaaatgtcattgtttcctgtttgttaatattagggttgtaaggtgtcgttttgaggtatcgactgtgattccttcccccaccctccattctccagcggttggccggtgttagaactcgctctctttgagtgactggctacaagggcctgagaggtggccagccagggttggagctggaggggatggagccccacctgaggtgccgtgtcacacgggttagagggtcactgggaaacaccgggcggtggcttctgtgatttattttcttgatggtaacttctcagagcagggcgattgggacatcaccagccagagcacaggaagccaccctgcctgctggggaggagggacccacacaagccccctcggcagtttgtccccccagcttcggtatgccttcagggaaaggtcacagctggggaggaagcggggggacgcctgtcacccctggcaggtggtgagttcaggtgggggctccctgctgcccccaggcctgggagcttgaagccctcccggcatctggcatccgagcctcccgccctccagggtgcgcttccctctcttgccgcagcatacacgagggcaggcagtggccttgtcactgtatcttgcatcagagacaaaggaggacccgctttagccctgctgcgggaaatgggggagggcccagggccagcgcattgtgcactggtttactttaaaatgtacagattcttctcgttaaattcttgatagattttttattattattaaaagtcagtttataatac

SEQ ID NO: 205985 - DNA, 4979 bp, Artificial Sequence
  derived and/or modified sequence
atggaagccccatctgggagcgagcccggaggggatggagccggagattgtgctcaccctgatcctcgtgcacctggtgccgctgccccatcctctggacctggcccatgtgctgctgccagggaatcagagcgacagctgaggctgaggttatgcgttctcaacgagattctcggcactgagagagactacgtgggcaccttaagatttctccagtcagccttcctacatcgcatccggcagaatgtggcagattccgtagaaaaaggcttaacagaggagaacgtcaaggtgttgttttctaatattgaggatattttagaggtgcataaggactttctggcggctctggaatactgcctgcacccggaaccgcagtctcagcatgagttaggtaacgtgttcctgaaattcaaggacaaattttgtgtgtacgaggagtactgctcaaatcacgaaaaagccctgcgattgctggttgaattgaacaaaattcccaccgtgcgggctttcctcctttcctgtatgttgctcggcggaaggaagactactgacatccctctggaggggtatctgctgtcccctatccagagaatttgtaagtaccccctgttgctgaaggagctggctaaaaggacccctggaaagcatccagaccatcctgctgtgcaatctgcccttcaggctatgaagaccgtgtgctctaacattaacgaaacaaagcgtcagatggaaaagttagaggccctggagcagctccagtcccatatcgagggctgggagggaagtaatctgacagacatctgcacccagctcctgctacagggaaccctcctgaagatttctgcaggtaacattcaggagcgggcattttttctctttgacaacttactggtctactgcaaacgcaagtcccgcgtgaccggaagcaaaaagtcgaccaagcggaccaagtccattaatggctccctttatatattccggggacgtattaatactgaagtgatggaggtcgagaacgtggaagacgggacagccgactaccactctaacggctacactgtgacgaatggttggaaaatccacaacaccgccaaaaacaagtggtttgtttgtatggctaaaactgctgaagagaaacagaaatggttggacgccatcatcagggagcgcgagcagagggaaagtttgaaactcgggatggagagggatgcatatgtcatgattgccgaaaaaggagagaaactatatcatatgatgatgaacaaaaaagtcaacctgatcaaggaccggaggcggaaactgagcacggttcccaaatgctttctgggtaatgagtttgttgcgtggctgctggagattggtgagatcagcaagactgaagaaggcgtcaacctggggcaggccctgttggagaatgggatcattcaccacgtcagtgacaagcaccagttcaagaatgagcaggtcatgtataggtttagatatgacgatggaacttacaaggccagaagtgaactggaggatatcatgtcaaagggcgtgcgcctctattgtcggctccattctttgtatacccccgtgatcaaggaccgggattaccatcttaaaacatacaagtccgtgctgccagggtctaagttggtcgactggctgctggctcaaggcgattgccagacccgcgaggaggccgtagcactgggggtggggctgtgcaacaacggctttatgcatcacgtcctggagaaaagcgagtttcgcgacgagtcgcagtattttcggttccacgcagacgaggaaatggagggaacatccagcaaaaacaaacagctgagaaacgacttcaagctcgtcgaaaacattctggccaaaagactcctgatcctgccgcaggaagaagattatgggttcgatattgaggagaaaaacaaagcagtggtggtgaagtcagtccagcggggaagtctggcagaggtggccggattgcaggtggggagaaaaatatacagcattaacgaggacctggtgttcctgcggccattttctgaagttgagagtatcctgaaccagagtttctgcagccgacgaccactccgactgctcgttgcaaccaaggccaaggaaattattaagatacccgatcaacctgatactctgtgcttccaaatcaggggagcagctcccccatacgtgtatgcggtcggccgaggttcggaggctatggcggctggcttgtgtgcaggtcaatgtatactcaaggtgaacggctccaatgttatgaatgacggagcccctgaagtgctggagcatttccaggctttccggagcaggcgggaggaagctctgggcctgtaccagtggatctatcatacacatgaggacgctcaggaggctcgtgcttcgcaggaagcgagtactgaagatccctcaggcgagcaagcacaagaagaggaccaggccgactcagcatttcccttactctcgctggggccaagactgtctctgtgcgaggactcacctatggtgacattaacggtcgacaacgtgcatctagagcacggcgtggtttacgaatatgtgagtaccgctggagtgaggtgtcacgtccttgaaaaaatcgtggaaccgagagggtgcttcggactgacagcaaagatattggaggccttcgccgctaacgacagcgtcttcgtagaaaactgtcgcagactgatggctttgtccagcgccatcgtgaccatgccccacttcgagttccggaacatttgtgacacaaagctggaaagcattggccagaggattgcttgttaccaagagttcgctgcccagctgaagtccagagtctccccaccatttaaacaggcccctctcgagcctcacccactgtgtgggctggatttttgtcccacaaattgccacataaacctgatggaggtctcctatccaaaaacaaccccatcagtggggagatcatttagtattagattcgggcgaaagccttctcttatcggtttggatcctgaacagggtcatctcaaccctatgagctacacgcagcactgtattacaaccatggccgctcctagttggaagtgcctgccggctgcagagggcgatccccagggccagggcctgcacgacgggtcattcgggccagcatcaggcacactcgggcaagaggatagaggtctgtcctttctccttaaacaagaggacagggaaatacaggacgcttatttacaactgttcaccaagctggatgtggccctcaaagagatgaagcagtacgtgacccagatcaacagactgctttctacaatcacggagcctacaagtgggggttcttgtgacgcttccctggcagaggaagccagctccttgcctctagtatctgaggaatcggaaatggaccgctctgaccatggaggaattaaaaaagtctgctttaaagtggctgaagaagaccaggaggatagcgggcacgataccatgagctatcgggattcctacagcgagtgcaattctaaccgtgattcagtcctcagttacacctccgtcagaagtaatagctcgtacctgggttctgacgagatggggagcggggatgagctgccctgcgatatgcggatcccgagcgacaagcaggacaagctgcacggctgcctggagcacctcttcaatcaggtcgacagcatcaatgccctcctgaagggcccagtgatgtccagagcatttgaagaaacgaagcacttccctatgaaccatagtttgcaggagtttaaacagaaagaagagtgtaccattcggggacgcagcctgatccagatctccatacaagaggacccttggaacttgcccaacagtatcaaaactctggtggataacatccaacggtacgtggaggatggaaaaaatcagttgctactggctctacttaaatgtacagatacagagcttcaactgcggagagacgcaatattctgccaggctttggtagccgcagtctgcacattctccaaacaactgttggctgcgctaggttaccggtataacaacaatggggagtacgaagaaagctctagagatgcctcacgaaaatggctggaacaagtagcagctacaggcgtgctgctgcactgtcagtcgctgttgagccccgctactgttaaggaggagcgcaccatgttagaagatatttgggtcactcttagtgaactggacaacgtcaccttcagcttcaagcagttagatgaaaattacgtcgcaaatacaaacgtgttctaccacatagagggctcaagacaggcactgaaagtgatcttctaccttgatagctatcatttctcgaaactcccaagcagattggagggaggggcaagccttagactacataccgccctgttcacaaaagtgctggagaacgtcgagggattaccaagtcctggctcccaggctgctgaagatcttcagcaagacattaacgcacagtctttggagaaggtacagcaatattaccgaaaattgagagctttttacttggagagaagtaatcttccaacagatgcctcaacgactgcggttaaaattgatcaactgatccgaccaatcaacgccttggacgagctgtgccgcctcatgaaatcgttcgtgcatccaaagcctggcgctgccggaagcgtgggggctggccttattcccataagttctgaactgtgctatcgtctgggcgcatgtcaaatggttatgtgtggtacagggatgcagaggtcaaccctgtcagttagcttagaacaggcagcgatcctggctagatcacacgggttgctgcccaaatgcatcatgcaggcaacagatatcatgaggaaacaagggcctcgagtggagatccttgcaaaaaacctgcgtgttaaggatcagatgccccagggcgctcctagattgtatagactgtgccagccaccagtagacggtgatctgta

SEQ ID NO: 205986 - DNA, 4686 bp, Artificial Sequence
  derived and/or modified sequence
atggaagccccatcaggctcagagccaggcggagatggcgcaggtgactgtgcccaccccgatcccagagcccctggagccgcagctccatcgagcgggcctgggccatgtgctgctgcgagggagtctgaacggcaattgaggcttcgcctatgtgtgttgaacgaaatcttgggaactgaaagggactatgtcgggaccctccggttcctgcagagcgcttttttgcatagaattagacagaatgtggcagactctgtggagaaaggattaacagaggagaacgtgaaggtcctgttcagtaatattgaagatatccttgaggtccacaaagattttctcgcggctctggagtattgtctgcatcctgaaccacagtcccagcacgagctgggcaatgtcttcttaaaatttaaggacaagttctgcgtgtacgaagaatactgctctaaccatgagaaggctctgagactgctggttgaacttaacaagatacccaccgtaagggcgttcctgctgagctgcatgctgctggggggaaggaaaacaacggatataccgctggaggggtacctgcttagccccatccaacgaatctgcaagtatccacttctgttgaaggaactggccaagcgcacccccggaaagcatccggaccacccagccgttcaatcggctctacaagcaatgaaaaccgtgtgctctaatataaatgaaacaaagcgtcagatggagaagctggaggctttggagcagctccagtctcacattgaaggctgggagggatctaatcttacggatatatgcacccagcttcttctgcagggcaccctgttgaagatctccgccggaaacatacaagagagggccttcttcctcttcgacaatctgctcgtgtattgcaaacgtaaaagtcgagtgaccgggagtaagaagtcgacgaaacgcaccaagtccatcaacggatctctctacatcttccgtgggagaatcaacacagaagtgatggaagtagaaaacgttgaagacgggacagctgattatcactccaacggctatacggtgactaatggctggaagatccataacacggctaaaaacaaatggttcgtgtgcatggcaaaaacagcagaggagaagcagaagtggctggacgctataatcagggaacgagagcagagggagtcactgaaactgggaatggagagagatgcctatgtcatgatagcagaaaaaggcgagaagttgtaccatatgatgatgaacaagaaggtgaacttgatcaaggatagacggcgtaaattgagcaccgtccccaaatgtttccttggcaacgaattcgtggcctggctgctcgaaattggcgaaatctcgaagacagaagagggtgttaacctgggacaggcactgctggagaacggcatcatccatcatgtctccgataaacatcagtttaagaatgagcaggtgatgtaccgtttccggtacgacgacggcacctataaggcgcgtagcgaactcgaggacattatgtccaagggcgtcagactgtattgccgcctgcattctctctatactcctgtcattaaggatcgagactaccatctcaagacttataagtcagtgctccccggatcaaaactggtcgattggctcttggcccagggcgattgtcagacgagagaagaagctgtagcccttggcgtaggtctatgcaacaacggcttcatgcatcacgtgctcgaaaagtcagagttccgggacgaatctcagtactttaggttccatgcggatgaggaaatggagggcacatcttcgaaaaacaaacaactcagaaacgatttcaagttggtcgagaacatactggctaaacggctgcttatcttgccgcaagaggaagactacggcttcgacatcgaagagaagaacaaggcagtagtcgtcaaatccgtgcagcggggaagccttgccgaggtggcaggattgcaggtgggccgtaaaatctacagcatcaatgaagacctagtctttctgcggcctttctcggaggttgagtccattcttaaccagagtttttgttcaagacggccactgcgcctgttagtggcaacaaaagcgaaggaaattatcaaaatacccgaccagcctgataccctgtgcttccaaattcgaggtgcagctccgccttatgtatacgccgtgggaagaggatccgaggctatggctgccggactctgtgccggtcagtgcatcttaaaggtcaatgggtccaatgtaatgaacgacggcgctccagaggtgttagagcattttcaggcatttcggagccggcgtgaggaggctctggggctgtaccaatggatctaccacacccatgaggatgcccaggaggcacgggctagtcaggaggccagcacggaggatccatctggggaacaggcgcaggaggaggaccaagccgatagcgcattccctcttctttcactggggccaaggcttagcctgtgtgaggatagtcctatggtgactcttaccgtcgataacgttcacctggaacacggggtggtgtacgaatatgtgagcactgccggtgtgagatgtcatgtactggagaagatcgtggagcccagaggttgcttcgggctgactgctaaaattctggaggccttcgctgctaatgatagtgtgtttgtggagaactgcaggcggcttatggctctgagcagtgccatcgtaactatgccccatttcgagttccgcaatatttgtgacacgaagctggagtcaataggacagcggatcgcttgttatcaggagtttgcggcacagctcaagagccgtgtgagtccgccatttaagcaggcccctctcgagcctcaccctctatgcgggctcgatttctgccccaccaactgtcacattaatctgatggaggtgagctatccaaagaccacccccagtgtgggacgttctttcagtatccgattcggacgtaagccctccctgataggtctggatcccgagcagggccatttgaatcctatgtcatatacccaacactgtattaccactatggccgcaccatcctggaaatgcctccctgctgccgagggcgatccacaagggcagggtctgcacgacggcagctttggacccgcatcaggcactttgggccaggaggaccgaggtctgtcttttctcctgaaacaggaagaccgggagatccaagacgcctatttgcagttgtttaccaaattggatgtcgctttgaaggagatgaagcaatacgtaacacaaatcaataggctgctgagtacaattacggaacccacatctgggggtagttgtgacgcctccctggctgaagaggcctccagcctcccccttgtgtccgaagaaagtgagatggatcgctcggatcatggcggaatcaagaaggtatgctttaaggttgcggaagaggaccaggaagactccgggcacgacacaatgtcctaccgggacagctactcagagtgcaattctaatcgcgatagcgttttaagttatacctcagtgagaagtaactctagttatctagggtctgacgagatggggagcggagacgagctgccctgcgacatgaggattccttcagataaacaagacaaacttcacgggtgcttggaacatttgtttaatcaagtggatagtatcaatgcactgcttaaggggccagtgatgtcacgggcattcgaagaaactaaacattttccaatgaatcatagcctccaggaatttaaacagaaagaggagtgcactattcgcggaaggtccctgattcagatatccatccaggaggacccatggaacctccccaattccatcaagaccttggtggacaatattcagcgatacgtagaagacggtaagaaccagctgctgctcgctctgctcaagtgtaccgatactgaactccagttacggcgagatgctattttctgtcaagcactggtggccgcagtgtgtacttttagtaaacagctgctggctgcacttggctaccggtacaacaacaatggtgagtacgaggagtcctcccgggatgctagccgtaagtggctcgagcaggttgccgcaacgggtgtactgctccattgccagtccctgctaagtcctgctacagtaaaagaggagcggaccatgctcgaggatatctgggtcaccctctccgagcttgacaacgtgactttttcttttaagcaacttgatgagaattacgtggccaatacgaacgtgttctaccatatcgaaggttcccggcaagctctgaaggtgattttttacctcgatagttatcacttctcgaagctgccgagccgactggagggcggagcttcgctgcgtttgcatacggccctgtttaccaaaggggaactgcaggcgtggggccgagaagatcacggaggtcgggcaaaggccaccaagcacacaggttcccagccaccagcacgcccaaggcacctgccatcccagtgctggcgaacatggcgcggatgcctgctccaagccgcaaggccaaggagaatttgctctagaacttccacccggtctccttggcgtaaattttcatctattacagccaactccgggcacttcacctggagtgggctcacctgtccccgtatgcccgcaccacgccgatag

SEQ ID NO: 205987 - DNA, 4980 bp, Artificial Sequence
  derived and/or modified sequence
atggaggcccccagcggcagcgagcccggcggcgacggcgccggcgactgcgcccaccccgaccccagagcccccggcgccgccgcccccagcagcggccccggcccctgcgccgccgccagagagagcgagagacagctgagactgagactgtgcgtgctgaacgagatcctgggcaccgagagagactacgtgggcaccctgagattcctgcagagcgccttcctgcacagaatcagacagaacgtggccgacagcgtggagaagggcctgaccgaggagaacgtgaaggtgctgttcagcaacatcgaggacatcctggaggtgcacaaggacttcctggccgccctggagtactgcctgcaccccgagccccagagccagcacgagctgggcaacgtgttcctgaagttcaaggacaagttctgcgtgtacgaggagtactgcagcaaccacgagaaggccctgagactgctggtggagctgaacaagatccccaccgtgagagccttcctgctgagctgcatgctgctgggcggcagaaagaccaccgacatccccctggagggctacctgctgagccccatccagagaatctgcaagtaccccctgctgctgaaggagctggccaagagaacccccggcaagcaccccgaccaccccgccgtgcagagcgccctgcaggccatgaagaccgtgtgcagcaacatcaacgagaccaagagacagatggagaagctggaggccctggagcagctgcagagccacatcgagggctgggagggcagcaacctgaccgacatctgcacccagctgctgctgcagggcaccctgctgaagatcagcgccggcaacatccaggagagagccttcttcctgttcgacaacctgctggtgtactgcaagagaaagagcagagtgaccggcagcaagaagagcaccaagagaaccaagagcatcaacggcagcctgtacatcttcagaggcagaatcaacaccgaggtgatggaggtggagaacgtggaggacggcaccgccgactaccacagcaacggctacaccgtgaccaacggctggaagatccacaacaccgccaagaacaagtggttcgtgtgcatggccaagaccgccgaggagaagcagaagtggctggacgccatcatcagagagagagagcagagagagagcctgaagctgggcatggagagagacgcctacgtgatgatcgccgagaagggcgagaagctgtaccacatgatgatgaacaagaaggtgaacctgatcaaggacagaagaagaaagctgagcaccgtgcccaagtgcttcctgggcaacgagttcgtggcctggctgctggagatcggcgagatcagcaagaccgaggagggcgtgaacctgggccaggccctgctggagaacggcatcatccaccacgtgagcgacaagcaccagttcaagaacgagcaggtgatgtacagattcagatacgacgacggcacctacaaggccagaagcgagctggaggacatcatgagcaagggcgtgagactgtactgcagactgcacagcctgtacacccccgtgatcaaggacagagactaccacctgaagacctacaagagcgtgctgcccggcagcaagctggtggactggctgctggcccagggcgactgccagaccagagaggaggccgtggccctgggcgtgggcctgtgcaacaacggcttcatgcaccacgtgctggagaagagcgagttcagagacgagagccagtacttcagattccacgccgacgaggagatggagggcaccagcagcaagaacaagcagctgagaaacgacttcaagctggtggagaacatcctggccaagagactgctgatcctgccccaggaggaggactacggcttcgacatcgaggagaagaacaaggccgtggtggtgaagagcgtgcagagaggcagcctggccgaggtggccggcctgcaggtgggcagaaagatctacagcatcaacgaggacctggtgttcctgagacccttcagcgaggtggagagcatcctgaaccagagcttctgcagcagaagacccctgagactgctggtggccaccaaggccaaggagatcatcaagatccccgaccagcccgacaccctgtgcttccagatcagaggcgccgcccccccctacgtgtacgccgtgggcagaggcagcgaggccatggccgccggcctgtgcgccggccagtgcatcctgaaggtgaacggcagcaacgtgatgaacgacggcgcccccgaggtgctggagcacttccaggccttcagaagcagaagagaggaggccctgggcctgtaccagtggatctaccacacccacgaggacgcccaggaggccagagccagccaggaggccagcaccgaggaccccagcggcgagcaggcccaggaggaggaccaggccgacagcgccttccccctgctgagcctgggccccagactgagcctgtgcgaggacagccccatggtgaccctgaccgtggacaacgtgcacctggagcacggcgtggtgtacgagtacgtgagcaccgccggcgtgagatgccacgtgctggagaagatcgtggagcccagaggctgcttcggcctgaccgccaagatcctggaggccttcgccgccaacgacagcgtgttcgtggagaactgcagaagactgatggccctgagcagcgccatcgtgaccatgccccacttcgagttcagaaacatctgcgacaccaagctggagagcatcggccagagaatcgcctgctaccaggagttcgccgcccagctgaagagcagagtgagcccccccttcaagcaggcccccctggagccccaccccctgtgcggcctggacttctgccccaccaactgccacatcaacctgatggaggtgagctaccccaagaccacccccagcgtgggcagaagcttcagcatcagattcggcagaaagcccagcctgatcggcctggaccccgagcagggccacctgaaccccatgagctacacccagcactgcatcaccaccatggccgcccccagctggaagtgcctgcccgccgccgagggcgacccccagggccagggcctgcacgacggcagcttcggccccgccagcggcaccctgggccaggaggacagaggcctgagcttcctgctgaagcaggaggacagagagatccaggacgcctacctgcagctgttcaccaagctggacgtggccctgaaggagatgaagcagtacgtgacccagatcaacagactgctgagcaccatcaccgagcccaccagcggcggcagctgcgacgccagcctggccgaggaggccagcagcctgcccctggtgagcgaggagagcgagatggacagaagcgaccacggcggcatcaagaaggtgtgcttcaaggtggccgaggaggaccaggaggacagcggccacgacaccatgagctacagagacagctacagcgagtgcaacagcaacagagacagcgtgctgagctacaccagcgtgagaagcaacagcagctacctgggcagcgacgagatgggcagcggcgacgagctgccctgcgacatgagaatccccagcgacaagcaggacaagctgcacggctgcctggagcacctgttcaaccaggtggacagcatcaacgccctgctgaagggccccgtgatgagcagagccttcgaggagaccaagcacttccccatgaaccacagcctgcaggagttcaagcagaaggaggagtgcaccatcagaggcagaagcctgatccagatcagcatccaggaggacccctggaacctgcccaacagcatcaagaccctggtggacaacatccagagatacgtggaggacggcaagaaccagctgctgctggccctgctgaagtgcaccgacaccgagctgcagctgagaagagacgccatcttctgccaggccctggtggccgccgtgtgcaccttcagcaagcagctgctggccgccctgggctacagatacaacaacaacggcgagtacgaggagagcagcagagacgccagcagaaagtggctggagcaggtggccgccaccggcgtgctgctgcactgccagagcctgctgagccccgccaccgtgaaggaggagagaaccatgctggaggacatctgggtgaccctgagcgagctggacaacgtgaccttcagcttcaagcagctggacgagaactacgtggccaacaccaacgtgttctaccacatcgagggcagcagacaggccctgaaggtgatcttctacctggacagctaccacttcagcaagctgcccagcagactggagggcggcgccagcctgagactgcacaccgccctgttcaccaaggtgctggagaacgtggagggcctgcccagccccggcagccaggccgccgaggacctgcagcaggacatcaacgcccagagcctggagaaggtgcagcagtactacagaaagctgagagccttctacctggagagaagcaacctgcccaccgacgccagcaccaccgccgtgaagatcgaccagctgatcagacccatcaacgccctggacgagctgtgcagactgatgaagagcttcgtgcaccccaagcccggcgccgccggcagcgtgggcgccggcctgatccccatcagcagcgagctgtgctacagactgggcgcctgccagatggtgatgtgcggcaccggcatgcagagaagcaccctgagcgtgagcctggagcaggccgccatcctggccagaagccacggcctgctgcccaagtgcatcatgcaggccaccgacatcatgagaaagcagggccccagagtggagatcctggccaagaacctgagagtgaaggaccagatgccccagggcgcccccagactgtacagactgtgccagccccccgtggacggcgacctgtag

SEQ ID NO: 205988 - DNA, 4686 bp, Artificial Sequence
  derived and/or modified sequence
atggaggcccccagcggcagcgagcccggcggcgacggcgccggcgactgcgcccaccccgaccccagagcccccggcgccgccgcccccagcagcggccccggcccctgcgccgccgccagagagagcgagagacagctgagactgagactgtgcgtgctgaacgagatcctgggcaccgagagagactacgtgggcaccctgagattcctgcagagcgccttcctgcacagaatcagacagaacgtggccgacagcgtggagaagggcctgaccgaggagaacgtgaaggtgctgttcagcaacatcgaggacatcctggaggtgcacaaggacttcctggccgccctggagtactgcctgcaccccgagccccagagccagcacgagctgggcaacgtgttcctgaagttcaaggacaagttctgcgtgtacgaggagtactgcagcaaccacgagaaggccctgagactgctggtggagctgaacaagatccccaccgtgagagccttcctgctgagctgcatgctgctgggcggcagaaagaccaccgacatccccctggagggctacctgctgagccccatccagagaatctgcaagtaccccctgctgctgaaggagctggccaagagaacccccggcaagcaccccgaccaccccgccgtgcagagcgccctgcaggccatgaagaccgtgtgcagcaacatcaacgagaccaagagacagatggagaagctggaggccctggagcagctgcagagccacatcgagggctgggagggcagcaacctgaccgacatctgcacccagctgctgctgcagggcaccctgctgaagatcagcgccggcaacatccaggagagagccttcttcctgttcgacaacctgctggtgtactgcaagagaaagagcagagtgaccggcagcaagaagagcaccaagagaaccaagagcatcaacggcagcctgtacatcttcagaggcagaatcaacaccgaggtgatggaggtggagaacgtggaggacggcaccgccgactaccacagcaacggctacaccgtgaccaacggctggaagatccacaacaccgccaagaacaagtggttcgtgtgcatggccaagaccgccgaggagaagcagaagtggctggacgccatcatcagagagagagagcagagagagagcctgaagctgggcatggagagagacgcctacgtgatgatcgccgagaagggcgagaagctgtaccacatgatgatgaacaagaaggtgaacctgatcaaggacagaagaagaaagctgagcaccgtgcccaagtgcttcctgggcaacgagttcgtggcctggctgctggagatcggcgagatcagcaagaccgaggagggcgtgaacctgggccaggccctgctggagaacggcatcatccaccacgtgagcgacaagcaccagttcaagaacgagcaggtgatgtacagattcagatacgacgacggcacctacaaggccagaagcgagctggaggacatcatgagcaagggcgtgagactgtactgcagactgcacagcctgtacacccccgtgatcaaggacagagactaccacctgaagacctacaagagcgtgctgcccggcagcaagctggtggactggctgctggcccagggcgactgccagaccagagaggaggccgtggccctgggcgtgggcctgtgcaacaacggcttcatgcaccacgtgctggagaagagcgagttcagagacgagagccagtacttcagattccacgccgacgaggagatggagggcaccagcagcaagaacaagcagctgagaaacgacttcaagctggtggagaacatcctggccaagagactgctgatcctgccccaggaggaggactacggcttcgacatcgaggagaagaacaaggccgtggtggtgaagagcgtgcagagaggcagcctggccgaggtggccggcctgcaggtgggcagaaagatctacagcatcaacgaggacctggtgttcctgagacccttcagcgaggtggagagcatcctgaaccagagcttctgcagcagaagacccctgagactgctggtggccaccaaggccaaggagatcatcaagatccccgaccagcccgacaccctgtgcttccagatcagaggcgccgcccccccctacgtgtacgccgtgggcagaggcagcgaggccatggccgccggcctgtgcgccggccagtgcatcctgaaggtgaacggcagcaacgtgatgaacgacggcgcccccgaggtgctggagcacttccaggccttcagaagcagaagagaggaggccctgggcctgtaccagtggatctaccacacccacgaggacgcccaggaggccagagccagccaggaggccagcaccgaggaccccagcggcgagcaggcccaggaggaggaccaggccgacagcgccttccccctgctgagcctgggccccagactgagcctgtgcgaggacagccccatggtgaccctgaccgtggacaacgtgcacctggagcacggcgtggtgtacgagtacgtgagcaccgccggcgtgagatgccacgtgctggagaagatcgtggagcccagaggctgcttcggcctgaccgccaagatcctggaggccttcgccgccaacgacagcgtgttcgtggagaactgcagaagactgatggccctgagcagcgccatcgtgaccatgccccacttcgagttcagaaacatctgcgacaccaagctggagagcatcggccagagaatcgcctgctaccaggagttcgccgcccagctgaagagcagagtgagcccccccttcaagcaggcccccctggagccccaccccctgtgcggcctggacttctgccccaccaactgccacatcaacctgatggaggtgagctaccccaagaccacccccagcgtgggcagaagcttcagcatcagattcggcagaaagcccagcctgatcggcctggaccccgagcagggccacctgaaccccatgagctacacccagcactgcatcaccaccatggccgcccccagctggaagtgcctgcccgccgccgagggcgacccccagggccagggcctgcacgacggcagcttcggccccgccagcggcaccctgggccaggaggacagaggcctgagcttcctgctgaagcaggaggacagagagatccaggacgcctacctgcagctgttcaccaagctggacgtggccctgaaggagatgaagcagtacgtgacccagatcaacagactgctgagcaccatcaccgagcccaccagcggcggcagctgcgacgccagcctggccgaggaggccagcagcctgcccctggtgagcgaggagagcgagatggacagaagcgaccacggcggcatcaagaaggtgtgcttcaaggtggccgaggaggaccaggaggacagcggccacgacaccatgagctacagagacagctacagcgagtgcaacagcaacagagacagcgtgctgagctacaccagcgtgagaagcaacagcagctacctgggcagcgacgagatgggcagcggcgacgagctgccctgcgacatgagaatccccagcgacaagcaggacaagctgcacggctgcctggagcacctgttcaaccaggtggacagcatcaacgccctgctgaagggccccgtgatgagcagagccttcgaggagaccaagcacttccccatgaaccacagcctgcaggagttcaagcagaaggaggagtgcaccatcagaggcagaagcctgatccagatcagcatccaggaggacccctggaacctgcccaacagcatcaagaccctggtggacaacatccagagatacgtggaggacggcaagaaccagctgctgctggccctgctgaagtgcaccgacaccgagctgcagctgagaagagacgccatcttctgccaggccctggtggccgccgtgtgcaccttcagcaagcagctgctggccgccctgggctacagatacaacaacaacggcgagtacgaggagagcagcagagacgccagcagaaagtggctggagcaggtggccgccaccggcgtgctgctgcactgccagagcctgctgagccccgccaccgtgaaggaggagagaaccatgctggaggacatctgggtgaccctgagcgagctggacaacgtgaccttcagcttcaagcagctggacgagaactacgtggccaacaccaacgtgttctaccacatcgagggcagcagacaggccctgaaggtgatcttctacctggacagctaccacttcagcaagctgcccagcagactggagggcggcgccagcctgagactgcacaccgccctgttcaccaagggcgagctgcaggcctggggcagagaggaccacggcggcagagccaaggccaccaagcacaccggcagccagccccccgccagacccagacacctgcccagccagtgctggagaacctggagaggctgcctgctgcaggccgccagacccagaagaatctgcagcagaaccagcaccagaagcccctggagaaagttcagcagcatcaccgccaacagcggccacttcacctggagcggcctgacctgccccagaatgcccgcccccagaagatag

SEQ ID NO: 205989 - protein, 3753 aa, Artificial Sequence
  derived and/or modified sequence
MVLESVVADLLNRFLGDYVENLNKSQLKLGIWGGNVALDNLQIKENALSELDVPFKVKAGQIDKLTLKIPWKNLYGEAVVATLEGLYLLVVPGASIKYDAVKEEKSLQDVKQKELSRIEEALQKAAEKGTHSGEFIYGLENFVYKDIKPGRKRKKHKKHFKKPFKGLDRSKDKPKEAKKDTFVEKLATQVIKNVQVKITDIHIKYEDDVTDPKRPLSFGVTLGELSLLTANEHWTPCILNEADKIIYKLIRLDSLSAYWNVNCSMSYQRSREQILDQLKNEILTSGNIPPNYQYIFQPISASAKLYMNPYAESELKTPKLDCNIEIQNIAIELTKPQYLSMIDLLESVDYMVRNAPYRKYKPYLPLHTNGRRWWKYAIDSVLEVHIRRYTQMWSWSNIKKHRQLLKSYKIAYKNKLTQSKVSEEIQKEIQDLEKTLDVFNIILARQQAQVEVIRSGQKLRKKSADTGEKRGGWFSGLWGKKESKKKDEESLIPETIDDLMTPEEKDKLFTAIGYSESTHNLTLPKQYVAHIMTLKLVSTSVTIRENKNIPEILKIQIIGLGTQVSQRPGAQALKVEAKLEHWYITGLRQQDIVPSLVASIGDTTSSLLKIKFETNPEDSPADQTLIVQSQPVEVIYDAKTVNAVVEFFQSNKGLDLEQITSATLMKLEEIKERTATGLTHIIETRKVLDLRINLKPSYLVVPQTGFHHEKSDLLILDFGTFQLNSKDQGLQKTTNSSLEEIMDKAYDKFDVEIKNVQLLFARAEETWKKCRFQHPSTMHILQPMDIHVELAKAMVEKDIRMARFKVSGGLPLMHVRISDQKMKDVLYLMNSIPLPQKSSAQSPERQVSSIPIISGGTKGLLGTSLLLDTVESESDDEYFDAEDGEPQTCKSMKGSELKKAAEVPNEELINLLLKFEIKEVILEFTKQQKEEDTILVFNVTQLGTEATMRTFDLTVVSYLKKISLDYHEIEGSKRKPLHLISSSDKPGLDLLKVEYIKADKNGPSFQTAFGKTEQTVKVAFSSLNLLLQTQALVASINYLTTIIPSDDQSISVAKEVQISTEKQQKNSTLPKAIVSSRDSDIIDFRLFAKLNAFCVIVCNEKNNIAEIKIQGLDSSLSLQSRKQSLFARLENIIVTDVDPKTVHKKAVSIMGNEVFRFNLDLYPDATEGDLYTDMSKVDGVLSLNVGCIQIVYLHKFLMSLLNFLNNFQTAKESLSAATAQAAERAATSVKDLAQRSFRVSINIDLKAPVIVIPQSSISTNAVVVDLGLIRVHNQFSLVSDEDYLNPPVIDRMDVQLTKLTLYRTVIQPGIYHPDIQLLHPINLEFLVNRNLAASWYHKVPVVEIKGHLDSMNVSLNQEDLNLLFRILTENLCEGTEDLDKVKPRVQETGEIKEPLEISISQDVHDSKNTLTTGVEEIRSVDIINMLLNFEIKEVVVTLMKKSEKKGRPLHELNVLQLGMEAKVKTYDMTAKAYLKKISMQCFDFTDSKGEPLHIINSSNVTDEPLLKMLLTKADSDGPEFKTIHDSTKQRLKVSFASLDLVLHLEALLSFMDFLSSAAPFSEPSSSEKESELKPLVGESRSIAVKAVSSNISQKDVFDLKITAELNAFNVFVCDQKCNIADIKIHGMDASISVKPKQTDVFARLKDIIVMNVDLQSIHKKAVSILGDEVFRFQLTLYPDATEGEAYADMSKVDGKLSFKVGCIQIVYVHKFFMSLLNFLNNFQTAKEALSTATVQAAERAASSMKDLAQKSFRLLMDINLKAPVIIIPQSSVSPNAVIADLGLIRVENKFSLVPMEHYSLPPVIDKMNIELTQLKLSRTILQASLPQNDIEILKPVNMLLSIQRNLAAAWYVQIPGMEIKGKLKPMQVALSEDDLTVLMKILLENLGEASSQPSPTQSVQETVRVRKVDVSSVPDHLKEQEDWTDSKLSMNQIVSLQFDFHFESLSIILYNNDINQESGVAFHNDSFQLGELRLHLMASSGKMFKDGSMNVSVKLKTCTLDDLREGIERATSRMIDRKNDQDNNSSMIDISYKQDKNGSQIDAVLDKLYVCASVEFLMTVADFFIKAVPQSPENVAKETQILPRQTATGKVKIEKDDSVRPNMTLKAMITDPEVVFVASLTKADAPALTASFQCNLSLSTSKLEQMMEASVRDLKVLACPFLREKRGKNITTVLQPCSLFMEKCTWASGKQNINIMVKEFIIKISPIILNTVLTIMAALSPKTKEDGSKDTSKEMENLWGIKSINDYNTWFLGVDTATEITESFKGIEHSLIEENCGVVVESIQVTLECGLGHRTVPLLLAESKFSGNIKNWTSLMAAVADVTLQVHYYNEIHAVWEPLIERVEGKRQWNLRLDVKKNPVQDKSLLPGDDFIPEPQMAIHISSGNTMNITISKSCLNVFNNLAKGFSEGTASTFDYSLKDRAPFTVKNAVGVPIKVKPNCNLRVMGFPEKSDIFDVDAGQNLELEYASMVPSSQGNLSILSRQESSFFTLTIVPHGYTEVANIPVARPGRRLYNVRNPNASHSDSVLVQIDATEGNKVITLRSPLQIKNHFSIAFIIYKFVKNVKLLERIGIARPEEEFHVPLDSYRCQLFIQPAGILEHQYKESTTYISWKEELHRSREVRCMLQCPSVEVSFLPLIVNTVALPDELSYICTHGEDWDVAYIIHLYPSLTLRNLLPYSLRYLLEGTAETHELAEGSTADVLHSRISGEIMELVLVKYQGKNWNGHFRIRDTLPEFFPVCFSSDSTEVTTVDLSVHVRRIGSRMVLSVFSPYWLINKTTRVLQYRSEDIHVKHPADFRDIILFSFKKKNIFTKNKVQLKISTSAWSSSFSLDTVGSYGCVKCPANNMEYLVGVSIKMSSFNLSRIVTLTPFCTIANKSSLELEVGEIASDGSMPTNKWNYIASSECLPFWPESLSGKLCVRVVGCEGSSKPFFYNRQDNGTLLSLEDLNGGILVDVNTAEHSTVITFSDYHEGSAPALIMNHTPWDILTYKQSGSPEEMVLLPRQARLFAWADPTGTRKLTWTYAANVGEHDLLKDGCGQFPYDANIQIHWVSFLDGRQRVLLFTDDVALVSKALQAEEMEQADYEITLSLHSLGLSLVNNESKQEVSYIGITSSGVVWEVKPKQKWKPFSQKQIILLEQSYQKHQISRDHGWIKLDNNFEVNFDKDPMEMRLPIRSPIKRDFLSGIQIEFKQSSHQRSLRARLYWLQVDNQLPGAMFPVVFHPVAPPKSIALDSEPKPFIDVSVITRFNEYSKVLQFKYFMVLIQEMALKIDQGFLGAIIALFTPTTDPEAERRRTKLIQQDIDALNAELMETSMTDMSILSFFEHFHISPVKLHLSLSLGSGGEESDKEKQEMFAVHSVNLLLKSIGATLTDVDDLIFKLAYYEIRYQFYKRDQLIWSVVRHYSEQFLKQMYVLVLGLDVLGNPFGLIRGLSEGVEALFYEPFQGAVQGPEEFAEGLVIGVRSLFGHTVGGAAGVVSRITGSVGKGLAAITMDKEYQQKRREELSRQPRDFGDSLARGGKGFLRGVVGGVTGIITKPVEGAKKEGAAGFFKGIGKGLVGAVARPTGGIVDMASSTFQGIQRAAESTEEVSSLRPPRLIHEDGIIRPYDRQESEGSDLLENHIKKLEGETYRYHCAIPGSKKTILMVTNRRVLCIKEVEILGLMCVDWQCPFEDFVFPPSVSENVLKISVKEQGLFHKKDSANQGCVRKVYLKDTATAERACNAIEDAQSTRQQQKLMKQSSVRLLRPQLPS

SEQ ID NO: 205990 - DNA, 11262 bp, Artificial Sequence
  derived and/or modified sequence
atggtgctggagagcgtggtggccgacctgctgaacagattcctgggcgactacgtggagaacctgaacaagagccagctgaagctgggcatctggggcggcaacgtggccctggacaacctgcagatcaaggagaacgccctgagcgagctggacgtgcccttcaaggtgaaggccggccagatcgacaagctgaccctgaagatcccctggaagaacctgtacggcgaggccgtggtggccaccctggagggcctgtacctgctggtggtgcccggcgccagcatcaagtacgacgccgtgaaggaggagaagagcctgcaggacgtgaagcagaaggagctgagcagaatcgaggaggccctgcagaaggccgccgagaagggcacccacagcggcgagttcatctacggcctggagaacttcgtgtacaaggacatcaagcccggcagaaagagaaagaagcacaagaagcacttcaagaagcccttcaagggcctggacagaagcaaggacaagcccaaggaggccaagaaggacaccttcgtggagaagctggccacccaggtgatcaagaacgtgcaggtgaagatcaccgacatccacatcaagtacgaggacgacgtgaccgaccccaagagacccctgagcttcggcgtgaccctgggcgagctgagcctgctgaccgccaacgagcactggaccccctgcatcctgaacgaggccgacaagatcatctacaagctgatcagactggacagcctgagcgcctactggaacgtgaactgcagcatgagctaccagagaagcagagagcagatcctggaccagctgaagaacgagatcctgaccagcggcaacatcccccccaactaccagtacatcttccagcccatcagcgccagcgccaagctgtacatgaacccctacgccgagagcgagctgaagacccccaagctggactgcaacatcgagatccagaacatcgccatcgagctgaccaagccccagtacctgagcatgatcgacctgctggagagcgtggactacatggtgagaaacgccccctacagaaagtacaagccctacctgcccctgcacaccaacggcagaagatggtggaagtacgccatcgacagcgtgctggaggtgcacatcagaagatacacccagatgtggagctggagcaacatcaagaagcacagacagctgctgaagagctacaagatcgcctacaagaacaagctgacccagagcaaggtgagcgaggagatccagaaggagatccaggacctggagaagaccctggacgtgttcaacatcatcctggccagacagcaggcccaggtggaggtgatcagaagcggccagaagctgagaaagaagagcgccgacaccggcgagaagagaggcggctggttcagcggcctgtggggcaagaaggagagcaagaagaaggacgaggagagcctgatccccgagaccatcgacgacctgatgacccccgaggagaaggacaagctgttcaccgccatcggctacagcgagagcacccacaacctgaccctgcccaagcagtacgtggcccacatcatgaccctgaagctggtgagcaccagcgtgaccatcagagagaacaagaacatccccgagatcctgaagatccagatcatcggcctgggcacccaggtgagccagagacccggcgcccaggccctgaaggtggaggccaagctggagcactggtacatcaccggcctgagacagcaggacatcgtgcccagcctggtggccagcatcggcgacaccaccagcagcctgctgaagatcaagttcgagaccaaccccgaggacagccccgccgaccagaccctgatcgtgcagagccagcccgtggaggtgatctacgacgccaagaccgtgaacgccgtggtggagttcttccagagcaacaagggcctggacctggagcagatcaccagcgccaccctgatgaagctggaggagatcaaggagagaaccgccaccggcctgacccacatcatcgagaccagaaaggtgctggacctgagaatcaacctgaagcccagctacctggtggtgccccagaccggcttccaccacgagaagagcgacctgctgatcctggacttcggcaccttccagctgaacagcaaggaccagggcctgcagaagaccaccaacagcagcctggaggagatcatggacaaggcctacgacaagttcgacgtggagatcaagaacgtgcagctgctgttcgccagagccgaggagacctggaagaagtgcagattccagcaccccagcaccatgcacatcctgcagcccatggacatccacgtggagctggccaaggccatggtggagaaggacatcagaatggccagattcaaggtgagcggcggcctgcccctgatgcacgtgagaatcagcgaccagaagatgaaggacgtgctgtacctgatgaacagcatccccctgccccagaagagcagcgcccagagccccgagagacaggtgagcagcatccccatcatcagcggcggcaccaagggcctgctgggcaccagcctgctgctggacaccgtggagagcgagagcgacgacgagtacttcgacgccgaggacggcgagccccagacctgcaagagcatgaagggcagcgagctgaagaaggccgccgaggtgcccaacgaggagctgatcaacctgctgctgaagttcgagatcaaggaggtgatcctggagttcaccaagcagcagaaggaggaggacaccatcctggtgttcaacgtgacccagctgggcaccgaggccaccatgagaaccttcgacctgaccgtggtgagctacctgaagaagatcagcctggactaccacgagatcgagggcagcaagagaaagcccctgcacctgatcagcagcagcgacaagcccggcctggacctgctgaaggtggagtacatcaaggccgacaagaacggccccagcttccagaccgccttcggcaagaccgagcagaccgtgaaggtggccttcagcagcctgaacctgctgctgcagacccaggccctggtggccagcatcaactacctgaccaccatcatccccagcgacgaccagagcatcagcgtggccaaggaggtgcagatcagcaccgagaagcagcagaagaacagcaccctgcccaaggccatcgtgagcagcagagacagcgacatcatcgacttcagactgttcgccaagctgaacgccttctgcgtgatcgtgtgcaacgagaagaacaacatcgccgagatcaagatccagggcctggacagcagcctgagcctgcagagcagaaagcagagcctgttcgccagactggagaacatcatcgtgaccgacgtggaccccaagaccgtgcacaagaaggccgtgagcatcatgggcaacgaggtgttcagattcaacctggacctgtaccccgacgccaccgagggcgacctgtacaccgacatgagcaaggtggacggcgtgctgagcctgaacgtgggctgcatccagatcgtgtacctgcacaagttcctgatgagcctgctgaacttcctgaacaacttccagaccgccaaggagagcctgagcgccgccaccgcccaggccgccgagagagccgccaccagcgtgaaggacctggcccagagaagcttcagagtgagcatcaacatcgacctgaaggcccccgtgatcgtgatcccccagagcagcatcagcaccaacgccgtggtggtggacctgggcctgatcagagtgcacaaccagttcagcctggtgagcgacgaggactacctgaacccccccgtgatcgacagaatggacgtgcagctgaccaagctgaccctgtacagaaccgtgatccagcccggcatctaccaccccgacatccagctgctgcaccccatcaacctggagttcctggtgaacagaaacctggccgccagctggtaccacaaggtgcccgtggtggagatcaagggccacctggacagcatgaacgtgagcctgaaccaggaggacctgaacctgctgttcagaatcctgaccgagaacctgtgcgagggcaccgaggacctggacaaggtgaagcccagagtgcaggagaccggcgagatcaaggagcccctggagatcagcatcagccaggacgtgcacgacagcaagaacaccctgaccaccggcgtggaggagatcagaagcgtggacatcatcaacatgctgctgaacttcgagatcaaggaggtggtggtgaccctgatgaagaagagcgagaagaagggcagacccctgcacgagctgaacgtgctgcagctgggcatggaggccaaggtgaagacctacgacatgaccgccaaggcctacctgaagaagatcagcatgcagtgcttcgacttcaccgacagcaagggcgagcccctgcacatcatcaacagcagcaacgtgaccgacgagcccctgctgaagatgctgctgaccaaggccgacagcgacggccccgagttcaagaccatccacgacagcaccaagcagagactgaaggtgagcttcgccagcctggacctggtgctgcacctggaggccctgctgagcttcatggacttcctgagcagcgccgcccccttcagcgagcccagcagcagcgagaaggagagcgagctgaagcccctggtgggcgagagcagaagcatcgccgtgaaggccgtgagcagcaacatcagccagaaggacgtgttcgacctgaagatcaccgccgagctgaacgccttcaacgtgttcgtgtgcgaccagaagtgcaacatcgccgacatcaagatccacggcatggacgccagcatcagcgtgaagcccaagcagaccgacgtgttcgccagactgaaggacatcatcgtgatgaacgtggacctgcagagcatccacaagaaggccgtgagcatcctgggcgacgaggtgttcagattccagctgaccctgtaccccgacgccaccgagggcgaggcctacgccgacatgagcaaggtggacggcaagctgagcttcaaggtgggctgcatccagatcgtgtacgtgcacaagttcttcatgagcctgctgaacttcctgaacaacttccagaccgccaaggaggccctgagcaccgccaccgtgcaggccgccgagagagccgccagcagcatgaaggacctggcccagaagagcttcagactgctgatggacatcaacctgaaggcccccgtgatcatcatcccccagagcagcgtgagccccaacgccgtgatcgccgacctgggcctgatcagagtggagaacaagttcagcctggtgcccatggagcactacagcctgccccccgtgatcgacaagatgaacatcgagctgacccagctgaagctgagcagaaccatcctgcaggccagcctgccccagaacgacatcgagatcctgaagcccgtgaacatgctgctgagcatccagagaaacctggccgccgcctggtacgtgcagatccccggcatggagatcaagggcaagctgaagcccatgcaggtggccctgagcgaggacgacctgaccgtgctgatgaagatcctgctggagaacctgggcgaggccagcagccagcccagccccacccagagcgtgcaggagaccgtgagagtgagaaaggtggacgtgagcagcgtgcccgaccacctgaaggagcaggaggactggaccgacagcaagctgagcatgaaccagatcgtgagcctgcagttcgacttccacttcgagagcctgagcatcatcctgtacaacaacgacatcaaccaggagagcggcgtggccttccacaacgacagcttccagctgggcgagctgagactgcacctgatggccagcagcggcaagatgttcaaggacggcagcatgaacgtgagcgtgaagctgaagacctgcaccctggacgacctgagagagggcatcgagagagccaccagcagaatgatcgacagaaagaacgaccaggacaacaacagcagcatgatcgacatcagctacaagcaggacaagaacggcagccagatcgacgccgtgctggacaagctgtacgtgtgcgccagcgtggagttcctgatgaccgtggccgacttcttcatcaaggccgtgccccagagccccgagaacgtggccaaggagacccagatcctgcccagacagaccgccaccggcaaggtgaagatcgagaaggacgacagcgtgagacccaacatgaccctgaaggccatgatcaccgaccccgaggtggtgttcgtggccagcctgaccaaggccgacgcccccgccctgaccgccagcttccagtgcaacctgagcctgagcaccagcaagctggagcagatgatggaggccagcgtgagagacctgaaggtgctggcctgccccttcctgagagagaagagaggcaagaacatcaccaccgtgctgcagccctgcagcctgttcatggagaagtgcacctgggccagcggcaagcagaacatcaacatcatggtgaaggagttcatcatcaagatcagccccatcatcctgaacaccgtgctgaccatcatggccgccctgagccccaagaccaaggaggacggcagcaaggacaccagcaaggagatggagaacctgtggggcatcaagagcatcaacgactacaacacctggttcctgggcgtggacaccgccaccgagatcaccgagagcttcaagggcatcgagcacagcctgatcgaggagaactgcggcgtggtggtggagagcatccaggtgaccctggagtgcggcctgggccacagaaccgtgcccctgctgctggccgagagcaagttcagcggcaacatcaagaactggaccagcctgatggccgccgtggccgacgtgaccctgcaggtgcactactacaacgagatccacgccgtgtgggagcccctgatcgagagagtggagggcaagagacagtggaacctgagactggacgtgaagaagaaccccgtgcaggacaagagcctgctgcccggcgacgacttcatccccgagccccagatggccatccacatcagcagcggcaacaccatgaacatcaccatcagcaagagctgcctgaacgtgttcaacaacctggccaagggcttcagcgagggcaccgccagcaccttcgactacagcctgaaggacagagcccccttcaccgtgaagaacgccgtgggcgtgcccatcaaggtgaagcccaactgcaacctgagagtgatgggcttccccgagaagagcgacatcttcgacgtggacgccggccagaacctggagctggagtacgccagcatggtgcccagcagccagggcaacctgagcatcctgagcagacaggagagcagcttcttcaccctgaccatcgtgccccacggctacaccgaggtggccaacatccccgtggccagacccggcagaagactgtacaacgtgagaaaccccaacgccagccacagcgacagcgtgctggtgcagatcgacgccaccgagggcaacaaggtgatcaccctgagaagccccctgcagatcaagaaccacttcagcatcgccttcatcatctacaagttcgtgaagaacgtgaagctgctggagagaatcggcatcgccagacccgaggaggagttccacgtgcccctggacagctacagatgccagctgttcatccagcccgccggcatcctggagcaccagtacaaggagagcaccacctacatcagctggaaggaggagctgcacagaagcagagaggtgagatgcatgctgcagtgccccagcgtggaggtgagcttcctgcccctgatcgtgaacaccgtggccctgcccgacgagctgagctacatctgcacccacggcgaggactgggacgtggcctacatcatccacctgtaccccagcctgaccctgagaaacctgctgccctacagcctgagatacctgctggagggcaccgccgagacccacgagctggccgagggcagcaccgccgacgtgctgcacagcagaatcagcggcgagatcatggagctggtgctggtgaagtaccagggcaagaactggaacggccacttcagaatcagagacaccctgcccgagttcttccccgtgtgcttcagcagcgacagcaccgaggtgaccaccgtggacctgagcgtgcacgtgagaagaatcggcagcagaatggtgctgagcgtgttcagcccctactggctgatcaacaagaccaccagagtgctgcagtacagaagcgaggacatccacgtgaagcaccccgccgacttcagagacatcatcctgttcagcttcaagaagaagaacatcttcaccaagaacaaggtgcagctgaagatcagcaccagcgcctggagcagcagcttcagcctggacaccgtgggcagctacggctgcgtgaagtgccccgccaacaacatggagtacctggtgggcgtgagcatcaagatgagcagcttcaacctgagcagaatcgtgaccctgacccccttctgcaccatcgccaacaagagcagcctggagctggaggtgggcgagatcgccagcgacggcagcatgcccaccaacaagtggaactacatcgccagcagcgagtgcctgcccttctggcccgagagcctgagcggcaagctgtgcgtgagagtggtgggctgcgagggcagcagcaagcccttcttctacaacagacaggacaacggcaccctgctgagcctggaggacctgaacggcggcatcctggtggacgtgaacaccgccgagcacagcaccgtgatcaccttcagcgactaccacgagggcagcgcccccgccctgatcatgaaccacaccccctgggacatcctgacctacaagcagagcggcagccccgaggagatggtgctgctgcccagacaggccagactgttcgcctgggccgaccccaccggcaccagaaagctgacctggacctacgccgccaacgtgggcgagcacgacctgctgaaggacggctgcggccagttcccctacgacgccaacatccagatccactgggtgagcttcctggacggcagacagagagtgctgctgttcaccgacgacgtggccctggtgagcaaggccctgcaggccgaggagatggagcaggccgactacgagatcaccctgagcctgcacagcctgggcctgagcctggtgaacaacgagagcaagcaggaggtgagctacatcggcatcaccagcagcggcgtggtgtgggaggtgaagcccaagcagaagtggaagcccttcagccagaagcagatcatcctgctggagcagagctaccagaagcaccagatcagcagagaccacggctggatcaagctggacaacaacttcgaggtgaacttcgacaaggaccccatggagatgagactgcccatcagaagccccatcaagagagacttcctgagcggcatccagatcgagttcaagcagagcagccaccagagaagcctgagagccagactgtactggctgcaggtggacaaccagctgcccggcgccatgttccccgtggtgttccaccccgtggccccccccaagagcatcgccctggacagcgagcccaagcccttcatcgacgtgagcgtgatcaccagattcaacgagtacagcaaggtgctgcagttcaagtacttcatggtgctgatccaggagatggccctgaagatcgaccagggcttcctgggcgccatcatcgccctgttcacccccaccaccgaccccgaggccgagagaagaagaaccaagctgatccagcaggacatcgacgccctgaacgccgagctgatggagaccagcatgaccgacatgagcatcctgagcttcttcgagcacttccacatcagccccgtgaagctgcacctgagcctgagcctgggcagcggcggcgaggagagcgacaaggagaagcaggagatgttcgccgtgcacagcgtgaacctgctgctgaagagcatcggcgccaccctgaccgacgtggacgacctgatcttcaagctggcctactacgagatcagataccagttctacaagagagaccagctgatctggagcgtggtgagacactacagcgagcagttcctgaagcagatgtacgtgctggtgctgggcctggacgtgctgggcaaccccttcggcctgatcagaggcctgagcgagggcgtggaggccctgttctacgagcccttccagggcgccgtgcagggccccgaggagttcgccgagggcctggtgatcggcgtgagaagcctgttcggccacaccgtgggcggcgccgccggcgtggtgagcagaatcaccggcagcgtgggcaagggcctggccgccatcaccatggacaaggagtaccagcagaagagaagagaggagctgagcagacagcccagagacttcggcgacagcctggccagaggcggcaagggcttcctgagaggcgtggtgggcggcgtgaccggcatcatcaccaagcccgtggagggcgccaagaaggagggcgccgccggcttcttcaagggcatcggcaagggcctggtgggcgccgtggccagacccaccggcggcatcgtggacatggccagcagcaccttccagggcatccagagagccgccgagagcaccgaggaggtgagcagcctgagaccccccagactgatccacgaggacggcatcatcagaccctacgacagacaggagagcgagggcagcgacctgctggagaaccacatcaagaagctggagggcgagacctacagataccactgcgccatccccggcagcaagaagaccatcctgatggtgaccaacagaagagtgctgtgcatcaaggaggtggagatcctgggcctgatgtgcgtggactggcagtgccccttcgaggacttcgtgttcccccccagcgtgagcgagaacgtgctgaagatcagcgtgaaggagcagggcctgttccacaagaaggacagcgccaaccagggctgcgtgagaaaggtgtacctgaaggacaccgccaccgccgagagagcctgcaacgccatcgaggacgcccagagcaccagacagcagcagaagctgatgaagcagagcagcgtgagactgctgagaccccagctgcccagctag

SEQ ID NO: 205991 - DNA, 10887 bp, Artificial Sequence
  derived and/or modified sequence
atggtgctggagagcgtggtggccgacctgctgaacagattcctgggcgactacgtggagaacctgaacaagagccagctgaagctgggcatctggggcggcaacgtggccctggacaacctgcagatcaaggagaacgccctgagcgagctggacgtgcccttcaaggtgaaggccggccagatcgacaagctgaccctgaagatcccctggaagaacctgtacggcgaggccgtggtggccaccctggagggcctgtacctgctggtggtgcccggcgccagcatcaagtacgacgccgtgaaggaggagaagagcctgcaggacgtgaagcagaaggagctgagcagaatcgaggaggccctgcagaaggccgccgagaagggcacccacagcggcgagttcatctacggcctggagaacttcgtgtacaaggacatcaagcccggcagaaagagaaagaagcacaagaagcacttcaagaagcccttcaagggcctggacagaagcaaggacaagcccaaggaggccaagaaggacaccttcgtggagaagctggccacccaggtgatcaagaacgtgcaggtgaagatcaccgacatccacatcaagtacgaggacgacgtgaccgaccccaagagacccctgagcttcggcgtgaccctgggcgagctgagcctgctgaccgccaacgagcactggaccccctgcatcctgaacgaggccgacaagatcatctacaagctgatcagactggacagcctgagcgcctactggaacgtgaactgcagcatgagctaccagagaagcagagagcagatcctggaccagctgaagaacgagatcctgaccagcggcaacatcccccccaactaccagtacatcttccagcccatcagcgccagcgccaagctgtacatgaacccctacgccgagagcgagctgaagacccccaagctggactgcaacatcgagatccagaacatcgccatcgagctgaccaagccccagtacctgagcatgatcgacctgctggagagcgtggactacatggtgagaaacgccccctacagaaagtacaagccctacctgcccctgcacaccaacggcagaagatggtggaagtacgccatcgacagcgtgctggaggtgcacatcagaagatacacccagatgtggagctggagcaacatcaagaagcacagacagctgctgaagagctacaagatcgcctacaagaacaagctgacccagagcaaggtgagcgaggagatccagaaggagatccaggacctggagaagaccctggacgtgttcaacatcatcctggccagacagcaggcccaggtggaggtgatcagaagcggccagaagctgagaaagaagagcgccgacaccggcgagaagagaggcggctggttcagcggcctgtggggcaagaaggagagcaagaagaaggacgaggagagcctgatccccgagaccatcgacgacctgatgacccccgaggagaaggacaagctgttcaccgccatcggctacagcgagagcacccacaacctgaccctgcccaagcagtacgtggcccacatcatgaccctgaagctggtgagcaccagcgtgaccatcagagagaacaagaacatccccgagatcctgaagatccagatcatcggcctgggcacccaggtgagccagagacccggcgcccaggccctgaaggtggaggccaagctggagcactggtacatcaccggcctgagacagcaggacatcgtgcccagcctggtggccagcatcggcgacaccaccagcagcctgctgaagatcaagttcgagaccaaccccgaggacagccccgccgaccagaccctgatcgtgcagagccagcccgtggaggtgatctacgacgccaagaccgtgaacgccgtggtggagttcttccagagcaacaagggcctggacctggagcagatcaccagcgccaccctgatgaagctggaggagatcaaggagagaaccgccaccggcctgacccacatcatcgagaccagaaaggtgctggacctgagaatcaacctgaagcccagctacctggtggtgccccagaccggcttccaccacgagaagagcgacctgctgatcctggacttcggcaccttccagctgaacagcaaggaccagggcctgcagaagaccaccaacagcagcctggaggagatcatggacaaggcctacgacaagttcgacgtggagatcaagaacgtgcagctgctgttcgccagagccgaggagacctggaagaagtgcagattccagcaccccagcaccatgcacatcctgcagcccatggacatccacgtggagctggccaaggccatggtggagaaggacatcagaatggccagattcaaggtgagcggcggcctgcccctgatgcacgtgagaatcagcgaccagaagatgaaggacgtgctgtacctgatgaacagcatccccctgccccagaagagcagcgcccagagccccgagagacaggtgagcagcatccccatcatcagcggcggcaccaagggcctgctgggcaccagcctgctgctggacaccgtggagagcgagagcgacgacgagtacttcgacgccgaggacggcgagccccagacctgcaagagcatgaagggcagcgagctgaagaaggccgccgaggtgcccaacgaggagctgatcaacctgctgctgaagttcgagatcaaggaggtgatcctggagttcaccaagcagcagaaggaggaggacaccatcctggtgttcaacgtgacccagctgggcaccgaggccaccatgagaaccttcgacctgaccgtggtgagctacctgaagaagatcagcctggactaccacgagatcgagggcagcaagagaaagcccctgcacctgatcagcagcagcgacaagcccggcctggacctgctgaaggtggagtacatcaaggccgacaagaacggccccagcttccagaccgccttcggcaagaccgagcagaccgtgaaggtggccttcagcagcctgaacctgctgctgcagacccaggccctggtggccagcatcaactacctgaccaccatcatccccagcgacgaccagagcatcagcgtggccaaggaggtgcagatcagcaccgagaagcagcagaagaacagcaccctgcccaaggccatcgtgagcagcagagacagcgacatcatcgacttcagactgttcgccaagctgaacgccttctgcgtgatcgtgtgcaacgagaagaacaacatcgccgagatcaagatccagggcctggacagcagcctgagcctgcagagcagaaagcagagcctgttcgccagactggagaacatcatcgtgaccgacgtggaccccaagaccgtgcacaagaaggccgtgagcatcatgggcaacgaggtgttcagattcaacctggacctgtaccccgacgccaccgagggcgacctgtacaccgacatgagcaaggtggacggcgtgctgagcctgaacgtgggctgcatccagatcgtgtacctgcacaagttcctgatgagcctgctgaacttcctgaacaacttccagaccgccaaggagagcctgagcgccgccaccgcccaggccgccgagagagccgccaccagcgtgaaggacctggcccagagaagcttcagagtgagcatcaacatcgacctgaaggcccccgtgatcgtgatcccccagagcagcatcagcaccaacgccgtggtggtggacctgggcctgatcagagtgcacaaccagttcagcctggtgagcgacgaggactacctgaacccccccgtgatcgacagaatggacgtgcagctgaccaagctgaccctgtacagaaccgtgatccagcccggcatctaccaccccgacatccagctgctgcaccccatcaacctggagttcctggtgaacagaaacctggccgccagctggtaccacaaggtgcccgtggtggagatcaagggccacctggacagcatgaacgtgagcctgaaccaggaggacctgaacctgctgttcagaatcctgaccgagaacctgtgcgagggcaccgaggacctggacaaggtgaagcccagagtgcaggagaccggcgagatcaaggagcccctggagatcagcatcagccaggacgtgcacgacagcaagaacaccctgaccaccggcgtggaggagatcagaagcgtggacatcatcaacatgctgctgaacttcgagatcaaggaggtggtggtgaccctgatgaagaagagcgagaagaagggcagacccctgcacgagctgaacgtgctgcagctgggcatggaggccaaggtgaagacctacgacatgaccgccaaggcctacctgaagaagatcagcatgcagtgcttcgacttcaccgacagcaagggcgagcccctgcacatcatcaacagcagcaacgtgaccgacgagcccctgctgaagatgctgctgaccaaggccgacagcgacggccccgagttcaagaccatccacgacagcaccaagcagagactgaaggtgagcttcgccagcctggacctggtgctgcacctggaggccctgctgagcttcatggacttcctgagcagcgccgcccccttcagcgagcccagcagcagcgagaaggagagcgagctgaagcccctggtgggcgagagcagaagcatcgccgtgaaggccgtgagcagcaacatcagccagaaggacgtgttcgacctgaagatcaccgccgagctgaacgccttcaacgtgttcgtgtgcgaccagaagtgcaacatcgccgacatcaagatccacggcatggacgccagcatcagcgtgaagcccaagcagaccgacgtgttcgccagactgaaggacatcatcgtgatgaacgtggacctgcagagcatccacaagaaggccgtgagcatcctgggcgacgaggtgttcagattccagctgaccctgtaccccgacgccaccgagggcgaggcctacgccgacatgagcaaggtggacggcaagctgagcttcaaggtgggctgcatccagatcgtgtacgtgcacaagttcttcatgagcctgctgaacttcctgaacaacttccagaccgccaaggaggccctgagcaccgccaccgtgcaggccgccgagagagccgccagcagcatgaaggacctggcccagaagagcttcagactgctgatggacatcaacctgaaggcccccgtgatcatcatcccccagagcagcgtgagccccaacgccgtgatcgccgacctgggcctgatcagagtggagaacaagttcagcctggtgcccatggagcactacagcctgccccccgtgatcgacaagatgaacatcgagctgacccagctgaagctgagcagaaccatcctgcaggccagcctgccccagaacgacatcgagatcctgaagcccgtgaacatgctgctgagcatccagagaaacctggccgccgcctggtacgtgcagatccccggcatggagatcaagggcaagctgaagcccatgcaggtggccctgagcgaggacgacctgaccgtgctgatgaagatcctgctggagaacctgggcgaggccagcagccagcccagccccacccagagcgtgcaggagaccgtgagagtgagaaaggtggacgtgagcagcgtgcccgaccacctgaaggagcaggaggactggaccgacagcaagctgagcatgaaccagatcgtgagcctgcagttcgacttccacttcgagagcctgagcatcatcctgtacaacaacgacatcaaccaggagagcggcgtggccttccacaacgacagcttccagctgggcgagctgagactgcacctgatggccagcagcggcaagatgttcaaggacggcagcatgaacgtgagcgtgaagctgaagacctgcaccctggacgacctgagagagggcatcgagagagccaccagcagaatgatcgacagaaagaacgaccaggacaacaacagcagcatgatcgacatcagctacaagcaggacaagaacggcagccagatcgacgccgtgctggacaagctgtacgtgtgcgccagcgtggagttcctgatgaccgtggccgacttcttcatcaaggccgtgccccagagccccgagaacgtggccaaggagacccagatcctgcccagacagaccgccaccggcaaggtgaagatcgagaaggacgacagcgtgagacccaacatgaccctgaaggccatgatcaccgaccccgaggtggtgttcgtggccagcctgaccaaggccgacgcccccgccctgaccgccagcttccagtgcaacctgagcctgagcaccagcaagctggagcagatgatggaggccagcgtgagagacctgaaggtgctggcctgccccttcctgagagagaagagaggcaagaacatcaccaccgtgctgcagccctgcagcctgttcatggagaagtgcacctgggccagcggcaagcagaacatcaacatcatggtgaaggagttcatcatcaagatcagccccatcatcctgaacaccgtgctgaccatcatggccgccctgagccccaagaccaaggaggacggcagcaaggacaccagcaaggagatggagaacctgtggggcatcaagagcatcaacgactacaacacctggttcctgggcgtggacaccgccaccgagatcaccgagagcttcaagggcatcgagcacagcctgatcgaggagaactgcggcgtggtggtggagagcatccaggtgaccctggagtgcggcctgggccacagaaccgtgcccctgctgctggccgagagcaagttcagcggcaacatcaagaactggaccagcctgatggccgccgtggccgacgtgaccctgcaggtgcactactacaacgagatccacgccgtgtgggagcccctgatcgagagagtggagggcaagagacagtggaacctgagactggacgtgaagaagaaccccgtgcaggacaagagcctgctgcccggcgacgacttcatccccgagccccagatggccatccacatcagcagcggcaacaccatgaacatcaccatcagcaagagctgcctgaacgtgttcaacaacctggccaagggcttcagcgagggcaccgccagcaccttcgactacagcctgaaggacagagcccccttcaccgtgaagaacgccgtgggcgtgcccatcaaggtgaagcccaactgcaacctgagagtgatgggcttccccgagaagagcgacatcttcgacgtggacgccggccagaacctggagctggagtacgccagcatggtgcccagcagccagggcaacctgagcatcctgagcagacaggagagcagcttcttcaccctgaccatcgtgccccacggctacaccgaggtggccaacatccccgtggccagacccggcagaagactgtacaacgtgagaaaccccaacgccagccacagcgacagcgtgctggtgcagatcgacgccaccgagggcaacaaggtgatcaccctgagaagccccctgcagatcaagaaccacttcagcatcgccttcatcatctacaagttcgtgaagaacgtgaagctgctggagagaatcggcatcgccagacccgaggaggagttccacgtgcccctggacagctacagatgccagctgttcatccagcccgccggcatcctggagcaccagtacaaggagagcaccacctacatcagctggaaggaggagctgcacagaagcagagaggtgagatgcatgctgcagtgccccagcgtggaggtgagcttcctgcccctgatcgtgaacaccgtggccctgcccgacgagctgagctacatctgcacccacggcgaggactgggacgtggcctacatcatccacctgtaccccagcctgaccctgagaaacctgctgccctacagcctgagatacctgctggagggcaccgccgagacccacgagctggccgagggcagcaccgccgacgtgctgcacagcagaatcagcggcgagatcatggagctggtgctggtgaagtaccagggcaagaactggaacggccacttcagaatcagagacaccctgcccgagttcttccccgtgtgcttcagcagcgacagcaccgaggtgaccaccgtggacctgagcgtgcacgtgagaagaatcggcagcagaatggtgctgagcgtgttcagcccctactggctgatcaacaagaccaccagagtgctgcagtacagaagcgaggacatccacgtgaagcaccccgccgacttcagagacatcatcctgttcagcttcaagaagaagaacatcttcaccaagaacaaggtgcagctgaagatcagcaccagcgcctggagcagcagcttcagcctggacaccgtgggcagctacggctgcgtgaagtgccccgccaacaacatggagtacctggtgggcgtgagcatcaagatgagcagcttcaacctgagcagaatcgtgaccctgacccccttctgcaccatcgccaacaagagcagcctggagctggaggtgggcgagatcgccagcgacggcagcatgcccaccaacaagtggaactacatcgccagcagcgagtgcctgcccttctggcccgagagcctgagcggcaagctgtgcgtgagagtggtgggctgcgagggcagcagcaagcccttcttctacaacagacaggacaacggcaccctgctgagcctggaggacctgaacggcggcatcctggtggacgtgaacaccgccgagcacagcaccgtgatcaccttcagcgactaccacgagggcagcgcccccgccctgatcatgaaccacaccccctgggacatcctgacctacaagcagagcggcagccccgaggagatggtgctgctgcccagacaggccagactgttcgcctgggccgaccccaccggcaccagaaagctgacctggacctacgccgccaacgtgggcgagcacgacctgctgaaggacggctgcggccagttcccctacgacgccaacatccagatccactgggtgagcttcctggacggcagacagagagtgctgctgttcaccgacgacgtggccctggtgagcaaggccctgcaggccgaggagatggagcaggccgactacgagatcaccctgagcctgcacagcctgggcctgagcctggtgaacaacgagagcaagcaggaggtgagctacatcggcatcaccagcagcggcgtggtgtgggaggtgaagcccaagcagaagtggaagcccttcagccagaagcagatcatcctgctggagcagagctaccagaagcaccagatcagcagagaccacggctggatcaagctggacaacaacttcgaggtgaacttcgacaaggaccccatggagatgagactgcccatcagaagccccatcaagagagacttcctgagcggcatccagatcgagttcaagcagagcagccaccagagaagcctgagagccagactgtactggctgcaggtggacaaccagctgcccggcgccatgttccccgtggtgttccaccccgtggccccccccaagagcatcgccctggacagcgagcccaagcccttcatcgacgtgagcgtgatcaccagattcaacgagtacagcaaggtgctgcagttcaagtacttcatggtgctgatccaggagatggccctgaagatcgaccagggcttcctgggcgccatcatcgccctgttcacccccaccaccgaccccgaggccgagagaagaagaaccaagctgatccagcaggacatcgacgccctgaacgccgagctgatggagaccagcatgaccgacatgagcatcctgagcttcttcgagcacttccacatcagccccgtgaagctgcacctgagcctgagcctgggcagcggcggcgaggagagcgacaaggagaagcaggagatgttcgccgtgcacagcgtgaacctgctgctgaagagcatcggcgccaccctgaccgacgtggacgacctgatcttcaagctggcctactacgagatcagataccagttctacaagagagaccagctgatctggagcgtggtgagacactacagcgagcagttcctgaagcagatgtacgtgctggtgctgggcctggacgtgctgggcaaccccttcggcctgatcagaggcctgagcgagggcgtggaggccctgttctacgagcccttccagggcgccgtgcagggccccgaggagttcgccgagggcctggtgatcggcgtgagaagcctgttcggccacaccgtgggcggcgccgccggcgtggtgagcagaatcaccggcagcgtgggcaagggcctggccgccatcaccatggacaaggagtaccagcagaagagaagagaggagctgagcagacagcccagagacttcggcgacagcctggccagaggcggcaagggcttcctgagaggcgtggtgggcggcgtgaccggcatcatcaccaagcccgtggagggcgccaagaaggagggcgccgccggcttcttcaagggcatcggcaagggcctggtgggcgccgtggccagacccaccggcggcatcgtggacatggccagcagcaccttccagggcatccagagagccgccgagagcaccgaggaggtgagcagcctgagaccccccagactgatccacgaggacggcatcatcagaccctacgacagacaggagagcgagggcagcgacctgctggagcaggagctggagatccaggagtag

SEQ ID NO: 205992 - DNA, 11262 bp, Artificial Sequence
  derived and/or modified sequence
atggtcctggagagcgttgtggccgacttgctgaaccgctttctcggcgattacgtggaaaacctcaataaaagtcaactcaagcttggtatctgggggggtaatgtcgccctggataacctgcaaatcaaggagaatgccctttccgaattggatgtgccctttaaagtcaaggctggtcagatcgacaagctcactctcaagatcccctggaagaacctgtatggtgaggctgtcgtcgccactctcgaggggttataccttctggtcgtacccggtgctagcatcaaatacgacgccgtcaaggaggagaaaagcttgcaggacgtgaaacaaaaggaattgtcccgaatagaggaggctctgcagaaggcagctgagaaaggcactcactccggtgagtttatatacggtttggaaaacttcgtgtacaaagatataaaacctggcaggaaacgaaaaaagcacaaaaagcactttaaaaaaccctttaaaggactggacagatcaaaggataagcccaaggaggctaaaaaagatacctttgtcgagaagcttgccacccaagtgatcaagaatgttcaggtaaaaatcactgacatacacattaaatatgaggacgacgtcaccgaccctaaaagacccctgtcctttggagtgacacttggcgaactaagcctgcttaccgctaacgagcattggaccccttgtatcctcaatgaagcggacaaaattatatataaattgatccgtttggactcgctcagcgcatactggaatgtcaactgcagcatgtcttaccagaggtcacgcgaacagattctggaccagttgaaaaacgagatcctcacctccggaaacatacctccaaattaccagtatatctttcagccaatcagtgcaagtgccaaactgtacatgaatccctacgcggagtctgagctgaagacaccaaagctggactgtaatatcgagattcagaacattgctatagagctgaccaaaccccaatacctttcgatgatcgacctgctggaatctgtggactacatggtgcgcaacgccccttaccggaagtataaaccttatcttcccctgcataccaatgggcggagatggtggaagtatgcgatcgacagtgtgttagaagtccatatccgacgatatacccagatgtggagctggagcaatataaagaagcatcgtcagctgttaaaaagctataagatcgcatataagaataaacttactcagtccaaggtctccgaagaaatacagaaggaaattcaagacttagaaaaaacacttgatgttttcaatatcattctggcgcgccagcaggctcaggtcgaggtcatcaggtctggtcagaaactccgtaagaagtccgccgacacaggggagaagcgcggcgggtggttttcgggactatggggaaagaaggagtccaagaagaaagatgaagagtccctgattccagaaaccatcgacgacctcatgacgccagaagaaaaggacaaactgttcacagccatcggctacagcgagtccacccacaacttgactctaccaaaacagtacgtagctcatattatgacactgaaactcgtctctacgtcagtgaccattagagagaataagaatatcccagagattttaaagatccagattattggactcggtacacaggtaagtcagaggcctggtgcccaggccctgaaggtggaggcaaaactggaacactggtatattaccgggcttcggcagcaggacatcgtgccctctctggtggcatccataggtgatactacctcttccttattgaaaattaagttcgaaactaatcccgaggactcaccggcggaccaaaccctcatcgttcagtcgcagccagtggaggtcatctacgacgcgaaaaccgtgaacgccgtagtggaattctttcagtccaacaaaggcctggatctggagcaaattacgtccgcaacactgatgaagctggaagagattaaagaacggactgccaccggactgacccacattatcgagactaggaaagtcctcgatttgagaattaatctgaagccctcatatctggtggtgcctcaaaccggcttccaccatgaaaagagtgatctgttaattttggacttcggtactttccagctgaattcaaaggatcaagggctgcaaaagacaacaaacagttctctggaggaaattatggacaaggcatacgataaattcgatgtggagatcaaaaacgtacaactactgtttgcccgagccgaggagacgtggaaaaaatgtagattccagcaccccagtactatgcacatcctccagcccatggacattcatgtcgaacttgctaaagccatggttgagaaggacatcaggatggcgagattcaaggtctccggaggactcccactgatgcacgtgagaatctcagaccagaaaatgaaggatgtgctgtatctaatgaactcaattccactgccacaaaaatcaagtgctcagagccctgaacgccaggtgagtagcataccaataatatctggaggcacgaaggggctgctgggaacctccctactgttggatacagtggaatcagaatcggatgatgagtactttgatgcagaggacggcgaaccacagacatgcaagagcatgaaagggagcgaactgaagaaagcagccgaagtcccgaatgaagagttgattaacttactcctcaaattcgagatcaaagaggttatactggagtttacaaaacaacaaaaagaggaagacacaatcttggtctttaacgtgacacagcttgggactgaggccacaatgcgcacctttgatctgacagtggtgagctacctgaagaagatctcccttgactaccatgagattgaggggagcaagcggaaacccctgcacctgatatccagctcggacaagcccggactggacctgcttaaggttgaatacattaaggcagataaaaatgggccctcgttccaaaccgcatttggaaagacggagcaaactgttaaagttgcctttagctcgctcaacctgttgcttcagacgcaagcactggtcgcatcaataaactatctgacaactatcatcccaagcgatgaccaatcgatcagtgtggcaaaggaagtgcagatttctaccgagaaacagcagaagaactcaacactgccaaaggcgattgtgagctcccgagatagcgacattattgactttagactgttcgcaaagcttaatgccttctgcgtcattgtgtgtaatgagaagaacaatattgccgagatcaagatccaagggctcgacagcagtttaagtctgcagtctaggaagcagtccctgtttgcgcggctggagaacataattgtgacagacgtcgacccaaagaccgttcataaaaaggcagtcagcatcatgggcaatgaggttttcaggtttaatctggatctataccctgacgccactgaaggggatctgtacaccgacatgagtaaggtagacggagtcctctctttaaatgtaggatgtatccaaatcgtatatttgcataaatttcttatgagcctactgaatttcctaaacaacttccagaccgcgaaagagagtctgtcagctgctactgcccaagccgcagagagagccgccacgtctgtcaaggacctggcccagagatcgttccgggtgtcaattaatattgacctcaaagcgcccgtaatagtgatcccccaatcaagcatatcaacgaatgcagtcgtcgtcgacctcggcctcattagggtgcacaaccagttttcactggtatctgacgaagactacctgaatcctccagtgattgaccggatggatgtgcagctcaccaaattgacactgtatagaactgtaattcagcctggcatctatcatccagatatccagttgctgcaccccataaacctcgagttccttgtcaatagaaacctcgccgcctcatggtaccataaagttccagtggtggaaattaaaggacatctggacagcatgaacgtgagtctgaatcaagaggacctgaatttgctcttccgcattctgacggagaatttgtgcgagggcaccgaagatcttgacaaagtcaaaccaagggtccaagaaacaggtgagattaaggagccactggaaatatccatcagccaagacgtacacgactccaagaacaccctgaccactggggttgaggagattcggtccgttgacattattaacatgctgctaaatttcgaaatcaaggaggttgtggtcacattgatgaaaaagtcagaaaaaaagggaagaccattgcatgagctgaacgtgttgcagctggggatggaagcaaaagtgaagacctacgacatgaccgccaaagcttacttgaaaaagatttccatgcaatgcttcgactttactgactccaagggagaacccctacacatcattaattccagcaatgttacagacgagcctttgctgaagatgctgctaacaaaagcagactccgacgggcctgaatttaagactattcatgatagcaccaaacagcggctcaaagttagtttcgcaagcctggatctagtcctccacctcgaagccttgctctctttcatggacttcctgtcgtcggctgcacccttttccgagccctcctcctcggagaaggaaagcgagcttaaaccgctggtgggggaatctcgcagtatcgcagtgaaagccgttagctccaacatatcgcagaaggatgtgtttgacttaaaaatcactgcggagttaaacgccttcaacgtcttcgtttgcgaccagaagtgcaatattgcagatattaagatccatgggatggacgcctctattagtgtgaaaccgaagcagactgacgtctttgcccggctcaaggacatcatcgtgatgaatgtcgacctgcagtctattcacaaaaaagccgtctctattctgggggacgaagtctttcgatttcagctgacactctacccagatgcaaccgagggcgaggcatatgcagatatgtccaaggtcgacggaaaattgagctttaaagtgggctgcatccagattgtctatgttcacaagtttttcatgtcgttattgaatttcctcaataattttcagactgcgaaagaagccctgtcaacagctactgttcaggccgccgagcgggccgccagcagcatgaaagatttggcgcagaaaagcttccgactgctcatggacattaatttgaaggctcctgttatcattattccgcagagttctgttagtccgaacgccgtgatcgcagacctgggtctgatccgggtggaaaacaagttttcattggtgccaatggagcactattcgcttcccccagtgattgacaagatgaacatagaattaacccagttgaagctatctagaactatcctgcaggcgagtctgccgcagaatgacatcgagatcctgaagccggtgaatatgcttctttctatacaacggaacttagctgccgcctggtacgtgcagattcccggaatggaaatcaaaggcaaattaaaacctatgcaggtcgccctcagcgaggacgacttgaccgtgctgatgaaaatcctgctggaaaaccttggggaagcctcatcccagcctagtcccacccagagtgtgcaggaaaccgttcgagtgcggaaggtcgatgtgagcagcgtccccgaccacctgaaggagcaggaagattggactgatagcaaactcagcatgaatcagattgtcagcttgcaattcgattttcatttcgagtccctgagcattattttgtataacaatgatatcaatcaggagagtggggtggcgtttcacaacgactccttccagctgggcgaactgcggttgcatctcatggcctcttctgggaaaatgtttaaagacgggagcatgaacgtatcagttaaactgaaaacgtgtaccctggacgatctcagagaagggattgagcgcgccacgtccaggatgatagatcgaaagaatgaccaagataataactcgtcaatgattgatatatcatataagcaggacaaaaacggaagccagattgacgcggtgttggataaattatacgtttgcgcgtcagtcgagttcctgatgacagtggcggatttttttatcaaagccgtcccccagagccccgagaatgtggccaaggaaacgcagattctgcctcgtcaaacagccaccgggaaggtgaaaattgagaaggacgactccgtccgcccaaacatgacactgaaggcaatgatcacggatcctgaagttgtgtttgtcgcaagtctgactaaggcagacgctccagccctgacggcgtcttttcaatgcaacctcagcctcagcacgtcaaagttagagcagatgatggaggcttcagtgcgagatcttaaggtgctagcctgccccttcctacgagaaaagagagggaaaaatatcacaactgtgctacaaccctgctctctgttcatggagaagtgcacgtgggcctccgggaaacaaaatattaatataatggtcaaggagttcataattaagatcagccctattatcctcaataccgtcctgacaattatggcggccttgtcgcctaagacgaaggaggatggcagtaaagacacttcaaaggagatggaaaacctttggggaatcaagtccatcaatgattacaacacttggtttctcggggtggacaccgccaccgaaattaccgagtctttcaaaggtatcgagcacagcctgattgaagaaaattgtggggtggtggtcgagtcaatacaagttactcttgaatgcggattgggtcaccgcacagttcctctgctcctggcggagagcaagtttagcggaaacatcaaaaattggacatccctcatggcagccgtggctgacgtgactttacaggtgcattattacaacgaaatccacgccgtttgggagccgctgattgagcgcgtggagggtaaaagacagtggaaccttaggctcgatgtcaaaaagaaccccgtgcaagataagtcactgctccctggggatgactttattcctgagccacagatggcaatccatatatcttccggcaacacgatgaacattacaatctcaaagagttgtctgaacgtcttcaacaaccttgctaaaggcttttccgaggggactgcatccacctttgactatagtctcaaagaccgagccccctttaccgtgaagaacgcagtgggagtacccattaaggtgaagccaaattgtaacctgcgcgtcatggggtttccggagaaatctgatattttcgatgtcgacgctgggcaaaacctcgaacttgagtacgccagtatggtgccgagctcccagggaaacctgtccatcctgagccggcaagagagcagcttctttaccctcacgatcgtgccgcacggatatactgaggtcgcaaacattccggtagcccggccagggcgccgtctctacaacgtgcggaatccgaatgcctctcactccgatagtgtacttgttcaaattgacgccactgaagggaataaggtgataactcttaggtcacctttgcaaatcaaaaaccacttttcaatcgcgtttatcatctataagttcgtgaaaaacgttaaacttttggagcggatcgggattgcacggcctgaggaggagttccatgttcccctcgactcatatcgatgccagcttttcatacaacctgccgggatacttgaacaccaatacaaagagtcgaccacatatattagctggaaggaagagttacatcgctctcgggaggtgagatgtatgctacagtgcccatctgtcgaggtgagtttcctgccattgatcgttaataccgtggccttaccggacgaactgagctatatctgtacacatggcgaggattgggatgtcgcttacatcatccatttatacccgagcctcacacttagaaatctgttgccgtactccttgaggtatctgctggagggcacagccgagactcatgagcttgctgaagggtccacagcagacgtcctccacagccggatttcaggagagattatggaacttgtgctggtaaagtaccagggaaagaactggaatggacattttcgaattagagatacactgccagagtttttccctgtatgcttcagcagcgattcgaccgaggtgactactgtggatctgtcagtccacgttaggcgaatcggatctaggatggtcctgagcgtctttagtccatattggctgattaataaaactacaagagtcctgcagtaccggtctgaggacattcacgtcaaacaccctgccgacttccgggatatcatcctttttagctttaaaaagaaaaatattttcacaaagaacaaggtccagctcaagatttccacatccgcatggtcctcttccttctccctcgacacagtcggcagttacgggtgtgtcaagtgtccagccaataacatggaatatctcgtgggagttagcatcaagatgtcttcctttaacctgtctcggatcgtaaccctgactccgttctgtactatcgcaaataaatctagcctagaactggaggtgggcgagatcgctagcgacggctccatgcccacaaataagtggaactacattgcttcgagcgaatgcttgccgttttggcccgagtctttgagcggaaaactgtgtgtacgagtcgtgggatgtgagggcagttccaagcctttcttctataatagacaggataacggtactctgttgtctctcgaagacctcaatggaggaatcctggtggatgttaacaccgcggagcacagtaccgtgattacctttagcgattatcatgagggttctgcgcctgctctgatcatgaatcacactccttgggatatacttacatacaagcagtcaggatctcccgaagaaatggttctgctgccgaggcaagcaaggctgttcgcttgggcagaccccactgggactcggaaacttacttggacctacgccgccaatgtgggcgagcatgatctgctcaaagacggatgcggacaatttccctacgatgcaaacattcagattcattgggtgtcctttttggatggcaggcagagggtgctcctgttcacggacgatgtcgctctggtatcgaaggctctccaggctgaagagatggaacaggctgattacgaaattaccttgtctctgcattcacttgggctatctctggtgaacaacgaaagcaagcaggaggtgagctatatcggcataaccagtagcggtgtggtgtgggaagtgaaacctaaacagaagtggaaacctttcagtcagaagcagattatcctgttagagcagtcctaccagaaacaccaaatcagtagggatcacggatggatcaaactggataataacttcgaggtgaacttcgataaggatcctatggagatgaggctccctatacgatcgcctattaagagagatttcctcagcggtatacagatcgagttcaaacagtcatcccaccaaaggagcttgcgcgcaagattgtactggctacaagtggacaatcaacttccaggcgcaatgtttcctgtcgtgttccacccagtggctcctccgaaatccatcgcactagacagtgagccaaagcctttcatcgatgtgagtgtgattacccggttcaacgagtactccaaggttctgcagttcaagtattttatggtgctgatacaggagatggccttgaagatcgatcaaggattcctcggtgctatcatagccctgttcacaccgacaactgaccctgaggccgagaggcgaaggacgaagttgatacagcaagatatcgacgccctcaatgccgaactgatggaaactagcatgactgatatgtcaattctgtccttcttcgaacatttccacatctcacctgtcaagctgcatttatctctctcccttgggtctgggggcgaagaatccgataaggagaaacaggagatgttcgctgtgcatagcgttaacctcctgctgaagagcatcggggccactctcactgatgtggacgacctgatattcaagctcgcatactatgagatcaggtatcagttttacaagcgcgatcagctgatatggagtgttgtgcggcactatagtgagcagttcttaaagcaaatgtatgttcttgtactaggactggatgtgctcggtaatccattcgggttgatccgtgggctgtctgagggggtcgaggcattgttctacgaacctttccagggcgcagttcagggcccggaagaatttgctgagggactggttatcggcgtgcgatcactgttcggccacactgtggggggagccgccggcgtagtgagtaggatcactggcagcgttggcaagggacttgctgccattacaatggacaaggaataccaacagaagagacgggaggaactcagcagacagcctagggatttcggcgacagcctcgcaaggggggggaagggattcctcagaggggtcgtgggcggtgtgacagggatcattacgaaacctgtggaaggggctaaaaaagaaggagccgcggggttctttaaagggattggcaagggccttgtgggcgcggtggctcgcccaacaggcggcatcgtggacatggcatcttcaaccttccagggcatccagagagctgccgagtcaaccgaggaggtctcatcactgagaccaccacgtctcatccatgaggacgggatcattcggccttacgatcgccaagaaagcgaaggaagtgacctccttgagaaccacatcaagaagctggagggagagacatatcgatatcattgtgctattcccggctccaaaaagaccatactgatggtgacaaatcgacgtgttctgtgtatcaaagaagtagagatcctcggtcttatgtgtgtggattggcagtgtccttttgaggatttcgtcttccctccgtcagtctctgaaaatgtgctgaagatttctgtcaaagagcagggtttgtttcataaaaaggatagtgcgaaccagggatgcgtgcgaaaagtctatctgaaagataccgccacagccgaacgcgcctgcaatgctattgaagacgcccagagcacaagacaacagcaaaaactgatgaagcagtcaagcgtgagacttttgaggccccagttgcctagctag

SEQ ID NO: 205993 - DNA, 10887 bp, Artificial Sequence
  derived and/or modified sequence
atggtcctggaaagtgtcgtagcagatttgctgaaccggtttctgggggattacgtggaaaacttgaacaagagccagttaaaattggggatctggggaggaaacgtggcattggacaatctccagattaaggaaaacgccctcagcgaactggacgtgcccttcaaggttaaagccgggcagatcgacaagcttactttaaaaatcccgtggaagaacctctatggagaagccgtagtggctaccttagaaggactgtacttactagtagttcccggagctagcatcaaatatgacgccgtaaaagaagagaaatcacttcaggacgttaagcaaaaggaactgtcacgcatagaagaggccctccagaaggccgctgaaaaaggtacccactccggcgaatttatttatgggcttgaaaactttgtttacaaggatattaaaccagggcggaaacggaagaaacacaaaaagcacttcaagaagccattcaaagggttggatcgctccaaagacaaacccaaggaggccaagaaagacacattcgtagagaaactggccacccaggtcatcaagaacgtccaggtcaagatcaccgacatccacatcaagtacgaagatgatgtcacagatcccaaacgaccactgagcttcggagtgaccctgggggaattgtcccttctgaccgcgaacgagcactggactccatgtattctcaatgaagcagacaaaatcatctataagttgattcgcctcgattcgctctctgcctattggaatgtgaactgttctatgagctatcaacgctccagagaacaaattctcgatcagctcaagaatgagattttgaccagtggaaacatcccgccaaattaccaatatatattccagcccatttcggcctcagcgaaactctacatgaacccctacgctgagagcgaattgaagaccccaaagttagactgtaacatcgaaatccaaaatattgccattgagctcaccaagccccagtacctgagcatgatcgacttgctggagagtgtggactacatggtccggaatgcaccatatagaaaatataagccgtatttaccgcttcacactaacggcaggcggtggtggaagtatgccattgacagtgtcctcgaagtccatataaggcggtacactcagatgtggtcatggtccaatatcaaaaagcataggcaacttctaaagtcatataagatcgcatacaagaacaagctgacgcagtcgaaggtctccgaggagatacagaaagaaatccaggacttagaaaaaacattagatgtctttaatataattctggcaagacaacaagctcaggtcgaggttatccgctcagggcagaagctgagaaaaaagagcgccgatacgggagagaagcgcggcggctggttttctggactctggggaaaaaaagaatcaaagaagaaggacgaagaaagcctgatccccgagactattgatgacctgatgaccccagaagaaaaagataaattattcacagctatagggtatagtgagagtacccacaacctgacactgcctaaacagtatgtggcgcatattatgaccctgaaattagtgagcacttccgtaaccattagagagaacaagaacattcccgaaatcctcaagatacagatcatcggtctcggaactcaggtgagccagcggccgggcgcgcaggctctgaaggtcgaagccaagctggagcattggtacatcaccggcctgagacagcaggacatcgtgccatccctcgtcgccagtatcggagacaccacaagttcactactgaagatcaaatttgaaacaaatccggaggactcacctgccgaccaaacactcatcgtacagtcccagcccgttgaggtgatctacgacgctaaaacggtaaacgcagtggtagagtttttccagtcgaacaagggtctcgacctggaacaaattacttctgccactcttatgaagctcgaagagattaaggagcggaccgccacggggctcacccacatcatcgagaccaggaaggtactggacttaaggataaaccttaagccatcctacttagtagttccgcaaacaggcttccatcatgaaaagagtgatttactgattctggacttcggaaccttccaactgaattcaaaggaccagggcctccagaagactactaacagcagtttggaggaaatcatggacaaagcatacgataaatttgatgtggagataaagaacgtgcaactgctttttgcgagagcagaagaaacgtggaaaaagtgcagattccagcatccctccaccatgcacattctccagcccatggacatccatgtggagctggcgaaagcaatggtcgagaaagatattcgaatggcaagatttaaggtctctggtggtctgcccctgatgcatgtgaggatatcagaccagaagatgaaggacgttctctacctgatgaattcgattcctctgccacagaaatccagcgcgcagtcccctgaacgacaagtctccagtattccgatcatatccggaggtaccaaaggactactaggaaccagcctcctgctggacaccgttgagagcgagtcagacgacgagtacttcgatgccgaggatggcgagcctcaaacctgtaagtcaatgaagggcagtgagctgaaaaaggcagctgaggtgcctaacgaagagctcattaatctgctcctaaaattcgagattaaggaagtaatcctggagttcacgaagcagcaaaaggaggaagataccattctggtctttaacgtcacccaactgggcaccgaggccacaatgcggaccttcgatctgacggtcgtgtcgtatctgaagaagatatctctggactaccatgaaatcgaggggagtaagaggaaacctctgcacttgatatcttccagcgacaaacctggactggacctcttgaaagtcgaatacattaaagctgacaaaaacggcccatcatttcaaaccgcgttcggcaaaactgagcagacagtgaaggttgctttttccagcctcaatctcctgttacagacccaagcactggtggcctctatcaactatctcaccactatcattccctcagacgaccagtccattagtgtcgccaaagaggtccagatctccacagagaaacaacaaaagaattctacactgcctaaggcaattgtctcctctagggacagtgacattatcgacttccgcttgttcgccaagctgaatgccttctgcgttattgtttgcaacgagaagaacaatatcgctgaaattaagatccagggccttgattcatcactgtcactccaatcaaggaagcagtccctgttcgcccgcctggagaacattattgtcactgatgtggatcccaagacagtacataagaaggctgtgtctattatgggcaacgaggtttttagatttaatctggacctctatcccgacgcaaccgagggagacttgtatacagacatgtcaaaggtcgacggtgtgctatccctgaacgtgggttgtatacagatcgtctacctccataaatttctgatgtccctcctgaattttctgaacaacttccagaccgcaaaggaaagcttatccgcggcgacagcccaggccgcagagcgagctgcgacatccgtgaaggatcttgcgcagcggagctttcgggtttctatcaacatagatcttaaggccccagttatcgtgatcccccagagctcaatcagtaccaatgccgtggtcgttgaccttggccttatccgggtccacaatcagttctccctagtgagcgatgaggactaccttaatcccccagtgatcgaccgcatggacgtccagttaacaaagctgactctgtatcggacggtaatccagcccggcatttaccatcctgacatccagttgctgcaccccattaatcttgagttccttgtcaaccgaaacctcgccgcgtcctggtatcataaagtaccagtggttgagatcaaggggcacctggactccatgaatgtgagccttaatcaagaagatctgaacttgttattcagaatcctgactgagaatctgtgcgagggaacagaggatctggataaagttaaaccacgagttcaggagaccggagagataaaggagcccctcgagatcagcattagccaagatgttcatgactcaaagaatactcttacaaccggagtggaagaaatacgcagtgtggacattatcaacatgctacttaactttgaaattaaagaggtggtcgtcaccctgatgaaaaagtctgaaaagaaagggcggcctctacatgagttaaatgtcttgcagctggggatggaagcaaaagtcaagacctacgatatgacagccaaagcatatctgaagaagatttcaatgcagtgctttgacttcaccgacagtaagggcgaacctctgcacattattaactcctctaatgtgactgatgagcccttgcttaaaatgctcttgaccaaagctgattctgatggaccagaatttaaaacgatacacgattccaccaagcaaaggctcaaggtgtcttttgcctcactcgatctggtacttcacctggaggccttgctcagttttatggattttttgtcgtccgcagccccatttagtgaaccatcgagttcagagaaggaaagtgaactgaaaccgctggtcggcgaaagccgaagtattgcagtcaaagctgtcagctcaaatatctcccagaaggatgtttttgacttaaaaataacggctgaactgaacgctttcaacgtgttcgtatgcgatcagaagtgcaacatcgccgacatcaagatccatggtatggatgcatctatttctgtcaagcctaagcagactgacgtgttcgcgagactgaaggacataattgtgatgaacgtagatctgcagagtattcacaaaaaagctgttagcatcctcggtgatgaggtatttaggttccagcttacactgtatcccgacgcaaccgagggcgaggcctatgccgatatgtctaaggtagacgggaaattgagtttcaaagtgggatgcatacagatcgtgtacgtgcacaagttctttatgtccctgcttaatttcttgaacaatttccagactgccaaggaggctttatcgaccgccacagtgcaagccgctgagagggcagcttcctctatgaaggacttagcccagaaatccttcagactcttaatggatattaatttgaaggcccctgtgattatcatccctcaatccagtgtgtcaccaaacgccgtcatcgctgaccttggtctcattagagtggaaaataagttttcgctggttcccatggagcactattctctacccccagtgatagacaagatgaatatcgaactaactcagcttaagctgtccagaacgatattgcaagctagcctgcctcaaaacgacatcgagatcctgaaaccggtgaacatgctgttaagcatccagaggaacctggcagcagcttggtatgtgcagataccaggcatggaaatcaaagggaaacttaaacccatgcaggttgctctgtccgaggatgatctgaccgtcctgatgaaaatccttctagagaacctgggagaggcttcctcacagcctagcccaacgcagtcagtgcaggagacagtccgagtgcggaaagtcgatgtgtcaagtgtcccggaccacctcaaagagcaagaagattggacggatagcaaattgagtatgaatcagatagtctccctgcagtttgacttccacttcgaaagcctatcaataatactttacaataatgacattaatcaagagtccggtgtggcttttcacaacgatagttttcaactgggtgaactcagactccatttgatggcctcatcgggaaagatgttcaaagatggaagtatgaatgtgtctgtaaagctaaaaacatgcacgctggatgacttgagagaaggcatcgagagagctacctcccgcatgatcgataggaaaaatgatcaggataacaactcctcaatgattgacatttcttataaacaagataaaaatggttcccaaattgacgcggtgctggataagctctatgtctgtgcaagcgtcgagtttttgatgactgttgcggatttcttcattaaagcggtgccccaatctccagaaaacgtggccaaggaaacacagatacttcctagacagactgccactggcaaagtgaaaatcgaaaaagacgattcagtccggcccaatatgactttaaaagctatgatcacggaccccgaagtggtatttgtggcttcactgactaaggcggatgcccccgctctgaccgcctcttttcagtgtaatctcagtttgtcaacctccaagctagaacagatgatggaggccagcgtgcgcgacttgaaggttctggcctgtccctttctgagagagaagagaggtaagaacataactacagtgctgcagccttgctccctcttcatggagaagtgtacttgggctagcggcaaacaaaacatcaacatcatggttaaagaattcattatcaaaatttccccgattatccttaacaccgtgctgaccatcatggctgctctttctccaaagacaaaagaagatggtagcaaagacacctccaaggagatggagaacttatggggcattaaaagcattaacgactataacacttggtttttaggagtggacactgctaccgaaatcactgaatcgttcaaaggcatcgagcactcactgattgaagaaaactgtggcgtcgtcgtggagtccatacaggtgaccttggagtgcggactgggccacaggacagttccgctgctcctcgccgagagtaaattcagcggcaatattaaaaattggactagcttaatggcagctgtcgccgacgtgacacttcaagtgcactactacaacgaaatccacgctgtctgggagcctctgattgaaagggttgagggtaaaagacagtggaacctgcgtctggatgtcaaaaagaaccccgtgcaggacaaatccttgctgcctggcgacgatttcatcccagagccacaaatggccatccatatctcttccggaaacaccatgaatattacaatcagtaagagttgtctgaatgtgtttaacaacctggccaaaggtttcagtgaggggacagcctccacatttgactattcactgaaggatcgggcacccttcacagtcaagaacgccgtcggagtgcccattaaggtgaaacctaattgcaatctgagggttatgggttttccggaaaagtctgacattttcgatgttgatgctggccagaacctggaattagagtatgcaagcatggtcccctccagccaagggaacctgagtatcctcagtagacaggaatcgtcctttttcactctgactatcgttcctcacgggtacaccgaggtggccaatatacctgtcgctcgaccagggaggcggctgtacaacgtcaggaaccctaatgcgtcacatagtgatagcgttctcgtgcaaatcgacgccaccgaagggaataaggtgataactttgagaagcccccttcagatcaagaaccacttttctatcgccttcattatttataagttcgtgaagaacgtgaaactcttggagcgtatcggcatcgcccgccctgaagaggagtttcatgtgccactggactcctacagatgccagttattcattcaacctgccggaattctggagcaccagtataaagagagcaccacttatatttcttggaaggaggagctgcatcgcagtcgcgaagtgcggtgtatgctccaatgtccttcagtcgaggtatccttcctcccactgattgtcaataccgttgccttacctgatgagctgtcatatatatgcacacacggcgaggattgggatgtcgcttatattatacatctctatccgtccctgaccttacggaacctgcttccatactcactgagatatctgttagagggcacagccgaaacccatgagctcgcagaaggcagtactgcggatgtcctccattccagaatttccggcgaaatcatggagctggtcctggtcaagtatcaggggaagaattggaatggccacttccgcattcgcgatactttgcctgagttctttcctgtgtgcttttcaagcgattccacagaggtgaccaccgtggatctcagcgtgcacgtgcgccgcattgggagtaggatggtcctgtccgttttcagcccctattggttgattaacaagaccacccgagtcctccagtaccggtctgaagatatccacgttaaacaccccgccgattttcgcgacatcatcctcttctcttttaagaagaaaaatattttcactaaaaataaggtgcaactgaaaatctcaacgtctgcctggtcttcctctttctccctggacacagtggggtcatatggctgtgtgaaatgtccagctaacaacatggaatatcttgttggcgtgagcattaagatgtcgtccttcaatctttctcgcatagtgacccttactcctttctgcactattgccaataaaagcagtctggaactcgaggtgggcgaaatcgcctcagacggaagcatgcccaccaataagtggaactacatagccagctctgagtgcctgcctttctggcccgagtccctgtccgggaaactatgtgtcagagtggtgggctgcgagggctcctctaaaccttttttctacaatagacaagacaacggtacattactgtcactcgaagatctcaacggcggtattttggttgatgtgaacactgccgagcatagcacagttattacattctccgattatcatgaggggagcgcccccgccttgatcatgaaccacacaccatgggatattttaacctacaagcaaagtgggagtccagaggagatggttcttctgccacgccaggcacgtttgtttgcctgggccgaccccacgggaaccaggaagctgacatggacatatgcagccaatgtcggagagcatgacctacttaaggacggctgcggtcagtttccttacgatgccaatatccaaatccattgggtttctttcctggatggacggcaacgagtgctgctttttacagatgatgtcgcgcttgtgagcaaggctctgcaggcagaagaaatggaacaggctgactacgagatcactctgtcactgcacagcctgggccttagtcttgtaaacaacgagtccaagcaggaagtgtcttacattggtatcacatcgtccggtgtagtgtgggaggtgaaacctaagcaaaagtggaagcccttcagccagaagcagatcatcctcttggaacaatcttatcagaaacaccagattagccgggaccatggatggatcaagctggataataactttgaagtgaacttcgataaggatcctatggaaatgcgtttacccatacgatcacccattaaacgcgattttcttagtggtatccagattgagtttaagcaaagctcccatcagcgaagtttaagagccagactgtactggctgcaggtggataatcagctgcccggggcaatgttccccgtggtgttccaccccgtcgcccctcctaagtccatcgccctggatagcgaaccaaaaccattcattgacgtctccgtgatcactcggtttaatgaatattcgaaggtcctccagttcaagtacttcatggtcctgatacaggaaatggcattgaagattgaccagggcttccttggggccattattgcccttttcacccctacgactgatcctgaagccgaaagacgtcgtacaaagctgattcagcaggatatagacgcgcttaatgcagaactgatggagacatcaatgacagacatgtccattctgtctttcttcgagcacttccacattagccctgtgaagctccacttgagtctctcattgggatccggcggtgaagaatcggataaagaaaagcaggaaatgtttgctgtgcactcagtaaacctgttgttaaagtcaatcggcgccaccctgacagacgtcgatgatctgatttttaagttagcatattacgagattagataccaattttacaagagggatcagcttatctggtctgtcgttagacactactctgagcagtttctaaagcagatgtatgttctggtgctggggctggacgtgctgggcaacccattcggactgattcgcggactctccgagggggtggaggctctgttctacgagccctttcagggcgcagtccagggacctgaggagtttgccgaaggcctcgtcattggtgtgaggagtctctttggtcatacggttggcggagccgctggcgtggtgagccgaatcaccggaagcgtcggaaaagggctcgcagccatcacaatggataaagagtaccagcagaagagaagggaggagctaagccgacaaccaagagatttcggcgatagtctggcacgcgggggcaagggctttctgcggggcgtggtgggcggagtgacaggaatcatcacgaaaccagtggagggtgctaagaaggagggagcagctggcttcttcaaagggatcggcaaaggcctcgtaggtgccgtggcccggcctacaggtggaatcgtggatatggccagttcaacttttcagggcatccagagggccgcggagagcacagaagaagtgagcagcctgcggccaccaagacttattcacgaggacgggatcatacgcccatacgacagacaggaatccgaggggtccgacctcctggagcaggagttagaaatccaggaatag

SEQ ID NO: 205994 - DNA, 11262 bp, Artificial Sequence
  derived and/or modified sequence
atggtgctggagagcgtggtggccgacctgctgaaccgcttcctgggggactatgtggagaacctgaacaagagccagctgaagctgggcatctggggcggcaatgtggccctggacaacctgcagatcaaggaaaatgccctgtctgagctggatgtgcccttcaaggtgaaggccggccagattgacaagctgaccctgaagatcccctggaagaacctgtatggagaggccgtggtggccaccctggagggcctgtacctgctggtggtgcctggggccagcatcaagtatgatgctgtgaaggaggagaagagcctgcaggatgtgaagcagaaggagctgagccgcatcgaggaggccctgcagaaggctgctgagaagggcacccacagcggggagttcatctacggcctggagaactttgtgtacaaggacatcaagccaggcaggaagaggaagaagcacaagaagcacttcaagaagcccttcaagggcctggacaggagcaaggacaagcccaaggaggccaagaaggacacctttgtggagaagctggccacccaggtgatcaagaatgtgcaggtgaagatcacagacatccacatcaagtatgaagatgatgtgacagaccccaagaggcccctgagctttggagtgaccctgggggagctgagcctgctgacagccaatgagcactggaccccctgcatcctgaatgaggccgacaagatcatctacaagctgatccggctggacagcctgagcgcctactggaatgtgaactgcagcatgagctaccagaggagccgggagcagatcctggaccagctgaagaatgagatcctgaccagcggcaacatcccccccaactaccagtacatcttccagcccatcagcgccagcgccaagctgtacatgaacccctatgcagagagcgagctgaagacccccaagctggactgcaacatcgagatccagaacatcgccatcgagctgaccaagccccagtacctgtccatgattgacctgctggagagcgtggactacatggtgagaaatgccccctacaggaagtacaagccctacctgcccctgcacaccaatggaagacgctggtggaagtatgccatcgacagcgtgctggaggtgcacatccgccgctacacccagatgtggagctggagcaacatcaagaagcaccggcagctgctgaagagctacaagatcgcctacaagaacaagctgacccagagcaaggtgtctgaggagatccagaaggagatccaggacctggagaagaccctggatgtgttcaacatcatcctggcccggcagcaggcccaggtggaggtgatccgcagcggccagaagctgaggaagaagtctgctgacaccggggagaagagaggaggctggttcagcggcctgtggggcaagaaggagagcaagaagaaggatgaggagagcctcatccctgagaccattgatgacctgatgaccccagaggagaaggacaagctgttcaccgccatcggctacagcgagagcacccacaacctgaccctgcccaagcagtatgtggcccacatcatgaccctgaagctggtgtccacctctgtgaccatccgggagaacaagaacatccctgagatcctgaagatccagatcatcggcctgggcacccaggtgtcccagaggcctggggcccaggccctgaaggtggaggccaagctggagcactggtacatcaccggcctgcggcagcaggacatcgtgcccagcctggtggccagcatcggggacaccaccagcagcctgctgaagatcaagtttgagaccaaccctgaggacagccctgctgaccagaccctcatcgtgcagagccagcctgtggaggtgatctatgatgccaagacagtgaatgctgtggtggagttcttccagagcaacaagggcctggacctggagcagatcaccagcgccaccctgatgaagctggaggagatcaaggagaggacagccaccggcctgacccacatcatcgagaccaggaaggtgctggacctgcgcatcaacctgaagcccagctacctggtggtgccccagacaggcttccaccacgagaagagtgacctgctgatcctggactttggcaccttccagctgaacagcaaggaccagggcctgcagaagaccaccaacagcagcctggaggagatcatggacaaggcctatgacaagtttgatgtggagatcaagaatgtgcagctgctgtttgcccgggcagaggagacctggaagaagtgccgcttccagcaccccagcaccatgcacatcctgcagcccatggacatccacgtggagctggccaaggccatggtggagaaggacatccgcatggcccgcttcaaggtgtctgggggcctgcccctgatgcacgtgcgcatcagtgaccagaagatgaaggatgtgctgtacctgatgaacagcatccccctgccccagaagagcagcgcccagagccctgagcggcaggtgagcagcatccccatcatcagcggcggcaccaagggcctgctgggcaccagcctgctgctggacacagtggagagcgagagtgatgatgagtactttgatgctgaagatggagagccccagacctgcaagtccatgaagggcagcgagctgaagaaggctgctgaggtgcccaatgaggagctgatcaacctgctgctgaagtttgagatcaaggaggtgatcctggagttcaccaagcagcagaaggaggaggacaccatcctggtgttcaacgtgacccagctgggcacagaggccaccatgaggacctttgacctgactgtggtgtcctacctgaagaagatcagcctggactaccatgaaattgagggcagcaagaggaagcccctgcacctgatcagcagcagtgacaagccaggcctggacctgctgaaggtggagtacatcaaggctgacaagaatggccccagcttccagacagccttcggcaagacagagcagacagtgaaggtggccttcagcagcctgaacctgctgctgcagacccaggccctggtggccagcatcaactacctgaccaccatcatccccagtgatgaccagagcatctctgtggccaaggaggtgcagatcagcacagagaagcagcagaagaacagcaccctgcccaaggccatcgtgagcagccgggacagcgacatcatcgacttccggctgtttgccaagctgaatgccttctgtgtgattgtgtgcaatgagaagaacaacattgctgagatcaagatccagggcctggacagcagcctgagcctgcagagcaggaagcagagcctgtttgcccggctggagaacatcatcgtgacagatgtggaccccaagacagtgcacaagaaggctgtgtccatcatgggaaatgaggtgttccgcttcaacctggacctgtacccagatgccacagaaggagacctgtacacagacatgagcaaggtggatggagtgctgagcctgaatgtgggctgcatccagatcgtgtacctgcacaagttcctgatgagcctgctgaacttcctgaacaacttccagacagccaaggagagcctgtctgctgccacagcccaggccgctgagagagctgccacctctgtgaaggacctggcccagaggagcttccgggtgtccatcaacatcgacctgaaggcccctgtgattgtcatcccccagagcagcatcagcaccaatgctgtggtggtggacctgggcctcatccgggtgcacaaccagttcagcctggtgtctgatgaggactacctgaacccccctgtgattgacaggatggatgtgcagctgaccaagctgaccctgtaccgcaccgtcatccagcccggcatctaccacccagacatccagctgctgcaccccatcaacctggagttcctggtgaacagaaacctggccgcctcctggtaccacaaggtgcctgtggtggagatcaagggccacctggacagcatgaatgtgtccctgaaccaggaggacctgaacctgctcttccgcatcctgacagagaacctgtgtgagggcacagaggacctggacaaggtgaagccccgggtgcaggagaccggggagatcaaggagcccctggagatcagcatcagccaggatgtgcatgacagcaagaacaccctgaccaccggggtggaggagatccgctctgtggacatcatcaacatgctgctgaactttgagatcaaggaggtggtggtgaccctgatgaagaagtctgagaagaagggccggcccctgcacgagctgaatgtgctgcagctgggcatggaggccaaggtgaagacctatgacatgacagccaaggcctacctgaagaagatctccatgcagtgctttgacttcacagacagcaagggggagcccctgcacatcatcaacagcagcaatgtgacagatgagcccctgctgaagatgctgctgaccaaggctgacagtgatggccctgagttcaagaccatccatgacagcaccaagcagaggctgaaggtgtcctttgccagcctggacctggtgctgcacctggaggccctgctgtccttcatggacttcctgagcagcgctgcccccttcagcgagcccagcagcagcgagaaggagagcgagctgaagcccctggtgggggagagccgcagcattgctgtgaaggctgtgagcagcaacatcagccagaaggatgtgtttgacctgaagatcacagctgagctgaatgccttcaacgtgtttgtgtgtgaccagaagtgcaacattgctgacatcaagatccacggcatggatgccagcatctctgtgaagcccaagcagacagatgtgtttgcccggctgaaggacatcatcgtgatgaatgtggacctgcagagcatccacaagaaggctgtgtccatcctgggagatgaggtgttccgcttccagctgaccctgtacccagatgccacagaaggagaggcctatgctgacatgagcaaggtggatggcaagctgtccttcaaggtgggctgcatccagatcgtgtatgtgcacaagttcttcatgagcctgctgaacttcctgaacaacttccagacagccaaggaggccctgagcacagccaccgtgcaggccgctgagcgggccgccagctccatgaaggacctggcccagaagagcttccggctgctgatggacatcaacctgaaggcccctgtgatcatcatcccccagagctctgtgagccccaatgctgtgattgctgacctgggcctcatccgggtggagaacaagttcagcctggtgcccatggagcactacagcctgccccctgtgattgacaagatgaacatcgagctgacccagctgaagctgagcaggaccatcctgcaggccagcctgccccagaatgacatcgagatcctgaagcctgtgaacatgctgctgagcatccagaggaacctggccgccgcctggtacgtgcagatccctggcatggagatcaagggcaagctgaagcccatgcaggtggccctgtctgaagatgacctgactgtgctgatgaagatcctgctggagaacctgggggaggccagcagccagcccagccccacccagagcgtgcaggagaccgtgcgggtgaggaaggtggatgtgtcctctgtgcctgaccacctgaaggagcaggaggactggacagacagcaagctgtccatgaaccagatcgtgtccctgcagtttgacttccactttgagagcctgagcatcatcctgtacaacaatgacatcaaccaggagagcggcgtggccttccacaatgacagcttccagctgggggagctgcggctgcacctgatggccagcagcggcaagatgttcaaggatggctccatgaatgtgtctgtgaagctgaagacctgcaccctggatgacctgcgggagggcatcgagcgggccaccagcaggatgattgacaggaagaatgaccaggacaacaacagctccatgattgacatctcctacaagcaggacaagaatggcagccagattgatgctgtgctggacaagctgtatgtgtgtgcctctgtggagttcctgatgacagtggccgacttcttcatcaaggctgtgccccagagcccagaaaatgtggccaaggagacccagatcctgccccggcagacagccaccgggaaggtgaagattgagaaggatgacagcgtgcggcccaacatgaccctgaaggccatgatcacagatcctgaggtggtgtttgtggccagcctgaccaaggcagatgccccagccctgacagccagcttccagtgcaacctgagcctgagcaccagcaagctggagcagatgatggaggcctctgtgcgggacctgaaggtgctggcctgccccttcctgcgggagaagaggggcaagaacatcaccaccgtgctgcagccctgcagcctcttcatggagaagtgcacctgggccagcggcaagcagaacatcaacatcatggtgaaggagttcatcatcaagatcagccccatcatcctgaacacagtgctgaccatcatggccgccctgagccccaagaccaaggaggatggcagcaaggacaccagcaaggagatggagaacctgtggggcatcaagagcatcaatgactacaacacctggttcctgggcgtggacacagccacagagatcacagagagcttcaagggcatcgagcacagcctcatcgaggagaactgtggggtggtggtggagagcatccaggtgaccctggagtgtggcctgggccacaggacagtgcccctgctgctggccgagagcaagttcagcggcaacatcaagaactggaccagcctgatggctgctgtggctgatgtgaccctgcaggtgcactactacaatgagatccatgctgtgtgggagcccctcatcgagcgggtggagggcaagaggcagtggaacctgcggctggatgtgaagaagaaccctgtgcaggacaagagcctgctgcctggagatgacttcatccctgagccccagatggccatccacatcagcagcggcaacaccatgaacatcaccatcagcaagagctgcctgaatgtgttcaacaacctggccaagggcttcagcgagggcacagccagcacctttgactacagcctgaaggaccgggcccccttcaccgtgaagaatgctgtgggcgtgcccatcaaggtgaagcccaactgcaacctgcgggtgatgggcttccctgagaagagtgacatctttgatgtggatgctggccagaacctggagctggagtatgcctccatggtgcccagcagccagggcaacctgagcatcctgagccggcaggagagcagcttcttcaccctgaccatcgtgccccacggctacacagaggtggccaacatccctgtggcccggcccggccggcggctgtacaacgtgaggaaccccaatgccagccacagcgacagcgtgctggtgcagattgatgccacagagggcaacaaggtgatcaccctgcggagccccctgcagatcaagaaccacttcagcatcgccttcatcatctacaagtttgtgaagaatgtgaagctgctggagcgcatcggcatcgcccggcctgaggaggagttccacgtgcccctggacagctaccgctgccagctgttcatccagcctgctggcatcctggagcaccagtacaaggagagcaccacctacatctcctggaaggaggagctgcacaggagccgggaggtgcgctgcatgctgcagtgccccagcgtggaggtgtccttcctgcccctcatcgtgaacacagtggccctgcctgatgagctgagctacatctgcacccacggggaggactgggatgtggcctacatcatccacctgtaccccagcctgaccctgaggaacctgctgccctacagcctgcgctacctgctggagggcacagctgagacccatgagctggccgagggcagcacagcagatgtgctgcacagccgcatctctggagagatcatggagctggtgctggtgaagtaccagggcaagaactggaatggccacttccgcatccgggacaccctgcctgagttcttccctgtgtgcttcagcagtgacagcacagaggtgaccaccgtggacctgtctgtgcacgtgcggcgcatcggcagcaggatggtgctgtctgtgttcagcccctactggctgatcaacaagaccaccagggtgctgcagtacagaagtgaggacatccacgtgaagcaccctgctgacttccgggacatcatcctcttctccttcaagaagaagaacatcttcaccaagaacaaggtgcagctgaagatcagcaccagcgcctggagcagcagcttcagcctggacacagtgggcagctatggctgtgtgaagtgcccagccaacaacatggagtacctggtgggcgtgtccatcaagatgagcagcttcaacctgagcagaattgtgaccctgacccccttctgcaccatcgccaacaagagcagcctggagctggaggtgggggagatcgccagtgatggctccatgcccaccaacaagtggaactacatcgccagcagtgaatgtctgcccttctggccagagagcctgagcggcaagctgtgtgtgcgggtggtgggctgtgagggcagcagcaagcccttcttctacaaccggcaggacaatggcaccctgctgagcctggaggacctgaatggaggcatcctggtggatgtgaacacagctgagcacagcaccgtcatcaccttcagtgactaccacgagggcagcgccccagccctgatcatgaaccacaccccctgggacatcctgacctacaagcagagcggcagccctgaggagatggtgctgctgccccggcaggcccggctgtttgcctgggccgaccccaccggcaccaggaagctgacctggacctatgctgccaacgtgggggagcatgacctgctgaaggatggctgcggccagttcccctatgatgccaacatccagatccactgggtgtccttcctggatggccggcagagggtgctgctcttcacagatgatgtggccctggtgtccaaggccctgcaggccgaggagatggagcaggccgactatgagatcaccctgagcctgcacagcctgggcctgagcctggtgaacaatgaaagcaagcaggaggtgtcctacatcggcatcaccagcagtggagtggtgtgggaggtgaagcccaagcagaagtggaagcccttcagccagaagcagatcatcctgctggagcagagctaccagaagcaccagatcagccgggaccacggctggatcaagctggacaacaactttgaggtgaactttgacaaggaccccatggagatgaggctgcccatccgcagccccatcaagagggacttcctgagcggcatccagatcgagttcaagcagagcagccaccagaggagcctgcgggcccggctgtactggctgcaggtggacaaccagctgcccggggccatgtttcctgtggtgttccaccctgtggccccacccaagagcatcgccctggacagcgagcccaagcccttcattgatgtgtctgtcatcacccgcttcaatgagtacagcaaggtgctgcagttcaagtacttcatggtgctgatccaggagatggccctgaagattgaccagggcttcctgggcgccatcatcgccctcttcacccccaccacagatcctgaggccgagaggaggaggaccaagctgatccagcaggacattgatgccctgaatgctgagctgatggagacctccatgacagacatgagcatcctgtccttctttgagcacttccacatcagccctgtgaagctgcacctgagcctgagcctgggcagcggcggggaggagagtgacaaggagaagcaggagatgtttgctgtgcacagcgtgaacctgctgctgaagagcatcggggccaccctgacagatgtggatgacctgatcttcaagctggcctactatgagatccgctaccagttctacaagagggaccagctgatctggagcgtggtgcgccactacagcgagcagttcctgaagcagatgtatgtgctggtgctgggcctggatgtgctgggcaaccccttcggcctcatccggggcctgtctgagggcgtggaggccctcttctatgagcccttccagggcgctgtgcagggccctgaggagtttgctgagggcctggtgattggagtgcgcagcctgtttggccacacagtgggcggcgctgctggggtggtgagccgcatcaccggctctgtgggcaagggcctggccgccatcaccatggacaaggagtaccagcagaagaggcgggaggagctgagccggcagccccgggactttggagacagcctggcccggggcggcaagggcttcctgcggggcgtggtgggcggcgtgacaggcatcatcaccaagcctgtggagggcgccaagaaggagggcgctgctggcttcttcaagggcatcggcaagggcctggtgggcgctgtggcccggcccactggaggcatcgtggacatggccagcagcaccttccagggcatccagagagctgctgagagcacagaggaggtgagcagcctgcggccccccaggctcatccatgaagatggcatcatccggccctatgaccggcaggagagcgagggcagtgacctgctggagaaccacatcaagaagctggagggggagacctaccgctaccactgtgccatccctggcagcaagaagaccatcctgatggtgaccaacagaagagtgctgtgcatcaaggaggtggagatcctgggcctgatgtgtgtggactggcagtgcccctttgaggactttgtgtttcctccttctgtgtctgaaaatgtgctgaagatctctgtgaaggagcagggcctcttccacaagaaggacagcgccaaccagggctgtgtgaggaaggtgtacctgaaggacacagccacagctgagcgggcctgcaatgccattgaagatgcccagagcacccggcagcagcagaagctgatgaagcagagctctgtgcggctgctgcggccccagctgcccagctag

SEQ ID NO: 205995 - DNA, 10887 bp, Artificial Sequence
  derived and/or modified sequence
atggtgctggagagcgtggtggccgacctgctgaaccgcttcctgggggactatgtggagaacctgaacaagagccagctgaagctgggcatctggggcggcaatgtggccctggacaacctgcagatcaaggaaaatgccctgtctgagctggatgtgcccttcaaggtgaaggccggccagattgacaagctgaccctgaagatcccctggaagaacctgtatggagaggccgtggtggccaccctggagggcctgtacctgctggtggtgcctggggccagcatcaagtatgatgctgtgaaggaggagaagagcctgcaggatgtgaagcagaaggagctgagccgcatcgaggaggccctgcagaaggctgctgagaagggcacccacagcggggagttcatctacggcctggagaactttgtgtacaaggacatcaagccaggcaggaagaggaagaagcacaagaagcacttcaagaagcccttcaagggcctggacaggagcaaggacaagcccaaggaggccaagaaggacacctttgtggagaagctggccacccaggtgatcaagaatgtgcaggtgaagatcacagacatccacatcaagtatgaagatgatgtgacagaccccaagaggcccctgagctttggagtgaccctgggggagctgagcctgctgacagccaatgagcactggaccccctgcatcctgaatgaggccgacaagatcatctacaagctgatccggctggacagcctgagcgcctactggaatgtgaactgcagcatgagctaccagaggagccgggagcagatcctggaccagctgaagaatgagatcctgaccagcggcaacatcccccccaactaccagtacatcttccagcccatcagcgccagcgccaagctgtacatgaacccctatgcagagagcgagctgaagacccccaagctggactgcaacatcgagatccagaacatcgccatcgagctgaccaagccccagtacctgtccatgattgacctgctggagagcgtggactacatggtgagaaatgccccctacaggaagtacaagccctacctgcccctgcacaccaatggaagacgctggtggaagtatgccatcgacagcgtgctggaggtgcacatccgccgctacacccagatgtggagctggagcaacatcaagaagcaccggcagctgctgaagagctacaagatcgcctacaagaacaagctgacccagagcaaggtgtctgaggagatccagaaggagatccaggacctggagaagaccctggatgtgttcaacatcatcctggcccggcagcaggcccaggtggaggtgatccgcagcggccagaagctgaggaagaagtctgctgacaccggggagaagagaggaggctggttcagcggcctgtggggcaagaaggagagcaagaagaaggatgaggagagcctcatccctgagaccattgatgacctgatgaccccagaggagaaggacaagctgttcaccgccatcggctacagcgagagcacccacaacctgaccctgcccaagcagtatgtggcccacatcatgaccctgaagctggtgtccacctctgtgaccatccgggagaacaagaacatccctgagatcctgaagatccagatcatcggcctgggcacccaggtgtcccagaggcctggggcccaggccctgaaggtggaggccaagctggagcactggtacatcaccggcctgcggcagcaggacatcgtgcccagcctggtggccagcatcggggacaccaccagcagcctgctgaagatcaagtttgagaccaaccctgaggacagccctgctgaccagaccctcatcgtgcagagccagcctgtggaggtgatctatgatgccaagacagtgaatgctgtggtggagttcttccagagcaacaagggcctggacctggagcagatcaccagcgccaccctgatgaagctggaggagatcaaggagaggacagccaccggcctgacccacatcatcgagaccaggaaggtgctggacctgcgcatcaacctgaagcccagctacctggtggtgccccagacaggcttccaccacgagaagagtgacctgctgatcctggactttggcaccttccagctgaacagcaaggaccagggcctgcagaagaccaccaacagcagcctggaggagatcatggacaaggcctatgacaagtttgatgtggagatcaagaatgtgcagctgctgtttgcccgggcagaggagacctggaagaagtgccgcttccagcaccccagcaccatgcacatcctgcagcccatggacatccacgtggagctggccaaggccatggtggagaaggacatccgcatggcccgcttcaaggtgtctgggggcctgcccctgatgcacgtgcgcatcagtgaccagaagatgaaggatgtgctgtacctgatgaacagcatccccctgccccagaagagcagcgcccagagccctgagcggcaggtgagcagcatccccatcatcagcggcggcaccaagggcctgctgggcaccagcctgctgctggacacagtggagagcgagagtgatgatgagtactttgatgctgaagatggagagccccagacctgcaagtccatgaagggcagcgagctgaagaaggctgctgaggtgcccaatgaggagctgatcaacctgctgctgaagtttgagatcaaggaggtgatcctggagttcaccaagcagcagaaggaggaggacaccatcctggtgttcaacgtgacccagctgggcacagaggccaccatgaggacctttgacctgactgtggtgtcctacctgaagaagatcagcctggactaccatgaaattgagggcagcaagaggaagcccctgcacctgatcagcagcagtgacaagccaggcctggacctgctgaaggtggagtacatcaaggctgacaagaatggccccagcttccagacagccttcggcaagacagagcagacagtgaaggtggccttcagcagcctgaacctgctgctgcagacccaggccctggtggccagcatcaactacctgaccaccatcatccccagtgatgaccagagcatctctgtggccaaggaggtgcagatcagcacagagaagcagcagaagaacagcaccctgcccaaggccatcgtgagcagccgggacagcgacatcatcgacttccggctgtttgccaagctgaatgccttctgtgtgattgtgtgcaatgagaagaacaacattgctgagatcaagatccagggcctggacagcagcctgagcctgcagagcaggaagcagagcctgtttgcccggctggagaacatcatcgtgacagatgtggaccccaagacagtgcacaagaaggctgtgtccatcatgggaaatgaggtgttccgcttcaacctggacctgtacccagatgccacagaaggagacctgtacacagacatgagcaaggtggatggagtgctgagcctgaatgtgggctgcatccagatcgtgtacctgcacaagttcctgatgagcctgctgaacttcctgaacaacttccagacagccaaggagagcctgtctgctgccacagcccaggccgctgagagagctgccacctctgtgaaggacctggcccagaggagcttccgggtgtccatcaacatcgacctgaaggcccctgtgattgtcatcccccagagcagcatcagcaccaatgctgtggtggtggacctgggcctcatccgggtgcacaaccagttcagcctggtgtctgatgaggactacctgaacccccctgtgattgacaggatggatgtgcagctgaccaagctgaccctgtaccgcaccgtcatccagcccggcatctaccacccagacatccagctgctgcaccccatcaacctggagttcctggtgaacagaaacctggccgcctcctggtaccacaaggtgcctgtggtggagatcaagggccacctggacagcatgaatgtgtccctgaaccaggaggacctgaacctgctcttccgcatcctgacagagaacctgtgtgagggcacagaggacctggacaaggtgaagccccgggtgcaggagaccggggagatcaaggagcccctggagatcagcatcagccaggatgtgcatgacagcaagaacaccctgaccaccggggtggaggagatccgctctgtggacatcatcaacatgctgctgaactttgagatcaaggaggtggtggtgaccctgatgaagaagtctgagaagaagggccggcccctgcacgagctgaatgtgctgcagctgggcatggaggccaaggtgaagacctatgacatgacagccaaggcctacctgaagaagatctccatgcagtgctttgacttcacagacagcaagggggagcccctgcacatcatcaacagcagcaatgtgacagatgagcccctgctgaagatgctgctgaccaaggctgacagtgatggccctgagttcaagaccatccatgacagcaccaagcagaggctgaaggtgtcctttgccagcctggacctggtgctgcacctggaggccctgctgtccttcatggacttcctgagcagcgctgcccccttcagcgagcccagcagcagcgagaaggagagcgagctgaagcccctggtgggggagagccgcagcattgctgtgaaggctgtgagcagcaacatcagccagaaggatgtgtttgacctgaagatcacagctgagctgaatgccttcaacgtgtttgtgtgtgaccagaagtgcaacattgctgacatcaagatccacggcatggatgccagcatctctgtgaagcccaagcagacagatgtgtttgcccggctgaaggacatcatcgtgatgaatgtggacctgcagagcatccacaagaaggctgtgtccatcctgggagatgaggtgttccgcttccagctgaccctgtacccagatgccacagaaggagaggcctatgctgacatgagcaaggtggatggcaagctgtccttcaaggtgggctgcatccagatcgtgtatgtgcacaagttcttcatgagcctgctgaacttcctgaacaacttccagacagccaaggaggccctgagcacagccaccgtgcaggccgctgagcgggccgccagctccatgaaggacctggcccagaagagcttccggctgctgatggacatcaacctgaaggcccctgtgatcatcatcccccagagctctgtgagccccaatgctgtgattgctgacctgggcctcatccgggtggagaacaagttcagcctggtgcccatggagcactacagcctgccccctgtgattgacaagatgaacatcgagctgacccagctgaagctgagcaggaccatcctgcaggccagcctgccccagaatgacatcgagatcctgaagcctgtgaacatgctgctgagcatccagaggaacctggccgccgcctggtacgtgcagatccctggcatggagatcaagggcaagctgaagcccatgcaggtggccctgtctgaagatgacctgactgtgctgatgaagatcctgctggagaacctgggggaggccagcagccagcccagccccacccagagcgtgcaggagaccgtgcgggtgaggaaggtggatgtgtcctctgtgcctgaccacctgaaggagcaggaggactggacagacagcaagctgtccatgaaccagatcgtgtccctgcagtttgacttccactttgagagcctgagcatcatcctgtacaacaatgacatcaaccaggagagcggcgtggccttccacaatgacagcttccagctgggggagctgcggctgcacctgatggccagcagcggcaagatgttcaaggatggctccatgaatgtgtctgtgaagctgaagacctgcaccctggatgacctgcgggagggcatcgagcgggccaccagcaggatgattgacaggaagaatgaccaggacaacaacagctccatgattgacatctcctacaagcaggacaagaatggcagccagattgatgctgtgctggacaagctgtatgtgtgtgcctctgtggagttcctgatgacagtggccgacttcttcatcaaggctgtgccccagagcccagaaaatgtggccaaggagacccagatcctgccccggcagacagccaccgggaaggtgaagattgagaaggatgacagcgtgcggcccaacatgaccctgaaggccatgatcacagatcctgaggtggtgtttgtggccagcctgaccaaggcagatgccccagccctgacagccagcttccagtgcaacctgagcctgagcaccagcaagctggagcagatgatggaggcctctgtgcgggacctgaaggtgctggcctgccccttcctgcgggagaagaggggcaagaacatcaccaccgtgctgcagccctgcagcctcttcatggagaagtgcacctgggccagcggcaagcagaacatcaacatcatggtgaaggagttcatcatcaagatcagccccatcatcctgaacacagtgctgaccatcatggccgccctgagccccaagaccaaggaggatggcagcaaggacaccagcaaggagatggagaacctgtggggcatcaagagcatcaatgactacaacacctggttcctgggcgtggacacagccacagagatcacagagagcttcaagggcatcgagcacagcctcatcgaggagaactgtggggtggtggtggagagcatccaggtgaccctggagtgtggcctgggccacaggacagtgcccctgctgctggccgagagcaagttcagcggcaacatcaagaactggaccagcctgatggctgctgtggctgatgtgaccctgcaggtgcactactacaatgagatccatgctgtgtgggagcccctcatcgagcgggtggagggcaagaggcagtggaacctgcggctggatgtgaagaagaaccctgtgcaggacaagagcctgctgcctggagatgacttcatccctgagccccagatggccatccacatcagcagcggcaacaccatgaacatcaccatcagcaagagctgcctgaatgtgttcaacaacctggccaagggcttcagcgagggcacagccagcacctttgactacagcctgaaggaccgggcccccttcaccgtgaagaatgctgtgggcgtgcccatcaaggtgaagcccaactgcaacctgcgggtgatgggcttccctgagaagagtgacatctttgatgtggatgctggccagaacctggagctggagtatgcctccatggtgcccagcagccagggcaacctgagcatcctgagccggcaggagagcagcttcttcaccctgaccatcgtgccccacggctacacagaggtggccaacatccctgtggcccggcccggccggcggctgtacaacgtgaggaaccccaatgccagccacagcgacagcgtgctggtgcagattgatgccacagagggcaacaaggtgatcaccctgcggagccccctgcagatcaagaaccacttcagcatcgccttcatcatctacaagtttgtgaagaatgtgaagctgctggagcgcatcggcatcgcccggcctgaggaggagttccacgtgcccctggacagctaccgctgccagctgttcatccagcctgctggcatcctggagcaccagtacaaggagagcaccacctacatctcctggaaggaggagctgcacaggagccgggaggtgcgctgcatgctgcagtgccccagcgtggaggtgtccttcctgcccctcatcgtgaacacagtggccctgcctgatgagctgagctacatctgcacccacggggaggactgggatgtggcctacatcatccacctgtaccccagcctgaccctgaggaacctgctgccctacagcctgcgctacctgctggagggcacagctgagacccatgagctggccgagggcagcacagcagatgtgctgcacagccgcatctctggagagatcatggagctggtgctggtgaagtaccagggcaagaactggaatggccacttccgcatccgggacaccctgcctgagttcttccctgtgtgcttcagcagtgacagcacagaggtgaccaccgtggacctgtctgtgcacgtgcggcgcatcggcagcaggatggtgctgtctgtgttcagcccctactggctgatcaacaagaccaccagggtgctgcagtacagaagtgaggacatccacgtgaagcaccctgctgacttccgggacatcatcctcttctccttcaagaagaagaacatcttcaccaagaacaaggtgcagctgaagatcagcaccagcgcctggagcagcagcttcagcctggacacagtgggcagctatggctgtgtgaagtgcccagccaacaacatggagtacctggtgggcgtgtccatcaagatgagcagcttcaacctgagcagaattgtgaccctgacccccttctgcaccatcgccaacaagagcagcctggagctggaggtgggggagatcgccagtgatggctccatgcccaccaacaagtggaactacatcgccagcagtgaatgtctgcccttctggccagagagcctgagcggcaagctgtgtgtgcgggtggtgggctgtgagggcagcagcaagcccttcttctacaaccggcaggacaatggcaccctgctgagcctggaggacctgaatggaggcatcctggtggatgtgaacacagctgagcacagcaccgtcatcaccttcagtgactaccacgagggcagcgccccagccctgatcatgaaccacaccccctgggacatcctgacctacaagcagagcggcagccctgaggagatggtgctgctgccccggcaggcccggctgtttgcctgggccgaccccaccggcaccaggaagctgacctggacctatgctgccaacgtgggggagcatgacctgctgaaggatggctgcggccagttcccctatgatgccaacatccagatccactgggtgtccttcctggatggccggcagagggtgctgctcttcacagatgatgtggccctggtgtccaaggccctgcaggccgaggagatggagcaggccgactatgagatcaccctgagcctgcacagcctgggcctgagcctggtgaacaatgaaagcaagcaggaggtgtcctacatcggcatcaccagcagtggagtggtgtgggaggtgaagcccaagcagaagtggaagcccttcagccagaagcagatcatcctgctggagcagagctaccagaagcaccagatcagccgggaccacggctggatcaagctggacaacaactttgaggtgaactttgacaaggaccccatggagatgaggctgcccatccgcagccccatcaagagggacttcctgagcggcatccagatcgagttcaagcagagcagccaccagaggagcctgcgggcccggctgtactggctgcaggtggacaaccagctgcccggggccatgtttcctgtggtgttccaccctgtggccccacccaagagcatcgccctggacagcgagcccaagcccttcattgatgtgtctgtcatcacccgcttcaatgagtacagcaaggtgctgcagttcaagtacttcatggtgctgatccaggagatggccctgaagattgaccagggcttcctgggcgccatcatcgccctcttcacccccaccacagatcctgaggccgagaggaggaggaccaagctgatccagcaggacattgatgccctgaatgctgagctgatggagacctccatgacagacatgagcatcctgtccttctttgagcacttccacatcagccctgtgaagctgcacctgagcctgagcctgggcagcggcggggaggagagtgacaaggagaagcaggagatgtttgctgtgcacagcgtgaacctgctgctgaagagcatcggggccaccctgacagatgtggatgacctgatcttcaagctggcctactatgagatccgctaccagttctacaagagggaccagctgatctggagcgtggtgcgccactacagcgagcagttcctgaagcagatgtatgtgctggtgctgggcctggatgtgctgggcaaccccttcggcctcatccggggcctgtctgagggcgtggaggccctcttctatgagcccttccagggcgctgtgcagggccctgaggagtttgctgagggcctggtgattggagtgcgcagcctgtttggccacacagtgggcggcgctgctggggtggtgagccgcatcaccggctctgtgggcaagggcctggccgccatcaccatggacaaggagtaccagcagaagaggcgggaggagctgagccggcagccccgggactttggagacagcctggcccggggcggcaagggcttcctgcggggcgtggtgggcggcgtgacaggcatcatcaccaagcctgtggagggcgccaagaaggagggcgctgctggcttcttcaagggcatcggcaagggcctggtgggcgctgtggcccggcccactggaggcatcgtggacatggccagcagcaccttccagggcatccagagagctgctgagagcacagaggaggtgagcagcctgcggccccccaggctcatccatgaagatggcatcatccggccctatgaccggcaggagagcgagggcagtgacctgctggagcaggagctggagatccaggagtag

SEQ ID NO: 205996 - DNA, 11262 bp, Artificial Sequence
  derived and/or modified sequence
atggtgctggagagcgtggtggccgacctgctgaaccggttcctgggtgactacgtggaaaacctcaacaaatcgcagctgaagctggggatctgggggggaaacgtggcactcgacaatctccagataaaggaaaatgcactgagcgaattagacgtgccctttaaggtgaaagctggacagattgacaagctcaccctgaagatcccgtggaagaacttgtatggtgaagcggtcgttgccactctggagggcctttacctccttgtggtccctggcgcctctatcaagtacgatgccgtgaaagaagaaaaatcccttcaggacgtaaagcagaaagagctgtctcgcatcgaagaggccctccagaaagccgctgagaaagggactcattccggggagttcatctacggtctcgagaacttcgtgtacaaggacataaaacccggaagaaagaggaagaagcacaagaaacacttcaagaaaccattcaaggggctcgaccgttcgaaggataagccaaaagaagccaagaaggacaccttcgtggaaaagttggctacccaggttatcaagaacgttcaagtaaagattacagatatacacatcaaatatgaagatgacgtgaccgatcctaagcgtccattgtcgttcggagtcacacttggagagctgtcactactgaccgccaacgagcactggacaccttgcatcctcaatgaggctgataagataatctacaaactgatccgcctggactccctctccgcatactggaacgtgaattgttccatgagctatcaacggtcacgggagcagatactcgaccaactgaagaatgagatcttgacatcaggcaacatacccccgaattatcagtatatattccagccgatatctgcttcggcgaaactgtacatgaacccatacgcagagtcagaactcaagaccccaaagctggactgcaacattgagatacagaacatcgctatagaattgaccaaaccgcagtatcttagcatgatcgacctgcttgagagcgtcgattatatggtccgtaatgcaccctacaggaagtacaagccttatctgcctctgcatactaacggccggcgttggtggaaatacgcgatcgattccgttcttgaggtgcatattcgcagatatacacaaatgtggagttggagtaacattaaaaagcatcggcagctgttaaagtcttacaagattgcctataagaataaattgacccaaagcaaagttagcgaggaaattcagaaagaaatccaggatctggaaaagacattggatgtgttcaatatcatcctggctcgtcagcaggcccaggtagaagtcatcaggtccggacagaagcttcggaagaaatcagccgacaccggcgagaaaagaggcggatggtttagcggcctttggggcaagaaggagtctaagaaaaaggatgaagaatccctcatcccagagactatcgacgacttaatgacaccagaggagaaagataaattattcaccgctattggctactctgaatccacacacaatcttacactgccgaagcagtatgtggctcatataatgactttgaagctggtgagcaccagtgtgaccattagggagaacaagaatattcccgaaatcctcaagatccagatcataggcttgggaacacaggtgtcccaacggcctggagcccaggcactcaaggtggaagccaagctggaacattggtacatcaccgggctgcggcagcaagacatcgtcccatcccttgtggcctctattggggataccacttcttccctattgaagataaagtttgagaccaaccctgaagactcaccagccgatcagacgctgatcgtgcagtctcagccagttgaagtcatctacgacgcaaagaccgtcaacgccgttgtggagttctttcaatctaataaagggctggacttagaacagataaccagtgccactctaatgaaactcgaggagatcaaagagaggacggcaactgggttaacgcatatcattgaaactcgaaaggtgctggacctgcgcataaatctcaaacccagttacttggtggtgccacagaccggatttcaccatgagaaaagcgacctcttaattcttgatttcggaacctttcagctgaactcgaaagatcagggcctgcaaaagaccacaaactcgtcacttgaagagattatggataaggcttacgacaagtttgacgtggagatcaaaaatgtacagctcctgttcgcgcgcgcggaagagacgtggaagaagtgtaggtttcaacacccctccacaatgcacattctgcagcctatggacattcatgttgaattagcaaaggcgatggttgaaaaggatattaggatggctaggtttaaagtgtccggtggactcccgcttatgcacgtgcggatttccgaccagaaaatgaaggacgtgctgtacctcatgaactccatacccctaccacaaaagtcctcagcccaatctccagagcgtcaggtgagcagcattccaatcatcagtgggggaacaaaaggcctgttggggaccagtctgctcctggatacagtggagtcggagagcgacgacgagtacttcgacgccgaggacggagagccgcaaacttgtaagtctatgaagggtagcgaattaaagaaggcggctgaggtccctaacgaggaacttataaacctcctcctgaaattcgagatcaaagaggtcatccttgagtttactaaacagcagaaggaagaggataccattttggtgtttaacgtgacgcaactcggcacggaagctacaatgcgtacctttgacctcactgtagtctcgtatctgaaaaaaatcagcctcgactaccatgaaatcgaagggtctaagcgcaagcctctccatctgatatccagcagtgacaaacccggattagatttgttgaaggtggagtatatcaaggcagataagaacggcccctctttccagacagcattcggtaagactgagcagaccgttaaagtcgctttctcgagcctcaaccttctcttgcagacccaagcactagtggcaagtatcaattatcttacaacgattataccttccgacgatcagtcaatttctgtggcaaaagaggtgcagattagcaccgagaaacaacagaaaaacagcactttacctaaagcaattgtgtccagccgggactctgatatcatcgattttcggctgttcgctaagctgaacgctttttgtgtgatcgtttgtaatgaaaagaataacatagccgaaattaagattcaggggctggacagctctctatcactgcagagcaggaaacagtcgctgttcgccaggctggagaacattattgtaactgacgtagatccaaaaaccgtgcataaaaaagctgtcagcatcatgggaaatgaggtgttccgcttcaacctggacctgtaccccgatgcaaccgaaggagacctctatacagatatgtctaaagtcgatggtgtgttatcactaaacgtggggtgtatccagattgtgtatttacataagttcctaatgagcctcctaaattttctgaataattttcagacggcaaaagaatccttgtccgccgccaccgctcaggcggctgaacgagcagcgacaagcgtgaaagatcttgcccaaagaagcttccgggtgagcataaacatcgatctgaaggccccagtgattgttatcccccagtcttccatctccacaaacgcagttgttgtggacttgggattgatcagggtgcacaaccagttctccctcgtcagcgacgaggactatttgaatcctccagtgatcgatagaatggatgtccaacttaccaaactgaccctctaccggacagttattcagcccggcatctaccaccctgatattcagctgctccatcccatcaatttggaatttctagtcaacaggaatctggctgcttcatggtaccacaaagttcctgtggtagagatcaaaggccacctcgattctatgaatgtcagtcttaaccaggaggacttaaatctcctatttcgaatcctcacagagaacctgtgtgagggcacagaggatctggacaaggtcaaaccccgagtacaggagaccggagagataaaagagccactcgagattagcatttcccaggacgtccacgacagcaaaaataccctcaccaccggcgtggaagagattaggagtgttgatattatcaatatgctgcttaatttcgaaataaaggaggttgtggtaactctcatgaagaaatcagaaaaaaaggggcggcctctgcatgagctcaatgtactccaattggggatggaggctaaggtgaagacttatgacatgactgctaaggcctatttgaaaaagatctccatgcagtgcttcgattttacagattctaagggcgaacccctgcacattatcaattcctctaacgttaccgatgaaccgctacttaaaatgctgcttaccaaagcagactctgacggcccagaatttaaaaccatccatgactcaaccaagcagaggctgaaggtgtcctttgccagcttggatctcgtgctgcatttagaggcgctcctctccttcatggacttcttgagttccgcagccccgttctctgagccatcaagttccgaaaaggaatccgaattgaagcctctcgttggcgagtctagatcaatcgcagttaaggcggttagctctaacatttcccagaaggacgtgttcgatctcaagataacggctgagttgaatgccttcaacgtgtttgtgtgtgatcagaaatgtaacattgccgatatcaagatacacggcatggatgcttcaatttccgtgaagcctaaacagaccgacgtgtttgcaagactcaaggacatcatcgtgatgaacgtggacctgcagtcaatccacaagaaggccgtgtctatccttggggatgaagtgtttagattccaattaacactctacccagacgctacagaaggtgaggcctatgcagacatgagtaaagtggatggaaaactgtctttcaaagtcggctgtattcagatcgtgtatgtacacaaattcttcatgtccctgctcaacttccttaacaattttcagaccgccaaggaagccctgtcgaccgcaactgtacaagccgccgagcgcgccgcatcttccatgaaagatctggcccagaaatcttttaggctgctgatggacatcaacttgaaggcccctgtgataattattcctcagtctagcgtctctccaaacgctgtcatagccgacctgggcctgataagggtggaaaataaatttagcttggtgcccatggagcactattctctgccacccgtgatagacaaaatgaacatcgagttgactcaattgaagctcagtagaaccattctacaggcttcactgccccagaatgacatcgagatattgaaacccgttaacatgctcctgagtattcagcggaaccttgcagctgcgtggtatgtgcagatcccagggatggaaataaaaggcaaactgaagccgatgcaggtggctctgtccgaggacgatttgacagtgttgatgaaaatcctattggagaatctgggagaagcctcaagccagccatcaccaacacagtcagtgcaggagaccgtgagagtaaggaaagtggacgtttcctctgttcctgaccacctgaaggaacaggaggattggacggacagcaagctttcaatgaaccagattgtgtccctgcagttcgactttcatttcgagagcctgtcgattatcctctacaacaacgatattaaccaggaaagcggcgtcgcctttcacaacgattcctttcagttaggagagttgagactgcacctgatggcctcgtctggaaaaatgttcaaagacggatcgatgaatgtatctgtcaaactcaagacctgtaccctcgatgacttacgtgaaggcattgagcgcgccacctctcgcatgatagacaggaaaaatgatcaggacaataactccagcatgatcgacatatcctacaaacaggataagaacggctctcagatagacgctgtgcttgataagttgtacgtgtgtgctagtgtagaatttctgatgacagttgccgacttcttcatcaaggccgtgccacaatccccggaaaacgttgccaaggagactcagatcttgcccagacagacggccaccggcaaagtcaagatcgaaaaggacgacagcgtccgcccaaacatgaccctgaaagccatgataaccgacccagaagtggtattcgtggcgagcctgactaaggccgacgcaccagcccttactgccagctttcagtgcaacttgtctctgagcacatctaaactcgagcagatgatggaagcttctgttagggacttaaaggtgctcgcttgcccatttctaagagaaaagaggggaaagaatatcaccacagttctccagccctgctcactgttcatggagaaatgcacatgggccagcggaaagcagaatataaacatcatggtgaaagagttcatcattaaaatttcaccgattatcctgaacaccgtgctcactatcatggctgctctgagccctaagacaaaggaagatggtagcaaagatacctctaaagagatggagaatctgtggggaatcaaatccataaatgattacaatacttggttcctcggggtggatacggcaacagaaatcaccgagagttttaaaggcatcgagcactctctgattgaagagaattgcggggtcgtagtggagtcaattcaagtcactctcgaatgcggattgggtcaccgtaccgtccctctcctcctggccgagtcgaagtttagtggtaatattaaaaactggactagtcttatggcagctgttgccgacgtgacgttgcaagtgcactactacaacgagatccatgcagtttgggagcctctgatcgaaagagttgagggaaaaaggcagtggaatcttcgactggatgttaagaaaaatcctgtccaggataagagtttgttgccaggcgacgatttcatcccagaacctcagatggccatccacataagttccggcaatacaatgaacattacaatttcaaagtcatgcctcaatgtgttcaataacctagccaagggattttcggaaggcaccgcctccacattcgactactctctcaaagaccgcgctccctttactgttaaaaatgcggtaggagtgcccattaaggtcaaaccaaactgtaatttgcgtgtaatgggcttccctgaaaagagtgacatctttgatgtcgacgcaggtcagaatctggagctcgaatacgcatcaatggtgccttcatcccagggcaacctgagcatcctcagcagacaggagtccagttttttcacccttacaattgtgcctcacggctatacagaggttgcgaatatcccggttgccaggcccggccgccgtctgtacaatgtaagaaaccctaatgcctcacactccgactccgttctggttcagatcgatgctacagagggaaataaagtgataacactgcgctctcccctgcagatcaaaaaccatttcagtattgcatttatcatctacaagttcgtgaagaacgtaaagttgttggagcggattggtattgcacggccggaggaagagttccatgtgccactggattcttatagatgtcaactgttcatccagcccgccgggatcttggaacatcagtacaaagagtctacaacatacatcagctggaaagaagagttacacaggtcccgggaggtgcgatgtatgttgcagtgcccatctgtagaagtcagcttccttcctttgatcgtgaatactgtcgcactgcccgatgaactgagctatatctgcactcacggagaggattgggacgttgcctacatcattcatctgtatccgtccctgacactccgaaacttactcccctattccttaagatacctcctggaaggaaccgccgagactcatgagttggcagaagggtcgacggcagatgttctgcactcacggatctctggagagattatggaacttgtgctagttaagtaccagggcaaaaactggaacggccattttaggatcagagataccctgcccgagtttttccctgtctgcttttcttctgattcaacagaagtgactactgtggaccttagcgtgcatgtacgcaggattgggtcacgcatggtgctgagcgttttctctccttattggctaatcaacaaaactactagagtcctccagtatcggtctgaggatattcatgtgaagcacccagccgattttcgggatatcatcctattttcattcaaaaaaaaaaatatcttcacaaaaaataaggtgcagttgaagatcagcacttcggcctggtcctcttctttctccctagacacggtcggctcctatggctgcgtaaaatgtccagccaacaacatggaataccttgtcggtgtgtctatcaagatgagctccttcaatttgagcaggattgtcacgttgacacctttttgcactatagctaataagtcatcccttgagctggaagttggtgaaatcgcctccgacggcagtatgccgacaaataagtggaactatatcgcgtccagcgagtgtctgcctttttggcctgagtccctgagtggtaagctgtgcgtgcgggttgtcggttgtgaaggctcaagtaaaccgttcttctataaccgacaagacaacgggacgctcttatcactggaagacttgaacggtgggatactggtggacgtaaacacagccgaacattccacggttatcactttttccgactaccacgagggctctgctccagctctgatcatgaaccacactccatgggacatattaacttacaaacaaagcggttctccagaggaaatggtgctgctccctcggcaagcgaggctgtttgcgtgggccgacccaactggtacccggaagctgacttggacatatgctgccaacgtgggtgagcatgatctgttgaaggatggctgcggccagttcccatatgatgcgaatattcagatacattgggtgtctttcctggatggaaggcaacgcgtgctcctgtttacagacgacgtcgccttggtctcgaaggcattacaggccgaagaaatggagcaggcggactatgaaatcacgctgtctctgcattctctgggtctgtccttggtcaacaatgaatccaaacaagaggtgtcctatataggtatcacgagcagcggagtggtctgggaggtgaaaccaaagcagaagtggaagcccttctcccagaagcaaatcattctgttggagcaaagctaccagaagcatcagatctcacgggaccacggctggatcaaactggacaacaatttcgaggttaattttgataaagatccaatggagatgaggcttccaatacggtcaccgatcaagagggattttctcagcgggatccaaatcgaattcaaacagagcagccaccagagaagtctcagggctcggctctactggctgcaggttgacaaccagctgccaggtgcaatgtttccagttgtctttcacccagtagctcctccaaagtcaatcgcgcttgatagcgagcccaaacctttcatagacgttagcgttatcaccaggtttaacgagtactctaaggtgctgcaatttaagtactttatggtcctgattcaagagatggccttgaagatcgaccaagggttcttgggagcaataatcgcgctgttcacccctacaacagacccagaagccgagaggcgtagaaccaagttgattcagcaggacatcgacgccctgaatgcagaacttatggagacatcaatgacagatatgagtatcctcagcttttttgagcactttcacatttctcccgtgaagctacatctatctctcagcttaggatccggcggggaggagtcagataaggaaaagcaagagatgtttgccgttcattctgttaatctgctgcttaagtctattggagcaactctcaccgatgtggacgatctgatctttaaactcgcctactacgagatcaggtatcaattctacaaaagggaccaactcatatggtctgtggtgcgccattatagcgagcagttcctaaagcagatgtacgtcctggttctgggactcgacgttcttggaaatcccttcggactcattagagggctctctgaaggagttgaggccctcttttatgagccattccagggagcggtgcagggtccagaggagttcgccgaaggccttgtgatcggggtccgaagcctgttcggacatacggtcggaggtgctgctggtgtggtgtctaggatcaccggctcagtgggcaaaggcctggccgcgattactatggacaaggagtaccaacagaaacgtcgcgaggagctttcccgacagccgagggattttggcgattcgctggctaggggcggaaaggggttcctgcgcggcgttgtgggtggcgtgactggcattataaccaagcctgtcgagggcgctaaaaaagagggagcagcaggcttttttaagggaattgggaagggtttggtaggtgcggttgccagaccaaccggtgggattgtcgatatggcttcatcaactttccaaggcatccaacgagcagcggaatccacagaagaagtgagttcgctaaggcccccaagactaattcatgaagacgggattattcgcccttacgataggcaggaatccgaggggagcgacctcctggaaaaccatatcaaaaaactggaaggagagacttaccggtatcactgtgccattccgggctccaagaagaccatcctgatggtaacaaaccgaagagtgctgtgtattaaagaagtcgagatccttggcctgatgtgtgtggattggcagtgcccttttgaggacttcgtgttccctccatcagtgtccgaaaacgtcctcaagatttctgtcaaagaacagggcttatttcacaagaaggactccgccaaccagggctgcgttcgcaaggtgtaccttaaggataccgccactgccgaaagagcctgtaacgcaatcgaagacgctcaatctacgcggcagcagcaaaaattgatgaaacaaagttcagtacggttactgaggccgcagctgcccagctag

SEQ ID NO: 205997 - DNA, 10887 bp, Artificial Sequence
  derived and/or modified sequence
atggtgctggagagcgtggtggccgacctgctgaaccggttcctgggtgactacgtggagaatcttaataagagtcagcttaagctgggcatctggggagggaacgtcgcgcttgataacctgcagatcaaagagaacgcgctctccgagctggacgtccccttcaaggtgaaggcaggacagatcgataagctgactttgaaaattccatggaagaatctgtatggggaggcagtcgtggctacgctggaggggctttatttgctggtagttccaggcgcctcaatcaaatatgacgccgtcaaagaagaaaaaagcttgcaagatgttaagcagaaggaactttcccgaatagaagaggcactccagaaggctgctgaaaagggtacacactccggagagtttatctacgggttagagaacttcgtgtataaggacataaagcccggacgaaaaagaaaaaaacacaaaaagcatttcaagaagccctttaaggggcttgataggagcaaagataagccgaaggaggcgaagaaagacacatttgtcgaaaagctggccacacaggtaatcaagaatgtgcaggtaaaaataacagacatccatatcaaatacgaagacgacgtgaccgacccgaagcgtccgctgtccttcggcgtaacgctcggcgagcttagtctgctaacggctaatgagcactggaccccttgcatccttaacgaggcggacaagataatctacaaactgattcggctggactcactcagcgcctactggaacgtaaattgctccatgagttatcagcgttcacgtgaacagatactggaccagctaaagaatgagattctgaccagcgggaacattcccccgaactatcagtatatcttccagccaataagcgcgtctgcaaaactgtatatgaacccttacgccgaatcagagctgaaaacacctaaactggattgcaatattgaaatacagaacatcgccatcgaacttaccaaaccccagtatctgtcaatgatcgaccttttggaaagtgtagactacatggtgagaaatgccccgtatagaaagtacaagccctatcttccactccacacaaatgggagaagatggtggaaatacgccattgactccgttctggaggtgcacattcgcaggtatactcagatgtggagctggtcaaatattaagaagcaccgacagctgctcaagtcttacaagatcgcttataagaacaaactcacccagagtaaagtgagcgaggagatccagaaggagatacaggacttggaaaaaaccctggacgtcttcaacatcattctggcacgccaacaggcgcaggtggaagtaattcggtcaggccagaaactccgcaagaagagcgcagacacaggggagaaacggggcggatggttctctggtctatgggggaagaaagaaagcaagaagaaagacgaagagagcttgattcccgagacgatcgacgaccttatgaccccggaggaaaaggacaagctgttcacagctattggctacagtgaaagcacccacaacctgactctgccaaagcagtatgtggcccatatcatgaccttgaaactggtgtcaacaagcgtcaccatccgcgaaaacaagaacattcccgagatactcaagatacaaatcattgggttgggcactcaggtaagccagcgcccgggagcccaggccctgaaggtggaggcaaagctggagcattggtacattacggggttgcggcagcaagatattgttcccagcttagtcgcttctatcggggacactacaagctcactgctgaagattaagttcgagaccaacccagaggactcgcccgctgatcagacactaatcgtgcaatctcagcctgtggaggtgatatatgatgctaagaccgttaacgccgttgtggagttttttcagtctaataagggtctggacctggagcaaatcaccagcgcaaccctgatgaagcttgaagagatcaaggaaaggacagcaactggcttaacccacattatcgaaaccaggaaagtgctggatctgcggataaacctgaaaccatcctatctggtcgtgcctcagacaggctttcaccatgaaaaaagtgatttgctgattctggattttgggaccttccagcttaactctaaagaccagggccttcagaagacgacgaattccagcctggaagaaatcatggataaggcctatgataagtttgatgttgagatcaaaaacgtccagctcttgttcgcgcgggcagaagaaacttggaagaagtgccggttccagcaccccagcactatgcacatcttgcagcccatggacatccatgtcgagctggcaaaggctatggtggagaaagacattcgtatggcacggtttaaagtgtccggagggttacccttaatgcacgtccgtatatcggatcagaagatgaaagacgtcctctacctgatgaatagcatccccctgccccaaaagtcctcggcccagagtcctgaacgccaagtcagctctatccctatcatttcaggaggcacaaaaggcctcctgggcaccagtctgctgctggacaccgtcgagagcgagtcggatgacgaatacttcgatgctgaggacggcgagccacagacctgcaagtctatgaagggcagtgaactcaagaaagcagccgaagtgcccaacgaggaactgatcaatctgctactaaaatttgaaatcaaggaggtcatcctggagtttaccaagcagcaaaaggaggaggataccatcctcgtatttaacgttactcagttggggacggaggccaccatgagaacattcgatctcacagtggtcagctacctcaagaagataagtcttgactaccatgagatagagggttctaagcgcaaaccactgcacctgattagcagctcagacaagcccggcttggacctgcttaaggtcgaatacataaaggcggacaagaacgggccttcgttccaaacagccttcggcaaaactgagcaaactgtcaaagtggctttctcctcacttaacctgctgttgcaaactcaagccttggtcgcatccatcaactacctaaccaccattataccaagcgacgatcagtccattagcgtagcaaaggaagtacaaatcagcaccgagaagcagcagaagaattctacgttacccaaggcaattgtttcttcaagggattccgatatcatcgacttccgtctgttcgcaaaactgaatgctttctgcgtgattgtctgtaatgagaaaaataacattgccgaaatcaagatccagggcctggactcaagtttgtccctgcagagcagaaaacagagcttattcgctaggctcgaaaacatcatcgtgactgacgtcgatccaaaaacggtccacaaaaaggcagtcagtatcatgggcaatgaggtcttcagatttaacctggacctgtatcccgacgccactgagggtgacctctacacagatatgtcaaaagttgacggtgtgctgagtctgaatgtggggtgcattcaaatagtctacctccataagtttctgatgtctttgctgaactttctgaacaacttccaaaccgcgaaagaatccctgtcggcagccaccgcccaagccgcagaacgagccgctacctccgttaaggacctggctcaaaggtctttccgtgtgtccattaatattgatttgaaggcgccagtgatcgtcattcctcagtcttcgatcagcaccaatgctgtggtggttgatctcggcctcattcgagtgcacaatcaatttagcctcgtgtcagacgaagattacctgaacccccctgtcattgatagaatggacgtgcagttgaccaaactgaccctttaccgtactgtgattcagcctggcatttaccaccccgatatccaactattgcaccccattaatctggaattcctggtgaacagaaatctggcggctagctggtaccacaaggtacctgttgtggagatcaagggacacctggactccatgaacgtttctctgaaccaggaggatctaaacctcctatttcgtatccttacagagaatctgtgcgaaggaacggaggacctggataaagtcaaaccccgggttcaggagaccggtgagatcaaggagcccctagagatctccataagccaagatgtgcacgacagcaagaataccctgaccactggtgtggaggagatccgttctgttgacattatcaacatgctcctcaacttcgagatcaaagaagtggtcgtaactctgatgaaaaaatctgaaaagaaaggcagacctctccatgagctcaacgtcctgcagcttggcatggaggcaaaggtcaagacatatgacatgaccgccaaggcctatctcaagaagatcagtatgcagtgtttcgattttacagactctaagggcgaaccactgcacatcattaatagcagtaacgtgacagatgagccactcttaaaaatgttactgactaaagccgacagcgacggtccagaattcaaaaccattcacgactctaccaaacagagattgaaagtgtcttttgccagtctggatcttgtccttcacctggaggccttgctgagcttcatggattttctcagcagtgccgcccccttcagtgaaccctcatcgagcgagaaagagagtgaattgaaaccactcgtgggggagagccggtcaatcgcagtgaaggccgtcagtagtaatatctcccagaaggacgtgtttgatctcaagatcactgctgagctgaacgctttcaacgtgttcgtctgtgatcagaaatgcaatattgcagacatcaagatccatggtatggacgcttccattagcgtgaagcccaagcagacagatgtgttcgcccgcctcaaggacattatagttatgaatgtggacctacaaagtatccacaagaaggcagtgtctattttgggcgatgaggtctttaggtttcagctcaccttatacccggatgctaccgaaggagaggcctacgccgacatgagcaaggtagatgggaagctgtcattcaaggtgggatgcatccagatcgtttatgtgcacaaatttttcatgtccctgctgaactttttaaacaattttcagaccgccaaggaggctttgagcacggccacagtgcaggccgccgagcgtgctgcctcatctatgaaagacttagctcagaaatctttccgtctactcatggacattaatctgaaagcgcctgtgatcattattccacaatccagtgtcagccctaatgctgttatcgctgatctaggactgatccgagtggagaacaagttttctcttgttcctatggaacactactccctgccccccgtcatcgacaaaatgaacatcgagctgacacagctgaaactgtccagaacaattctgcaggcctccttgccacaaaatgacatcgagatattaaaacccgtgaacatgttgctaagcattcagcgaaaccttgccgctgcgtggtatgttcaaatccctgggatggagattaaaggaaaacttaagccaatgcaggtggcgttatcagaggatgatttgactgtattgatgaaaatccttctggagaatctgggcgaggcctccagtcaaccgtccccgacacagagcgtgcaggaaacagtacgagttcggaaggtggatgtcagtagcgtgccagatcacttgaaggagcaggaggattggacagatagtaaactgagcatgaatcagatagtgtcactacagttcgactttcacttcgagagcctgtcaattatactatataataatgatataaatcaggaaagcggagtggcctttcacaacgacagttttcagttgggcgagctgcgcttacatctgatggcttcatctgggaagatgtttaaagatggctcgatgaatgtgagcgtcaagttaaagacttgcactctggatgacctcagggagggcatagaaagggctacttccaggatgatcgatagaaagaacgaccaggacaataacagcagcatgatcgatatctcatacaagcaggacaagaatggaagccagatcgacgctgtattggacaaactctatgtctgcgcttcagtggagtttctaatgacagtggctgatttttttataaaagcagtgccgcagagccctgagaatgtcgccaaggagacacagattctgccaagacagacggctaccgggaaagtaaagatagagaaagacgattctgtgcgcccaaacatgacactgaaagcaatgattacggatcctgaggtggtcttcgtagcgtccttaaccaaagcggatgcacctgcactgacagcgtctttccaatgcaatctaagcctctcaacttccaagctcgaacagatgatggaagccagcgtcagggatctgaaggttttagcctgtccatttttgagggagaagcggggcaagaacatcaccacagtgctgcagccttgttcactttttatggagaaatgcacatgggcctccggcaaacagaacataaacatcatggtcaaagagtttattatcaaaatctctcccatcattctgaacacggtcttaaccatcatggccgccctgagccctaaaactaaagaagacggctctaaggatacttcgaaagaaatggagaatctgtgggggatcaagtcaattaatgattacaatacatggtttctgggcgtggacaccgccactgagataaccgaaagcttcaaaggcattgagcactccctcatagaagagaattgtggcgtggtggtggaaagcatccaggtcaccctcgaatgtgggcttgggcaccgcacagtccccctgcttttagctgagagcaaattctctggcaacattaagaactggacctcactgatggcggcagtcgccgacgtcacactgcaagtgcactattacaacgagattcatgccgtgtgggagcctttaattgaacgagttgaaggtaagagacaatggaatctgcgcctggatgttaaaaagaaccctgtccaggataagtctctgttacctggcgatgatttcatccccgaaccacagatggcaatacatatctctagtggtaacacaatgaacatcaccatatccaagtcctgtctgaatgtgtttaacaatctggccaaaggctttagcgagggcactgcgtcaacctttgattacagtttgaaggatcgggctccttttacggtaaaaaacgcagtgggggtgcctattaaggttaagccaaattgtaatctcagggtgatgggcttccctgagaaaagtgacatttttgacgttgatgccggccagaacctggaattggagtacgctagtatggtaccctctagtcagggtaacctgagtatcctgtccagacaagagtcctcattcttcaccctgactattgtgccccatggctataccgaggtggctaatataccagttgctcgcccaggtcggaggttgtacaatgtgcggaatccaaatgcttctcatagcgactccgtgctagtgcaaatcgacgccaccgaaggtaacaaggtaattactttgcgttcgccactccagattaaaaaccactttagcattgcattcatcatctataagttcgtgaagaacgtgaagctactggaaagaatcggcattgcgcgacccgaggaggaatttcacgtgccgttggattcttataggtgccagctgtttatacaacccgccggtatcttggagcaccaatataaggagtccactacttatataagctggaaagaggagcttcaccgctcccgggaagtgagatgtatgctgcagtgcccttctgtggaggtgtccttcttgccacttattgtgaacactgtcgcactccccgacgagctctcctatatctgcacccacggagaagattgggatgtggcttacattattcacctctaccctagcttaacacttcggaatctgctgccttactcacttcgctatctgctggaaggtacagctgagacacacgaactggccgaaggaagtaccgccgacgtgttgcattcccgcatcagtggcgaaattatggagctcgtactcgtgaagtatcaggggaagaactggaatggccatttccgcataagggacacccttcccgaatttttcccagtgtgcttctctagcgacagtactgaggtgacaacagtcgacctgtccgtgcacgtgcgaagaattggttcacggatggtgctgagtgtgttttccccatactggttgattaacaaaacaaccagggtcttgcagtaccgcagtgaagatatccacgtcaagcacccggctgatttccgtgacataatcttattctcattcaagaaaaaaaatatctttacaaagaacaaggttcagttaaaaatcagtactagcgcatggtcgtcttccttttcacttgacacagtaggatcatatggctgcgtgaagtgccccgccaacaacatggagtatctggttggggtgtcaattaagatgtcgtcttttaacttgagccggattgttaccctgacgccattctgcaccatcgccaataaaagctccttggaactcgaagttggagaaatcgcctccgacgggtccatgccaactaacaagtggaattatatagcaagttcagaatgtctgcctttctggccggagtccctcagtggtaaattatgcgtgcgcgtggtgggctgcgagggtagtagcaagccatttttttataaccgtcaagacaacggcactctgctcagtctggaggacttaaacgggggcattctggtcgacgttaacactgcagaacatagcactgtcattacattctctgattatcacgaaggctccgcccccgcactgattatgaatcacacaccgtgggatattctcacttataaacagtctggcagtcccgaagagatggtactcttaccgcgacaagctagactgtttgcttgggccgaccccactggaaccagaaagctgacctggacttatgcagccaatgttggcgagcatgatttactcaaggatggctgtggccagttcccatatgacgccaatatccagatccactgggtcagcttcctggacggccgacaacgggtgctcctgttcacagacgacgtagccttagtgagtaaagctctccaggccgaagagatggagcaggccgattacgagatcacactgtcccttcatagcttggggctttcattagtgaacaatgagtcaaagcaagaggtttcgtatataggcatcacatcttccggcgttgtatgggaagtaaaaccaaagcagaagtggaaaccctttagccagaaacagatcattctactagaacagtcttaccagaagcatcagatcagcagggaccatggttggatcaaactggacaataacttcgaggtcaactttgacaaagatcccatggaaatgcggttgccaattcgctcccctattaagcgggattttctcagtggaatccagatcgagtttaaacagtcctcccatcagaggtccctacgggcccgcttatattggctgcaggttgataatcagctgccgggagccatgttcccagtggtttttcatcccgttgcaccacccaaaagtattgcactggactcagagcctaaaccattcatcgacgtctctgtgatcactagattcaacgagtactccaaggtattgcaatttaagtattttatggttctgatccaagaaatggctcttaaaatcgaccagggctttctaggcgccatcattgcccttttcacgcctacaactgaccctgaggcggagagacgccggaccaaactgatccagcaagacatcgatgctttaaacgccgagcttatggaaacttcaatgactgatatgtccatcctgtccttcttcgaacacttccatataagcccagtgaagctgcacctctcactgagcttgggctccggaggcgaggaatcagacaaagagaagcaggaaatgtttgccgtccatagcgtaaatttgctgctgaaaagcatcggcgctaccttaacggatgtagacgatctgatttttaagttggcctattatgagatccggtaccagttctacaagcgagatcaactgatttggagcgttgtgagacactactcagagcaatttcttaagcagatgtatgtcctggtgctgggtttggacgtcctgggcaacccgttcggactcataagaggattatccgagggcgtggaggcgctgttttacgaaccattccagggggctgtgcagggtccagaggagttcgcggaaggcctggtgataggtgtcaggtccctctttggacacacggtcggcggagcggctggcgtggtgtccaggataaccggatcagtgggcaaggggctagctgcaatcacaatggacaaagaataccagcaaaagcggagagaggaactaagccggcagccacgcgacttcggggacagcctcgctcgggggggtaagggcttcttgcgaggtgttgtaggtggcgttactgggatcatcacgaagcccgttgaaggggctaaaaaggagggcgcagccggttttttcaagggcattggcaagggcctggtaggcgctgtggccagaccaactggaggtattgtcgacatggcatcttccacatttcagggcattcagcgcgctgctgaaagcacagaggaagtatcgagccttcgccctccaaggctcattcacgaagacggaattatccgcccctacgacaggcaagaatccgaaggctctgatctgctcgaacaagagctcgagatacaggagtag

SEQ ID NO: 205998 - DNA, 11262 bp, Artificial Sequence
  derived and/or modified sequence
atggtgctggagtccgtggtggctgacctattgaatcgattcctgggagattatgtagagaacctcaataaaagccagcttaaactgggaatatggggaggcaatgtcgccctagataatttgcaaataaaggagaatgccctaagtgaattagacgtaccctttaaggtaaaagctggacaaatagacaagctgacactaaagattccatggaagaacctgtatggtgaagccgtagttgccacattagagggtctttacttactggttgtacctggggcaagcatcaaatacgacgctgtgaaagaagagaaatcacttcaagatgtcaaacagaaagagctgagccgcatcgaagaggcactgcagaaggcagccgaaaaagggacgcactctggcgaatttatctacgggctggagaactttgtgtacaaggatatcaagcccggtcgaaagcgcaagaagcacaagaagcacttcaaaaagcccttcaaagggctggaccgatcgaaggataaacctaaagaggccaagaaggatacgtttgtcgaaaagctggcaactcaggtgataaaaaacgtacaggtgaagatcaccgatatccacattaagtatgaagacgacgtgacggatccaaagagacccctcagcttcggcgtgacactcggggagctgagcctcttaactgccaacgagcattggacaccctgcattctgaatgaggctgataagattatttataagctcattcgcctcgatagcttatctgcctattggaacgtcaactgctcgatgtcctatcagaggtctcgggagcagattctcgatcagctcaaaaatgaaattctcacctctgggaatattccacctaattaccagtacatattccaacccatttcagcgtcagcgaagctgtatatgaacccttacgccgaatctgagctgaaaacacccaagctggattgcaatattgagattcaaaatatcgccattgaactgaccaagcctcagtatttgtcaatgatagacctgctcgagtccgtagattatatggttaggaatgctccctataggaaatacaaaccttatcttccactccatacaaatgggaggaggtggtggaagtatgcgatcgatagtgtcttggaggtgcatatccgtcgttacacacagatgtggagctggagcaacatcaaaaaacatagacagctgctaaagtcctacaaaatagcatacaaaaataaattaacacaaagcaaagtgagtgaggagattcagaaggagatccaggatctggagaaaacactcgacgtgtttaacattatcctggcccgacagcaagcgcaggtcgaggtgattagatctggacaaaagttgaggaaaaagagcgccgacactggagagaaacggggtgggtggttttcaggtctttggggaaaaaaagaaagtaagaagaaggacgaggaaagcttgataccggagacgattgatgatctcatgacacctgaggaaaaagacaaactgtttaccgcgattgggtatagcgagtccacccacaatctcactctccccaaacagtatgtggctcacataatgactctgaaattagtgtctacgagcgtaactataagggagaataaaaacatacctgagatactgaagatacaaatcatcgggctgggcacccaggtgtcgcaaagacctggcgctcaggcattaaaggttgaagcgaaactggagcactggtatatcacaggactacgccaacaagacattgtgcctagtttggtggcgtccatcggggacactactagctcactgctcaagatcaaattcgaaaccaatcccgaggactcaccggcagatcaaacactgattgtacagagccagcccgtcgaagtgatttatgatgcaaagactgtgaacgcggtcgtggagttctttcagtcaaataaaggcctcgatctggagcagatcaccagcgcgaccctgatgaagctggaggagattaaagagcgtactgctactggacttacacatattattgaaacacgaaaagtgttggacttgcggattaacctgaagcccagctacttggttgttccccaaacgggcttccaccacgagaagtccgacttgcttatactggactttggcacattccaactgaactctaaggaccaggggctgcagaagactaccaactcctctctggaggaaattatggacaaagcctatgataagtttgatgtagagatcaagaacgtacaactgctcttcgcaagggctgaagagacctggaagaaatgccggtttcagcacccctccacaatgcatatccttcaacccatggatatccatgtggagctcgcaaaagccatggttgagaaagacataaggatggctagattcaaggtctcaggtggtttgccactgatgcacgttagaatcagcgatcagaagatgaaagacgtgctctatctaatgaattccatacccctgcctcagaaatccagtgcccagtcccccgagcgacaagtctcgtctatccctatcatcagcggcggtacaaaggggctgctcggcaccagcttgctcctggacaccgtggagtccgaatcggatgatgagtatttcgacgcagaagatggggagccccaaacatgcaagtcaatgaaaggctccgaattaaagaaagcagccgaggtgccgaacgaagaacttattaacttgcttttgaaatttgaaatcaaggaagtgattctcgaattcactaagcagcaaaaggaggaggacactattctggtatttaatgttactcaactgggaacggaggctaccatgagaacttttgacctcacagtggtatcctacctgaaaaagattagtctggactatcacgaaatcgagggatcaaagcgcaagcccctacatcttatctcgtcatcagataagccaggtctggaccttttgaaagtggaatacataaaagcggataagaacggaccgtcgttccagaccgccttcggaaagaccgaacagaccgtgaaggtggctttctcctctctgaacctactgctacagacccaagcactggtagcctccattaattatctgacaacaatcatcccatctgatgatcaaagtatctccgtagcgaaggaggtgcagatttccacagaaaaacaacagaagaactctactctacccaaagccatcgtatcttccagggactccgacataattgatttcagactgtttgcgaagctgaacgccttctgtgtcatcgtgtgcaatgagaagaataatatcgctgagataaaaattcaaggactcgatagtagcctgagcttacagagccgcaagcagagcctttttgccaggctcgaaaatatcattgttacagatgttgatcccaagacagttcataaaaaggcagttagcattatgggaaacgaagtgttccgattcaacctggatttgtatccagacgccacagaaggtgacctttacacagacatgagcaaggtggatggggtgctatccctcaacgtgggatgtattcagatcgtttacctgcataagtttctgatgtccctactcaacttcctgaacaacttccagacagccaaggaatccctttctgcagctacagcacaagctgctgaacgggcagccacttctgtcaaagacctggcacagaggagctttagagtttccataaacattgatctaaaggctccggtcattgtgatcccacaatcaagcatcagtaccaacgctgtggtggtggatttggggctgattcgtgtgcacaatcaattttccctcgtcagcgacgaggactatctcaacccacccgttatcgatcggatggatgtgcaattgactaagctgacgttatacagaacggtgatacagcccggtatctaccaccctgacatccaactgttacatcccatcaacctagagtttctggtcaataggaacctggccgcttcctggtaccacaaggtccccgtggttgagattaaagggcatttggatagtatgaacgtttccctcaatcaggaggatcttaacttactgttccgcatcctcacagaaaatctatgtgagggaaccgaagacctcgacaaagtaaagcctagggtgcaggagaccggtgaaatcaaagagccgcttgaaatcagcattagtcaggatgtgcatgattccaagaatacccttactaccggggtggaagagattcggtcggtggatatcattaacatgctgctcaacttcgagatcaaggaggtcgtggttacgctgatgaaaaaaagtgagaagaaaggcagacccctgcatgagcttaacgtgctccagctaggaatggaagcaaaagtcaagacatacgacatgacggcaaaggcttatttgaagaagatctccatgcagtgcttcgactttacagatagcaagggcgagcccttgcatatcataaattcatccaatgtgaccgacgagccattgctgaagatgcttttgacaaaggcagacagcgacggccctgagtttaagaccatccacgacagcaccaaacagcgcctgaaggtctcatttgcgtctctcgatctcgttttgcacctggaggccctgttgagtttcatggactttcttagttctgccgctccattttcagagccatcgagcagtgagaaagagtccgaactgaaaccactcgtgggcgagagcagaagcatagcagttaaggcagtgtcctctaacattagtcagaaggacgtgtttgacctcaagatcactgcggagctcaatgcattcaacgtgtttgtttgtgaccagaagtgcaatattgctgacatcaagatccatggcatggatgcctccattagcgtcaagcctaagcagactgacgtgttcgcaaggttgaaagatataattgtgatgaacgttgatcttcaatccattcacaagaaggccgtgtccatcctgggagacgaagttttccgctttcaactgaccctgtacccagacgctaccgaaggcgaagcttacgctgatatgtcaaaggttgatggtaaactctcgtttaaagtggggtgcatccaaatcgtgtatgttcacaagttcttcatgtccctgttaaattttctcaacaatttccagactgcgaaggaggcactcagcaccgccactgtgcaggccgcagaaagagcagcttcttctatgaaggatctagctcagaagtcgttccggctgctgatggacatcaacctgaaagcacctgtaatcattatcccccagtccagcgtgtcaccaaacgcagtaattgccgatctggggctgatcagggttgagaacaagttcagcctagtgccaatggaacactactcattacctccggtgatcgacaaaatgaacatcgagttgacgcagctaaagctgtcacggactatcctccaggctagcttaccacaaaacgatatcgagatccttaaacctgttaatatgctgttgtctattcagcggaacctcgctgccgcttggtacgtgcaaatcccaggtatggagatcaagggtaagctcaagcccatgcaagtggccctgagcgaggatgacctcaccgtgttaatgaagatactgctggagaacctgggtgaagcgtcttctcagcctagtccaacccagtctgtccaagaaacagtgagagttcgcaaagtggacgtgagtagcgtgcctgaccacttgaaagagcaggaagactggacggatagtaagttgagtatgaatcagattgtctcactgcagttcgatttccacttcgagagcctgtcaattatcttatacaataacgacataaaccaagagtctggagtagcattccacaatgacagcttccagctgggcgagctgcgactgcatcttatggcctctagcggaaagatgtttaaagacgggtccatgaatgtctctgtcaagttgaagacctgtactttggacgacctgcgcgaaggaatcgaacgggcaacctcaaggatgattgatcggaagaacgaccaggacaacaacagctcaatgatagacattagctacaagcaggataagaatgggtcacagatcgatgctgtacttgataaattatacgtctgtgcttctgtcgagttcctgatgactgtggccgatttttttataaaggcagtccctcagtcccccgaaaacgttgctaaagagacccagattctgcccagacagaccgcaacgggcaaagttaagatcgaaaaagatgatagcgtccgtcctaacatgacactaaaagccatgatcaccgatcccgaggtggtctttgtggcatccttaacaaaggccgatgctccagcgttaacagcctccttccagtgtaacctgtctctcagtacttccaaactagagcaaatgatggaggcatccgtcagagatctgaaagtcctcgcgtgtcccttcctgcgcgagaagcgaggcaagaacattacaaccgtcctacaaccttgcagtcttttcatggagaagtgtacctgggccagcggaaaacagaatattaacattatggtgaaggagttcataatcaaaatatcacctatcattctgaatactgtcctgactataatggccgctctgagccctaagacaaaggaggacggcagcaaagacacctccaaagagatggagaacctgtgggggattaagtcaatcaatgactacaacacctggtttttgggggttgatactgccacagaaatcaccgaaagttttaagggaattgagcactccctcattgaagagaactgcggggtggttgtggaatcaattcaggttaccctggaatgcggcctgggccaccgcaccgtgccactgctattggcggagagtaagttttccggaaatatcaagaactggactagcctgatggctgccgtagccgacgttacactccaggttcattactacaacgagatacatgcagtgtgggagcctctgatcgaaagagttgagggcaagcgccagtggaatttgcgcctcgacgttaagaaaaacccagtgcaggataagtcgttactccctggagacgactttatccccgagccacagatggcaatccatatcagcagcggcaacaccatgaatatcacgatcagcaagtcctgcctgaatgtgttcaataatttggcaaagggcttcagcgaaggcacagcttcgaccttcgattacagtcttaaggacagggcaccatttacagtgaaaaacgccgtaggagtgccaatcaaagtgaagccaaattgcaatctaagagttatgggcttccccgagaagtcagacattttcgatgtggacgccggtcagaacttggaactcgagtacgcctctatggtgccatcctcccagggaaatctgtccattctcagccgccaggagagcagctttttcaccctgaccattgtaccacatgggtacaccgaggtggccaacatacctgtggcgcgtcccggaagacggctctacaatgttagaaaccctaacgccagccattcagatagcgtgctggtccagattgatgccacagaagggaacaaggtgattaccttgcgcagcccccttcagatcaagaatcacttctctattgcctttatcatttataagtttgtcaaaaacgtaaagcttctggagaggatcggcattgctcggcctgaggaggagttccatgtgccgctggattcttatcgttgtcagctgtttatccagcctgcaggcatcctggaacaccagtataaagaatcaacaacgtatatcagttggaaggaggaactgcataggagccgtgaagttagatgcatgttgcagtgtccctctgttgaggtctcgtttcttcctctgatcgtgaacaccgtggcactcccagatgaattaagctacatctgcacccacggcgaagactgggacgtggcctatattattcatctgtatccctccttgaccctgagaaaccttttgccatatagtctgcggtacctcctggaagggacggcggagacacatgaattggctgaggggtccacagctgacgtgttacattccagaatctcgggtgaaatcatggaactcgtgctggtgaaataccagggcaagaactggaacggacattttcgcatacgcgacacactgccagagttcttccctgtatgttttagcagcgacagcaccgaggtaaccacagtcgatttgtctgtacatgttaggaggattggctccaggatggtgctgagcgtgttctctccttattggctgatcaacaaaaccactagggtgcttcagtaccggagcgaagatattcatgtgaagcaccccgctgactttagggatatcatcctttttagtttcaagaagaaaaacatctttaccaaaaacaaggttcaactgaagatttcgacctccgcatggagtagttcctttagcttagataccgttggcagttacggctgcgtgaagtgccccgcaaataacatggagtacctggtgggggtctctattaagatgagctcttttaatctgagtcgaatagtgactctcacaccgttttgcactattgcaaacaaaagctcactggaactcgaggtgggagaaattgcgtcagacgggtccatgcccaccaacaagtggaactatatcgctagtagtgagtgtctgcctttttggccagaaagcctgagcggcaaactatgcgtcagggtcgtcggttgtgaagggtctagtaaacctttcttttataaccgtcaagacaatggaactctcttatcactggaagacctcaatggaggcatcctggtggacgtgaacaccgccgagcatagcaccgtgattacgtttagcgactatcatgaaggctccgccccagctcttatcatgaatcataccccctgggacatcctaacatacaagcagtctggttctcccgaggaaatggtgctgctgccacggcaggccaggctgttcgcatgggctgatcctaccggcactcgaaaactgacttggacatacgcggctaacgtgggcgagcacgatctgctaaaagatgggtgtgggcagttcccctacgacgccaatattcagattcattgggtgtcctttctcgacggccgacaaagagtgctgttgtttacagacgatgtggcgctggtgtcaaaagccttgcaggctgaggagatggaacaagctgattatgagatcacactgagcctgcactccctgggcctgagccttgttaacaatgaatccaagcaggaagtgagttatattgggatcacaagtagcggggtcgtatgggaggtgaagcccaaacagaaatggaagccttttagccaaaagcagattattctgctcgagcagtcctaccagaagcatcagatctcccgtgaccacggctggataaagctggataataacttcgaggtaaatttcgataaggatcctatggaaatgaggctccctattaggagtccaatcaaaagggacttcttgtcaggtattcagatcgaattcaaacagtccagccaccagcggagtttgagggccagactgtactggctccaggtggacaaccagttaccaggagctatgtttccagtggtcttccacccagttgcaccccctaagtctatagcattggattcggaacctaaaccatttattgacgtctccgtgatcactcgattcaatgagtactcaaaggttctgcagttcaaatacttcatggtcttaattcaagagatggctctgaagatcgatcaggggtttctgggcgctatcatagctctgttcaccccaaccaccgatccagaggcagaacgcagacgaacaaagctgattcaacaggacatcgatgcgcttaatgctgagctgatggaaacttcaatgaccgacatgtcgatcctttcatttttcgaacactttcacatctctcctgtgaagctccacctttccttgtccctgggcagtggcggagaggaaagtgataaagagaaacaggagatgtttgccgtgcattctgtgaacctgctcttaaagtctatcggagccacactgactgacgtggatgacttaatcttcaagttggcatactatgagattcggtatcagttttacaagcgcgatcagctgatctggtcggttgtccgccactacagtgaacagtttcttaagcagatgtacgttttggtgctcgggttggatgttttaggcaatcccttcggccttatccgcggactgagtgagggtgtcgaggctttattttacgagccttttcaaggggcagtgcaagggccagaggagtttgctgaaggcctcgtgatcggggtcagatctctattcggtcacaccgtcggtggtgccgctggggtcgtgtcacgaattactgggagcgttggtaagggcttagcagcgattacaatggacaaggagtaccaacaaaagaggcgggaggagctctcacgccagccaagagactttggagacagtctcgctcggggtggaaaaggtttcttaaggggcgtagtgggaggcgtgacagggattataacaaaacccgtcgaaggggctaagaaagaaggtgctgctgggttctttaaggggattgggaagggcctcgtgggggcagtcgcacggccaaccgggggaattgtggatatggcctcttcgacctttcaggggattcagcgggcagccgagtccacagaagaagtgtcaagtctacggccaccacgtttgattcacgaagacggtatcatacgaccttacgaccggcaagaaagtgaaggttcagatcttctggagaatcacatcaaaaaacttgagggggaaacttataggtatcactgcgcaattcctgggtctaagaagacaattctcatggtgactaatagacgtgtgctgtgtatcaaggaagtcgagatcctcggcctaatgtgtgttgactggcagtgcccttttgaagatttcgtttttcctcctagcgttagcgagaacgttcttaagatcagtgtaaaagagcaaggcctcttccacaagaaggatagtgcaaaccaaggctgtgttcgaaaggtctacctcaaagacacagccacagccgagcgggcttgcaatgctatcgaggatgctcagagcacccggcagcaacagaaactgatgaagcagtcctccgttaggcttttgaggccccaactcccctcttag

SEQ ID NO: 205999 - DNA, 10887 bp, Artificial Sequence
  derived and/or modified sequence
atggttttggaatctgtggtggctgacctgctcaataggttccttggagactacgttgagaatcttaataagtcccagctgaaactcggaatatgggggggtaatgtagcactggacaacttacaaattaaggaaaacgctctgtccgagctagacgtaccttttaaggtgaaagccggacagatagacaagcttacgttgaagattccctggaaaaatttatatggcgaggccgtggtagcgacattggaaggcctgtaccttctcgtcgtgcctggcgcttccattaagtatgacgcagttaaagaggagaaaagtctgcaagacgttaagcagaaagagctgtccagaatagaagaggcgctgcaaaaagcagccgagaaggggacccactcaggcgaatttatctatggactggaaaattttgtgtataaggatattaagcccggtcggaaacgcaagaaacacaagaaacattttaagaagccctttaaaggcttggacagaagtaaggacaagcctaaggaagctaagaaggacacattcgtggaaaagctagccacacaggtgatcaaaaatgtccaggtgaagatcacagatatacacatcaaatacgaagacgatgtgacagaccctaaacggcctttgagcttcggggtgaccctgggcgagctcagcctcctaaccgccaacgaacattggaccccttgtatcctgaatgaggccgataagattatctacaagctcataagactggatagtttaagcgcatactggaacgtgaattgttccatgtcctatcagcgctctagggagcagatcttggaccaactgaagaacgaaattctcacatccggcaacattcctcctaattaccagtacattttccaaccaatcagcgcgtccgccaaactgtatatgaatccttacgcagaatccgaattaaagacccctaaactggactgcaacatcgagatacagaatatagcaattgagctgactaagcctcaatatttgagcatgatcgatcttctggaatcggtggattatatggttagaaacgctccgtaccggaagtacaagccatacctaccccttcacacgaatggcaggaggtggtggaagtacgctatcgactctgtcctggaagtgcatattcggaggtatacccagatgtggtcttggtcaaacatcaagaagcaccgtcagctgctgaagtcatacaagatcgcatataagaacaagctgacccagagcaaggtgtccgaagagatacagaaagaaattcaggacctggagaagaccctggacgtgttcaacatcattctggcaagacagcaggctcaagttgaggtgatcaggtctggtcaaaaattgaggaagaagtccgcagataccggcgagaagcgagggggatggttctcaggactttggggcaaaaaagaatctaaaaagaaggacgaagaaagtctgatcccagaaactattgatgacttgatgacacccgaagaaaaagacaaactctttaccgcaataggatatagcgagtctactcataacttaaccctcccaaagcagtacgtggctcatattatgactctgaagttggtgtcgacctcagtgaccatcagagaaaataaaaatatacctgaaatcctgaaaattcagattatcgggcttggcacacaggtaagccaacgccctggcgctcaggccctgaaggtcgaagccaaactagagcactggtacatcacgggattgaggcagcaggacattgttcccagtttggtggcctccatcggggacacaacatccagcctcctcaagatcaagttcgaaacaaatcccgaagattctcctgctgaccagacactgatagtgcagtcccagccagtcgaggttatctacgacgcaaaaacggtgaatgcagttgtggagttttttcaatcaaacaaaggactggaccttgagcaaatcacctcagcaactctgatgaaactggaggagatcaaagaacgcacagccaccggccttacacatataatcgagacaagaaaggtcctagacctgcgcatcaacctgaagcctagttacctggtcgttcctcagacagggtttcaccatgagaagtcagacctgctgatactggatttcggaacatttcagctgaatagtaaagatcagggcttacagaaaacaaccaacagtagtctcgaggaaatcatggacaaggcatacgataagttcgacgttgaaataaaaaatgtccagctgttgtttgcccgagccgaggagacgtggaaaaagtgccgctttcaacaccccagcacgatgcatattctccagccaatggacatccatgttgaattagcaaaggcaatggtggagaaagatatacgcatggcgagattcaaggttagtggcggacttccattgatgcatgtgagaatcagcgaccagaagatgaaggacgtgttgtatctaatgaatagtattcctctacctcagaagtcttcagcccaaagcccagagagacaggtttcaagcattccgataatatcaggcggtaccaaagggctgctgggaacatcattgctcctggacacagtggagagtgaatccgatgatgagtattttgacgctgaagacggcgagccccagacgtgtaagtccatgaagggctcggagctaaagaaggccgcagaggtgccaaacgaggaactgattaacttactgttaaagttcgagatcaaggaagttatcttggagttcaccaaacagcagaaagaggaggatactatcctggtgtttaacgtgacgcaactggggacagaggccactatgcggacattcgacctcaccgtcgtgagttacttaaagaaaattagcctggattaccatgagatcgagggcagcaagcgcaagccgctacatttgatcagctcatccgataaaccgggactggacctgctgaaggtggagtacatcaaggcagataagaatgggccttcattccagaccgcgtttggcaaaaccgaacagactgtcaaagtcgcgttttcttccctgaatctgctcctccagacccaggccctggtcgcatctatcaattatctgaccactatcattcccagtgatgaccagagcatatccgtggcgaaggaagtacagatctctaccgagaagcagcagaaaaacagtacgcttcccaaagccatcgtgtctagtagggactccgatatcattgacttcaggttgttcgccaagctaaacgctttctgtgtgattgtgtgcaatgagaagaataatatagctgagatcaaaatccaagggctggatagttccctgtccctgcaaagtcggaaacagtctttgtttgcaaggctagagaatatcatcgtcacagacgtcgatcccaaaacggtgcacaaaaaggctgtttctataatgggtaatgaggtttttagatttaaccttgacctgtaccctgatgccactgagggtgacctttatactgacatgagcaaagtggacggtgtgctgtccttaaacgttggatgcatacagatcgtctatttgcataaatttctgatgagcttgctcaattttctcaataactttcaaacagccaaagagagcctcagtgccgctaccgcccaagcggctgagcgtgctgccacctctgtcaaggacctggcccagagatcttttagggtttctattaatatcgatttaaaggcccctgtgattgtgatcccgcagagtagtatttccacaaatgctgtcgttgtcgatctgggtctcattagagtgcataaccagttttcactggtgtccgatgaggattatttgaaccctccggttattgaccgcatggatgttcaattaactaagttgactctgtacaggactgtgattcagcccggaatctaccaccctgacatacaactcctgcatcccataaacctggaattcctggtgaacaggaacctggctgcctcttggtaccacaaggtaccggtagtggagataaagggccatctggacagcatgaatgtgagcctgaaccaggaagatttaaacctcttgttcaggattctgaccgagaacctgtgcgagggaactgaagatttggacaaagtcaagcccagggttcaagagactggtgaaatcaaagagccacttgaaattagcatttcgcaagatgtacacgattctaaaaatacccttacaaccggagtagaggagatcagaagcgtcgatatcattaacatgctccttaacttcgagatcaaggaagtggttgtgactttgatgaaaaaatctgaaaagaagggcagacccctacacgagctaaacgtcctccaactaggtatggaagcaaaagtgaaaacctatgacatgacagccaaggcgtatttgaagaaaatctctatgcagtgctttgatttcaccgatagtaaaggcgaacccttgcacattatcaactcctctaatgtgactgacgaaccccttttgaaaatgctgctgaccaaggccgacagtgatggtcctgagttcaagacaattcatgatagtaccaaacagcgcctgaaggtgagtttcgccagcctggatttggtgctccacctggaagctctcctgagcttcatggattttttgtccagtgctgctcctttctccgagccttcaagctctgagaaggagagcgagctgaaacctctggtcggggagtcccggtcaattgccgtcaaggctgtgtctagcaacatcagtcagaaggacgtgttcgatctaaaaattacagctgaattaaatgcttttaatgtctttgtgtgcgatcagaagtgtaacattgctgatattaaaatccatggtatggatgcctctatttccgtgaaaccaaagcagactgacgtctttgcacgccttaaggatattattgtaatgaacgtggatctgcaatccattcataagaaggcggtgtccattctgggcgacgaagtgttcaggtttcagttaaccttgtaccccgacgcaactgaaggggaagcttacgcggacatgtctaaagtggacgggaagctgagtttcaaggtgggctgtattcagattgtgtatgttcataaattcttcatgtccctcctcaattttctgaataactttcagacagccaaggaggccctttctactgcgacagtgcaggccgcagaaagggccgcaagctctatgaaggatctggcacagaaaagctttagactgttgatggacatcaaccttaaagctcccgtgatcattatccctcagagctctgtgtctcctaatgccgttatcgcagacttaggactcattcgagtggaaaacaaatttagtctagttccgatggagcattacagcctacctccagtgatcgataaaatgaacatcgaactgacccagttaaaactgtcgcgcaccattctccaagcgagtctcccacagaatgatattgagattctgaagcctgtgaacatgctcctgtccatccagcgaaatctcgcggctgcgtggtacgtgcagatcccaggcatggagattaagggcaagttaaagcctatgcaggtggcgctgagtgaagacgacctaaccgtcttgatgaagatcttactcgaaaatttgggggaggcttcatctcaacctagccccacacaaagcgtccaggagactgtgagagtgcggaaagtggatgtatcttccgtgcctgaccatctaaaggagcaggaagactggactgatagcaaactttctatgaaccagattgtctccctgcagtttgacttccacttcgagtccttgtctataatactctataataacgatattaaccaggaaagcggggttgcattccacaatgatagttttcaattaggtgaactgagactgcacctgatggccagctccggcaagatgttcaaagacgggtccatgaatgtcagcgtcaaactgaaaacttgcaccttggacgacctgcgcgagggcatcgaacgcgctacatctagaatgattgatcggaagaacgaccaggataataacagcagcatgatcgatatcagctacaaacaggacaagaacggcagccagatcgatgcagtgctcgataaactgtatgtgtgcgcttccgtggaattcctcatgactgtggccgatttctttatcaaagctgtaccacagtcccctgagaacgtggccaaggagactcagatccttcccaggcagacagcaacaggtaaagtcaagatcgagaaggatgactctgttcggcctaacatgacattgaaggcaatgatcactgacccagaggtagtgttcgtcgcatctcttacaaaagcagatgcccctgctcttacggcctcctttcagtgtaatctgagcctttctacatcaaaactcgagcaaatgatggaagcaagtgtacgggacctgaaagtgctggcttgcccattccttcgcgaaaaacgaggtaaaaacattacaacggtactgcagccatgcagcctcttcatggagaagtgtacgtgggcaagcggcaagcagaacattaacattatggtaaaagagttcataattaagatctctcccatcattttgaataccgttctaaccattatggctgcgctaagtccgaaaacgaaggaagatggctccaaggatacctcgaaggaaatggagaacctgtgggggatcaagtccattaacgattacaacacatggttcctcggagtagacactgcgacagaaatcactgagtcttttaaggggatcgaacactccctgatcgaggagaattgtggagtagtcgtggaaagcatacaagtgaccctggagtgcggcctgggccatagaactgtgccactgttactggcggagtcaaagttcagcggtaatattaagaattggacatctctcatggccgctgtggcagacgtgactttgcaggtgcattattataacgagattcacgccgtgtgggagccgctgatcgagcgtgttgagggtaagagacagtggaatcttaggctcgacgttaagaagaatcctgtacaagacaagtcactgctccccggagatgactttatccccgagcctcagatggcaattcatatttcatccgggaataccatgaacatcactatctcaaaaagctgcctgaacgttttcaataaccttgccaagggtttctccgaagggactgccagcacctttgattacagccttaaagaccgagcccctttcaccgtgaagaacgcagtgggcgtgccaattaaggttaaacccaattgtaatcttagggtgatggggttccctgagaagagtgacatcttcgacgtggacgccggtcagaacttagaactggagtacgctagcatggttccaagctcccagggcaacttaagtatcctaagtagacaagagagctctttttttacgctgactatcgtcccccacggatacacagaggttgccaacattcccgtggccagaccaggcagacgcctatacaatgtaagaaaccctaacgcctcccatagcgacagtgtactcgtccagatagacgcaacagagggcaataaggtgataaccctgagaagcccattacagataaaaaatcacttcagcatagcatttattatctataaattcgtcaaaaacgtgaaactgctggaacggataggaatcgcccgaccggaagaagagttccacgtccctttagattcttatcgttgtcagcttttcattcaaccagccggtattctcgagcatcagtataaggaatctacaacatatattagctggaaggaagaattgcacaggtcccgtgaggtaagatgcatgcttcaatgtccctctgtcgaggtatcgttcctgcctttgattgtgaacactgtcgccctgccagatgagttgagctatatctgcacacatggcgaggactgggatgtcgcatacatcatacacctgtacccctcccttactctccggaacctcctcccatacagcctccgctacctccttgaagggaccgctgaaacacacgagctggctgagggatcaactgctgatgtccttcacagcaggatttccggagagatcatggagctagttcttgtaaagtaccagggcaagaactggaatggacactttagaattcgcgacaccctgcccgagtttttccctgtgtgtttttcaagtgactccacagaagtgacgaccgtggatttgtccgtgcatgtaagacgtattggaagcaggatggtcctctccgttttctccccttactggctgattaataagactacaagagttctgcagtatcggagcgaggacatccatgtcaagcacccagccgacttccgcgatattatcctctttagctttaagaaaaagaacatcttcacgaagaacaaggtacaactcaaaatcagtactagcgcttggtcctcctccttttctttggatacagtaggttcctacggttgcgtgaagtgccctgctaacaatatggaatatctcgtgggggtcagtataaaaatgagttctttcaatctcagtcgtatcgtaaccctgactcccttttgcaccatcgccaataagtcttctctggaactggaagtgggagagatcgcctccgatgggtccatgcctacaaacaagtggaattatatcgcatctagtgagtgtctgcccttctggccagaaagcctatctggcaagctttgtgtgagagtggtaggatgcgaggggagttccaagccgttcttttataacaggcaagacaacggtacattactctccttggaggatctcaacgggggtattttagtcgacgtcaacacagcagagcactctaccgtcattaccttctcagattaccatgaaggatccgccccagctctcatcatgaatcacacaccatgggacatccttacctataaacagtcgggtagccccgaggaaatggtgctgcttccccgtcaggcaagactgttcgcctgggctgatccaaccgggactcgtaaactgacgtggacatatgcggctaacgtaggggagcacgacctgctgaaggacggctgtgggcaattcccttacgatgctaatatccaaatacattgggtgtctttcctcgacggaagacagagggttctgctattcaccgatgacgtcgccctcgttagcaaagctctacaggcagaagagatggaacaggctgactacgaaatcacactgagcctacattccttgggcttgagtctcgttaacaacgagagtaaacaagaggtatcttacatcggaatcacttccagcggtgtggtgtgggaagttaaacccaagcagaagtggaagccattctcccagaagcagatcatcctcctggaacagtcatatcagaagcatcagatttctcgtgatcatggctggataaaactagacaacaatttcgaggtgaatttcgataaggaccccatggaaatgcgcctgccgatccggtctcctattaaaagagattttctgtctggcatccaaatcgagttcaaacaaagtagccatcagcggtccctgagagcgagactgtattggttacaggttgacaatcagcttccaggagcgatgttcccggtcgtatttcacccagtcgcccctcccaaatccatcgcccttgattctgaacccaagccattcattgacgtcagcgtgataacccggtttaatgagtactccaaagtgctccagtttaagtacttcatggtgttgattcaggaaatggccttaaagattgatcagggcttcctcggcgctatcatagccctgttcacacctaccacagaccctgaagccgagaggcgacgaaccaaattaatccagcaagatatagacgccctgaatgctgagctgatggaaactagcatgactgacatgtccattctgagtttttttgagcactttcatatcagtcctgtcaagctccatctcagcctgagtctggggtcaggtggcgaagaatctgataaagagaaacaggagatgttcgccgttcactcagtgaatctcttgctcaagagcattggtgccacactgaccgacgtagacgatctgattttcaaactagcttactacgaaatacgataccagttctacaaacgggaccagctgatctggtccgtagtccgccactacagcgaacaatttctcaagcagatgtacgtgttagtgctgggactcgacgtgctgggaaatcccttcggcctcatcaggggtctgagtgagggtgtggaagctcttttctatgaaccatttcagggagccgtgcagggtccggaagaattcgcggaaggtttagtgatcggtgttcgctcccttttcgggcatacagtaggtggagccgctggggtggtatctcgcatcactggatcagtggggaagggcctcgccgctattaccatggataaggagtaccagcaaaaacgacgagaagagctgagtcgtcagcccagagactttggggactctttagctcgagggggaaaaggctttctgagaggtgtggtggggggtgtaaccggtataattactaagcccgtcgaaggagcaaagaaagagggagccgctggattttttaaaggcatagggaagggcctcgtgggcgcagtagcccgaccaactggtggcattgtggacatggctagtagcacgtttcagggcatccagagagctgcagaatcaaccgaagaggtgtcaagcctgcggcctcctcggctgatccacgaggatgggatcattcgaccttacgatcggcaagagtcagagggctccgatttattggagcaggagttggaaatccaggagtaa

SEQ ID NO: 206000 - DNA, 13400 bp, Artificial Sequence
  derived and/or modified sequence
tgcagcgctggtcgcagccctcagctgcgccgggcggttccggctcctccctctccttgtgcctcagcgccaccatggtgctggagtcggtggtcgcggacttgctgaaccgcttcctgggggactatgtggagaacctgaacaagtcccagctgaagctgggcatctggggcggaaatgtggctttagataatctacagataaaagaaaatgccctgagtgaattggatgttccttttaaagtcaaggctggccaaattgataaattaactttgaagattccttggaagaacctttatggagaagcagttgttgcgaccctggaaggattatacctgcttgttgtccctggagcaagtattaagtatgatgctgtaaaagaagaaaaatccttgcaggatgttaaacagaaagagctatcccgaattgaagaagcccttcaaaaagcagcagaaaaaggcacacattcaggggagttcatatatggcttggagaactttgtttacaaggacatcaagcctggacgtaaacgtaaaaagcacaaaaaacattttaagaaaccttttaaaggtcttgatcgttcaaaagataagccaaaagaagccaaaaaggatacatttgtggaaaaattggcaactcaagtaataaaaaatgtacaagtaaaaatcacagatattcacattaaatatgaagatgatgtcactgatccaaagcggcctctttcatttggtgtcacactgggagagcttagtctactgactgcaaatgaacactggactccatgcatattaaatgaagcagacaaaattatatacaagcttatacgacttgatagtcttagcgcctactggaatgtaaattgcagcatgtcttaccagagatcaagggaacagattttggatcagctgaaaaatgaaattcttacaagtggaaatatacccccaaattatcaatacattttccagccaatatcagcctctgcaaaactctacatgaatccttatgcagaatcagagctcaaaacgcccaaactggattgcaacatagaaatacaaaatattgccattgaactgaccaaacctcagtacttaagtatgattgaccttttggagtcagtggattatatggttaggaatgcgccttataggaaatacaagccttatttaccacttcataccaatggtcgacgatggtggaaatatgcaattgattctgttcttgaagttcatataagaaggtatacacagatgtggtcatggagtaacataaaaaagcacaggcagttactcaagagttataaaattgcctacaaaaacaagttaacacagtctaaagtctcagaagaaatacagaaagaaattcaggacttggagaagactctagatgtttttaacataattttagcaaggcaacaagcacaagttgaggtgattcggtctgggcaaaaattaaggaaaaagtctgctgacacaggcgagaaacgtggaggctggtttagtgggttgtggggtaagaaagagtctaagaaaaaggacgaagaatcattgattcctgaaactattgatgaccttatgactccagaggaaaaagataaactcttcactgccattggttatagtgagagtacccacaacctaactttacctaagcagtatgttgcccatattatgaccctgaagttagtaagcacctctgttacgataagagaaaacaagaatattccagaaatactaaaaattcagataattggcctgggcactcaagtatctcagcgaccaggagcacaagcacttaaggtagaagcgaaattagaacactggtatataacaggtttgagacagcaggatattgtgccatcacttgtggcttcaattggtgacactacatcatccttgcttaaaattaaatttgaaaccaatccggaggatagtcctgctgaccagactctgattgttcagtcccagcctgtggaggtcatctatgatgctaaaactgtcaatgcagtggttgaattctttcaatcaaataagggattggatcttgagcaaataacatcagcaacattgatgaagctggaagaaattaaggagagaacagctacaggacttacacatattattgaaactcgaaaagtccttgatttaaggataaatctgaagccttcttatctagtagttccacagacgggtttccaccatgaaaagtcagatcttctgattttagattttggtacatttcagctcaacagtaaagatcaaggtttacagaagactactaattcatctctggaagaaataatggataaggcatatgacaagtttgatgttgaaataaaaaatgtacaactactttttgcaagagcagaggaaacctggaaaaagtgtcgatttcagcatccatcaactatgcatatattgcaacccatggatattcatgttgagttggctaaggccatggtagaaaaagacattagaatggccagatttaaagtgtcaggaggacttcctttgatgcatgtgagaatttctgaccagaagatgaaagatgtgctatatttgatgaacagtatacctttgccacagaaatcatcagcccagtctccagagagacaggtatcctcaattcctattatttcaggtggtacaaaaggtctacttggtacttcactattgctagacactgtggaatcagagtctgatgatgagtattttgatgctgaagatggagaaccacagacttgtaaaagtatgaaaggatcagaacttaaaaaagctgcagaggtcccaaatgaggagctcatcaatcttctactcaagtttgaaattaaagaagtgattttggaatttactaaacagcagaaagaagaagatacaattctagtatttaatgttactcagttaggaacagaggccacaatgagaacatttgacttaactgtggtatcttatttaaagaaaatcagcttggattatcatgaaattgaaggatccaaaaggaagccccttcacttgattagctcttctgacaaacctggattagatcttttgaaagtggagtatattaaggctgataagaatggacctagttttcaaactgcttttggaaaaactgaacaaacagttaaggtggccttttcatctttaaatctgttgctgcaaacacaagctcttgtcgcttctattaattacctcacaaccattattccatctgatgatcaaagcataagtgttgctaaggaggtacaaatttcaactgaaaaacaacaaaaaaattcaactctgccaaaagcgattgtatcctccagagatagtgacattattgatttcaggctatttgccaagttgaatgctttctgtgtcattgtttgcaacgaaaagaacaatatcgccgaaatcaagattcaaggactggattcctccctttctctccagtcaagaaagcagtcactttttgcccgactagaaaatattattgtcacagatgttgatccaaagacagttcataagaaagctgtgtcaataatgggaaatgaagttttccgttttaatttggatttgtatccagatgctactgagggggatttgtatactgacatgtccaaagtggatggtgtgctgtctctgaatgttggctgtattcagattgtctatcttcataaattccttatgtcacttctgaacttcctgaataatttccagacagccaaagagtctctgagtgctgccactgcccaggctgcagaaagggctgccacaagtgtgaaagatcttgcccagaggagttttcgtgtttccatcaatattgatttgaaagcaccggttatagtcatcccacagtcttctatttccaccaatgcagtagtggtagatcttgggttaatcagagttcataatcagttcagtctggtgtctgatgaagactacttaaatcctccagtaattgatagaatggatgtgcagctaacaaagcttacactttataggacagtgatccagccaggcatctaccatcctgatattcagctgttgcacccaattaacttggaatttcttgtaaatcggaatctagctgcatcttggtaccacaaggtgcctgttgtggaaattaaaggacatcttgattcaatgaatgttagtctaaatcaagaagatcttaatcttttatttaggatactaacagaaaatctctgtgagggtactgaagacttggataaagtgaaaccaagagtacaagagacaggtgaaattaaagagccccttgaaatctctatatcacaagatgtacatgattcaaaaaatactttaacaactggagtggaagaaattaggtctgtagacatcattaatatgctgctgaattttgaaattaaagaggttgtggttactttgatgaaaaaatcagaaaagaaaggaaggcctttacatgagctaaatgtcctgcaacttggaatggaagctaaagttaaaacctatgacatgactgctaaagcttatctaaaaaaaattagtatgcagtgctttgatttcactgactctaaaggggaacctcttcacattattaactcttctaatgtgactgacgaaccccttctgaaaatgttactgacaaaggcagacagtgatggaccagaatttaaaactattcatgacagtaccaaacagagactgaaggtttcatttgcatccttagacttagtacttcatttggaagctttactttccttcatggattttttatcatctgctgctccattctctgagccttcctcttctgagaaggaatccgagctgaaaccacttgtgggggagtccagaagtatcgctgtcaaagctgtatccagcaacatttcccaaaaggatgtgtttgatttaaagatcacagctgaattaaatgcatttaatgtctttgtctgtgatcagaagtgtaacattgcagatattaaaatacatggaatggatgcctctatttctgtgaagcctaagcagactgatgtgtttgccagacttaaagatattatagttatgaatgtagatttgcagtccattcacaaaaaggctgtctctattttgggagatgaagtctttaggttccaactgactctttatccagatgccacagaaggagaggcctatgctgatatgtccaaagtagacggcaaacttagttttaaagtgggttgtattcagattgtttatgttcataaattcttcatgtctcttttgaacttcctcaacaatttccaaactgctaaagaagctttgagtacagccacagtccaggctgcagaaagagctgcttccagcatgaaagacttggctcaaaagagtttccgccttttgatggatattaatttgaaagcaccagttattattattcctcagtcttcagtatcacctaatgctgttatagcagatctgggtttaatcagagttgaaaacaagtttagcttggttcctatggaacattattctcttcctccagtcattgataaaatgaacatcgaactcactcagttgaagctgtcaagaactattttgcaggctagcttgccacaaaatgacattgaaattttaaaaccagtcaacatgcttttgtccatacagcgaaacttagcagcagcatggtatgtgcaaattccagggatggagataaaaggaaaactaaaacctatgcaggttgctctcagtgaagatgacttgacagttttaatgaaaattttgctagaaaatcttggagaagcttcctcacaaccaagccctacacagtctgtgcaggagactgtaagagtgagaaaagttgatgtttcaagtgtacctgaccatctcaaagaacaagaagattggacagactcaaagctctctatgaaccagattgtcagtctccaatttgactttcactttgaatctctttccattatcctttataacaatgatatcaaccaggaatctggagttgcatttcataatgacagtttccaacttggtgaactcagactacatcttatggcctcctcagggaagatgtttaaggatggctcaatgaatgtcagcgttaaacttaagacatgcacccttgatgatctcagagaaggaattgagagagcaacatcgagaatgattgacagaaagaatgaccaagataacaacagttctatgattgatataagttacaaacaagacaaaaatggaagtcaaattgatgctgttcttgacaagctgtatgtatgtgccagtgtggaatttctgatgactgtggcagatttctttatcaaagctgtgcctcagagtccagaaaatgtggcaaaagaaacacagattttaccaagacagactgccacagggaaggtcaagatagagaaagatgactctgttagaccaaatatgactttaaaggccatgatcacagatccagaagtggtatttgttgccagcctgacaaaggctgatgctcctgctctgacagcctcgtttcagtgcaacctttctctgtcaacatccaaactcgaacagatgatggaagcttctgtgagagatctgaaagtgctcgcttgcccttttctcagagaaaagagagggaaaaacattaccacagtcttgcagccctgttctttatttatggaaaaatgtacgtgggcttcaggaaagcaaaatataaatattatggttaaagaatttataattaagatttcacccataattcttaatactgtgttgacaatcatggctgcattgtctccaaaaacaaaagaagatggatccaaagatacgtctaaggaaatggaaaatctttggggtatcaaatcgattaatgattataacacttggtttcttggtgttgacacggcaacagaaataacggaaagcttcaaaggcattgaacattcactgatagaggaaaattgtggtgttgttgtagaatccattcaagttaccttagaatgtggccttggacatcgaactgtacctttattattggcagagtctaagttttcaggaaatattaaaaattggacttctctaatggctgctgttgctgacgtgacactacaggtgcactattacaatgagatccatgctgtctgggagccactgattgagagagtggaggggaagagacaatggaatttaaggcttgatgtaaagaagaacccagttcaggataaaagtttgctgccaggagatgattttattcctgagccacaaatggcaattcatatttcttcaggaaatacaatgaatataacaatatccaaaagttgtcttaatgttttcaacaatttagcaaaaggtttttcagagggcactgcttctacttttgactactctttaaaggacagagctccttttacggtaaaaaatgctgtaggtgttcccattaaggtgaagcccaattgtaatctcagagtaatgggcttccctgagaaaagtgatatttttgatgttgatgctggccagaatttggaactggagtatgccagcatggtaccttcaagtcaagggaacctatctatattgagccgtcaagaaagctccttcttcactctgaccattgtacctcatggatatacagaagttgcaaatatccctgtggccagacctggacggcgattgtataatgtacggaatcccaatgccagtcattctgactctgtcttggtacaaattgatgcaactgaagggaataaagtaattacccttcgctctcctctacagatcaaaaaccatttctccattgcatttatcatctataaatttgttaagaatgttaagctattggagcgcattgggatagccagacctgaagaggagttccatgttcctttagattcatatagatgtcaattgtttatccagccagctggaatcttagagcatcagtacaaagaatctaccacttatatttcctggaaggaagaacttcataggagcagggaagtcagatgcatgttgcagtgtccatcagtagaagtcagcttcttacctctcatagtgaatacagttgctctgcctgatgaattgagctacatatgtacacatggggaagactgggatgtagcttacattattcatctttatccttctctcactttgcggaatcttctcccatattccctaagatatttacttgagggaacagcagaaactcatgagctggcagaaggcagtactgctgatgttctgcattcgagaatcagtggtgaaataatggaattagtcctggtgaaataccagggcaaaaactggaatggacatttccgcatacgtgatacactaccagaattctttcctgtgtgtttttcttctgactccacagaagtgacgacagtcgacctgtcagtccacgtcaggagaattggcagccggatggtgctgtctgtctttagtccctattggttaatcaacaagactacccgggttctccagtatcgttcagaagatattcatgtgaaacatccagctgatttcagggatattattttattttctttcaagaagaagaacatttttactaaaaataaggtacaattaaaaatttcaaccagtgcctggtccagtagtttctcattggatacagtgggaagttatgggtgtgtgaagtgtcctgccaacaatatggagtacctggttggtgttagcatcaaaatgagcagtttcaacctttcacgaatagttaccctgactcccttttgtaccattgcaaacaagtcatcattagaactagaagttggcgagattgcatctgatggctcaatgccaactaataaatggaactatattgcttcttcagagtgccttccattttggccagaaagtttgtcaggcaaactttgtgtgagagtggtgggctgtgaaggatcttccaaaccattcttttataaccgacaggataatggcactttattgagcttagaagatctgaatgggggtatcttggtggatgtaaacactgccgaacattcaactgtcataactttttctgattaccatgagggatctgcacctgccttgataatgaaccatacaccatgggacatcctcacatacaaacagagtgggtcaccagaagaaatggtcttgctgccaagacaggctcgactttttgcctgggcagatcctactggtaccagaaaacttacatggacatatgcagcaaatgttggggaacatgatctgttaaaggatggatgtggacagtttccatatgatgcaaacatccagatacactgggtatcatttctggatgggcgccagagagttttgcttttcaccgatgatgttgccttggtttccaaagcactgcaggcagaagaaatggaacaggctgattatgaaataaccttgtctctccacagtcttgggctttcactggttaacaatgaaagcaagcaggaagtttcctatattgggataaccagttctggtgttgtttgggaggtgaaaccaaagcagaaatggaagccatttagtcaaaagcagataatcttattggaacaatcctatcagaaacatcaaatatcaagagaccatggctggattaagctagataataattttgaggtcaattttgataaagatccaatggaaatgcgcctccctattcgtagccctattaaacgagactttttatcaggaattcagattgaatttaagcagtcttctcaccagagaagtttaagggccaggttgtactggcttcaggttgataatcagttaccaggtgcaatgttccctgttgtatttcatcctgttgcccctccaaaatctattgctttagattcagagcccaagcctttcattgatgtgagtgtcatcacaagatttaatgagtacagtaaagtcttacagttcaagtattttatggtcctcattcaggaaatggccttaaaaattgatcaagggtttctaggagctattattgcactgtttaccccaacaacagaccctgaagctgaaagaagacggacaaagttaatccaacaagatattgatgctctaaatgcagaattaatggagacttcaatgactgatatgtcaattcttagtttctttgaacatttccatatttctcctgtgaagttgcatttgagtttgtctttgggttccggaggtgaagaatcagacaaagaaaaacaggaaatgtttgcagttcattctgtcaacttgctgttgaaaagcataggtgctactctgactgatgtggatgaccttatattcaaacttgcttattatgaaattcgatatcagttctacaagagagatcagcttatatggagtgttgttaggcattacagtgaacagttcttgaaacagatgtatgtccttgtattggggttagatgtacttggaaacccatttggattaattagaggtctgtctgaaggagttgaagctttattctatgaacccttccagggtgctgttcaaggccctgaagaatttgcagaggggttagtgattggagtgagaagcctctttggacacacagtaggtggtgcagcaggagttgtatctcgaatcaccggttctgttgggaaaggtttggcagcaattacaatggacaaggaatatcagcaaaaaagaagagaagagttgagtcgacagcccagagattttggagacagcctggccagaggaggaaagggctttctgcgaggagttgttggtggagtgactggaataataacaaaacctgtggaaggtgccaaaaaggaaggagctgctggattctttaaaggaattggaaaagggcttgtgggtgctgtggcccgtccaactggtggaatcgtagatatggccagtagtaccttccaaggcattcagagggcagcagaatcaactgaggaagtatctagcctccgtccccctcgcctgatccatgaagatggcatcattcgtccttatgacagacaggaatctgagggctctgacttacttgagaatcatatcaaaaagttggaaggagagacttaccgataccactgtgctattcctggaagcaagaagacaatccttatggttacaaataggcgagtgttgtgtataaaggaagttgaaatcctgggccttatgtgtgtagactggcaatgtccatttgaagattttgtatttcctcctagtgtcagtgaaaatgtgctaaaaatttcagttaaggaacagggtctgttccacaaaaaagacagtgccaatcaaggctgtgttcgaaaagtttacctgaaggacaccgccacagcagagagagcatgtaatgccattgaggatgcacagtcaacgagacagcagcaaaaattgatgaagcagtcatcagtgagacttctcagaccccaattgccatcttaatcacagacctcaggggctccaacagggagaaaaaacaatcactggtcttgtctataagtcactctgctttatcttgctaaagacaatttttcaagcaatcctttagttttagttttctggaatagctagtattgggttttctagttttttcaccttttagtttttactctaattttgtaaccatgtatatgctagcagtccacttctacgccaccacccaaatgggtcagacccttgaagaaacgtcacttcaaactcagaatgaaattttcattaatattaaaattgtgaagcaaaggtcaataggcttatatttaattaaagccttactgaagaataagaaatgagcttagaatgactagtgttctttgaaaggtttttttatttttgtttttttggggttttttttttttttgagaccgagtcttgctctgtcgcccaggctggaatgcagtggtgcgatcttggctcactgcaatctctgcctctcgggttcaagctgttctactgcctcagcctcctgagtagctgggattacaggtgtgtgccaccacgcctgggtaattttttttttttttgtatttttagtagagatgagtttcaccatgttggtcagtctagtctcgaactcctgaccttgtgatccgcatgcctcagcctcccaaagtgctgggattacaggcatgagccaccacggcccgccaaaaggctttaacccatgaacaaatgttggatcctgacattttgtttaagagtgatttgttcaataattgaactgagttaacattcttggtaaaccaggtaattgaatgaagaaaggtcactaaagggagaaatgacatgttttctattttcttttcatgaaaacactgtttttccccctaataaagcatattttactttggtgcttatttttcctccttgcagtctaataaaaaaatctggacaatcaaaccttaaaatagctacactctgccctctgtaatgtagcattcataaaaatttggaagtatttacatcctctttcaagatgagcttatatgacacaattattatttgctgatacatgaaaatactgcactttaagtttctcaagactctgaaatatgtaaaattcaatatttttatattcccagaaattgtttcttacaggttgaaagtcttttaagggcatcacaaattaacatttactcctaatgcacgcctagaatgtattttaaatacttactaagaagaatgaaaattctttggttgttttatatataaataaggcatatataatgacactgtgttctgtgagggagcaggccctgtgagaatcaattcaggacagtatttttttttgtcctttctccatccttgatcagagataaactattaaaactttaaaaaatactcaaaaatatgtaagttttttggttgaacctttagatttgctcataatgtttaacataacaacatttatttcaaatcactgaattcatggagatgtggacacgcttggtttgctctatttttgtttatgtgtgatagtggttctgtcatcatcattcatgttttttaaggcctggtcataaaactttaaattttactagtgttacttaatgtatattctaaaaagagaatgcagtaactaatgccctaaatgtttgatctctgtttgtcattactttttcaaaattatttttttctgtaaagtataatatataaaacttcttgcttaaattgaatttctatattagtggttaattgcagtttattaaagggatcattatcagtaatttcatagcaactgttctagtgttttgtgtttttaaaacagaattaggaatttgagatatctgattatatttttcatatgaatcacagctgttgacaatgtcccatatatttaagaaattatatcatactgatactatttgtaacattttgatttgatttaatctccagggacagaaataattcattggtaaagtgtaataatgcgttttttaaaaatgctttgagaggtaattacttgcatatgagagaaataaaacatttggcacattgtttacaggtgtg

SEQ ID NO: 206001 - DNA, 11923 bp, Artificial Sequence
  derived and/or modified sequence
tgcagcgctggtcgcagccctcagctgcgccgggcggttccggctcctccctctccttgtgcctcagcgccaccatggtgctggagtcggtggtcgcggacttgctgaaccgcttcctgggggactatgtggagaacctgaacaagtcccagctgaagctgggcatctggggcggaaatgtggctttagataatctacagataaaagaaaatgccctgagtgaattggatgttccttttaaagtcaaggctggccaaattgataaattaactttgaagattccttggaagaacctttatggagaagcagttgttgcgaccctggaaggattatacctgcttgttgtccctggagcaagtattaagtatgatgctgtaaaagaagaaaaatccttgcaggatgttaaacagaaagagctatcccgaattgaagaagcccttcaaaaagcagcagaaaaaggcacacattcaggggagttcatatatggcttggagaactttgtttacaaggacatcaagcctggacgtaaacgtaaaaagcacaaaaaacattttaagaaaccttttaaaggtcttgatcgttcaaaagataagccaaaagaagccaaaaaggatacatttgtggaaaaattggcaactcaagtaataaaaaatgtacaagtaaaaatcacagatattcacattaaatatgaagatgatgtcactgatccaaagcggcctctttcatttggtgtcacactgggagagcttagtctactgactgcaaatgaacactggactccatgcatattaaatgaagcagacaaaattatatacaagcttatacgacttgatagtcttagcgcctactggaatgtaaattgcagcatgtcttaccagagatcaagggaacagattttggatcagctgaaaaatgaaattcttacaagtggaaatatacccccaaattatcaatacattttccagccaatatcagcctctgcaaaactctacatgaatccttatgcagaatcagagctcaaaacgcccaaactggattgcaacatagaaatacaaaatattgccattgaactgaccaaacctcagtacttaagtatgattgaccttttggagtcagtggattatatggttaggaatgcgccttataggaaatacaagccttatttaccacttcataccaatggtcgacgatggtggaaatatgcaattgattctgttcttgaagttcatataagaaggtatacacagatgtggtcatggagtaacataaaaaagcacaggcagttactcaagagttataaaattgcctacaaaaacaagttaacacagtctaaagtctcagaagaaatacagaaagaaattcaggacttggagaagactctagatgtttttaacataattttagcaaggcaacaagcacaagttgaggtgattcggtctgggcaaaaattaaggaaaaagtctgctgacacaggcgagaaacgtggaggctggtttagtgggttgtggggtaagaaagagtctaagaaaaaggacgaagaatcattgattcctgaaactattgatgaccttatgactccagaggaaaaagataaactcttcactgccattggttatagtgagagtacccacaacctaactttacctaagcagtatgttgcccatattatgaccctgaagttagtaagcacctctgttacgataagagaaaacaagaatattccagaaatactaaaaattcagataattggcctgggcactcaagtatctcagcgaccaggagcacaagcacttaaggtagaagcgaaattagaacactggtatataacaggtttgagacagcaggatattgtgccatcacttgtggcttcaattggtgacactacatcatccttgcttaaaattaaatttgaaaccaatccggaggatagtcctgctgaccagactctgattgttcagtcccagcctgtggaggtcatctatgatgctaaaactgtcaatgcagtggttgaattctttcaatcaaataagggattggatcttgagcaaataacatcagcaacattgatgaagctggaagaaattaaggagagaacagctacaggacttacacatattattgaaactcgaaaagtccttgatttaaggataaatctgaagccttcttatctagtagttccacagacgggtttccaccatgaaaagtcagatcttctgattttagattttggtacatttcagctcaacagtaaagatcaaggtttacagaagactactaattcatctctggaagaaataatggataaggcatatgacaagtttgatgttgaaataaaaaatgtacaactactttttgcaagagcagaggaaacctggaaaaagtgtcgatttcagcatccatcaactatgcatatattgcaacccatggatattcatgttgagttggctaaggccatggtagaaaaagacattagaatggccagatttaaagtgtcaggaggacttcctttgatgcatgtgagaatttctgaccagaagatgaaagatgtgctatatttgatgaacagtatacctttgccacagaaatcatcagcccagtctccagagagacaggtatcctcaattcctattatttcaggtggtacaaaaggtctacttggtacttcactattgctagacactgtggaatcagagtctgatgatgagtattttgatgctgaagatggagaaccacagacttgtaaaagtatgaaaggatcagaacttaaaaaagctgcagaggtcccaaatgaggagctcatcaatcttctactcaagtttgaaattaaagaagtgattttggaatttactaaacagcagaaagaagaagatacaattctagtatttaatgttactcagttaggaacagaggccacaatgagaacatttgacttaactgtggtatcttatttaaagaaaatcagcttggattatcatgaaattgaaggatccaaaaggaagccccttcacttgattagctcttctgacaaacctggattagatcttttgaaagtggagtatattaaggctgataagaatggacctagttttcaaactgcttttggaaaaactgaacaaacagttaaggtggccttttcatctttaaatctgttgctgcaaacacaagctcttgtcgcttctattaattacctcacaaccattattccatctgatgatcaaagcataagtgttgctaaggaggtacaaatttcaactgaaaaacaacaaaaaaattcaactctgccaaaagcgattgtatcctccagagatagtgacattattgatttcaggctatttgccaagttgaatgctttctgtgtcattgtttgcaacgaaaagaacaatatcgccgaaatcaagattcaaggactggattcctccctttctctccagtcaagaaagcagtcactttttgcccgactagaaaatattattgtcacagatgttgatccaaagacagttcataagaaagctgtgtcaataatgggaaatgaagttttccgttttaatttggatttgtatccagatgctactgagggggatttgtatactgacatgtccaaagtggatggtgtgctgtctctgaatgttggctgtattcagattgtctatcttcataaattccttatgtcacttctgaacttcctgaataatttccagacagccaaagagtctctgagtgctgccactgcccaggctgcagaaagggctgccacaagtgtgaaagatcttgcccagaggagttttcgtgtttccatcaatattgatttgaaagcaccggttatagtcatcccacagtcttctatttccaccaatgcagtagtggtagatcttgggttaatcagagttcataatcagttcagtctggtgtctgatgaagactacttaaatcctccagtaattgatagaatggatgtgcagctaacaaagcttacactttataggacagtgatccagccaggcatctaccatcctgatattcagctgttgcacccaattaacttggaatttcttgtaaatcggaatctagctgcatcttggtaccacaaggtgcctgttgtggaaattaaaggacatcttgattcaatgaatgttagtctaaatcaagaagatcttaatcttttatttaggatactaacagaaaatctctgtgagggtactgaagacttggataaagtgaaaccaagagtacaagagacaggtgaaattaaagagccccttgaaatctctatatcacaagatgtacatgattcaaaaaatactttaacaactggagtggaagaaattaggtctgtagacatcattaatatgctgctgaattttgaaattaaagaggttgtggttactttgatgaaaaaatcagaaaagaaaggaaggcctttacatgagctaaatgtcctgcaacttggaatggaagctaaagttaaaacctatgacatgactgctaaagcttatctaaaaaaaattagtatgcagtgctttgatttcactgactctaaaggggaacctcttcacattattaactcttctaatgtgactgacgaaccccttctgaaaatgttactgacaaaggcagacagtgatggaccagaatttaaaactattcatgacagtaccaaacagagactgaaggtttcatttgcatccttagacttagtacttcatttggaagctttactttccttcatggattttttatcatctgctgctccattctctgagccttcctcttctgagaaggaatccgagctgaaaccacttgtgggggagtccagaagtatcgctgtcaaagctgtatccagcaacatttcccaaaaggatgtgtttgatttaaagatcacagctgaattaaatgcatttaatgtctttgtctgtgatcagaagtgtaacattgcagatattaaaatacatggaatggatgcctctatttctgtgaagcctaagcagactgatgtgtttgccagacttaaagatattatagttatgaatgtagatttgcagtccattcacaaaaaggctgtctctattttgggagatgaagtctttaggttccaactgactctttatccagatgccacagaaggagaggcctatgctgatatgtccaaagtagacggcaaacttagttttaaagtgggttgtattcagattgtttatgttcataaattcttcatgtctcttttgaacttcctcaacaatttccaaactgctaaagaagctttgagtacagccacagtccaggctgcagaaagagctgcttccagcatgaaagacttggctcaaaagagtttccgccttttgatggatattaatttgaaagcaccagttattattattcctcagtcttcagtatcacctaatgctgttatagcagatctgggtttaatcagagttgaaaacaagtttagcttggttcctatggaacattattctcttcctccagtcattgataaaatgaacatcgaactcactcagttgaagctgtcaagaactattttgcaggctagcttgccacaaaatgacattgaaattttaaaaccagtcaacatgcttttgtccatacagcgaaacttagcagcagcatggtatgtgcaaattccagggatggagataaaaggaaaactaaaacctatgcaggttgctctcagtgaagatgacttgacagttttaatgaaaattttgctagaaaatcttggagaagcttcctcacaaccaagccctacacagtctgtgcaggagactgtaagagtgagaaaagttgatgtttcaagtgtacctgaccatctcaaagaacaagaagattggacagactcaaagctctctatgaaccagattgtcagtctccaatttgactttcactttgaatctctttccattatcctttataacaatgatatcaaccaggaatctggagttgcatttcataatgacagtttccaacttggtgaactcagactacatcttatggcctcctcagggaagatgtttaaggatggctcaatgaatgtcagcgttaaacttaagacatgcacccttgatgatctcagagaaggaattgagagagcaacatcgagaatgattgacagaaagaatgaccaagataacaacagttctatgattgatataagttacaaacaagacaaaaatggaagtcaaattgatgctgttcttgacaagctgtatgtatgtgccagtgtggaatttctgatgactgtggcagatttctttatcaaagctgtgcctcagagtccagaaaatgtggcaaaagaaacacagattttaccaagacagactgccacagggaaggtcaagatagagaaagatgactctgttagaccaaatatgactttaaaggccatgatcacagatccagaagtggtatttgttgccagcctgacaaaggctgatgctcctgctctgacagcctcgtttcagtgcaacctttctctgtcaacatccaaactcgaacagatgatggaagcttctgtgagagatctgaaagtgctcgcttgcccttttctcagagaaaagagagggaaaaacattaccacagtcttgcagccctgttctttatttatggaaaaatgtacgtgggcttcaggaaagcaaaatataaatattatggttaaagaatttataattaagatttcacccataattcttaatactgtgttgacaatcatggctgcattgtctccaaaaacaaaagaagatggatccaaagatacgtctaaggaaatggaaaatctttggggtatcaaatcgattaatgattataacacttggtttcttggtgttgacacggcaacagaaataacggaaagcttcaaaggcattgaacattcactgatagaggaaaattgtggtgttgttgtagaatccattcaagttaccttagaatgtggccttggacatcgaactgtacctttattattggcagagtctaagttttcaggaaatattaaaaattggacttctctaatggctgctgttgctgacgtgacactacaggtgcactattacaatgagatccatgctgtctgggagccactgattgagagagtggaggggaagagacaatggaatttaaggcttgatgtaaagaagaacccagttcaggataaaagtttgctgccaggagatgattttattcctgagccacaaatggcaattcatatttcttcaggaaatacaatgaatataacaatatccaaaagttgtcttaatgttttcaacaatttagcaaaaggtttttcagagggcactgcttctacttttgactactctttaaaggacagagctccttttacggtaaaaaatgctgtaggtgttcccattaaggtgaagcccaattgtaatctcagagtaatgggcttccctgagaaaagtgatatttttgatgttgatgctggccagaatttggaactggagtatgccagcatggtaccttcaagtcaagggaacctatctatattgagccgtcaagaaagctccttcttcactctgaccattgtacctcatggatatacagaagttgcaaatatccctgtggccagacctggacggcgattgtataatgtacggaatcccaatgccagtcattctgactctgtcttggtacaaattgatgcaactgaagggaataaagtaattacccttcgctctcctctacagatcaaaaaccatttctccattgcatttatcatctataaatttgttaagaatgttaagctattggagcgcattgggatagccagacctgaagaggagttccatgttcctttagattcatatagatgtcaattgtttatccagccagctggaatcttagagcatcagtacaaagaatctaccacttatatttcctggaaggaagaacttcataggagcagggaagtcagatgcatgttgcagtgtccatcagtagaagtcagcttcttacctctcatagtgaatacagttgctctgcctgatgaattgagctacatatgtacacatggggaagactgggatgtagcttacattattcatctttatccttctctcactttgcggaatcttctcccatattccctaagatatttacttgagggaacagcagaaactcatgagctggcagaaggcagtactgctgatgttctgcattcgagaatcagtggtgaaataatggaattagtcctggtgaaataccagggcaaaaactggaatggacatttccgcatacgtgatacactaccagaattctttcctgtgtgtttttcttctgactccacagaagtgacgacagtcgacctgtcagtccacgtcaggagaattggcagccggatggtgctgtctgtctttagtccctattggttaatcaacaagactacccgggttctccagtatcgttcagaagatattcatgtgaaacatccagctgatttcagggatattattttattttctttcaagaagaagaacatttttactaaaaataaggtacaattaaaaatttcaaccagtgcctggtccagtagtttctcattggatacagtgggaagttatgggtgtgtgaagtgtcctgccaacaatatggagtacctggttggtgttagcatcaaaatgagcagtttcaacctttcacgaatagttaccctgactcccttttgtaccattgcaaacaagtcatcattagaactagaagttggcgagattgcatctgatggctcaatgccaactaataaatggaactatattgcttcttcagagtgccttccattttggccagaaagtttgtcaggcaaactttgtgtgagagtggtgggctgtgaaggatcttccaaaccattcttttataaccgacaggataatggcactttattgagcttagaagatctgaatgggggtatcttggtggatgtaaacactgccgaacattcaactgtcataactttttctgattaccatgagggatctgcacctgccttgataatgaaccatacaccatgggacatcctcacatacaaacagagtgggtcaccagaagaaatggtcttgctgccaagacaggctcgactttttgcctgggcagatcctactggtaccagaaaacttacatggacatatgcagcaaatgttggggaacatgatctgttaaaggatggatgtggacagtttccatatgatgcaaacatccagatacactgggtatcatttctggatgggcgccagagagttttgcttttcaccgatgatgttgccttggtttccaaagcactgcaggcagaagaaatggaacaggctgattatgaaataaccttgtctctccacagtcttgggctttcactggttaacaatgaaagcaagcaggaagtttcctatattgggataaccagttctggtgttgtttgggaggtgaaaccaaagcagaaatggaagccatttagtcaaaagcagataatcttattggaacaatcctatcagaaacatcaaatatcaagagaccatggctggattaagctagataataattttgaggtcaattttgataaagatccaatggaaatgcgcctccctattcgtagccctattaaacgagactttttatcaggaattcagattgaatttaagcagtcttctcaccagagaagtttaagggccaggttgtactggcttcaggttgataatcagttaccaggtgcaatgttccctgttgtatttcatcctgttgcccctccaaaatctattgctttagattcagagcccaagcctttcattgatgtgagtgtcatcacaagatttaatgagtacagtaaagtcttacagttcaagtattttatggtcctcattcaggaaatggccttaaaaattgatcaagggtttctaggagctattattgcactgtttaccccaacaacagaccctgaagctgaaagaagacggacaaagttaatccaacaagatattgatgctctaaatgcagaattaatggagacttcaatgactgatatgtcaattcttagtttctttgaacatttccatatttctcctgtgaagttgcatttgagtttgtctttgggttccggaggtgaagaatcagacaaagaaaaacaggaaatgtttgcagttcattctgtcaacttgctgttgaaaagcataggtgctactctgactgatgtggatgaccttatattcaaacttgcttattatgaaattcgatatcagttctacaagagagatcagcttatatggagtgttgttaggcattacagtgaacagttcttgaaacagatgtatgtccttgtattggggttagatgtacttggaaacccatttggattaattagaggtctgtctgaaggagttgaagctttattctatgaacccttccagggtgctgttcaaggccctgaagaatttgcagaggggttagtgattggagtgagaagcctctttggacacacagtaggtggtgcagcaggagttgtatctcgaatcaccggttctgttgggaaaggtttggcagcaattacaatggacaaggaatatcagcaaaaaagaagagaagagttgagtcgacagcccagagattttggagacagcctggccagaggaggaaagggctttctgcgaggagttgttggtggagtgactggaataataacaaaacctgtggaaggtgccaaaaaggaaggagctgctggattctttaaaggaattggaaaagggcttgtgggtgctgtggcccgtccaactggtggaatcgtagatatggccagtagtaccttccaaggcattcagagggcagcagaatcaactgaggaagtatctagcctccgtccccctcgcctgatccatgaagatggcatcattcgtccttatgacagacaggaatctgagggctctgacttacttgagcaagaactggaaatacaggaataaatgtttcctaaactactacttgatttcatccttaaaaatcaaaacaaactgtggtgttaattgactgtgtgtgaattccattgtcaattttaatgaaattttctttaaaactctcacctccatctgaacttttcatagtagtgggattgactacaaataaaaacttgtggtattcctggtaatactgtccagaaataagagattagtataaaatattaaaggatgcagagaatcagctctcttctgcgtttaatagatgaaagcctttattgagctcagaagcagatactgttactatcatttcgaaaattttatcttatggtgttcatgtgcatttcaggtaaaattgaaaaacaggacaattattatgtccaattaatatgtttatgtttgtgagtcttgatgatggaattacatagctttctgtttcacaaatggctctaaatttgcttaagttacgggactattacctggagcatctgctttaataattgaattgtcagttgctctgagcctgcccttagacctcaagtaataaatagttggcacatgaattttgaggatatgtttcctcttccctctttttcctatttaaccccttggtactgttgctaaataaatgatagccattttataattatgttatatacattttcagcctttagcatttctgcttttcaaaaattgaatctccttgttggttatgcttatttcataattattagttttaattaatgtagatagaagttgaacatgtaattaggcaaattgctgtgtggcacttgaatacatagatttctttattttcaaaaaccaaccttttgcttttaaatccttagagagggtttattatcttagagaaaaaataattataatcattatttttgaaattagtatcctcttaattctcaacataagttatgtttcaatttcttttttttgtaataaatgatggaaatgtt

SEQ ID NO: 206002 - protein, 1256 aa, Artificial Sequence
  derived and/or modified sequence
MPLPDGARTPGGVCREARGGGYTNRTFEFDDGQCAPRRPCAGDGALLDTAGFKMSDLDSEVLPLPPRYRFRDLLLGDPSFQNDDRVQVEFYVNENTFKERLKLFFIKNQRSSLRIRLFNFSLKLLTCLLYIVRVLLDDPALGIGCWGCPKQNYSFNDSSSEINWAPILWVERKMTLWAIQVIVAIISFLETMLLIYLSYKGNIWEQIFRVSFVLEMINTLPFIITIFWPPLRNLFIPVFLNCWLAKHALENMINDFHRAILRTQSAMFNQVLILFCTLLCLVFTGTCGIQHLERAGENLSLLTSFYFCIVTFSTVGYGDVTPKIWPSQLLVVIMICVALVVLPLQFEELVYLWMERQKSGGNYSRHRAQTEKHVVLCVSSLKIDLLMDFLNEFYAHPRLQDYYVVILCPTEMDVQVRRVLQIPLWSQRVIYLQGSALKDQDLMRAKMDNGEACFILSSRNEVDRTAADHQTILRAWAVKDFAPNCPLYVQILKPENKFHVKFADHVVCEEECKYAMLALNCICPATSTLITLLVHTSRGQEGQESPEQWQRMYGRCSGNEVYHIRMGDSKFFREYEGKSFTYAAFHAHKKYGVCLIGLKREDNKSILLNPGPRHILAASDTCFYINITKEENSAFIFKQEEKRKKRAFSGQGLHEGPARLPVHSIIASMGTVAMDLQGTEHRPTQSGGGGGGSKLALPTENGSGSRRPSIAPVLELADSSALLPCDLLSDQSEDEVTPSDDEGLSVVEYVKGYPPNSPYIGSSPTLCHLLPVKAPFCCLRLDKGCKHNSYEDAKAYGFKNKLIIVSAETAGNGLYNFIVPLRAYYRSRKELNPIVLLLDNKPDHHFLEAICCFPMVYYMEGSVDNLDSLLQCGIIYADNLVVVDKESTMSAEEDYMADAKTIVNVQTMFRLFPSLSITTELTHPSNMRFMQFRAKDSYSLALSKLEKRERENGSNLAFMFRLPFAAGRVFSISMLDTLLYQSFVKDYMITITRLLLGLDTTPGSGYLCAMKITEGDLWIRTYGRLFQKLCSSSAEIPIGIYRTESHVFSTSEPHDLRAQSQISVNVEDCEDTREVKGPWGSRAGTGGSSQGRHTGGGDPAEHPLLRRKSLQWARRLSRKAPKQAGRAAAAEWISQQRLSLYRRSERQELSELVKNRMKHLGLPTTGYEDVANLTASDVMNRVNLGYLQDEMNDHQNTLSYVLINPPPDTRLEPSDIVYLIRSDPLAHVASSSQSRKSSCSHKLSSCNPETRDETQL

SEQ ID NO: 206003 - protein, 1235 aa, Artificial Sequence
  derived and/or modified sequence
MPLPDGARTPGGVCREARGGGYTNRTFEFDDGQCAPRRPCAGDGALLDTAGFKMSDLDSEVLPLPPRYRFRDLLLGDPSFQNDDRVQVEFYVNENTFKERLKLFFIKNQRSSLRIRLFNFSLKLLTCLLYIVRVLLDDPALGIGCWGCPKQNYSFNDSSSEINWAPILWVERKMTLWAIQVIVAIISFLETMLLIYLSYKGNIWEQIFRVSFVLEMINTLPFIITIFWPPLRNLFIPVFLNCWLAKHALENMINDFHRAILRTQSAMFNQVLILFCTLLCLVFTGTCGIQHLERAGENLSLLTSFYFCIVTFSTVGYGDVTPKIWPSQLLVVIMICVALVVLPLQFEELVYLWMERQKSGGNYSRHRAQTEKHVVLCVSSLKIDLLMDFLNEFYAHPRLQDYYVVILCPTEMDVQVRRVLQIPLWSQRVIYLQGSALKDQDLMRAKMDNGEACFILSSRNEVDRTAADHQTILRAWAVKDFAPNCPLYVQILKPENKFHVKFADHVVCEEECKYAMLALNCICPATSTLITLLVHTSRGQEGQESPEQWQRMYGRCSGNEVYHIRMGDSKFFREYEGKSFTYAAFHAHKKYGVCLIGLKREDNKSILLNPGPRHILAASDTCFYINITKEENSAFIFKQEEKRKKRAFSGQGLHEGPARLPVHSIIASMGTVAMDLQGTEHRPTQSGGGGGGSKLALPTENGSGSRRPSIAPVLELADSSALLPCDLLSDQSEDEVTPSDDEGLSVVEYVKGYPPNSPYIGSSPTLCHLLPVKAPFCCLRLDKGCKHNSYEDAKAYGFKNKLIIVSAETAGNGLYNFIVPLRAYYRSRKELNPIVLLLDNKPDHHFLEAICCFPMVYYMEGSVDNLDSLLQCGIIYADNLVVVDKESTMSAEEDYMADAKTIVNVQTMFRLFPSLSITTELTHPSNMRFMQFRAKDSYSLALSKLEKRERENGSNLAFMFRLPFAAGRVFSISMLDTLLYQSFVKDYMITITRLLLGLDTTPGSGYLCAMKITEGDLWIRTYGRLFQKLCSSSAEIPIGIYRTESHVFSTSEPHDLRAQSQISVNVEDCEDTREVKGPWGSRAGTGGSSQGRHTGGGDPAEHPLLRRKSLQWARRLSRKAPKQAGRAAAAEWISQQRLSLYRRSERQELSELVKNRMKHLGLPTTGYDEMNDHQNTLSYVLINPPPDTRLEPSDIVYLIRSDPLAHVASSSQSRKSSCSHKLSSCNPETRDETQL

SEQ ID NO: 206004 - DNA, 3771 bp, Artificial Sequence
  derived and/or modified sequence
atgcccttacctgacggcgctcgaacacccggaggtgtgtgcagggaggctcgcgggggaggatatacaaataggacctttgagtttgacgatggacaatgcgccccccgccggccgtgtgcaggggacggagctctcctggacaccgccggtttcaagatgtcagacctggatagcgaagtcctccctctgccacctaggtatcgattccgggatcttttgctgggagaccccagctttcaaaatgacgatcgagtacaagtagaattctatgttaacgaaaacacattcaaggagaggttgaagctgttcttcattaaaaatcagagatccagcctgcgcataaggctgttcaacttcagtctcaagctgttgacttgcctcctgtacatcgtgagggtcctgctggatgaccctgcccttgggattgggtgctggggatgtcccaagcagaactattcattcaacgatagcagtagcgagatcaactgggcccctatcttgtgggtggagcgcaaaatgactctttgggccatacaagtgatagtcgccataattagtttcctggagaccatgttgctaatctacctgtcctataaggggaacatttgggagcagattttccgagtgagtttcgtgctggagatgatcaatacccttcccttcatcatcacaattttttggccacccctgaggaacctgttcatcccggtgttcctcaactgctggttggccaaacacgccctagagaatatgatcaacgatttccaccgggcaattttgcgcacccagtctgctatgttcaatcaggtgctgatcctcttttgtacgctcctgtgtttggtgtttactggcacctgcggcattcagcatcttgaaagagctggcgagaatctctcactactgacctccttttacttctgcatcgtgaccttctcaaccgtggggtacggggacgtcacccctaaaatctggccttcccagctgcttgtggtgattatgatatgtgtggcccttgtagtgctcccacttcagttcgaggaattggtttatctctggatggagagacagaagtccggcggaaactattctcgccatagggcccagacagagaagcatgtagtactctgcgtttctagcctgaaaatcgacctgctgatggactttctcaacgaattttatgcccatccccggttacaggactattacgtggtcattctttgcccaactgaaatggatgtgcaggttagaagggttctgcaaatcccgctgtggtcgcagcgagtgatctatctgcagggtagcgctctcaaggaccaggacttgatgcgcgccaaaatggacaacggggaggcctgttttatactcagttctagaaatgaggtggaccggactgccgcagatcatcagactatcctgagggcttgggcggtcaaagatttcgcccctaactgcccactctacgtccagatcctgaagcccgaaaacaagtttcatgtgaaatttgccgaccatgttgtctgtgaggaggaatgtaaatatgcaatgttggctctgaattgtatttgccccgcaaccagcactctcattactctgctcgtgcatacatccaggggccaggagggccaggaaagtcctgaacagtggcagaggatgtatggccgttgtagcggcaatgaagtgtatcacatcaggatgggggacagcaaattcttccgcgaatacgagggaaagagcttcacctacgctgcatttcacgcacataagaaatacggggtttgcctcatcggtttaaaaagggaggataataaatctatcctactgaaccctggcccccgacatattttagctgcttcagacacatgcttttatatcaatatcacaaaagaggaaaactccgcattcatctttaagcaagaggagaagagaaagaagagggcatttagtggtcaagggttgcacgaggggcccgcaagactgcccgtccattccattatagccagtatgggaactgtggccatggacctacagggcacagaacaccggccgactcagtctggaggcggtggggggggctcaaaacttgctctcccaacagaaaatggctctggctctcgccgtccctccatcgcaccagtgctagaactggccgactccagtgccttgctgccgtgtgacttgctttcagaccagtctgaggatgaagtgacgccgtctgatgatgagggactgagcgtggtggagtatgtgaaaggctacccccccaattctccctacattggcagcagccctaccctctgccacctacttcctgttaaggctcccttttgttgcttacgccttgataaaggttgtaagcataattcttatgaggacgcaaaagcatacgggttcaaaaataaactcatcatagtgagcgcggaaactgctggaaatgggctgtataattttatcgtcccactgagggcatactacaggtcgagaaaagagctgaacccaattgttctgttgctggacaacaaacccgatcatcattttcttgaagccatttgttgtttcccaatggtctactacatggaggggtctgtcgacaacttggattctcttctccagtgtggaatcatctacgccgataatcttgtggtggtggataaggagagcacaatgagtgctgaggaagactacatggccgatgcaaaaactattgtgaacgtgcagactatgttccgtctgttcccctctctctccatcaccacagagctgacccaccccagcaatatgcgcttcatgcagtttcgcgccaaagatagttacagtctggctttaagcaaacttgagaagcgcgaaagggagaacggatctaacctcgctttcatgttcaggctacccttcgccgctggtagagttttttcaatctcaatgctggacacgctgttataccagtctttcgtgaaggactacatgattaccatcactcgactgcttctgggcctggacacaacccctgggagcggttacctctgtgcgatgaagatcacggagggagatttgtggattcgaacatatggtcgtctttttcagaagctttgtagttctagcgccgagatccccatcggcatctacaggacagagagtcatgtattctctacttctgagccccacgatctgagagcgcagtctcaaatctctgttaacgtggaggactgcgaagatacccgggaagtcaaaggaccatggggaagcagggcagggaccggcggcagcagccaagggaggcataccggaggcggagatcctgcagagcacccgctcttacgcagaaaatcattacagtgggcaaggcgcctgagcaggaaagcacccaaacaggctgggcgcgctgcagccgcggaatggatctcccagcagcgattgtccttgtacaggcgcagcgagcggcaggagctcagtgagctcgtgaagaacagaatgaagcatctgggtcttccaaccacaggatatgaagacgtggccaacctcacagcatccgacgtgatgaaccgggttaacctcggatatttgcaggacgagatgaacgaccaccagaacacactgagctacgtgcttattaaccctccgcctgatacacgacttgagcctagcgacatcgtatacctaattagaagtgaccctcttgcacacgtagcttctagcagtcagtcccgcaagagttcgtgctcacacaagctttcctcgtgcaatcctgaaactcgggacgaaacacagctctag

SEQ ID NO: 206005 - DNA, 3708 bp, Artificial Sequence
  derived and/or modified sequence
atgcctctccccgacggcgcccgcacccccggcggcgtgtgtcgagaggcgcgaggaggaggctacacaaatcgaactttcgagttcgatgacggacagtgtgctccccgccgcccgtgcgcaggggacggggcccttctcgacactgcaggatttaagatgtctgacttagattctgaggttctaccactcccgccacgctacaggttcagggatctgctgctgggtgatcctagtttccaaaatgatgatagggtgcaggtggagttttacgtgaatgagaatacattcaaagaaaggctcaagctgttctttattaagaaccagcggtccagtcttcgaatcagattattcaacttctcccttaagcttcttacttgtctgctgtacattgtgcgagttctcttggacgaccctgctctcgggattggttgctgggggtgccccaagcaaaattattccttcaatgacagctcctctgagatcaactgggcccctattttatgggtggaaagaaagatgactctttgggccatccaagttattgttgctattatcagctttttggagactatgctgttgatctacctgagctacaaaggcaacatctgggagcagatctttagggtgagtttcgtgctggagatgatcaatacactgccatttatcatcacaattttctggcccccgctacgaaacttgtttatccccgtgttcttgaactgttggctggctaagcacgctctggagaatatgatcaatgattttcaccgagctattctgcgcacccagtccgccatgttcaatcaggttttaatcctcttctgcactttgctctgtctggtgtttacaggcacatgcgggatacaacacctcgaacgcgcgggagagaatttatcactacttacaagtttctatttctgcattgtcaccttcagcaccgtgggttacggcgatgtgacacctaaaatctggccttctcagttgctcgtggtgatcatgatctgcgttgccctggttgttctgccacttcagtttgaggaacttgtttacctgtggatggagagacaaaagagtggaggtaactactctaggcacagggcgcagactgagaagcacgtcgttctgtgcgtctcatctttaaaaattgaccttctgatggacttcttgaatgagttctatgcccatcctcgcctccaggattattacgtagtcattctgtgtccgactgaaatggacgtacaggtgaggagagtcctacagattcccctctggtcacagagggttatttacctccagggctctgcactgaaagaccaggatttgatgcgcgcaaaaatggataacggagaagcttgcttcatcctgtcaagtcggaatgaagtggataggaccgccgcagaccatcaaactatcctccgcgcttgggccgtgaaagacttcgcacccaactgcccactttacgtgcaaattctaaaacccgagaacaagttccacgttaaatttgccgaccacgttgtatgtgaggaggagtgtaaatacgctatgctcgcgctcaactgcatctgtccagctacgagcactttaatcacactcctggttcatacctcccgcgggcaggagggacaagaatccccagaacaatggcagcgtatgtatggacggtgctctgggaatgaggtgtaccacataaggatgggggactcgaagttctttcgagagtatgaaggcaagagctttacttacgcagctttccacgctcacaaaaagtatggggtatgcctaataggtctgaagagggaggacaacaagtccatcctgctgaatcccggaccaaggcatatcctcgctgctagcgacacctgcttctacattaatattactaaagaggagaatagcgcgttcattttcaaacaagaggaaaaacgcaagaagcgagccttttctggacagggtcttcacgaaggtcccgcgcggcttcccgtacattcaatcatagcaagcatgggaaccgttgcaatggatctacaaggtaccgaacaccgcccaacacagtctggcggcggaggtggaggttctaagctggccttgccgactgagaatgggtcaggctcaagacggccaagcatcgcgcctgttctagaattggcagactccagtgctctgctcccttgtgacctgcttagtgatcagagcgaagatgaggtgactccgagcgatgacgagggcctctctgtggtggagtatgtcaagggatatcccccaaattcaccctatatcggatccagtccaaccctctgccacttgctccccgtgaaggcccccttctgctgccttcggctcgacaagggttgcaagcataactcttatgaagatgcgaaggcgtacggcttcaagaacaagctcattatcgtgtctgctgaaaccgcaggtaatggtctctataacttcatcgtgcctctgagggcctactacaggtctagaaaagaactcaatcctatcgtgttgctgcttgacaacaaaccagaccaccactttctagaggctatctgctgctttccaatggtatactacatggagggtagcgtcgataatctcgactctctgttacagtgcggcattatttacgcagataacctggtcgttgttgataaggagagcactatgtctgccgaggaagactatatggccgatgccaagacaatcgttaacgtccagacaatgttcagactattcccatcgctgtccatcacaactgaacttactcaccctagtaatatgagatttatgcaattcagggccaaggacagctattctctcgcgctgtctaaactggagaagagggagcgggagaacggatcaaatcttgcctttatgttcaggctgccattcgcggctggcagggttttcagtattagcatgctggatacacttctgtatcagtctttcgttaaggactatatgatcactattacacggctgcttctcggtctcgataccacgcctggaagtggatacttgtgcgcaatgaaaattacggagggcgatttatggatcagaacctacggccgactttttcaaaagctatgcagctcttccgccgaaatcccaattggcatctatagaacggaaagccacgtgttcagcacctctgagccccacgacctgagggcccagtctcagatttctgttaatgttgaagactgcgaggacaccagggaggtgaaaggaccctggggatccagagcaggcacaggagggagctcacagggaagacatacaggaggcggagacccagccgagcatcccctactgagaaggaagagcctgcagtgggccagacgcctcagcaggaaagctcctaaacaggccggaagagcagctgctgctgagtggataagccaacaacgtctgtctctgtatcgaagatcggaacggcaggaattgagcgaattagtgaaaaatagaatgaaacatttgggcctccccacgaccggatatgatgaaatgaacgaccatcagaacacactaagttacgttctcattaatccccccccagataccagactggaaccttctgacatcgtttatttgatacgttcagatcctctggcccacgttgcctcaagttcacaatctcgcaaatcctcctgttcccacaagctgtccagctgcaaccccgaaacacgtgacgaaacccaactgtag

SEQ ID NO: 206006 - DNA, 3771 bp, Artificial Sequence
  derived and/or modified sequence
atgcccctgcctgatggagcccggacccctgggggcgtgtgccgggaggcccggggcggcggctacaccaacagaacatttgaatttgatgatggccagtgtgccccccggcggccctgtgctggagatggagccctgctggacacagctggcttcaagatgtctgacctggacagcgaggtgctgcccctgcccccacgctaccgcttccgggacctgctgctgggggaccccagcttccagaatgatgacagagtgcaggtggagttctacgtgaatgaaaacaccttcaaggagcggctgaagctgttcttcatcaagaaccagaggagcagcctgcgcatccgcctcttcaacttcagcctgaagctgctgacctgcctgctgtacatcgtgcgggtgctgctggatgatcctgccctgggcatcggctgctggggctgccccaagcagaactacagcttcaatgacagcagcagcgagatcaactgggcccccatcctgtgggtggagaggaagatgaccctgtgggccatccaggtgattgtggccatcatctccttcctggagaccatgctgctgatctacctgagctacaagggcaacatctgggagcagatcttccgggtgtcctttgtgctggagatgatcaacaccctgcccttcatcatcaccatcttctggccacccctgaggaacctcttcatccctgtgttcctgaactgctggctggccaagcacgccctggagaacatgatcaatgacttccaccgggccatcctgcggacccagagcgccatgttcaaccaggtgctgatcctcttctgcaccctgctgtgcctggtgttcaccggcacctgtggcatccagcacctggagagagctggggagaacctgagcctgctgaccagcttctacttctgcatcgtgaccttcagcacagtgggctatggagatgtgacccccaagatctggcccagccagctgctggtggtgatcatgatctgtgtggccctggtggtgctgcccctgcagtttgaggagctggtgtacctgtggatggagcggcagaagagcggcggcaactacagccgccaccgggcccagacagagaagcacgtggtgctgtgtgtgagcagcctgaagattgacctgctgatggacttcctgaatgagttctacgcccacccccggctgcaggactactacgtggtgatcctgtgccccacagagatggatgtgcaggtgagaagagtgctgcagatccccctgtggagccagagggtcatctacctgcagggcagcgccctgaaggaccaggacctgatgagggccaagatggacaatggagaggcctgcttcatcctgagcagcagaaatgaggtggacagaacagctgctgaccaccagaccatcctgcgggcctgggccgtgaaggactttgcccccaactgccccctgtatgtgcagatcctgaagccagagaacaagttccacgtgaagtttgctgaccacgtggtgtgtgaggaggagtgcaagtatgccatgctggccctgaactgcatctgcccagccaccagcaccctcatcaccctgctggtgcacaccagccggggccaggagggccaggagagccctgagcagtggcagaggatgtatggccgctgcagcggaaatgaggtgtaccacatccgcatgggagacagcaagttcttccgggagtatgagggcaagagcttcacctatgctgccttccacgcccacaagaagtatggagtgtgcctgattggcctgaagcgggaggacaacaagagcatcctgctgaaccctggccccaggcacatcctggccgccagtgacacctgcttctacatcaacatcaccaaggaggagaacagcgccttcatcttcaagcaggaggagaagaggaagaagagggccttcagcggccagggcctgcacgagggccctgcccggctgcctgtgcacagcatcatcgcctccatgggcaccgtggccatggacctgcagggcacagagcaccggcccacccagagcggcggcggcggcggcggcagcaagctggccctgcccacagaaaatggaagtggcagccggcggcccagcatcgcccctgtgctggagctggccgacagcagcgccctgctgccctgtgacctgctgagtgaccagagtgaagatgaggtgacccccagtgatgatgagggcctgtctgtggtggagtatgtgaagggctacccacccaacagcccctacatcggcagcagccccaccctgtgccacctgctgcctgtgaaggcccccttctgctgcctgcggctggacaagggctgcaagcacaacagctatgaagatgccaaggcctacggcttcaagaacaagctgatcatcgtgtctgctgagacagctggaaatggcctgtacaacttcatcgtgcccctgcgggcctactaccgcagcaggaaggagctgaaccccatcgtgctgctgctggacaacaagccagaccaccacttcctggaggccatctgctgcttccccatggtgtactacatggagggctctgtggacaacctggacagcctgctgcagtgtggcatcatctatgctgacaacctggtggtggtggacaaggagagcaccatgtctgctgaggaggactacatggctgatgccaagaccatcgtgaatgtgcagaccatgttccgcctcttccccagcctgagcatcaccacagagctgacccaccccagcaacatgaggttcatgcagttccgggccaaggacagctacagcctggccctgagcaagctggagaagcgggagagagaaaatggcagcaacctggccttcatgttccggctgccctttgctgctggccgggtcttcagcatctccatgctggacaccctgctgtaccagagctttgtgaaggactacatgatcaccatcacccggctgctgctgggcctggacaccaccccaggcagcggctacctgtgtgccatgaagatcacagaaggagacctgtggatccgcacctacggccgcctcttccagaagctgtgcagcagcagcgctgagatccccatcggcatctacagaacagagagccacgtgttcagcaccagcgagccccatgacctgcgggcccagagccagatctctgtgaatgtggaggactgtgaggacacccgggaggtgaagggcccctggggcagcagagctggcactggaggcagcagccagggccgccacactggaggaggagaccctgctgagcaccccctgctgcggaggaagagcctgcagtgggcccggcggctgagcaggaaggcccccaagcaggccggccgggctgctgctgctgagtggatcagccagcagaggctgagcctgtaccgccgctctgagcggcaggagctgtctgagctggtgaagaacaggatgaagcacctgggcctgcccaccaccggctatgaagatgtggccaacctgacagccagtgatgtgatgaacagagtgaacctgggctacctgcaggatgagatgaatgaccaccagaacaccctgtcctatgtgctgatcaaccccccaccagacacccggctggagcccagcgacatcgtgtacctgatccgcagtgaccccctggcccacgtggccagcagcagccagagcaggaagagcagctgcagccacaagctgagcagctgcaaccctgagaccagagatgagacccagctgtag

SEQ ID NO: 206007 - DNA, 3708 bp, Artificial Sequence
  derived and/or modified sequence
atgcccctgcctgatggagcccggacccctgggggcgtgtgccgggaggcccggggcggcggctacaccaacagaacatttgaatttgatgatggccagtgtgccccccggcggccctgtgctggagatggagccctgctggacacagctggcttcaagatgtctgacctggacagcgaggtgctgcccctgcccccacgctaccgcttccgggacctgctgctgggggaccccagcttccagaatgatgacagagtgcaggtggagttctacgtgaatgaaaacaccttcaaggagcggctgaagctgttcttcatcaagaaccagaggagcagcctgcgcatccgcctcttcaacttcagcctgaagctgctgacctgcctgctgtacatcgtgcgggtgctgctggatgatcctgccctgggcatcggctgctggggctgccccaagcagaactacagcttcaatgacagcagcagcgagatcaactgggcccccatcctgtgggtggagaggaagatgaccctgtgggccatccaggtgattgtggccatcatctccttcctggagaccatgctgctgatctacctgagctacaagggcaacatctgggagcagatcttccgggtgtcctttgtgctggagatgatcaacaccctgcccttcatcatcaccatcttctggccacccctgaggaacctcttcatccctgtgttcctgaactgctggctggccaagcacgccctggagaacatgatcaatgacttccaccgggccatcctgcggacccagagcgccatgttcaaccaggtgctgatcctcttctgcaccctgctgtgcctggtgttcaccggcacctgtggcatccagcacctggagagagctggggagaacctgagcctgctgaccagcttctacttctgcatcgtgaccttcagcacagtgggctatggagatgtgacccccaagatctggcccagccagctgctggtggtgatcatgatctgtgtggccctggtggtgctgcccctgcagtttgaggagctggtgtacctgtggatggagcggcagaagagcggcggcaactacagccgccaccgggcccagacagagaagcacgtggtgctgtgtgtgagcagcctgaagattgacctgctgatggacttcctgaatgagttctacgcccacccccggctgcaggactactacgtggtgatcctgtgccccacagagatggatgtgcaggtgagaagagtgctgcagatccccctgtggagccagagggtcatctacctgcagggcagcgccctgaaggaccaggacctgatgagggccaagatggacaatggagaggcctgcttcatcctgagcagcagaaatgaggtggacagaacagctgctgaccaccagaccatcctgcgggcctgggccgtgaaggactttgcccccaactgccccctgtatgtgcagatcctgaagccagagaacaagttccacgtgaagtttgctgaccacgtggtgtgtgaggaggagtgcaagtatgccatgctggccctgaactgcatctgcccagccaccagcaccctcatcaccctgctggtgcacaccagccggggccaggagggccaggagagccctgagcagtggcagaggatgtatggccgctgcagcggaaatgaggtgtaccacatccgcatgggagacagcaagttcttccgggagtatgagggcaagagcttcacctatgctgccttccacgcccacaagaagtatggagtgtgcctgattggcctgaagcgggaggacaacaagagcatcctgctgaaccctggccccaggcacatcctggccgccagtgacacctgcttctacatcaacatcaccaaggaggagaacagcgccttcatcttcaagcaggaggagaagaggaagaagagggccttcagcggccagggcctgcacgagggccctgcccggctgcctgtgcacagcatcatcgcctccatgggcaccgtggccatggacctgcagggcacagagcaccggcccacccagagcggcggcggcggcggcggcagcaagctggccctgcccacagaaaatggaagtggcagccggcggcccagcatcgcccctgtgctggagctggccgacagcagcgccctgctgccctgtgacctgctgagtgaccagagtgaagatgaggtgacccccagtgatgatgagggcctgtctgtggtggagtatgtgaagggctacccacccaacagcccctacatcggcagcagccccaccctgtgccacctgctgcctgtgaaggcccccttctgctgcctgcggctggacaagggctgcaagcacaacagctatgaagatgccaaggcctacggcttcaagaacaagctgatcatcgtgtctgctgagacagctggaaatggcctgtacaacttcatcgtgcccctgcgggcctactaccgcagcaggaaggagctgaaccccatcgtgctgctgctggacaacaagccagaccaccacttcctggaggccatctgctgcttccccatggtgtactacatggagggctctgtggacaacctggacagcctgctgcagtgtggcatcatctatgctgacaacctggtggtggtggacaaggagagcaccatgtctgctgaggaggactacatggctgatgccaagaccatcgtgaatgtgcagaccatgttccgcctcttccccagcctgagcatcaccacagagctgacccaccccagcaacatgaggttcatgcagttccgggccaaggacagctacagcctggccctgagcaagctggagaagcgggagagagaaaatggcagcaacctggccttcatgttccggctgccctttgctgctggccgggtcttcagcatctccatgctggacaccctgctgtaccagagctttgtgaaggactacatgatcaccatcacccggctgctgctgggcctggacaccaccccaggcagcggctacctgtgtgccatgaagatcacagaaggagacctgtggatccgcacctacggccgcctcttccagaagctgtgcagcagcagcgctgagatccccatcggcatctacagaacagagagccacgtgttcagcaccagcgagccccatgacctgcgggcccagagccagatctctgtgaatgtggaggactgtgaggacacccgggaggtgaagggcccctggggcagcagagctggcactggaggcagcagccagggccgccacactggaggaggagaccctgctgagcaccccctgctgcggaggaagagcctgcagtgggcccggcggctgagcaggaaggcccccaagcaggccggccgggctgctgctgctgagtggatcagccagcagaggctgagcctgtaccgccgctctgagcggcaggagctgtctgagctggtgaagaacaggatgaagcacctgggcctgcccaccaccggctatgatgagatgaatgaccaccagaacaccctgtcctatgtgctgatcaaccccccaccagacacccggctggagcccagcgacatcgtgtacctgatccgcagtgaccccctggcccacgtggccagcagcagccagagcaggaagagcagctgcagccacaagctgagcagctgcaaccctgagaccagagatgagacccagctgtag

SEQ ID NO: 206008 - DNA, 3771 bp, Artificial Sequence
  derived and/or modified sequence
atgcccctgcccgacggcgcccggacccccggcggcgtgtgccgggaagcacggggaggcggatacaccaatcggacctttgagttcgacgacggccaatgcgcccctagacgcccatgcgctggagatggcgcgctgttggacactgcaggctttaagatgtccgacctcgatagtgaagtgctgcccctccccccccggtacagattcagggatcttctcttgggagacccctcattccaaaacgacgaccgagttcaagtcgagttctacgtcaatgaaaacaccttcaaggaacggctgaagcttttttttattaaaaatcaaagatcaagtctgagaatcagactgtttaactttagcctcaagcttctgacatgtcttctgtatatagttcgagtcctgctggacgatccagctttgggaattgggtgctggggatgtcccaagcaaaattactcattcaatgatagtagtagcgagatcaattgggctcctattctctgggtggaaaggaagatgactctctgggccatacaggtgatagtggccatcatctctttccttgaaactatgctactcatctacttaagttacaaaggcaacatatgggaacagatattccgggtgtcttttgtgttggagatgattaacactttacctttcatcatcacaattttctggcccccgctccgaaacttatttattcccgtatttttgaactgttggctggctaagcacgcccttgaaaatatgattaatgacttccaccgcgcaatccttaggacccaatccgccatgttcaatcaggtgctgattttgttttgtactctcttgtgcctcgtgttcacagggacctgtggcattcagcacctggagagggccggagagaacttgagcctgctcaccagtttctatttttgcattgtgaccttctctaccgtgggatatggagacgtgaccccaaaaatctggcctagtcagctcctggtagtgatcatgatctgcgtggccctggtagtgctacccctgcaatttgaggaactcgtttatctctggatggagagacagaagtctggtggcaattatagccgacaccgggcgcagacggaaaagcacgttgtgctgtgcgtctctagtctgaaaatagacctgctaatggattttctgaacgagttttacgcccaccctcggctgcaggactactacgttgttattttatgccctacggaaatggacgttcaagtaaggcgggtcttgcagatacccctgtggagccagcgagtaatttacctgcaggggtccgctctcaaagaccaagacctaatgagggctaaaatggacaatggcgaagcttgtttcatcctgagtagtcggaacgaggtggatcggactgccgctgatcaccaaaccattctgcgagcctgggccgtcaaagattttgcgcccaactgtcccctttacgtgcagattctgaagccggaaaataagtttcatgtcaagtttgccgatcatgtggtctgcgaggaggaatgtaagtacgccatgttggccctgaactgtatctgccccgcgaccagcaccttaattaccctgttggtccacaccagtaggggacaagaaggccaggagtctccagagcagtggcagcgaatgtacgggcgttgttccggcaacgaagtctaccacattagaatgggagattctaagttctttcgcgaatatgaaggtaaatcgttcacgtacgctgcgtttcacgcgcacaagaagtatggagtgtgccttatcggtctgaagcgtgaagataacaagtctattctcctgaatccaggccccaggcatatactcgcagcttcagacacttgtttttatatcaacataactaaggaggaaaactctgccttcatcttcaaacaggaggaaaaacgcaaaaagagagcattttctggtcaaggactccacgaggggcccgcgcgactgcccgtccattccatcatcgcgagcatgggtacggtggccatggatcttcagggcaccgagcatcggccaactcagtctggggggggaggaggtggaagtaagctggctctgcccacagagaacgggtcgggaagcagacgcccttctattgctccagtgctggaactggctgactcttccgccctgttgccttgcgatttattgagcgatcaaagcgaagacgaggtgacgcctagcgacgacgagggcctgtccgtggttgagtatgtgaaagggtaccctccaaactctccatatattggctcatcacctaccctttgccacttgttacccgtcaaggctcccttttgctgccttcggctggataaaggttgcaaacataacagctacgaagatgccaaggcctatgggttcaaaaacaaactaattatagtttctgcagaaaccgcaggaaatggattgtacaatttcatcgtgccgctccgagcttactataggtctcgaaaagagttaaatccaattgtgctgctgctggataacaaacccgaccatcacttcctagaagcgatctgttgtttcccgatggtctattatatggaaggttccgtagacaacctagactccctcctgcaatgcggcataatatatgcagacaatttggtcgtggtcgacaaggaaagcactatgtccgccgaagaagactatatggctgatgctaagacaattgtcaacgtgcagactatgttccggctgttccccagcttgtccattacaaccgaactaactcaccctagcaacatgagattcatgcaattccgcgccaaagatagctattcactcgccttatccaagctcgaaaaacgcgagagggagaacggttctaatctggctttcatgtttcggctgccctttgctgccggcagagtttttagtattagtatgcttgataccctcctgtatcaatcctttgtgaaggactacatgatcaccataacaaggctgctcctggggctggacaccactccaggttcggggtacctgtgcgccatgaagataaccgagggcgacctgtggattagaacctacgggcgcctgtttcagaagctgtgctccagctcggcggagatccccattggtatatacaggacagagagccacgtcttctcaacaagcgagccgcacgacctgagggctcagagccagatctccgtgaatgttgaggactgtgaggatacccgtgaggtcaaaggtccatggggtagcagggccgggaccggaggctcatcacagggacgccacacaggggggggcgatccggccgagcatcctctgttgagacggaagtcgctgcagtgggcgcgaaggcttagccgaaaagcccccaaacaggccggccgagccgccgctgctgagtggatttcccagcagaggctatcactttataggcgcagcgaacgacaagagctctctgagctggttaaaaaccggatgaagcacctgggtctgcccacaaccggatatgaggatgttgctaatctgacagccagcgacgtgatgaatcgagtcaacctgggatacttgcaggatgagatgaatgaccaccagaacaccctttcctacgtcctgatcaacccacctccagacactcgcctggaaccctcagacattgtgtacctgattcgcagcgatcctctcgcacatgtggcatcaagctctcaatcacggaaaagcagctgttcccacaagctctctagttgcaatcccgagactagagacgagacccagttatag

SEQ ID NO: 206009 - DNA, 3708 bp, Artificial Sequence
  derived and/or modified sequence
atgcccctgcccgacggcgcccggacccccggcggcgtgtgccgggaggctcgggggggtggctacactaacaggactttcgaattcgatgacggccagtgcgcacccaggcgaccctgtgcgggggatggggctttgcttgatacagctggcttcaagatgtctgacctggattccgaagtgttgcccctgccaccaaggtacaggttccgcgatcttttgttaggagatccttcattccagaatgacgatcgcgtacaggtagaattttatgtcaatgagaacacatttaaagagcggttgaagttattctttatcaaaaaccagagatcttccctgcgtatccgcctcttcaatttttctctgaagctattgacatgcctgctgtatatcgtgcgcgtcctgctcgatgatccggctctggggatcgggtgttggggatgtccaaagcagaattattccttcaatgacagctcgagcgaaattaattgggctcctattctgtgggtggagaggaagatgacactatgggcaatccaggtcatagtggctattataagttttctcgagacgatgctgttaatttatctgagctataaggggaacatctgggaacagattttccgcgtctctttcgtgctagagatgatcaatacactcccttttattatcaccatcttctggccccctctgagaaatttgtttatccccgtctttttgaactgctggctggccaagcatgcccttgagaacatgatcaacgattttcatagagcgatattaagaacacaatctgcgatgttcaatcaggtccttattctgttctgtaccctattgtgtctggtgttcacgggtacctgtggcatacagcacctggagcgcgccggtgagaacctcagtctattgacaagcttctacttctgtatcgtgacattcagcactgtgggctacggcgacgtcacaccgaagatctggccgtcacagctcctcgtggtgattatgatctgcgtggcactggttgtcctgcctctccagttcgaagagctggtgtatctttggatggaaagacagaaaagcggaggaaattactccaggcaccgtgctcaaacagagaaacacgtggtactttgtgtgtcgagcttgaagatcgaccttctaatggatttcctcaacgagttctatgcacaccctagattgcaggactattatgtggtaatcttgtgtcccaccgagatggacgtgcaagtacgacgggtcctgcagattcccttgtggtcacagagggttatctatctgcagggctcagccctcaaggaccaagatctgatgcgagctaaaatggacaacggagaggcatgttttatcttgtcaagccggaatgaggttgacagaactgctgccgaccaccaaacaattcttcgagcgtgggcagtgaaagatttcgccccaaattgccccctatacgtacaaatcctcaagcccgaaaataagtttcatgtaaagtttgcagatcatgtagtttgcgaggaggaatgtaaatacgctatgctcgcactcaattgtatttgtcccgccactagcactttgataacgctgctagtgcatacgtcacgaggtcaagaaggccaggaatctcccgagcaatggcagagaatgtatggccggtgttctggtaacgaagtgtatcacatacgcatgggcgattccaagttttttcgtgagtacgaaggaaaaagctttacgtacgccgcattccacgcccacaaaaagtacggggtgtgtctgattggcttgaaacgcgaggataacaaaagcatcttgctcaacccaggcccccgacacattctggcagcaagcgacacatgcttctatataaatatcactaaagaagagaatagcgcatttatttttaagcaggaggagaagcgcaaaaagcgcgccttttcagggcaaggactacatgaaggaccagcccggctgccagtgcatagtattatcgcatccatgggaactgtggccatggacctccagggcacggagcaccgtccgacccaatctgggggtggtgggggcggctctaaactggccctacctactgagaatggctccggctctagaagaccatccatcgcacctgtccttgaactggcagactcgtccgccttgttgccttgtgacttgttgtcggatcagtcggaggatgaggtgactcctagtgacgatgagggcttatcagtggtggagtacgtcaaggggtaccctcccaattctccctacattggttcaagtcctacactatgtcatttgctccctgtgaaggcacccttttgttgccttcgactggataagggctgcaagcacaattcgtacgaagatgctaaagcatacgggtttaaaaacaagctcattatagtgagcgccgagaccgcgggtaacggcctttataatttcattgtcccccttagggcctactaccggtctcggaaggaattgaaccccatcgtgcttctgctagacaacaagcccgatcatcattttctcgaagcgatatgttgcttccctatggtgtactatatggaagggagtgttgacaatctcgatagcttgcttcagtgtgggattatttacgcggataacctggtagttgtggataaagaatctacaatgagcgccgaggaagattacatggcagacgccaagactatcgtaaatgtccagaccatgtttcgactgtttccctcattgagcatcacgacagagttaactcatccaagtaatatgcgttttatgcaattccgggccaaggattcatacagtctcgctttgtctaagttagagaaaagagagcgtgagaatgggagtaacctcgccttcatgtttagactgcctttcgcagccggcagagtcttcagtatttccatgctggacaccctgctgtaccagtcctttgtgaaggattacatgatcaccattaccagacttcttcttggccttgacacgactcccggcagtggatacctttgtgccatgaagattacagaaggagacttgtggattcggacctacggccgactctttcaaaaactgtgttcctcttccgccgaaattcctattggcatctataggactgagagccatgtattcagcaccagcgagccacacgacttgcgagctcagtcccagatctcggttaacgtggaagattgcgaagacacccgggaggtcaagggaccatggggtagccgcgcaggaacggggggaagcagtcaaggcagacataccggaggtggggatccggccgagcaccccttgctgcgacggaagtcactgcagtgggcccgacgtttaagcaggaaggcccccaaacaagctgggagagcggccgcagccgaatggattagccagcagcgtctgtcactttatcgccggagtgaaagacaggaactgagcgaacttgtcaaaaatcggatgaagcacctcggactccccacaaccggctatgacgaaatgaacgaccaccagaacaccctctcctatgtgctcattaatcctcctcccgatactaggttagagccctccgatattgtgtatcttattcgcagtgaccctttagctcatgtcgccagttcgagccagagcaggaagtcttcctgctctcataagctctcttcctgcaatccagagacccgggacgagacccagctctag

SEQ ID NO: 206010 - DNA, 4830 bp, Artificial Sequence
  derived and/or modified sequence
agggcaacgcgagggaagaaggtggcggctcccactcgcttctccctcgggtcgggtccgagctgccaggccgcatgccactccctgacggggcgcggaccccggggggcgtctgccgggaggcgcgcggcgggggctacaccaaccggaccttcgagtttgacgacggccaatgcgcccccaggcggccctgcgcgggggacggcgcgctcctggacaccgccggcttcaagatgagcgacctggactccgaggtgctgcccttgccgccgcgctaccgcttccgggacctgctgctgggcgacccgtccttccagaacgacgacagggtccaggtggagttctacgtcaacgagaacaccttcaaggagcggctcaagctgttcttcatcaaaaaccaaagatcgagcctgaggatccggctgttcaacttctccctgaagctgctcacctgcctgctctacattgtgcgcgtcctgctcgatgacccggccctgggcatcggatgctggggctgcccaaagcagaactactccttcaatgactcgtcctccgagatcaactgggctcctattctgtgggtggagagaaagatgacactgtgggcgatccaggtcatcgtggccataataagcttcctggagacgatgcttctcatctacctcagctacaaaggcaacatctgggagcagatcttccgcgtgtccttcgtcctggagatgatcaacactctgcccttcatcatcacgatcttctggccgccgctgcggaacctgttcatccccgtctttctgaactgctggctggccaagcacgcgctggaaaacatgattaatgacttccaccgtgccatcctgcggacacagtcagccatgttcaaccaggtcctcatcctcttctgcaccctgctgtgcctcgttttcacggggacctgcggcatccagcacctggagcgggcgggcgagaacctgtccctcctgacctccttctacttctgcatcgtcaccttctccaccgtgggctacggtgacgtcacgcccaagatctggccatcgcagctgctggtggtcatcatgatctgcgtggccctcgtggtgctcccactgcagttcgaggagctcgtctacctctggatggagcggcagaagtcagggggcaactacagccgccaccgtgcgcagacggagaagcacgtggtcctgtgtgtcagctccctcaagatcgaccttctcatggacttcctgaacgagttctacgcccacccccggctccaggactattacgtggtcatcctgtgccccacggagatggatgtccaggtgcgcagagtcctgcagatccctctgtggtcccagcgggtcatctacctccagggctctgcactcaaagaccaggacctcatgcgagccaagatggacaatggggaggcctgcttcatcctcagcagcaggaacgaggtggaccgcacggctgcagaccaccagaccatcctgcgcgcctgggccgtgaaggacttcgcccccaactgccccctctacgtccagatcctcaaacctgaaaacaagtttcacgtcaagtttgctgaccacgtggtgtgtgaggaggagtgcaagtacgccatgctggcgctgaactgcatctgcccggcgacctccaccctcatcaccctgctggtgcacacgtcccgcggccaggagggacaggagtctccggagcagtggcagcgcatgtatgggcgctgctccggcaacgaggtgtaccacatccgcatgggtgacagcaagttcttccgcgagtacgagggcaagagcttcacctacgcggccttccacgcccacaagaagtatggcgtgtgcctcatcgggctgaagcgggaggacaacaagagcatcctgctgaacccggggccccggcacatcctggccgcctctgacacctgcttctacatcaacatcaccaaggaggagaactcggccttcatcttcaagcaggaggagaagcggaagaagagggccttctcggggcaggggctgcacgagggtccggcccgcctgcccgtgcacagcatcatcgcctccatggggacagtggccatggacctgcagggcacagagcaccggcctacgcagagcggcggtgggggcgggggcagcaagctggcactgcccacggagaacggctcgggcagccggcggcccagcatcgcgcccgtcctggaactggccgacagctcagccctgctgccctgcgacctgctgagcgaccagtcggaggatgaggtgacgccgtcggacgacgaggggctctccgtggtagagtatgtgaagggctaccctcccaactcgccctacatcggcagctccccaaccctgtgccacctcctgcctgtgaaagcccccttctgctgcctgcggctggacaagggctgcaagcacaacagctatgaagacgccaaggcctacgggttcaagaacaagctgatcatcgtctcggcagagacggccggcaatgggctgtacaacttcatcgtgccactgcgggcctactacagatcccgcaaggagctgaaccccatcgtgctgctgctggacaacaagcccgaccaccacttcctggaagccatctgctgcttccccatggtctactacatggagggctctgtggacaacctggacagcctgctgcagtgtggcatcatctatgcggacaacctggtggtggtggacaaggagagcaccatgagcgccgaggaggactacatggcggacgccaagaccatcgtcaacgtgcagaccatgttccggctcttccccagcctcagcatcaccacggagctcacccacccttccaacatgcgcttcatgcagttccgcgccaaggacagctactctctggctctttccaaactagaaaagagggagcgagagaatggctccaacctggccttcatgttccgcctgccgttcgccgccggccgcgtcttcagcatcagcatgttggacacactgctctaccagtccttcgtgaaggactacatgatcaccatcacccggctgctgctgggcctggacaccacgccgggctcggggtacctctgtgccatgaaaatcaccgagggcgacctgtggatccgcacgtacggccgcctcttccagaagctctgctcctccagcgccgagatccccattggcatctaccggacagagagccacgtcttctccacctcggagccccacgacctcagagcccagtcccagatctcggtgaacgtggaggactgtgaggacacacgggaagtgaaggggccctggggctcccgcgctggcaccggaggcagctcccagggccgccacacgggcggcggtgaccccgcagagcacccactgctacggcgcaagagcctgcagtgggcccggaggctgagccgcaaggcgcccaagcaggcaggccgggcggcggccgcggagtggatcagccagcagcgcctcagcctgtaccggcgctctgagcgccaggagctctccgagctggtgaagaaccgcatgaagcacctggggctgcccaccaccggctacgaggacgtagcaaatttaacagccagtgatgtcatgaatcgggtaaacctgggatatttgcaagacgagatgaacgaccaccagaacaccctctcctacgtcctcatcaaccctccgcccgacacgaggctggagcccagtgacattgtctatctcatccgctccgaccccctggctcacgtggccagcagctcccagagccggaagagcagctgcagccacaagctgtcgtcctgcaaccccgagactcgcgacgagacacagctctgagccagccctgcacggagctcaggccaccaagcccggggtcctcaggaaggacgtggaggagcgtgtgaggacacggtggcactagcgtgaccctggggatggcacactctactcaccatggctcctgggactccaccctggaaaggagcccctcatgcggggggagggccagctcacccctgggcacctgcaggctagtgaggagagttttttaacctatttttacacgtcgatgcagtccacttctctttacacagatgtaccgcaactcgtgaccagggctggctgggagggcaacgcagggactggacgccctacagggccgagcccaggctgtgctggagggtggggctggggtgcatggggaggggagcagaacccagaacccaggagccccgcgtgggccacacccaactcagagccggcctgagcgttcacggccaggcagcctcgcttccttgcagccaagggctgggggccagggctgctgttctgcactctggggtgggtgagggggaccctgggctgtttgctgtcccaagccccttctggaagttagaagcagcaaagggcccggggaagccgggcatgtgagaggggtgcgtccccaggtcccccagagggccctgtcgccgaggacctttctgaaggaagcagaagacgccatttcctctacttcacactgaactgtcccagccactgcatctagggggcattgggcggaagatggtgcatttccatggaccattttacacttaccttttaaagcaaagcctcattttctaaacccctgacttgtgaagcacaattcagcctccgggctgggccacgtggagagagaggatcttctcagcaaggcgagatcccgggcggcggctgacatcaggagcgccaccctgcgtcctttgctgctggttccttactggtttgtacggtcagcgctggaaacttctattaaatggatgcattctggaggcatgaagtt

SEQ ID NO: 206011 - DNA, 4717 bp, Artificial Sequence
  derived and/or modified sequence
cgcgagggaagaaggtggcggctcccactcgcttctccctcgggtcgggtccgagctgccaggccgcatgccactccctgacggggcgcggaccccggggggcgtctgccgggaggcgcgcggcgggggctacaccaaccggaccttcgagtttgacgacggccaatgcgcccccaggcggccctgcgcgggggacggcgcgctcctggacaccgccggcttcaagatgagcgacctggactccgaggtgctgcccttgccgccgcgctaccgcttccgggacctgctgctgggcgacccgtccttccagaacgacgacagggtccaggtggagttctacgtcaacgagaacaccttcaaggagcggctcaagctgttcttcatcaaaaaccaaagatcgagcctgaggatccggctgttcaacttctccctgaagctgctcacctgcctgctctacattgtgcgcgtcctgctcgatgacccggccctgggcatcggatgctggggctgcccaaagcagaactactccttcaatgactcgtcctccgagatcaactgggctcctattctgtgggtggagagaaagatgacactgtgggcgatccaggtcatcgtggccataataagcttcctggagacgatgcttctcatctacctcagctacaaaggcaacatctgggagcagatcttccgcgtgtccttcgtcctggagatgatcaacactctgcccttcatcatcacgatcttctggccgccgctgcggaacctgttcatccccgtctttctgaactgctggctggccaagcacgcgctggaaaacatgattaatgacttccaccgtgccatcctgcggacacagtcagccatgttcaaccaggtcctcatcctcttctgcaccctgctgtgcctcgttttcacggggacctgcggcatccagcacctggagcgggcgggcgagaacctgtccctcctgacctccttctacttctgcatcgtcaccttctccaccgtgggctacggtgacgtcacgcccaagatctggccatcgcagctgctggtggtcatcatgatctgcgtggccctcgtggtgctcccactgcagttcgaggagctcgtctacctctggatggagcggcagaagtcagggggcaactacagccgccaccgtgcgcagacggagaagcacgtggtcctgtgtgtcagctccctcaagatcgaccttctcatggacttcctgaacgagttctacgcccacccccggctccaggactattacgtggtcatcctgtgccccacggagatggatgtccaggtgcgcagagtcctgcagatccctctgtggtcccagcgggtcatctacctccagggctctgcactcaaagaccaggacctcatgcgagccaagatggacaatggggaggcctgcttcatcctcagcagcaggaacgaggtggaccgcacggctgcagaccaccagaccatcctgcgcgcctgggccgtgaaggacttcgcccccaactgccccctctacgtccagatcctcaaacctgaaaacaagtttcacgtcaagtttgctgaccacgtggtgtgtgaggaggagtgcaagtacgccatgctggcgctgaactgcatctgcccggcgacctccaccctcatcaccctgctggtgcacacgtcccgcggccaggagggacaggagtctccggagcagtggcagcgcatgtatgggcgctgctccggcaacgaggtgtaccacatccgcatgggtgacagcaagttcttccgcgagtacgagggcaagagcttcacctacgcggccttccacgcccacaagaagtatggcgtgtgcctcatcgggctgaagcgggaggacaacaagagcatcctgctgaacccggggccccggcacatcctggccgcctctgacacctgcttctacatcaacatcaccaaggaggagaactcggccttcatcttcaagcaggaggagaagcggaagaagagggccttctcggggcaggggctgcacgagggtccggcccgcctgcccgtgcacagcatcatcgcctccatggggacagtggccatggacctgcagggcacagagcaccggcctacgcagagcggcggtgggggcgggggcagcaagctggcactgcccacggagaacggctcgggcagccggcggcccagcatcgcgcccgtcctggaactggccgacagctcagccctgctgccctgcgacctgctgagcgaccagtcggaggatgaggtgacgccgtcggacgacgaggggctctccgtggtagagtatgtgaagggctaccctcccaactcgccctacatcggcagctccccaaccctgtgccacctcctgcctgtgaaagcccccttctgctgcctgcggctggacaagggctgcaagcacaacagctatgaagacgccaaggcctacgggttcaagaacaagctgatcatcgtctcggcagagacggccggcaatgggctgtacaacttcatcgtgccactgcgggcctactacagatcccgcaaggagctgaaccccatcgtgctgctgctggacaacaagcccgaccaccacttcctggaagccatctgctgcttccccatggtctactacatggagggctctgtggacaacctggacagcctgctgcagtgtggcatcatctatgcggacaacctggtggtggtggacaaggagagcaccatgagcgccgaggaggactacatggcggacgccaagaccatcgtcaacgtgcagaccatgttccggctcttccccagcctcagcatcaccacggagctcacccacccttccaacatgcgcttcatgcagttccgcgccaaggacagctactctctggctctttccaaactagaaaagagggagcgagagaatggctccaacctggccttcatgttccgcctgccgttcgccgccggccgcgtcttcagcatcagcatgttggacacactgctctaccagtccttcgtgaaggactacatgatcaccatcacccggctgctgctgggcctggacaccacgccgggctcggggtacctctgtgccatgaaaatcaccgagggcgacctgtggatccgcacgtacggccgcctcttccagaagctctgctcctccagcgccgagatccccattggcatctaccggacagagagccacgtcttctccacctcggagccccacgacctcagagcccagtcccagatctcggtgaacgtggaggactgtgaggacacacgggaagtgaaggggccctggggctcccgcgctggcaccggaggcagctcccagggccgccacacgggcggcggtgaccccgcagagcacccactgctacggcgcaagagcctgcagtgggcccggaggctgagccgcaaggcgcccaagcaggcaggccgggcggcggccgcggagtggatcagccagcagcgcctcagcctgtaccggcgctctgagcgccaggagctctccgagctggtgaagaaccgcatgaagcacctggggctgcccaccaccggctacgacgagatgaacgaccaccagaacaccctctcctacgtcctcatcaaccctccgcccgacacgaggctggagcccagtgacattgtctatctcatccgctccgaccccctggctcacgtggccagcagctcccagagccggaagagcagctgcagccacaagctgtcgtcctgcaaccccgagactcgcgacgagacacagctctgagccagccctgcacggagctcaggccaccaagcccggggtcctcaggaaggacgtggaggagcgtgtgaggacacggtggcactagcgtgaccctggggatggcacactctactcaccatggctcctgggactccaccctggaaaggagcccctcatgcggggggagggccagctcacccctgggcacctgcaggctagtgaggagagttttttaacctatttttacacgtcgatgcagtccacttctctttacacagatgtaccgcaactcgtgaccagggctggctgggagggcaacgcagggactggacgccctacagggccgagcccaggctgtgctggagggtggggctggggtgcatggggaggggagcagaacccagaacccaggagccccgcgtgggccacacccaactcagagccggcctgagcgttcacggccaggcagcctcgcttccttgcagccaagggctgggggccagggctgctgttctgcactctggggtgggtgagggggaccctgggctgtttgctgtcccaagccccttctggaagttagaagcagcaaagggcccggggaagccgggcatgtgagaggggtgcgtccccaggtcccccagagggccctgtcgccgaggacctttctgaaggaagcagaagacgccatttcctctacttcacactgaactgtcccagccactgcatctagggggcattgggcggaagatggtgcatttccatggaccattttacacttaccttttaaagcaaagcctcattttctaaacccctgacttgtgaagcacaattcagcctccgggctgggccacgtggagagagaggatcttctcagcaaggcgagatcccgggcggcggctgacatcaggagcgccaccctgcgtcctttgctgctggttccttactggtttgtacggtcagcgc

SEQ ID NO: 206012 - DNA, 3771 bp, Artificial Sequence
  derived and/or modified sequence
atgcccctgcctgatggcgcaagaacccccggaggagtgtgtcgggaagcacggggtggcggttataccaacagaacgtttgaattcgatgatggacagtgcgcgccaagacggccatgtgctggggacggagccctcctagacaccgccggattcaagatgagtgacttagacagcgaagtgctacctcttcctcctcggtaccggtttcgtgacctattactgggcgaccccagtttccagaatgatgacagggtgcaagtcgagttttacgttaacgagaataccttcaaggagcgccttaaactgttcttcattaaaaatcagaggtcctctctgagaattaggctgttcaacttcagcctgaaactgctgacatgtctgctatacatagtgcgagtgttgcttgacgacccagcgctggggataggctgttggggatgcccaaaacagaactactcctttaatgactccagttcagagattaactgggccccaattctatgggtggagagaaagatgaccctatgggcaattcaggtgatcgtcgcaatcatcagctttctggaaaccatgttactcatctacctctcctataagggcaatatatgggaacagattttccgcgtgtcattcgtacttgagatgatcaacacgttacccttcattatcacaattttttggccacccctgagaaacctgtttattccagtcttcttaaactgttggctcgcaaagcacgccctggagaacatgattaatgattttcatcgggctattttacgcacgcaatccgctatgttcaatcaggtactgattctgttttgcactcttctctgtcttgtctttactggaacatgcgggattcagcaccttgaaagagccggtgaaaatttatctctgttaacctccttctacttctgcatcgtgaccttttctacagtggggtacggggacgtgactcccaagatttggccctcccagctcttggtggtgatcatgatttgcgtcgctctggtggtgctccctctgcagtttgaagagctcgtgtatttatggatggagcgacagaagtctggaggcaactactcccgacaccgagcacaaacagaaaagcacgtggtcctgtgtgtgagcagcttgaaaatcgatcttttgatggattttctgaatgagttctacgcccatccacgtctgcaggattactatgtggtcattttatgccccacagagatggatgttcaggttagaagagtgctccagatccccctgtggagccagcgcgtcatatacctgcagggtagcgcccttaaagaccaggatcttatgagggcaaagatggacaacggagaggcatgcttcattctgtcttcaagaaacgaagtggatcggaccgcagcggaccatcagaccatccttagagcctgggcagtgaaggactttgcccctaactgccccctgtacgtgcagatcttaaagcccgagaacaaattccacgtgaaattcgcagatcacgtcgtgtgtgaggaagaatgcaagtatgctatgctggcccttaactgtatctgccccgctactagcacactcataaccctccttgtgcatactagcagaggtcaagaggggcaggaaagtcctgagcagtggcagcggatgtacggtaggtgctccggaaacgaagtgtatcatattcgcatgggtgacagtaagttcttccgagaatacgagggaaagagctttacttatgctgctttccatgctcacaaaaagtacggtgtgtgtctgattgggctcaagcgcgaggacaataaaagtatcctgttgaatccaggccctcggcacatcctggcggcatctgatacctgtttctacatcaacataactaaagaagaaaacagcgcattcatcttcaaacaggaggagaagcggaagaaacgagccttttctgggcagggcctgcatgagggcccagcaaggctgccagtgcattcaatcattgccagcatgggcactgtagctatggaccttcaggggaccgaacaccgtccaacacagagcggcggaggcggaggcggttctaagctcgccttgccgaccgagaacggttcaggctccaggagaccttccattgcgcctgtcctcgagcttgccgactcctctgccttgcttccttgcgaccttctgagcgaccagtcagaggacgaggtgacccccagtgatgacgagggattgtctgtcgtagaatacgtgaagggataccccccaaactctccgtacattggctcctcccccaccctttgccatcttctgccagtgaaagccccattttgttgtctgagacttgacaagggctgcaagcataactcttacgaagatgctaaggcttatgggttcaaaaataagttgattatagtgtcagcagagactgctggaaatgggctgtataactttattgtcccactccgggcttactaccggtctaggaaagaactgaacccgattgtgttactgctggacaacaaacctgaccatcatttcctggaggccatatgttgttttccaatggtttattatatggagggaagcgtcgacaatttagactccctgctgcagtgtggtataatctatgcggataacttggttgtggttgataaagagtctaccatgtcagccgaggaggactacatggccgatgctaaaaccattgtcaatgtacaaacaatgtttcgtctttttccctctctcagtatcaccaccgagcttacccacccctcaaatatgcgctttatgcaattccgagctaaggattcgtacagtctggccttgagcaaacttgagaaacgagagagggaaaatggcagtaacttagcctttatgttcagactcccatttgccgctggcagagtattcagtattagtatgcttgacacacttctataccagtcctttgtgaaggattatatgatcacgataactcggcttctcctgggattggacactactcctggatccggctatctgtgtgcgatgaagatcacagagggagacctgtggatccgcacatatgggagacttttccagaagctgtgttcttccagcgctgaaatcccgatcggaatttatcgcacggaatcccatgtctttagcacctctgagccgcacgacttgagagctcagtctcagatttcggtcaacgttgaggattgtgaagatactcgcgaggtaaagggcccttggggctcgcgggcaggcacgggtgggagttcccagggaaggcatacaggcggaggtgacccagcagagcatccccttctgagacggaagagcttgcagtgggcacggagactttctcggaaagctccaaaacaagccggacgggcagccgcagctgagtggatctctcagcagcgcctgagtctgtataggcgatccgaacgtcaggaacttagcgaactggtgaagaacaggatgaaacatttggggctgccgacaacaggctatgaggatgtggcaaacctgaccgcctccgatgttatgaaccgcgtcaatcttgggtacctgcaggacgaaatgaacgaccaccagaataccttaagttacgttctgatcaatccccctcctgacacgaggctggagccctccgatatcgtgtatctgattagatcagaccccctcgcgcatgtggcttcttcgtcccagtctaggaagagctcctgctcgcacaagcttagctcatgtaaccccgaaacccgagacgagacgcagctttag

SEQ ID NO: 206013 - DNA, 3708 bp, Artificial Sequence
  derived and/or modified sequence
atgcctctgcccgacggcgcaaggactccgggtggggtgtgcagggaggctcgaggcggaggctacactaatagaacattcgagtttgacgatgggcagtgtgccccacgaagaccttgcgcaggagacggggctcttttggacacagcaggattcaaaatgtcagatttggattctgaggtgctgcctctccccccaagataccgcttccgcgacttgctgctgggggacccaagcttccagaatgacgacagggtgcaggttgaattttacgtcaacgaaaataccttcaaagaacgccttaaactcttcttcattaagaatcagaggtcctccttacgtatccggctgttcaacttttcgttgaaactgctaacctgtctcctgtatatcgtccgggtgctgctggacgaccctgcccttggcatagggtgctggggatgcccaaagcagaattacagctttaatgattccagcagtgaaatcaactgggcacctattctgtgggtagagagaaagatgacgctgtgggcaatacaggtgattgtagcaattattagtttcctggaaactatgctgctgatttacctttcttataaaggtaacatctgggagcaaatattcagagtgtcttttgtgttggagatgattaatacactgccctttatcatcacgatcttctggccgccactgcggaacctgttcattcccgtgttccttaattgttggctggcgaaacatgccctggagaatatgatcaatgactttcaccgtgcaatactgagaacccaatctgctatgtttaaccaggtactcatcctgttttgcacactgctctgccttgtattcacgggcacgtgcgggatccagcacttggagagagccggagaaaacctatcactgctgaccagcttttatttttgtatcgtgacattctccaccgtgggctacggtgatgtcactccgaaaatatggcccagccagctgctagtggttatcatgatctgcgttgccttggttgtcttacctctccagttcgaagaactggtgtacctgtggatggaacgacagaaatccgggggaaactattctcggcatcgggctcagacagagaagcacgtggtgctctgcgtctcttcactgaaaatcgatctgctgatggatttcctgaacgaattctatgcacatccgaggctacaggactactacgtcgtcattttgtgccctacagaaatggacgtgcaggtaagaagagtcttgcagatcccactatggagtcagagggtcatctaccttcaaggatccgccctaaaagaccaggacttaatgcgggctaaaatggataacggggaagcctgcttcatcctttctagcaggaacgaagttgatcgtaccgcagccgaccaccagactatcttacgtgcatgggctgtgaaggactttgctcctaattgtccactctatgtgcaaatcctgaaacctgaaaacaagttccacgtaaaattcgccgatcacgtcgtttgcgaagaagagtgtaagtatgccatgttagctctcaattgcatttgcccagccacttccacgttaatcacactgttggtacacaccagtcgaggccaagagggtcaagagagtcccgaacagtggcagaggatgtatggacggtgcagcggaaatgaggtctaccatatccgtatgggagacagcaagttctttagggaatatgagggcaagagcttcacttacgccgcttttcacgcccataaaaagtacggagtttgtctgattgggttgaagagggaggataataagagcatattgttaaaccctggacctaggcacatcctagctgcttctgatacttgcttctatataaatatcactaaggaggagaattctgccttcatattcaaacaggaggagaagcgaaaaaaaagagccttcagtgggcagggcctccacgaggggcctgcaaggctgcctgttcattccattatcgccagcatgggaacagttgctatggatctgcagggaactgaacacagacccacacaaagcggtgggggaggtggtggaagcaagttagcgcttcctacagaaaacggctcaggtagtcgtagaccctcaatcgctcctgtgctcgaactggccgactcttccgcgctgttgccctgcgatctactcagcgaccagtcagaggatgaagtgacaccgagcgacgatgaaggacttagtgtagtggagtacgtcaagggatacccccctaattccccgtatatagggtcttcacctaccctgtgccatctcttgccagtgaaggctcccttctgttgcctcaggcttgataagggttgtaagcataattcttacgaagacgcgaaggcttacgggtttaaaaacaagctcattatcgtgagcgctgagacggctggcaatggtctatacaatttcattgttcccctcagggcctattatagatctagaaaggagttgaacccgatagtcttactacttgataacaagcccgaccatcacttcctcgaagcaatatgctgtttccccatggtttactacatggaggggagcgtggacaatctggattcactactccagtgcggcatcatttacgctgacaacctagtggtggttgataaggagtcaaccatgagcgccgaggaagattacatggccgatgcgaaaactattgtgaatgtgcagaccatgttcagactctttccgagcttgtccatcactacagagttaacccacccctctaatatgcgattcatgcagtttagggccaaggactcctatagcctcgcactgagtaagcttgagaagagagaacgcgaaaatggctccaatctagcatttatgttcaggctccctttcgccgcagggagggtcttctctatctcaatgcttgacacactcctgtaccagtccttcgtaaaggactatatgataactattacccgcttgctgctggggctggatactacccctggatccggctacctgtgtgcgatgaagatcactgagggcgacctgtggatccgaacctatggtagactgtttcagaaactatgctcatcctctgcagaaattcccatcggcatttacagaactgagtcccacgtctttagtacatctgagccgcacgatctgagagcccagtcgcagatttccgtaaatgtcgaggattgcgaggacactcgcgaggtcaaaggcccttgggggagtagggcaggtaccggcggatctagccagggtagacacaccggcggaggggatcctgctgaacatcctctgctgagaaggaagagcctgcagtgggcgcgacgcctaagcaggaaggcccctaagcaggctggtcgcgctgccgctgctgagtggattagccagcagcgtttaagtctgtatcgaagaagcgaaaggcaggaactgtccgaactagtgaagaaccggatgaagcacttggggcttccaaccacggggtacgatgaaatgaacgatcatcagaacacactgagttacgttctcatcaacccacctccagatacgcggctagagccatcagacattgtgtatctaatccgtagtgaccctcttgctcacgtggcttctagcagtcagtcccggaaatcgtcctgctctcacaaactctcttcttgcaaccccgagacccgcgatgagacccagctgtag

SEQ ID NO: 206014 - DNA, 3771 bp, Artificial Sequence
  derived and/or modified sequence
atgcccctgcccgacggcgccagaacccccggcggcgtgtgcagagaggccagaggcggcggctacaccaacagaaccttcgagttcgacgacggccagtgcgcccccagaagaccctgcgccggcgacggcgccctgctggacaccgccggcttcaagatgagcgacctggacagcgaggtgctgcccctgccccccagatacagattcagagacctgctgctgggcgaccccagcttccagaacgacgacagagtgcaggtggagttctacgtgaacgagaacaccttcaaggagagactgaagctgttcttcatcaagaaccagagaagcagcctgagaatcagactgttcaacttcagcctgaagctgctgacctgcctgctgtacatcgtgagagtgctgctggacgaccccgccctgggcatcggctgctggggctgccccaagcagaactacagcttcaacgacagcagcagcgagatcaactgggcccccatcctgtgggtggagagaaagatgaccctgtgggccatccaggtgatcgtggccatcatcagcttcctggagaccatgctgctgatctacctgagctacaagggcaacatctgggagcagatcttcagagtgagcttcgtgctggagatgatcaacaccctgcccttcatcatcaccatcttctggccccccctgagaaacctgttcatccccgtgttcctgaactgctggctggccaagcacgccctggagaacatgatcaacgacttccacagagccatcctgagaacccagagcgccatgttcaaccaggtgctgatcctgttctgcaccctgctgtgcctggtgttcaccggcacctgcggcatccagcacctggagagagccggcgagaacctgagcctgctgaccagcttctacttctgcatcgtgaccttcagcaccgtgggctacggcgacgtgacccccaagatctggcccagccagctgctggtggtgatcatgatctgcgtggccctggtggtgctgcccctgcagttcgaggagctggtgtacctgtggatggagagacagaagagcggcggcaactacagcagacacagagcccagaccgagaagcacgtggtgctgtgcgtgagcagcctgaagatcgacctgctgatggacttcctgaacgagttctacgcccaccccagactgcaggactactacgtggtgatcctgtgccccaccgagatggacgtgcaggtgagaagagtgctgcagatccccctgtggagccagagagtgatctacctgcagggcagcgccctgaaggaccaggacctgatgagagccaagatggacaacggcgaggcctgcttcatcctgagcagcagaaacgaggtggacagaaccgccgccgaccaccagaccatcctgagagcctgggccgtgaaggacttcgcccccaactgccccctgtacgtgcagatcctgaagcccgagaacaagttccacgtgaagttcgccgaccacgtggtgtgcgaggaggagtgcaagtacgccatgctggccctgaactgcatctgccccgccaccagcaccctgatcaccctgctggtgcacaccagcagaggccaggagggccaggagagccccgagcagtggcagagaatgtacggcagatgcagcggcaacgaggtgtaccacatcagaatgggcgacagcaagttcttcagagagtacgagggcaagagcttcacctacgccgccttccacgcccacaagaagtacggcgtgtgcctgatcggcctgaagagagaggacaacaagagcatcctgctgaaccccggccccagacacatcctggccgccagcgacacctgcttctacatcaacatcaccaaggaggagaacagcgccttcatcttcaagcaggaggagaagagaaagaagagagccttcagcggccagggcctgcacgagggccccgccagactgcccgtgcacagcatcatcgccagcatgggcaccgtggccatggacctgcagggcaccgagcacagacccacccagagcggcggcggcggcggcggcagcaagctggccctgcccaccgagaacggcagcggcagcagaagacccagcatcgcccccgtgctggagctggccgacagcagcgccctgctgccctgcgacctgctgagcgaccagagcgaggacgaggtgacccccagcgacgacgagggcctgagcgtggtggagtacgtgaagggctacccccccaacagcccctacatcggcagcagccccaccctgtgccacctgctgcccgtgaaggcccccttctgctgcctgagactggacaagggctgcaagcacaacagctacgaggacgccaaggcctacggcttcaagaacaagctgatcatcgtgagcgccgagaccgccggcaacggcctgtacaacttcatcgtgcccctgagagcctactacagaagcagaaaggagctgaaccccatcgtgctgctgctggacaacaagcccgaccaccacttcctggaggccatctgctgcttccccatggtgtactacatggagggcagcgtggacaacctggacagcctgctgcagtgcggcatcatctacgccgacaacctggtggtggtggacaaggagagcaccatgagcgccgaggaggactacatggccgacgccaagaccatcgtgaacgtgcagaccatgttcagactgttccccagcctgagcatcaccaccgagctgacccaccccagcaacatgagattcatgcagttcagagccaaggacagctacagcctggccctgagcaagctggagaagagagagagagagaacggcagcaacctggccttcatgttcagactgcccttcgccgccggcagagtgttcagcatcagcatgctggacaccctgctgtaccagagcttcgtgaaggactacatgatcaccatcaccagactgctgctgggcctggacaccacccccggcagcggctacctgtgcgccatgaagatcaccgagggcgacctgtggatcagaacctacggcagactgttccagaagctgtgcagcagcagcgccgagatccccatcggcatctacagaaccgagagccacgtgttcagcaccagcgagccccacgacctgagagcccagagccagatcagcgtgaacgtggaggactgcgaggacaccagagaggtgaagggcccctggggcagcagagccggcaccggcggcagcagccagggcagacacaccggcggcggcgaccccgccgagcaccccctgctgagaagaaagagcctgcagtgggccagaagactgagcagaaaggcccccaagcaggccggcagagccgccgccgccgagtggatcagccagcagagactgagcctgtacagaagaagcgagagacaggagctgagcgagctggtgaagaacagaatgaagcacctgggcctgcccaccaccggctacgaggacgtggccaacctgaccgccagcgacgtgatgaacagagtgaacctgggctacctgcaggacgagatgaacgaccaccagaacaccctgagctacgtgctgatcaaccccccccccgacaccagactggagcccagcgacatcgtgtacctgatcagaagcgaccccctggcccacgtggccagcagcagccagagcagaaagagcagctgcagccacaagctgagcagctgcaaccccgagaccagagacgagacccagctgtag

SEQ ID NO: 206015 - DNA, 3708 bp, Artificial Sequence
  derived and/or modified sequence
atgcccctgcccgacggcgccagaacccccggcggcgtgtgcagagaggccagaggcggcggctacaccaacagaaccttcgagttcgacgacggccagtgcgcccccagaagaccctgcgccggcgacggcgccctgctggacaccgccggcttcaagatgagcgacctggacagcgaggtgctgcccctgccccccagatacagattcagagacctgctgctgggcgaccccagcttccagaacgacgacagagtgcaggtggagttctacgtgaacgagaacaccttcaaggagagactgaagctgttcttcatcaagaaccagagaagcagcctgagaatcagactgttcaacttcagcctgaagctgctgacctgcctgctgtacatcgtgagagtgctgctggacgaccccgccctgggcatcggctgctggggctgccccaagcagaactacagcttcaacgacagcagcagcgagatcaactgggcccccatcctgtgggtggagagaaagatgaccctgtgggccatccaggtgatcgtggccatcatcagcttcctggagaccatgctgctgatctacctgagctacaagggcaacatctgggagcagatcttcagagtgagcttcgtgctggagatgatcaacaccctgcccttcatcatcaccatcttctggccccccctgagaaacctgttcatccccgtgttcctgaactgctggctggccaagcacgccctggagaacatgatcaacgacttccacagagccatcctgagaacccagagcgccatgttcaaccaggtgctgatcctgttctgcaccctgctgtgcctggtgttcaccggcacctgcggcatccagcacctggagagagccggcgagaacctgagcctgctgaccagcttctacttctgcatcgtgaccttcagcaccgtgggctacggcgacgtgacccccaagatctggcccagccagctgctggtggtgatcatgatctgcgtggccctggtggtgctgcccctgcagttcgaggagctggtgtacctgtggatggagagacagaagagcggcggcaactacagcagacacagagcccagaccgagaagcacgtggtgctgtgcgtgagcagcctgaagatcgacctgctgatggacttcctgaacgagttctacgcccaccccagactgcaggactactacgtggtgatcctgtgccccaccgagatggacgtgcaggtgagaagagtgctgcagatccccctgtggagccagagagtgatctacctgcagggcagcgccctgaaggaccaggacctgatgagagccaagatggacaacggcgaggcctgcttcatcctgagcagcagaaacgaggtggacagaaccgccgccgaccaccagaccatcctgagagcctgggccgtgaaggacttcgcccccaactgccccctgtacgtgcagatcctgaagcccgagaacaagttccacgtgaagttcgccgaccacgtggtgtgcgaggaggagtgcaagtacgccatgctggccctgaactgcatctgccccgccaccagcaccctgatcaccctgctggtgcacaccagcagaggccaggagggccaggagagccccgagcagtggcagagaatgtacggcagatgcagcggcaacgaggtgtaccacatcagaatgggcgacagcaagttcttcagagagtacgagggcaagagcttcacctacgccgccttccacgcccacaagaagtacggcgtgtgcctgatcggcctgaagagagaggacaacaagagcatcctgctgaaccccggccccagacacatcctggccgccagcgacacctgcttctacatcaacatcaccaaggaggagaacagcgccttcatcttcaagcaggaggagaagagaaagaagagagccttcagcggccagggcctgcacgagggccccgccagactgcccgtgcacagcatcatcgccagcatgggcaccgtggccatggacctgcagggcaccgagcacagacccacccagagcggcggcggcggcggcggcagcaagctggccctgcccaccgagaacggcagcggcagcagaagacccagcatcgcccccgtgctggagctggccgacagcagcgccctgctgccctgcgacctgctgagcgaccagagcgaggacgaggtgacccccagcgacgacgagggcctgagcgtggtggagtacgtgaagggctacccccccaacagcccctacatcggcagcagccccaccctgtgccacctgctgcccgtgaaggcccccttctgctgcctgagactggacaagggctgcaagcacaacagctacgaggacgccaaggcctacggcttcaagaacaagctgatcatcgtgagcgccgagaccgccggcaacggcctgtacaacttcatcgtgcccctgagagcctactacagaagcagaaaggagctgaaccccatcgtgctgctgctggacaacaagcccgaccaccacttcctggaggccatctgctgcttccccatggtgtactacatggagggcagcgtggacaacctggacagcctgctgcagtgcggcatcatctacgccgacaacctggtggtggtggacaaggagagcaccatgagcgccgaggaggactacatggccgacgccaagaccatcgtgaacgtgcagaccatgttcagactgttccccagcctgagcatcaccaccgagctgacccaccccagcaacatgagattcatgcagttcagagccaaggacagctacagcctggccctgagcaagctggagaagagagagagagagaacggcagcaacctggccttcatgttcagactgcccttcgccgccggcagagtgttcagcatcagcatgctggacaccctgctgtaccagagcttcgtgaaggactacatgatcaccatcaccagactgctgctgggcctggacaccacccccggcagcggctacctgtgcgccatgaagatcaccgagggcgacctgtggatcagaacctacggcagactgttccagaagctgtgcagcagcagcgccgagatccccatcggcatctacagaaccgagagccacgtgttcagcaccagcgagccccacgacctgagagcccagagccagatcagcgtgaacgtggaggactgcgaggacaccagagaggtgaagggcccctggggcagcagagccggcaccggcggcagcagccagggcagacacaccggcggcggcgaccccgccgagcaccccctgctgagaagaaagagcctgcagtgggccagaagactgagcagaaaggcccccaagcaggccggcagagccgccgccgccgagtggatcagccagcagagactgagcctgtacagaagaagcgagagacaggagctgagcgagctggtgaagaacagaatgaagcacctgggcctgcccaccaccggctacgacgagatgaacgaccaccagaacaccctgagctacgtgctgatcaaccccccccccgacaccagactggagcccagcgacatcgtgtacctgatcagaagcgaccccctggcccacgtggccagcagcagccagagcagaaagagcagctgcagccacaagctgagcagctgcaaccccgagaccagagacgagacccagctgtag

SEQ ID NO: 206016 - protein, 644 aa, Artificial Sequence
  derived and/or modified sequence
MLRTDAGEDLADAPAEELQEKGSPAGPPPSQGQPAARPPKEVPASRLAQQLREEGWNLQTSESLTLAEVYLMMGKPSKLQLEYDWLGPGRQDPRPGSLPTALHKQRLLSCLLKLISTEVNPKLALEANTISTASVRPAQEEQSMTPPGKVVTVSSRSPRCPRNQASLRSSKTFPPSSAPCSSGLRNPPRPLLVPGPSSTGSNDSDGGLFAVPTTLPPNSRHGKLFSPSKEAELTFRQHLNSISMQSDFFLPKPRKLRNRHLRKPLVVQRTLLPRPSENQSHNVCSFSILSNSSVTGRGSFRPIQSSLTKAALSRPIVPKVLPPQATSHLASAIDLAATSAGILSGNPLPALDTEGLSGISPLSSDEVTGAISGQDSTGTHQDGDTLPTVGGSDPFVSIPSRPEQEPVADSFQGSSVLSLSELPKAPLQNGLSIPLSSSESSSTRLSPPDVSALLDISLPGPPEDALSQGEPATHISDSIIEIAISSGEGVPLSPAKLNGSDSSKSLPSPSSSPQPHWIASPTHDPQWYPSDSTDSSLSSLFASFISPEKSRKMLPTPIGTNSGTSLLGPSLLDGNSRDSFVSRSLADVAEVVDSQLVCMMNENSIDYISRFNDLAQELSIAEPGRREALFDGGGGGPAVSDLSQ

SEQ ID NO: 206017 - protein, 1269 aa, Artificial Sequence
  derived and/or modified sequence
MTVKLGDGGSGEDGLKKLGKRAADEESLEGEGAGGADAAEESSGTKRDEKTPRAGADGPPAPPGAPQAPSPPQGSPQDQHHFLRSSVRPQSKRPRKDPPSAVGSGNAGGSGPRGKGAEGGGSSSGNVSGVAPAAPAGGSRSSSRNLGSSGGEKEEGKKVRRQWESWSTEDKNTFFEGLYEHGKDFEAIQNNIALKYKKKGKPASMVKNKEQVRHFYYRTWHKITKYIDFDHVFSRGLKKSSQELYGLICYGELRKKIGGCMDDKNATKLNELIQVGATTVRYKGRNLRIKAPMCRALKKLCDPDGLSDEEDQKPVRLPLKVPIELQPRNNHAWARVQSLAQNPRLRMIVELHRKVSSLIEFLKQKWALHEVRVRKTLEERQLQDSCSAPMQEKVTLHLFPGENCTLTPLPGVARVVHSKAFCTVHWQEGGRCKQSAKDAHVLPPAQILGIQSGQGTARGQVKCPRSGAEGKGVGRPPPAADALQSSGESSPESAPGEGAALSLSSPDAPDRPPPRHQDTGPCLEKTPAEGRDSPTREPGALPCACGQLPDLEDELSLLDPLPRYLKSCQDLIVPEQCRCADTRPGSEQPPLGGAASPEVLAPVSKEAADLAPTGPSPRPGPGLLLDVCTKDLADAPAEELQEKGSPAGPPPSQGQPAARPPKEVPASRLAQQLREEGWNLQTSESLTLAEVYLMMGKPSKLQLEYDWLGPGRQDPRPGSLPTALHKQRLLSCLLKLISTEVNPKLALEANTISTASVRPAQEEQSMTPPGKVVTVSSRSPRCPRNQASLRSSKTFPPSSAPCSSGLRNPPRPLLVPGPSSTGSNDSDGGLFAVPTTLPPNSRHGKLFSPSKEAELTFRQHLNSISMQSDFFLPKPRKLRNRHLRKPLVVQRTLLPRPSENQSHNVCSFSILSNSSVTGRGSFRPIQSSLTKAALSRPIVPKVLPPQATSHLASAIDLAATSAGILSGNPLPALDTEGLSGISPLSSDEVTGAISGQDSTGTHQDGDTLPTVGGSDPFVSIPSRPEQEPVADSFQGSSVLSLSELPKAPLQNGLSIPLSSSESSSTRLSPPDVSALLDISLPGPPEDALSQGEPATHISDSIIEIAISSGQYGEGVPLSPAKLNGSDSSKSLPSPSSSPQPHWIASPTHDPQWYPSDSTDSSLSSLFASFISPEKSRKMLPTPIGTNSGTSLLGPSLLDGNSRDSFVSRSLADVAEVVDSQLVCMMNENSIDYISRFNDLAQELSIAEPGRREALFDGGGGGPAVSDLSQ

SEQ ID NO: 206018 - protein, 1266 aa, Artificial Sequence
  derived and/or modified sequence
MTVKLGDGGSGEDGLKKLGKRAADEESLEGEGAGGADAAEESSGTKRDEKTPRAGADGPPAPPGAPQAPSPPQGSPQDQHHFLRSSVRPQSKRPRKDPPSAVGSGNAGGSGPRGKDRHLPKAQLWLSISRVPFGGSRSSSRNLGSSGGEKEEGKKVRRQWESWSTEDKNTFFEGLYEHGKDFEAIQNNIALKYKKKGKPASMVKNKEQVRHFYYRTWHKITKYIDFDHVFSRGLKKSSQELYGLICYGELRKKIGGCMDDKNATKLNELIQVGATTVRYKGRNLRIKAPMCRALKKLCDPDGLSDEEDQKPVRLPLKVPIELQPRNNHAWARVQSLAQNPRLRMIVELHRKVSSLIEFLKQKWALHEVRVRKTLEERQLQDSCSAPMQEKVTLHLFPGENCTLTPLPGVARVVHSKAFCTVHWQEGGRCKQSAKDAHVLPPAQILGIQSGQGTARGQVKCPRSGAEGKGVGRPPPAADALQSSGESSPESAPGEGAALSLSSPDAPDRPPPRHQDTGPCLEKTPAEGRDSPTREPGALPCACGQLPDLEDELSLLDPLPRYLKSCQDLIVPEQCRCADTRPGSEQPPLGGAASPEVLAPVSKEAADLAPTGPSPRPGPGLLLDVCTKDLADAPAEELQEKGSPAGPPPSQGQPAARPPKEVPASRLAQQLREEGWNLQTSESLTLAEVYLMMGKPSKLQLEYDWLGPGRQDPRPGSLPTALHKQRLLSCLLKLISTEVNPKLALEANTISTASVRPAQEEQSMTPPGKVVTVSSRSPRCPRNQASLRSSKTFPPSSAPCSSGLRNPPRPLLVPGPSSTGSNDSDGGLFAVPTTLPPNSRHGKLFSPSKEAELTFRQHLNSISMQSDFFLPKPRKLRNRHLRKPLVVQRTLLPRPSENQSHNVCSFSILSNSSVTGRGSFRPIQSSLTKAALSRPIVPKVLPPQATSHLASAIDLAATSAGILSGNPLPALDTEGLSGISPLSSDEVTGAISGQDSTGTHQDGDTLPTVGGSDPFVSIPSRPEQEPVADSFQGSSVLSLSELPKAPLQNGLSIPLSSSESSSTRLSPPDVSALLDISLPGPPEDALSQGEPATHISDSIIEIAISSGQYGEGVPLSPAKLNGSDSSKSLPSPSSSPQPHWIASPTHDPQWYPSDSTDSSLSSLFASFISPEKSRKMLPTPIGTNSGTSLLGPSLLDGNSRDSFVSRSLADVAEVVDSQLVCMMNENSIDYISRFNDLAQELSIAEPGRREALFDGGGGGPAVSDLSQ

SEQ ID NO: 206019 - DNA, 1935 bp, Artificial Sequence
  derived and/or modified sequence
atgctgagaaccgacgccggcgaggacctggccgacgcccccgccgaggagctgcaggagaagggcagccccgccggccccccccccagccagggccagcccgccgccagaccccccaaggaggtgcccgccagcagactggcccagcagctgagagaggagggctggaacctgcagaccagcgagagcctgaccctggccgaggtgtacctgatgatgggcaagcccagcaagctgcagctggagtacgactggctgggccccggcagacaggaccccagacccggcagcctgcccaccgccctgcacaagcagagactgctgagctgcctgctgaagctgatcagcaccgaggtgaaccccaagctggccctggaggccaacaccatcagcaccgccagcgtgagacccgcccaggaggagcagagcatgaccccccccggcaaggtggtgaccgtgagcagcagaagccccagatgccccagaaaccaggccagcctgagaagcagcaagaccttcccccccagcagcgccccctgcagcagcggcctgagaaacccccccagacccctgctggtgcccggccccagcagcaccggcagcaacgacagcgacggcggcctgttcgccgtgcccaccaccctgccccccaacagcagacacggcaagctgttcagccccagcaaggaggccgagctgaccttcagacagcacctgaacagcatcagcatgcagagcgacttcttcctgcccaagcccagaaagctgagaaacagacacctgagaaagcccctggtggtgcagagaaccctgctgcccagacccagcgagaaccagagccacaacgtgtgcagcttcagcatcctgagcaacagcagcgtgaccggcagaggcagcttcagacccatccagagcagcctgaccaaggccgccctgagcagacccatcgtgcccaaggtgctgcccccccaggccaccagccacctggccagcgccatcgacctggccgccaccagcgccggcatcctgagcggcaaccccctgcccgccctggacaccgagggcctgagcggcatcagccccctgagcagcgacgaggtgaccggcgccatcagcggccaggacagcaccggcacccaccaggacggcgacaccctgcccaccgtgggcggcagcgaccccttcgtgagcatccccagcagacccgagcaggagcccgtggccgacagcttccagggcagcagcgtgctgagcctgagcgagctgcccaaggcccccctgcagaacggcctgagcatccccctgagcagcagcgagagcagcagcaccagactgagcccccccgacgtgagcgccctgctggacatcagcctgcccggcccccccgaggacgccctgagccagggcgagcccgccacccacatcagcgacagcatcatcgagatcgccatcagcagcggcgagggcgtgcccctgagccccgccaagctgaacggcagcgacagcagcaagagcctgcccagccccagcagcagcccccagccccactggatcgccagccccacccacgacccccagtggtaccccagcgacagcaccgacagcagcctgagcagcctgttcgccagcttcatcagccccgagaagagcagaaagatgctgcccacccccatcggcaccaacagcggcaccagcctgctgggccccagcctgctggacggcaacagcagagacagcttcgtgagcagaagcctggccgacgtggccgaggtggtggacagccagctggtgtgcatgatgaacgagaacagcatcgactacatcagcagattcaacgacctggcccaggagctgagcatcgccgagcccggcagaagagaggccctgttcgacggcggcggcggcggccccgccgtgagcgacctgagccagtag

SEQ ID NO: 206020 - DNA, 3810 bp, Artificial Sequence
  derived and/or modified sequence
atgaccgtgaagctgggcgacggcggcagcggcgaggacggcctgaagaagctgggcaagagagccgccgacgaggagagcctggagggcgagggcgccggcggcgccgacgccgccgaggagagcagcggcaccaagagagacgagaagacccccagagccggcgccgacggcccccccgccccccccggcgccccccaggcccccagccccccccagggcagcccccaggaccagcaccacttcctgagaagcagcgtgagaccccagagcaagagacccagaaaggacccccccagcgccgtgggcagcggcaacgccggcggcagcggccccagaggcaagggcgccgagggcggcggcagcagcagcggcaacgtgagcggcgtggcccccgccgcccccgccggcggcagcagaagcagcagcagaaacctgggcagcagcggcggcgagaaggaggagggcaagaaggtgagaagacagtgggagagctggagcaccgaggacaagaacaccttcttcgagggcctgtacgagcacggcaaggacttcgaggccatccagaacaacatcgccctgaagtacaagaagaagggcaagcccgccagcatggtgaagaacaaggagcaggtgagacacttctactacagaacctggcacaagatcaccaagtacatcgacttcgaccacgtgttcagcagaggcctgaagaagagcagccaggagctgtacggcctgatctgctacggcgagctgagaaagaagatcggcggctgcatggacgacaagaacgccaccaagctgaacgagctgatccaggtgggcgccaccaccgtgagatacaagggcagaaacctgagaatcaaggcccccatgtgcagagccctgaagaagctgtgcgaccccgacggcctgagcgacgaggaggaccagaagcccgtgagactgcccctgaaggtgcccatcgagctgcagcccagaaacaaccacgcctgggccagagtgcagagcctggcccagaaccccagactgagaatgatcgtggagctgcacagaaaggtgagcagcctgatcgagttcctgaagcagaagtgggccctgcacgaggtgagagtgagaaagaccctggaggagagacagctgcaggacagctgcagcgcccccatgcaggagaaggtgaccctgcacctgttccccggcgagaactgcaccctgacccccctgcccggcgtggccagagtggtgcacagcaaggccttctgcaccgtgcactggcaggagggcggcagatgcaagcagagcgccaaggacgcccacgtgctgccccccgcccagatcctgggcatccagagcggccagggcaccgccagaggccaggtgaagtgccccagaagcggcgccgagggcaagggcgtgggcagacccccccccgccgccgacgccctgcagagcagcggcgagagcagccccgagagcgcccccggcgagggcgccgccctgagcctgagcagccccgacgcccccgacagacccccccccagacaccaggacaccggcccctgcctggagaagacccccgccgagggcagagacagccccaccagagagcccggcgccctgccctgcgcctgcggccagctgcccgacctggaggacgagctgagcctgctggaccccctgcccagatacctgaagagctgccaggacctgatcgtgcccgagcagtgcagatgcgccgacaccagacccggcagcgagcagccccccctgggcggcgccgccagccccgaggtgctggcccccgtgagcaaggaggccgccgacctggcccccaccggccccagccccagacccggccccggcctgctgctggacgtgtgcaccaaggacctggccgacgcccccgccgaggagctgcaggagaagggcagccccgccggccccccccccagccagggccagcccgccgccagaccccccaaggaggtgcccgccagcagactggcccagcagctgagagaggagggctggaacctgcagaccagcgagagcctgaccctggccgaggtgtacctgatgatgggcaagcccagcaagctgcagctggagtacgactggctgggccccggcagacaggaccccagacccggcagcctgcccaccgccctgcacaagcagagactgctgagctgcctgctgaagctgatcagcaccgaggtgaaccccaagctggccctggaggccaacaccatcagcaccgccagcgtgagacccgcccaggaggagcagagcatgaccccccccggcaaggtggtgaccgtgagcagcagaagccccagatgccccagaaaccaggccagcctgagaagcagcaagaccttcccccccagcagcgccccctgcagcagcggcctgagaaacccccccagacccctgctggtgcccggccccagcagcaccggcagcaacgacagcgacggcggcctgttcgccgtgcccaccaccctgccccccaacagcagacacggcaagctgttcagccccagcaaggaggccgagctgaccttcagacagcacctgaacagcatcagcatgcagagcgacttcttcctgcccaagcccagaaagctgagaaacagacacctgagaaagcccctggtggtgcagagaaccctgctgcccagacccagcgagaaccagagccacaacgtgtgcagcttcagcatcctgagcaacagcagcgtgaccggcagaggcagcttcagacccatccagagcagcctgaccaaggccgccctgagcagacccatcgtgcccaaggtgctgcccccccaggccaccagccacctggccagcgccatcgacctggccgccaccagcgccggcatcctgagcggcaaccccctgcccgccctggacaccgagggcctgagcggcatcagccccctgagcagcgacgaggtgaccggcgccatcagcggccaggacagcaccggcacccaccaggacggcgacaccctgcccaccgtgggcggcagcgaccccttcgtgagcatccccagcagacccgagcaggagcccgtggccgacagcttccagggcagcagcgtgctgagcctgagcgagctgcccaaggcccccctgcagaacggcctgagcatccccctgagcagcagcgagagcagcagcaccagactgagcccccccgacgtgagcgccctgctggacatcagcctgcccggcccccccgaggacgccctgagccagggcgagcccgccacccacatcagcgacagcatcatcgagatcgccatcagcagcggccagtacggcgagggcgtgcccctgagccccgccaagctgaacggcagcgacagcagcaagagcctgcccagccccagcagcagcccccagccccactggatcgccagccccacccacgacccccagtggtaccccagcgacagcaccgacagcagcctgagcagcctgttcgccagcttcatcagccccgagaagagcagaaagatgctgcccacccccatcggcaccaacagcggcaccagcctgctgggccccagcctgctggacggcaacagcagagacagcttcgtgagcagaagcctggccgacgtggccgaggtggtggacagccagctggtgtgcatgatgaacgagaacagcatcgactacatcagcagattcaacgacctggcccaggagctgagcatcgccgagcccggcagaagagaggccctgttcgacggcggcggcggcggccccgccgtgagcgacctgagccagtag

SEQ ID NO: 206021 - DNA, 3801 bp, Artificial Sequence
  derived and/or modified sequence
atgaccgtgaagctgggcgacggcggcagcggcgaggacggcctgaagaagctgggcaagagagccgccgacgaggagagcctggagggcgagggcgccggcggcgccgacgccgccgaggagagcagcggcaccaagagagacgagaagacccccagagccggcgccgacggcccccccgccccccccggcgccccccaggcccccagccccccccagggcagcccccaggaccagcaccacttcctgagaagcagcgtgagaccccagagcaagagacccagaaaggacccccccagcgccgtgggcagcggcaacgccggcggcagcggccccagaggcaaggacagacacctgcccaaggcccagctgtggctgagcatcagcagagtgcccttcggcggcagcagaagcagcagcagaaacctgggcagcagcggcggcgagaaggaggagggcaagaaggtgagaagacagtgggagagctggagcaccgaggacaagaacaccttcttcgagggcctgtacgagcacggcaaggacttcgaggccatccagaacaacatcgccctgaagtacaagaagaagggcaagcccgccagcatggtgaagaacaaggagcaggtgagacacttctactacagaacctggcacaagatcaccaagtacatcgacttcgaccacgtgttcagcagaggcctgaagaagagcagccaggagctgtacggcctgatctgctacggcgagctgagaaagaagatcggcggctgcatggacgacaagaacgccaccaagctgaacgagctgatccaggtgggcgccaccaccgtgagatacaagggcagaaacctgagaatcaaggcccccatgtgcagagccctgaagaagctgtgcgaccccgacggcctgagcgacgaggaggaccagaagcccgtgagactgcccctgaaggtgcccatcgagctgcagcccagaaacaaccacgcctgggccagagtgcagagcctggcccagaaccccagactgagaatgatcgtggagctgcacagaaaggtgagcagcctgatcgagttcctgaagcagaagtgggccctgcacgaggtgagagtgagaaagaccctggaggagagacagctgcaggacagctgcagcgcccccatgcaggagaaggtgaccctgcacctgttccccggcgagaactgcaccctgacccccctgcccggcgtggccagagtggtgcacagcaaggccttctgcaccgtgcactggcaggagggcggcagatgcaagcagagcgccaaggacgcccacgtgctgccccccgcccagatcctgggcatccagagcggccagggcaccgccagaggccaggtgaagtgccccagaagcggcgccgagggcaagggcgtgggcagacccccccccgccgccgacgccctgcagagcagcggcgagagcagccccgagagcgcccccggcgagggcgccgccctgagcctgagcagccccgacgcccccgacagacccccccccagacaccaggacaccggcccctgcctggagaagacccccgccgagggcagagacagccccaccagagagcccggcgccctgccctgcgcctgcggccagctgcccgacctggaggacgagctgagcctgctggaccccctgcccagatacctgaagagctgccaggacctgatcgtgcccgagcagtgcagatgcgccgacaccagacccggcagcgagcagccccccctgggcggcgccgccagccccgaggtgctggcccccgtgagcaaggaggccgccgacctggcccccaccggccccagccccagacccggccccggcctgctgctggacgtgtgcaccaaggacctggccgacgcccccgccgaggagctgcaggagaagggcagccccgccggccccccccccagccagggccagcccgccgccagaccccccaaggaggtgcccgccagcagactggcccagcagctgagagaggagggctggaacctgcagaccagcgagagcctgaccctggccgaggtgtacctgatgatgggcaagcccagcaagctgcagctggagtacgactggctgggccccggcagacaggaccccagacccggcagcctgcccaccgccctgcacaagcagagactgctgagctgcctgctgaagctgatcagcaccgaggtgaaccccaagctggccctggaggccaacaccatcagcaccgccagcgtgagacccgcccaggaggagcagagcatgaccccccccggcaaggtggtgaccgtgagcagcagaagccccagatgccccagaaaccaggccagcctgagaagcagcaagaccttcccccccagcagcgccccctgcagcagcggcctgagaaacccccccagacccctgctggtgcccggccccagcagcaccggcagcaacgacagcgacggcggcctgttcgccgtgcccaccaccctgccccccaacagcagacacggcaagctgttcagccccagcaaggaggccgagctgaccttcagacagcacctgaacagcatcagcatgcagagcgacttcttcctgcccaagcccagaaagctgagaaacagacacctgagaaagcccctggtggtgcagagaaccctgctgcccagacccagcgagaaccagagccacaacgtgtgcagcttcagcatcctgagcaacagcagcgtgaccggcagaggcagcttcagacccatccagagcagcctgaccaaggccgccctgagcagacccatcgtgcccaaggtgctgcccccccaggccaccagccacctggccagcgccatcgacctggccgccaccagcgccggcatcctgagcggcaaccccctgcccgccctggacaccgagggcctgagcggcatcagccccctgagcagcgacgaggtgaccggcgccatcagcggccaggacagcaccggcacccaccaggacggcgacaccctgcccaccgtgggcggcagcgaccccttcgtgagcatccccagcagacccgagcaggagcccgtggccgacagcttccagggcagcagcgtgctgagcctgagcgagctgcccaaggcccccctgcagaacggcctgagcatccccctgagcagcagcgagagcagcagcaccagactgagcccccccgacgtgagcgccctgctggacatcagcctgcccggcccccccgaggacgccctgagccagggcgagcccgccacccacatcagcgacagcatcatcgagatcgccatcagcagcggccagtacggcgagggcgtgcccctgagccccgccaagctgaacggcagcgacagcagcaagagcctgcccagccccagcagcagcccccagccccactggatcgccagccccacccacgacccccagtggtaccccagcgacagcaccgacagcagcctgagcagcctgttcgccagcttcatcagccccgagaagagcagaaagatgctgcccacccccatcggcaccaacagcggcaccagcctgctgggccccagcctgctggacggcaacagcagagacagcttcgtgagcagaagcctggccgacgtggccgaggtggtggacagccagctggtgtgcatgatgaacgagaacagcatcgactacatcagcagattcaacgacctggcccaggagctgagcatcgccgagcccggcagaagagaggccctgttcgacggcggcggcggcggccccgccgtgagcgacctgagccagtag

SEQ ID NO: 206022 - DNA, 5796 bp, Artificial Sequence
  derived and/or modified sequence
atgctccgcaccgatgcaggagaagacttggcagatgcacctgcggaggagctccaggagaaggggagccccgcggggcctccgccgtctcagggacagcctgccgccaggcccccgaaggaggtccccgccagccggctggctcagcagctccgtgaggagggctggaacctgcagacctccgaaagcctcacgctggccgaagtctacctcatgatgggcaagcccagcaagctgcagctggagtacgactggctggggcccggccgccaggacccccgccccggctccctacccaccgccctccacaagcagcgcctcctcagctgcctcctgaagctcatttccaccgaggtcaaccccaagctggctctggaagcaaacaccatctctacagcctcagtaaggcccgcccaggaggagcagtcgatgacgcccccagggaaggtggtgaccgtcagctctcgcagcccccgctgccctcggaaccaggcctccctccgcagcagcaagaccttcccgcccagctctgcaccctgctcctcaggtttgagaaaccctccaagacccctcttggtgcctggtccctccagcacaggaagcaatgactcagatggaggcctttttgctgtcccgacaaccttgccacccaacagccgacacgggaagctcttctctcccagtaaagaagcagagctgactttccgccagcatctgaactccatcagtatgcagtcggatttcttcctgccaaagccccggaagctgcggaaccggcacctgcggaagccactggtggtccagagaacactgctccctagaccatcggaaaaccagtcccacaacgtttgttccttctccatcctgtctaactcttccgtaactgggagaggttcgttccggcccatccagtcttctctgaccaaagcagctctgtctcggccgatcgtgcccaaggtccttccaccccaggccacgagtcacctggccagtgctatcgacttagcagctacaagtgccggcatcctttccgggaaccccctccctgccttggacaccgagggcttgtctggcatctctccactgtcttcagacgaggtgacgggtgccatctcggggcaggactctactggaactcaccaggatggagacaccctccccaccgtggggggctccgacccatttgtcagcatcccttcgaggcctgagcaggagccagtggcagacagtttccagggctcatctgttctctccttatctgagctgcccaaggcccctctccagaatggcctctccataccgctgtcctcgtcagagagctccagcacccggctgtctccaccagacgtctctgctctgctcgacatctccctgcccggcccacctgaggatgcgctgtcacagggcgagcctgccacacacattagcgactccatcattgagatcgccatcagctccggtgaaggagtccctctttctccagcaaaactgaatggcagtgacagttccaagagccttccctccccgtccagcagcccccagccacactggatcgcctctcccacccacgacccccagtggtaccccagtgactccaccgactcctcgctcagcagcctgtttgcaagcttcatctccccagagaagagccggaagatgttgccgactcccattgggaccaacagtggcacttccttgcttggccccagcttgttggatggaaactcgcgggactcatttgtgtccaggtccctggctgacgttgcagaggttgtggattcccagctggtgtgcatgatgaacgaaaacagcattgattacatttctcggttcaatgacctggcccaagagctgtccatcgctgagcctggccgccgagaagctctgtttgatggtggtggaggcggccccgctgtcagtgacctgtcccagtgaccacacgtcctggtggcggatgaagccctcttcgagctagagaaaaatagataagcccagcagccccagaagatggtctgaacagaggcatctccgcacccaagactgtgcaacgggcaggaacgtggtcacagagctgcttccccacgagcagcaggcaacggcgtccaaggagactaggatgagttcttggcaagggccagcgttagaaatcactgtggtactagagccgttcttcaccacgcctgggcccatgttagggtctgcataatgatcccatttcagcctgtgctctgcctcgattgttgtgttggacattccggtggcatttccttctgagacaagggagtatgtgtgccttggtgtagttgctgtgcactaggagctgtgatctccctctctgcagggaggccccagcccctgctgcttgctttctgccaaacctgtgctatgcatcagctgtgccctctgtggactgtaacgggcaggacagttgggtgtggcctgggctcatgcctggtggtgtcacatcccaaggcagcaagagcatggataccgatcacagggctgctgcggagtcgtggggccctgggctggtgcctcccctccctagaggttttgttcgtactcttaacagggagtgggggcaggaagagtcctgtactatgcaggttgtgtggactttacatgggaccctgctaagctggttgaaaatgtttttcttgtgttttaagaattaggagacatggaagaggaagaacaaagtcccctctgtagttggtttccttcctgtgtccctttgcaagcttccaggcgatctaaggtgtcatttctccctcctggggtgacccttaggcgctaatatgattacagcgaagactttcctgataagttctcaaactcgatgtgtgactgtttggcacttgagacaaacctgcctttgcagggaaagtgtctctcacgggcattggtgtgggcgtgcctgacatacgtgttcagtcccttgcatacctttgccttgagacttctgtgtctccttcccatttgggacacccaggtgagggcccagacatctggatgtggtcagacctcaccaaatatatgccttcgtggtggtctccctccttgcgccctcttgggtggccagcgttcctactgcagacggcccaacatccagtctttccccaggacagagctaacaagggcccctttgccttctcatcctcaggagttccaggcacatgagtcaccgtccatccacatccagtgtggcctggagctgctacagaggtgttgggcaggccatgcctgtgccgccatctctcccttcctgcctcatttcatcccccgcagcagccgggattgattgtgctttcctaacccccttggacctactctccctcctccccaccattcctcttcccccacatgtgtggcacgctgcagccctcaaggccagccctggcccctccactgcttctctccccatccacaatggagaaggtgaaaagaggagggaaaggcctttggtgtggacaagcatgtggacgccctccgtcctgcagtcttgccagcccaccacagccactgtagaccacaggcaggccgtgtactgcaccactgggaggacgtggagaggacagtgaacttccaggcaagagcttccttcttttgtctcacgagtttttcttagagctcttgcctgagctggcttccctccttcagacattgacatgagatcttaagcaaacagtcccaaacctcttaggggtgaaaaaagaaacatgccacttgattaggagagagacagcagtgtttgaactacagcatctttacactagcttgtgttttgtgctacgtataccagcttccaaaattagcatctcattgagccagagaagacaaggagatctccctctgggcatctggctttgctgcgtctctagagggttaggataccaggccgagttcaggccactgctagctttctcatactcccacaggctagaccagagatgccaagtcccaacagcactgagctgtgtgcactgtgccagggacaggagggtttgtgaactgcctgtcagggtacctgttagcccctgacaactcagtggggtgaagttttggaggtcagagtctgctttcgtaggctctttagacagcacctaccacttggttctccagcgtagactcctgggagcagccaactgcagccattgccatccagtggggagatgggttagggaggaggacgggctgactcctctcctgtaataaagctgacaagagttctagaggattctgcttctctagtaactagacaggtgatacgcatttgcttgccacattaagggaaaatggtgtcatttgttgcagaaaaacaatggatacattttcttctggcctaaatgaatatttatgtgcaaacataggcaactgttaaaggctggaattttcaaaagatccaaacagagacttcctgcatcttctgcctttccaacagaagcggtgatcgtctaagtatgagcctgtggcttcctttgtgcatttgagcatgctgtaattaagatgagatcagtttcttagaaaaagctttcctgaatccctctgacgttgcctgggatctttctgttgattcgtcttttctggagattgggacagagcatctgtggtccagggaagttagtcctctggcctcaattctgttgtggatgtgcagtgataagcgggcattgcgtgcctcgggggatgcctagttcgtggcttcctggctgttttgtccttctgtgtcttgtagctgtagggtgccagctcagggagtggggtgttggcggcgtttccgcggttggcctccttgctttgccgcacctccaggttctgggcatgagaggccgtggcctcatttctggtggataacctttttagtttaatagcatctttaattagatcacagcattgaattcaaaatttcttctgcaaagaaagttgtggggcataagacaccgggaatgagggaggaggaagacagttgtgttttctctttaaaccttgagctctagccgatgcatttgtcaggaaatacagcactttgtcttaagaaaacaaggaaggaggccgggcgcagtggctcacgcctgtaatcccagcactttgggaggccgaggcgggcggatcacctgaggtggggagtatgagaccaccctgactaacatggagagaccctgtctctactaaaagtacagaattagccgggcgtggtggcgcatgcccataatcccagctactgaggagacttgaggtaggagaatcacttgaacctcagcggcggaggttgcagtgagtcgagatcgcgccagtgcactccagcctgggcaagaagagcgaaactgggtctcaagttaaaaaaagaaagcaaggaaagagtaatttacaacgaaggaaaaaaacccacagcacacccttcgcggctgtcagcgctctcctgatgtcacagtggctgcgtgtccttggggtgggtgaggtgtggggagcccagcccctggccctgcctcccgcgccccgctccccttctctctcttactcggttaagccatagcgaggcctccgctcgtttcagatatgaatttgttttatagattataaatatgcatatacagtgtatgtataaagcagaatgcctgcctttcctggttattttttgtaccatattgtaaattatattatttattctttaccaattttgggaataaaaggtgttttggttatttaatataataagagctgttaaacttctgtttaaatttccagttcaacttgtaaatgtttttattgtgcataaatacatactaatgttgatct

SEQ ID NO: 206023 - DNA, 7671 bp, Artificial Sequence
  derived and/or modified sequence
atgacagtgaagttgggcgacggcggcagcggggaggacgggctcaagaagctgggcaagcgggcggccgatgaggagtccctggaaggagaaggggccggcggcgcagacgcggccgaggagagcagcggcacaaagagggacgagaagaccccccgggccggcgccgacggcccccccgcgccccccggcgcgccgcaggcgccgtccccgccgcagggcagcccccaggaccagcaccacttcctccggtccagcgtgcggccgcagagcaagaggcccaggaaggatcctccgagcgctgtggggagcggcaacgccggtggctcggggccccgcggaaaaggagctgaaggtggtggatcatcgtctggaaatgtgtctggggttgcccctgctgcccctgcagggggctcgcgctcctcctcccggaacttagggtcttctggtggcgagaaggaagaaggcaaaaaggtccggcggcagtgggagtcgtggagcacagaggacaagaacaccttcttcgaggggctgtacgagcatgggaaagactttgaagcgattcagaacaacattgcgctgaagtacaagaagaaaggcaagccagcaagcatggtgaagaacaaggagcaggtccgccacttctactaccgcacctggcacaagatcaccaagtacatcgactttgatcatgtgttctctcgaggcctgaagaagtcatcccaggaactgtatggcctgatctgctatggcgagctgcgcaagaagattgggggctgtatggatgacaagaatgcaacaaagctgaatgaactcattcaggttggggccaccactgtacgttacaaagggcggaacctgcggatcaaagcgcccatgtgccgggccctgaagaagctgtgcgatccagatggcttgagtgatgaagaggaccagaagccagtgcgcctgcctctgaaagtccctatagagctacagccgcggaacaaccacgcctgggcccgtgtgcagagccttgcccagaacccacgcctcaggatgatcgtggagctacatcgaaaggtctccagcctcatcgaattcttgaagcagaagtgggcgctccatgaggtgcgagttcggaagacactcgaggagcggcagctgcaggactcatgctccgcaccgatgcaggagaaggtgacactgcacttgttcccaggcgagaactgtacactgacaccgctgccgggcgtggctcgcgtggtgcactccaaggccttctgcacagtgcactggcaggagggcggccggtgcaagcagagtgccaaggacgcccacgtgctgcccccagcccagatcctgggcatccagagtgggcagggcacggcccggggccaggtgaaatgcccgcggagcggagctgagggcaagggtgtggggcggccccctcctgcggctgacgccttgcagagctccggagagagttcccccgaaagcgcccccggggagggggctgccctaagcttgagcagcccggacgctcctgacaggcctcctcccaggcaccaggacactgggccatgtcttgagaagacccctgcagaaggcagggacagtcccacccgggagccaggggccttgccgtgtgcctgtggccagctcccagacctggaggacgagctctcgcttctagaccccttgccccgctacctaaagtcctgtcaggacctcattgtccccgagcagtgccgctgtgcggacacacggcctgggagcgagcagccccctctgggcggggcggcctccccagaggtgctggctcctgtcagcaaggaggctgctgaccttgctcccactggcccatccccgaggcccggccccgggctcctgctggatgtttgcactaaagacttggcagatgcacctgcggaggagctccaggagaaggggagccccgcggggcctccgccgtctcagggacagcctgccgccaggcccccgaaggaggtccccgccagccggctggctcagcagctccgtgaggagggctggaacctgcagacctccgaaagcctcacgctggccgaagtctacctcatgatgggcaagcccagcaagctgcagctggagtacgactggctggggcccggccgccaggacccccgccccggctccctacccaccgccctccacaagcagcgcctcctcagctgcctcctgaagctcatttccaccgaggtcaaccccaagctggctctggaagcaaacaccatctctacagcctcagtaaggcccgcccaggaggagcagtcgatgacgcccccagggaaggtggtgaccgtcagctctcgcagcccccgctgccctcggaaccaggcctccctccgcagcagcaagaccttcccgcccagctctgcaccctgctcctcaggtttgagaaaccctccaagacccctcttggtgcctggtccctccagcacaggaagcaatgactcagatggaggcctttttgctgtcccgacaaccttgccacccaacagccgacacgggaagctcttctctcccagtaaagaagcagagctgactttccgccagcatctgaactccatcagtatgcagtcggatttcttcctgccaaagccccggaagctgcggaaccggcacctgcggaagccactggtggtccagagaacactgctccctagaccatcggaaaaccagtcccacaacgtttgttccttctccatcctgtctaactcttccgtaactgggagaggttcgttccggcccatccagtcttctctgaccaaagcagctctgtctcggccgatcgtgcccaaggtccttccaccccaggccacgagtcacctggccagtgctatcgacttagcagctacaagtgccggcatcctttccgggaaccccctccctgccttggacaccgagggcttgtctggcatctctccactgtcttcagacgaggtgacgggtgccatctcggggcaggactctactggaactcaccaggatggagacaccctccccaccgtggggggctccgacccatttgtcagcatcccttcgaggcctgagcaggagccagtggcagacagtttccagggctcatctgttctctccttatctgagctgcccaaggcccctctccagaatggcctctccataccgctgtcctcgtcagagagctccagcacccggctgtctccaccagacgtctctgctctgctcgacatctccctgcccggcccacctgaggatgcgctgtcacagggcgagcctgccacacacattagcgactccatcattgagatcgccatcagctccggtcagtacggtgaaggagtccctctttctccagcaaaactgaatggcagtgacagttccaagagccttccctccccgtccagcagcccccagccacactggatcgcctctcccacccacgacccccagtggtaccccagtgactccaccgactcctcgctcagcagcctgtttgcaagcttcatctccccagagaagagccggaagatgttgccgactcccattgggaccaacagtggcacttccttgcttggccccagcttgttggatggaaactcgcgggactcatttgtgtccaggtccctggctgacgttgcagaggttgtggattcccagctggtgtgcatgatgaacgaaaacagcattgattacatttctcggttcaatgacctggcccaagagctgtccatcgctgagcctggccgccgagaagctctgtttgatggtggtggaggcggccccgctgtcagtgacctgtcccagtgaccacacgtcctggtggcggatgaagccctcttcgagctagagaaaaatagataagcccagcagccccagaagatggtctgaacagaggcatctccgcacccaagactgtgcaacgggcaggaacgtggtcacagagctgcttccccacgagcagcaggcaacggcgtccaaggagactaggatgagttcttggcaagggccagcgttagaaatcactgtggtactagagccgttcttcaccacgcctgggcccatgttagggtctgcataatgatcccatttcagcctgtgctctgcctcgattgttgtgttggacattccggtggcatttccttctgagacaagggagtatgtgtgccttggtgtagttgctgtgcactaggagctgtgatctccctctctgcagggaggccccagcccctgctgcttgctttctgccaaacctgtgctatgcatcagctgtgccctctgtggactgtaacgggcaggacagttgggtgtggcctgggctcatgcctggtggtgtcacatcccaaggcagcaagagcatggataccgatcacagggctgctgcggagtcgtggggccctgggctggtgcctcccctccctagaggttttgttcgtactcttaacagggagtgggggcaggaagagtcctgtactatgcaggttgtgtggactttacatgggaccctgctaagctggttgaaaatgtttttcttgtgttttaagaattaggagacatggaagaggaagaacaaagtcccctctgtagttggtttccttcctgtgtccctttgcaagcttccaggcgatctaaggtgtcatttctccctcctggggtgacccttaggcgctaatatgattacagcgaagactttcctgataagttctcaaactcgatgtgtgactgtttggcacttgagacaaacctgcctttgcagggaaagtgtctctcacgggcattggtgtgggcgtgcctgacatacgtgttcagtcccttgcatacctttgccttgagacttctgtgtctccttcccatttgggacacccaggtgagggcccagacatctggatgtggtcagacctcaccaaatatatgccttcgtggtggtctccctccttgcgccctcttgggtggccagcgttcctactgcagacggcccaacatccagtctttccccaggacagagctaacaagggcccctttgccttctcatcctcaggagttccaggcacatgagtcaccgtccatccacatccagtgtggcctggagctgctacagaggtgttgggcaggccatgcctgtgccgccatctctcccttcctgcctcatttcatcccccgcagcagccgggattgattgtgctttcctaacccccttggacctactctccctcctccccaccattcctcttcccccacatgtgtggcacgctgcagccctcaaggccagccctggcccctccactgcttctctccccatccacaatggagaaggtgaaaagaggagggaaaggcctttggtgtggacaagcatgtggacgccctccgtcctgcagtcttgccagcccaccacagccactgtagaccacaggcaggccgtgtactgcaccactgggaggacgtggagaggacagtgaacttccaggcaagagcttccttcttttgtctcacgagtttttcttagagctcttgcctgagctggcttccctccttcagacattgacatgagatcttaagcaaacagtcccaaacctcttaggggtgaaaaaagaaacatgccacttgattaggagagagacagcagtgtttgaactacagcatctttacactagcttgtgttttgtgctacgtataccagcttccaaaattagcatctcattgagccagagaagacaaggagatctccctctgggcatctggctttgctgcgtctctagagggttaggataccaggccgagttcaggccactgctagctttctcatactcccacaggctagaccagagatgccaagtcccaacagcactgagctgtgtgcactgtgccagggacaggagggtttgtgaactgcctgtcagggtacctgttagcccctgacaactcagtggggtgaagttttggaggtcagagtctgctttcgtaggctctttagacagcacctaccacttggttctccagcgtagactcctgggagcagccaactgcagccattgccatccagtggggagatgggttagggaggaggacgggctgactcctctcctgtaataaagctgacaagagttctagaggattctgcttctctagtaactagacaggtgatacgcatttgcttgccacattaagggaaaatggtgtcatttgttgcagaaaaacaatggatacattttcttctggcctaaatgaatatttatgtgcaaacataggcaactgttaaaggctggaattttcaaaagatccaaacagagacttcctgcatcttctgcctttccaacagaagcggtgatcgtctaagtatgagcctgtggcttcctttgtgcatttgagcatgctgtaattaagatgagatcagtttcttagaaaaagctttcctgaatccctctgacgttgcctgggatctttctgttgattcgtcttttctggagattgggacagagcatctgtggtccagggaagttagtcctctggcctcaattctgttgtggatgtgcagtgataagcgggcattgcgtgcctcgggggatgcctagttcgtggcttcctggctgttttgtccttctgtgtcttgtagctgtagggtgccagctcagggagtggggtgttggcggcgtttccgcggttggcctccttgctttgccgcacctccaggttctgggcatgagaggccgtggcctcatttctggtggataacctttttagtttaatagcatctttaattagatcacagcattgaattcaaaatttcttctgcaaagaaagttgtggggcataagacaccgggaatgagggaggaggaagacagttgtgttttctctttaaaccttgagctctagccgatgcatttgtcaggaaatacagcactttgtcttaagaaaacaaggaaggaggccgggcgcagtggctcacgcctgtaatcccagcactttgggaggccgaggcgggcggatcacctgaggtggggagtatgagaccaccctgactaacatggagagaccctgtctctactaaaagtacagaattagccgggcgtggtggcgcatgcccataatcccagctactgaggagacttgaggtaggagaatcacttgaacctcagcggcggaggttgcagtgagtcgagatcgcgccagtgcactccagcctgggcaagaagagcgaaactgggtctcaagttaaaaaaagaaagcaaggaaagagtaatttacaacgaaggaaaaaaacccacagcacacccttcgcggctgtcagcgctctcctgatgtcacagtggctgcgtgtccttggggtgggtgaggtgtggggagcccagcccctggccctgcctcccgcgccccgctccccttctctctcttactcggttaagccatagcgaggcctccgctcgtttcagatatgaatttgttttatagattataaatatgcatatacagtgtatgtataaagcagaatgcctgcctttcctggttattttttgtaccatattgtaaattatattatttattctttaccaattttgggaataaaaggtgttttggttatttaatataataagagctgttaaacttctgtttaaatttccagttcaacttgtaaatgtttttattgtgcataaatacatactaatgttgatct

SEQ ID NO: 206024 - DNA, 7760 bp, Artificial Sequence
  derived and/or modified sequence
ccccgcccccgcgcgccgtccgtgaggtccccaccggccgccgtagccggaactgctgctgagggcggcgggccggcttcgctagggatgacagtgaagttgggcgacggcggcagcggggaggacgggctcaagaagctgggcaagcgggcggccgatgaggagtccctggaaggagaaggggccggcggcgcagacgcggccgaggagagcagcggcacaaagagggacgagaagaccccccgggccggcgccgacggcccccccgcgccccccggcgcgccgcaggcgccgtccccgccgcagggcagcccccaggaccagcaccacttcctccggtccagcgtgcggccgcagagcaagaggcccaggaaggatcctccgagcgctgtggggagcggcaacgccggtggctcggggccccgcggaaaaggagctgaaggtggtggatcatcgtctggaaatgtgtctggggttgcccctgctgcccctgcagggggctcgcgctcctcctcccggaacttagggtcttctggtggcgagaaggaagaaggcaaaaaggtccggcggcagtgggagtcgtggagcacagaggacaagaacaccttcttcgaggggctgtacgagcatgggaaagactttgaagcgattcagaacaacattgcgctgaagtacaagaagaaaggcaagccagcaagcatggtgaagaacaaggagcaggtccgccacttctactaccgcacctggcacaagatcaccaagtacatcgactttgatcatgtgttctctcgaggcctgaagaagtcatcccaggaactgtatggcctgatctgctatggcgagctgcgcaagaagattgggggctgtatggatgacaagaatgcaacaaagctgaatgaactcattcaggttggggccaccactgtacgttacaaagggcggaacctgcggatcaaagcgcccatgtgccgggccctgaagaagctgtgcgatccagatggcttgagtgatgaagaggaccagaagccagtgcgcctgcctctgaaagtccctatagagctacagccgcggaacaaccacgcctgggcccgtgtgcagagccttgcccagaacccacgcctcaggatgatcgtggagctacatcgaaaggtctccagcctcatcgaattcttgaagcagaagtgggcgctccatgaggtgcgagttcggaagacactcgaggagcggcagctgcaggactcatgctccgcaccgatgcaggagaaggtgacactgcacttgttcccaggcgagaactgtacactgacaccgctgccgggcgtggctcgcgtggtgcactccaaggccttctgcacagtgcactggcaggagggcggccggtgcaagcagagtgccaaggacgcccacgtgctgcccccagcccagatcctgggcatccagagtgggcagggcacggcccggggccaggtgaaatgcccgcggagcggagctgagggcaagggtgtggggcggccccctcctgcggctgacgccttgcagagctccggagagagttcccccgaaagcgcccccggggagggggctgccctaagcttgagcagcccggacgctcctgacaggcctcctcccaggcaccaggacactgggccatgtcttgagaagacccctgcagaaggcagggacagtcccacccgggagccaggggccttgccgtgtgcctgtggccagctcccagacctggaggacgagctctcgcttctagaccccttgccccgctacctaaagtcctgtcaggacctcattgtccccgagcagtgccgctgtgcggacacacggcctgggagcgagcagccccctctgggcggggcggcctccccagaggtgctggctcctgtcagcaaggaggctgctgaccttgctcccactggcccatccccgaggcccggccccgggctcctgctggatgtttgcactaaagacttggcagatgcacctgcggaggagctccaggagaaggggagccccgcggggcctccgccgtctcagggacagcctgccgccaggcccccgaaggaggtccccgccagccggctggctcagcagctccgtgaggagggctggaacctgcagacctccgaaagcctcacgctggccgaagtctacctcatgatgggcaagcccagcaagctgcagctggagtacgactggctggggcccggccgccaggacccccgccccggctccctacccaccgccctccacaagcagcgcctcctcagctgcctcctgaagctcatttccaccgaggtcaaccccaagctggctctggaagcaaacaccatctctacagcctcagtaaggcccgcccaggaggagcagtcgatgacgcccccagggaaggtggtgaccgtcagctctcgcagcccccgctgccctcggaaccaggcctccctccgcagcagcaagaccttcccgcccagctctgcaccctgctcctcaggtttgagaaaccctccaagacccctcttggtgcctggtccctccagcacaggaagcaatgactcagatggaggcctttttgctgtcccgacaaccttgccacccaacagccgacacgggaagctcttctctcccagtaaagaagcagagctgactttccgccagcatctgaactccatcagtatgcagtcggatttcttcctgccaaagccccggaagctgcggaaccggcacctgcggaagccactggtggtccagagaacactgctccctagaccatcggaaaaccagtcccacaacgtttgttccttctccatcctgtctaactcttccgtaactgggagaggttcgttccggcccatccagtcttctctgaccaaagcagctctgtctcggccgatcgtgcccaaggtccttccaccccaggccacgagtcacctggccagtgctatcgacttagcagctacaagtgccggcatcctttccgggaaccccctccctgccttggacaccgagggcttgtctggcatctctccactgtcttcagacgaggtgacgggtgccatctcggggcaggactctactggaactcaccaggatggagacaccctccccaccgtggggggctccgacccatttgtcagcatcccttcgaggcctgagcaggagccagtggcagacagtttccagggctcatctgttctctccttatctgagctgcccaaggcccctctccagaatggcctctccataccgctgtcctcgtcagagagctccagcacccggctgtctccaccagacgtctctgctctgctcgacatctccctgcccggcccacctgaggatgcgctgtcacagggcgagcctgccacacacattagcgactccatcattgagatcgccatcagctccggtcagtacggtgaaggagtccctctttctccagcaaaactgaatggcagtgacagttccaagagccttccctccccgtccagcagcccccagccacactggatcgcctctcccacccacgacccccagtggtaccccagtgactccaccgactcctcgctcagcagcctgtttgcaagcttcatctccccagagaagagccggaagatgttgccgactcccattgggaccaacagtggcacttccttgcttggccccagcttgttggatggaaactcgcgggactcatttgtgtccaggtccctggctgacgttgcagaggttgtggattcccagctggtgtgcatgatgaacgaaaacagcattgattacatttctcggttcaatgacctggcccaagagctgtccatcgctgagcctggccgccgagaagctctgtttgatggtggtggaggcggccccgctgtcagtgacctgtcccagtgaccacacgtcctggtggcggatgaagccctcttcgagctagagaaaaatagataagcccagcagccccagaagatggtctgaacagaggcatctccgcacccaagactgtgcaacgggcaggaacgtggtcacagagctgcttccccacgagcagcaggcaacggcgtccaaggagactaggatgagttcttggcaagggccagcgttagaaatcactgtggtactagagccgttcttcaccacgcctgggcccatgttagggtctgcataatgatcccatttcagcctgtgctctgcctcgattgttgtgttggacattccggtggcatttccttctgagacaagggagtatgtgtgccttggtgtagttgctgtgcactaggagctgtgatctccctctctgcagggaggccccagcccctgctgcttgctttctgccaaacctgtgctatgcatcagctgtgccctctgtggactgtaacgggcaggacagttgggtgtggcctgggctcatgcctggtggtgtcacatcccaaggcagcaagagcatggataccgatcacagggctgctgcggagtcgtggggccctgggctggtgcctcccctccctagaggttttgttcgtactcttaacagggagtgggggcaggaagagtcctgtactatgcaggttgtgtggactttacatgggaccctgctaagctggttgaaaatgtttttcttgtgttttaagaattaggagacatggaagaggaagaacaaagtcccctctgtagttggtttccttcctgtgtccctttgcaagcttccaggcgatctaaggtgtcatttctccctcctggggtgacccttaggcgctaatatgattacagcgaagactttcctgataagttctcaaactcgatgtgtgactgtttggcacttgagacaaacctgcctttgcagggaaagtgtctctcacgggcattggtgtgggcgtgcctgacatacgtgttcagtcccttgcatacctttgccttgagacttctgtgtctccttcccatttgggacacccaggtgagggcccagacatctggatgtggtcagacctcaccaaatatatgccttcgtggtggtctccctccttgcgccctcttgggtggccagcgttcctactgcagacggcccaacatccagtctttccccaggacagagctaacaagggcccctttgccttctcatcctcaggagttccaggcacatgagtcaccgtccatccacatccagtgtggcctggagctgctacagaggtgttgggcaggccatgcctgtgccgccatctctcccttcctgcctcatttcatcccccgcagcagccgggattgattgtgctttcctaacccccttggacctactctccctcctccccaccattcctcttcccccacatgtgtggcacgctgcagccctcaaggccagccctggcccctccactgcttctctccccatccacaatggagaaggtgaaaagaggagggaaaggcctttggtgtggacaagcatgtggacgccctccgtcctgcagtcttgccagcccaccacagccactgtagaccacaggcaggccgtgtactgcaccactgggaggacgtggagaggacagtgaacttccaggcaagagcttccttcttttgtctcacgagtttttcttagagctcttgcctgagctggcttccctccttcagacattgacatgagatcttaagcaaacagtcccaaacctcttaggggtgaaaaaagaaacatgccacttgattaggagagagacagcagtgtttgaactacagcatctttacactagcttgtgttttgtgctacgtataccagcttccaaaattagcatctcattgagccagagaagacaaggagatctccctctgggcatctggctttgctgcgtctctagagggttaggataccaggccgagttcaggccactgctagctttctcatactcccacaggctagaccagagatgccaagtcccaacagcactgagctgtgtgcactgtgccagggacaggagggtttgtgaactgcctgtcagggtacctgttagcccctgacaactcagtggggtgaagttttggaggtcagagtctgctttcgtaggctctttagacagcacctaccacttggttctccagcgtagactcctgggagcagccaactgcagccattgccatccagtggggagatgggttagggaggaggacgggctgactcctctcctgtaataaagctgacaagagttctagaggattctgcttctctagtaactagacaggtgatacgcatttgcttgccacattaagggaaaatggtgtcatttgttgcagaaaaacaatggatacattttcttctggcctaaatgaatatttatgtgcaaacataggcaactgttaaaggctggaattttcaaaagatccaaacagagacttcctgcatcttctgcctttccaacagaagcggtgatcgtctaagtatgagcctgtggcttcctttgtgcatttgagcatgctgtaattaagatgagatcagtttcttagaaaaagctttcctgaatccctctgacgttgcctgggatctttctgttgattcgtcttttctggagattgggacagagcatctgtggtccagggaagttagtcctctggcctcaattctgttgtggatgtgcagtgataagcgggcattgcgtgcctcgggggatgcctagttcgtggcttcctggctgttttgtccttctgtgtcttgtagctgtagggtgccagctcagggagtggggtgttggcggcgtttccgcggttggcctccttgctttgccgcacctccaggttctgggcatgagaggccgtggcctcatttctggtggataacctttttagtttaatagcatctttaattagatcacagcattgaattcaaaatttcttctgcaaagaaagttgtggggcataagacaccgggaatgagggaggaggaagacagttgtgttttctctttaaaccttgagctctagccgatgcatttgtcaggaaatacagcactttgtcttaagaaaacaaggaaggaggccgggcgcagtggctcacgcctgtaatcccagcactttgggaggccgaggcgggcggatcacctgaggtggggagtatgagaccaccctgactaacatggagagaccctgtctctactaaaagtacagaattagccgggcgtggtggcgcatgcccataatcccagctactgaggagacttgaggtaggagaatcacttgaacctcagcggcggaggttgcagtgagtcgagatcgcgccagtgcactccagcctgggcaagaagagcgaaactgggtctcaagttaaaaaaagaaagcaaggaaagagtaatttacaacgaaggaaaaaaacccacagcacacccttcgcggctgtcagcgctctcctgatgtcacagtggctgcgtgtccttggggtgggtgaggtgtggggagcccagcccctggccctgcctcccgcgccccgctccccttctctctcttactcggttaagccatagcgaggcctccgctcgtttcagatatgaatttgttttatagattataaatatgcatatacagtgtatgtataaagcagaatgcctgcctttcctggttattttttgtaccatattgtaaattatattatttattctttaccaattttgggaataaaaggtgttttggttatttaatataataagagctgttaaacttctgtttaaatttccagttcaacttgtaaatgtttttattgtgcataaatacatactaatgttgatctaa

SEQ ID NO: 206025 - DNA, 6881 bp, Artificial Sequence
  derived and/or modified sequence
atgacagtgaagttgggcgacggcggcagcggggaggacgggctcaagaagctgggcaagcgggcggccgatgaggagtccctggaaggagaaggggccggcggcgcagacgcggccgaggagagcagcggcacaaagagggacgagaagaccccccgggccggcgccgacggcccccccgcgccccccggcgcgccgcaggcgccgtccccgccgcagggcagcccccaggaccagcaccacttcctccggtccagcgtgcggccgcagagcaagaggcccaggaaggatcctccgagcgctgtggggagcggcaacgccggtggctcggggccccgcggaaaagacagacatcttccaaaggcccagctctggctgtctattagccgcgtgcctttcgggggctcgcgctcctcctcccggaacttagggtcttctggtggcgagaaggaagaaggcaaaaaggtccggcggcagtgggagtcgtggagcacagaggacaagaacaccttcttcgaggggctgtacgagcatgggaaagactttgaagcgattcagaacaacattgcgctgaagtacaagaagaaaggcaagccagcaagcatggtgaagaacaaggagcaggtccgccacttctactaccgcacctggcacaagatcaccaagtacatcgactttgatcatgtgttctctcgaggcctgaagaagtcatcccaggaactgtatggcctgatctgctatggcgagctgcgcaagaagattgggggctgtatggatgacaagaatgcaacaaagctgaatgaactcattcaggttggggccaccactgtacgttacaaagggcggaacctgcggatcaaagcgcccatgtgccgggccctgaagaagctgtgcgatccagatggcttgagtgatgaagaggaccagaagccagtgcgcctgcctctgaaagtccctatagagctacagccgcggaacaaccacgcctgggcccgtgtgcagagccttgcccagaacccacgcctcaggatgatcgtggagctacatcgaaaggtctccagcctcatcgaattcttgaagcagaagtgggcgctccatgaggtgcgagttcggaagacactcgaggagcggcagctgcaggactcatgctccgcaccgatgcaggagaaggtgacactgcacttgttcccaggcgagaactgtacactgacaccgctgccgggcgtggctcgcgtggtgcactccaaggccttctgcacagtgcactggcaggagggcggccggtgcaagcagagtgccaaggacgcccacgtgctgcccccagcccagatcctgggcatccagagtgggcagggcacggcccggggccaggtgaaatgcccgcggagcggagctgagggcaagggtgtggggcggccccctcctgcggctgacgccttgcagagctccggagagagttcccccgaaagcgcccccggggagggggctgccctaagcttgagcagcccggacgctcctgacaggcctcctcccaggcaccaggacactgggccatgtcttgagaagacccctgcagaaggcagggacagtcccacccgggagccaggggccttgccgtgtgcctgtggccagctcccagacctggaggacgagctctcgcttctagaccccttgccccgctacctaaagtcctgtcaggacctcattgtccccgagcagtgccgctgtgcggacacacggcctgggagcgagcagccccctctgggcggggcggcctccccagaggtgctggctcctgtcagcaaggaggctgctgaccttgctcccactggcccatccccgaggcccggccccgggctcctgctggatgtttgcactaaagacttggcagatgcacctgcggaggagctccaggagaaggggagccccgcggggcctccgccgtctcagggacagcctgccgccaggcccccgaaggaggtccccgccagccggctggctcagcagctccgtgaggagggctggaacctgcagacctccgaaagcctcacgctggccgaagtctacctcatgatgggcaagcccagcaagctgcagctggagtacgactggctggggcccggccgccaggacccccgccccggctccctacccaccgccctccacaagcagcgcctcctcagctgcctcctgaagctcatttccaccgaggtcaaccccaagctggctctggaagcaaacaccatctctacagcctcagtaaggcccgcccaggaggagcagtcgatgacgcccccagggaaggtggtgaccgtcagctctcgcagcccccgctgccctcggaaccaggcctccctccgcagcagcaagaccttcccgcccagctctgcaccctgctcctcaggtttgagaaaccctccaagacccctcttggtgcctggtccctccagcacaggaagcaatgactcagatggaggcctttttgctgtcccgacaaccttgccacccaacagccgacacgggaagctcttctctcccagtaaagaagcagagctgactttccgccagcatctgaactccatcagtatgcagtcggatttcttcctgccaaagccccggaagctgcggaaccggcacctgcggaagccactggtggtccagagaacactgctccctagaccatcggaaaaccagtcccacaacgtttgttccttctccatcctgtctaactcttccgtaactgggagaggttcgttccggcccatccagtcttctctgaccaaagcagctctgtctcggccgatcgtgcccaaggtccttccaccccaggccacgagtcacctggccagtgctatcgacttagcagctacaagtgccggcatcctttccgggaaccccctccctgccttggacaccgagggcttgtctggcatctctccactgtcttcagacgaggtgacgggtgccatctcggggcaggactctactggaactcaccaggatggagacaccctccccaccgtggggggctccgacccatttgtcagcatcccttcgaggcctgagcaggagccagtggcagacagtttccagggctcatctgttctctccttatctgagctgcccaaggcccctctccagaatggcctctccataccgctgtcctcgtcagagagctccagcacccggctgtctccaccagacgtctctgctctgctcgacatctccctgcccggcccacctgaggatgcgctgtcacagggcgagcctgccacacacattagcgactccatcattgagatcgccatcagctccggtcagtacggtgaaggagtccctctttctccagcaaaactgaatggcagtgacagttccaagagccttccctccccgtccagcagcccccagccacactggatcgcctctcccacccacgacccccagtggtaccccagtgactccaccgactcctcgctcagcagcctgtttgcaagcttcatctccccagagaagagccggaagatgttgccgactcccattgggaccaacagtggcacttccttgcttggccccagcttgttggatggaaactcgcgggactcatttgtgtccaggtccctggctgacgttgcagaggttgtggattcccagctggtgtgcatgatgaacgaaaacagcattgattacatttctcggttcaatgacctggcccaagagctgtccatcgctgagcctggccgccgagaagctctgtttgatggtggtggaggcggccccgctgtcagtgacctgtcccagtgaccacacgtcctggtggcggatgaagccctcttcgagctagagaaaaatagataagcccagcagccccagaagatggtctgaacagaggcatctccgcacccaagactgtgcaacgggcaggaacgtggtcacagagctgcttccccacgagcagcaggcaacggcgtccaaggagactaggatgagttcttggcaagggccagcgttagaaatcactgtggtactagagccgttcttcaccacgcctgggcccatgttagggtctgcataatgatcccatttcagcctgtgctctgcctcgattgttgtgttggacattccggtggcatttccttctgagacaagggagtatgtgtgccttggtgtagttgctgtgcactaggagctgtgatctccctctctgcagggaggccccagcccctgctgcttgctttctgccaaacctgtgctatgcatcagctgtgccctctgtggactgtaacgggcaggacagttgggtgtggcctgggctcatgcctggtggtgtcacatcccaaggcagcaagagcatggataccgatcacagggctgctgcggagtcgtggggccctgggctggtgcctcccctccctagaggttttgttcgtactcttaacagggagtgggggcaggaagagtcctgtactatgcaggttgtgtggactttacatgggaccctgctaagctggttgaaaatgtttttcttgtgttttaagaattaggagacatggaagaggaagaacaaagtcccctctgtagttggtttccttcctgtgtccctttgcaagcttccaggcgatctaaggtgtcatttctccctcctggggtgacccttaggcgctaatatgattacagcgaagactttcctgataagttctcaaactcgatgtgtgactgtttggcacttgagacaaacctgcctttgcagggaaagtgtctctcacgggcattggtgtgggcgtgcctgacatacgtgttcagtcccttgcatacctttgccttgagacttctgtgtctccttcccatttgggacacccaggtgagggcccagacatctggatgtggtcagacctcaccaaatatatgccttcgtggtggtctccctccttgcgccctcttgggtggccagcgttcctactgcagacggcccaacatccagtctttccccaggacagagctaacaagggcccctttgccttctcatcctcaggagttccaggcacatgagtcaccgtccatccacatccagtgtggcctggagctgctacagaggtgttgggcaggccatgcctgtgccgccatctctcccttcctgcctcatttcatcccccgcagcagccgggattgattgtgctttcctaacccccttggacctactctccctcctccccaccattcctcttcccccacatgtgtggcacgctgcagccctcaaggccagccctggcccctccactgcttctctccccatccacaatggagaaggtgaaaagaggagggaaaggcctttggtgtggacaagcatgtggacgccctccgtcctgcagtcttgccagcccaccacagccactgtagaccacaggcaggccgtgtactgcaccactgggaggacgtggagaggacagtgaacttccaggcaagagcttccttcttttgtctcacgagtttttcttagagctcttgcctgagctggcttccctccttcagacattgacatgagatcttaagcaaacagtcccaaacctcttaggggtgaaaaaagaaacatgccacttgattaggagagagacagcagtgtttgaactacagcatctttacactagcttgtgttttgtgctacgtataccagcttccaaaattagcatctcattgagccagagaagacaaggagatctccctctgggcatctggctttgctgcgtctctagagggttaggataccaggccgagttcaggccactgctagctttctcatactcccacaggctagaccagagatgccaagtcccaacagcactgagctgtgtgcactgtgccagggacaggagggtttgtgaactgcctgtcagggtacctgttagcccctgacaactcagtggggtgaagttttggaggtcagagtctgctttcgtaggctctttagacagcacctaccacttggttctccagcgtagactcctgggagcagccaactgcagccattgccatccagtggggagatgggttagggaggaggacgggctgactcctctcctgtaataaagctgacaagagttctagaggattctgcttctctagtaactagacaggtgatacgcatttgcttgccacattaagggaaaatggtgtcatttgttgcagaaaaacaatggatacattttcttctggcctaaatgaatatttatgtgcaaacataggcaactgttaaaggctggaattttcaaaagatccaaacagagacttcctgcatcttctgcctttccaacagaagcggtgatcgtctaagtatgagcctgtggcttcctttgtgcatttgagcatgctgtaattaagatgagatcagtttcttagaaaaagctttcctgaatccctctgacgttgcctgggatctttctgttgattcgtcttttctggagattgggacagagcatctgtggtccagggaagttagtcctctggcctcaattctgttgtggatgtgcagtgataagcgggcattgcgtgcctcgggggatgcctagttcgtggcttcctggctgttttgtccttctgtgtcttgtagctgtagggtgccagctcagggagtggggtgttggcggcgtttccgcggttggcctccttgctttgccgcacctccaggttctgggcatgagaggccgtggcctcatttctggtggataacctttttagtttaatagcatctttaattagatcacagcattgaattcaaaatttcttctgcaaagaaagttgtggggcataagacaccgggaatgagggaggaggaagacagttgtgttttctctttaaaccttgagctctagccgatgcatttgtcagga

SEQ ID NO: 206026 - DNA, 1935 bp, Artificial Sequence
  derived and/or modified sequence
atgctgaggacagatgctggcgaggatcttgccgacgcgcctgctgaagaactgcaagagaaaggcagccccgccgggcctccaccctctcagggccagcccgccgctaggcctcccaaagaggttcctgccagccgcctcgcacagcagctccgcgaagagggatggaatctgcagacaagcgagtcgttgaccctcgctgaagtttacctcatgatgggcaagccttcaaagttacagttggaatacgattggctgggccctgggcgacaggaccccaggcctggctctcttcctactgctctgcacaagcagcgattgctgagctgcctgctcaagctgatctcaaccgaagtgaatcccaaattggccttagaagccaacactattagtacggccagcgtacggccagcccaggaggaacagtctatgactcctcctggcaaagtggtgactgtctcatcacggtccccacgatgccctaggaaccaagcttccttgcgatcttccaagactttccctcccagttcagccccgtgctcatctgggctcaggaacccacctcgaccgctcctcgttccgggaccctcgtcgaccggatctaatgactccgatggaggcctgtttgcagtgcccacaacactgccacccaatagtcgacacgggaagcttttttcaccctccaaggaagctgaactgacgttccgacagcaccttaattcaatatcaatgcagtcggactttttcctgccaaaacctcgcaaactgcggaaccgccatctgaggaagccacttgtggtacagaggacacttctcccccgtcctagcgaaaatcagtcccacaatgtatgcagcttctccatcctaagcaattcctccgtaacaggtcgcggatctttcaggccaatccaatcctctcttaccaaagccgccttatctcggccaatcgtgccaaaagtgttgccaccgcaagctacttctcacctcgcctccgccatagacctcgctgcaactagcgccggtatcctgtcaggcaatccccttcctgccttggacactgaggggctgagcgggatctcacccctgtcttctgacgaggtaaccggtgctatatctggccaagattccaccgggacccatcaggatggcgacaccctgccaacagtgggcggtagtgatccattcgtatcaattcccagccggccagagcaggaaccggtcgcagattctttccagggaagttctgtgctctcgctctccgaacttcctaaagcgccactgcagaacggtctatctatcccactgagttctagcgaaagcagttccactaggctgtccccaccagacgtgagcgccttgctggatataagcctgcccggtccccctgaggatgcactaagtcaaggggagccagctacccacatttccgacagtatcattgaaatcgccatctcttccggcgagggcgtgcccctgtcccctgccaagctgaatggctcagatagcagcaagtcgctgccttctcctagctccagccctcagccccattggatcgcttcccccacacacgacccacaatggtatccgagcgactcaactgactcatctctcagctctttgtttgcctcatttatttctccagaaaagtcaaggaaaatgttaccaacaccaatcgggaccaatagcggtaccagtctcttaggtccatcactactggatggtaattccagagacagttttgtgtctcggtcattggccgacgtcgccgaggttgtggattcccagctggtatgcatgatgaatgagaattctatagactacatctccagattcaacgaccttgcgcaagagctgagtatcgcggaaccgggtcgtcgggaagccctgtttgacggtggcgggggtgggcctgcagtgtccgacctgtcacagtag

SEQ ID NO: 206027 - DNA, 3810 bp, Artificial Sequence
  derived and/or modified sequence
atgactgttaagctcggcgatggcgggtctggcgaggatggcctgaaaaagttaggtaagagggcggctgacgaagagtctcttgaaggtgagggcgccggaggggcagacgctgcggaagaaagttccggcactaagcgcgacgagaaaaccccccgtgctggggctgatggtcccccagcccccccaggcgcgccgcaggccccttcgccccctcaggggtcaccccaggaccagcaccacttcctgcgatcttctgtgcggccacagtccaaacgtccccgcaaggacccgccctcagccgtggggagtggaaacgcagggggcagtggcccacggggaaagggtgcggaagggggtggttcgtcttccggaaacgtgagcggggtcgcaccagccgccccggccggtgggagccggtctagttcccgcaatctgggatccagcgggggtgaaaaggaggagggcaagaaagtccgtaggcaatgggagtcatggtccacagaggacaagaatactttctttgaggggctgtacgagcatgggaaggacttcgaagccatccagaacaacatcgccctgaaatataagaagaagggtaagcctgcctctatggtgaaaaacaaagagcaggtgagacacttttattatcgcacgtggcataaaattacaaagtatatagacttcgaccacgtcttcagtcggggactcaagaagtcaagccaagaactttatggcctgatatgctatggtgagttgcggaaaaagataggcgggtgtatggacgataagaacgccacaaagcttaacgaactgattcaggtaggggccaccactgtgagatataaaggaagaaatctccgtatcaaggcccctatgtgccgtgccttgaagaaactgtgtgatcctgatggcctgagcgacgaagaggaccaaaaaccagttagactgccattgaaggtaccgatagagctgcagcccagaaacaaccacgcctgggcacgcgtgcagagtctggcccagaatcctagactaagaatgattgttgagcttcataggaaagtctcatcgctgattgaattcttaaagcagaagtgggctttacatgaagttagagtaaggaaaacccttgaggagaggcagctccaggattcttgtagtgcaccaatgcaagagaaagtgacattgcacttatttcccggagagaattgtacgctcacgccattacccggggtggcaagggtggtacacagcaaggctttttgcaccgttcactggcaggaaggcgggcgctgcaaacaatctgcaaaagacgcacatgtgctccccccggcccagatcctcggtatccagtctggacaggggactgctcgcgggcaggttaaatgccccaggagcggggccgaaggaaaaggcgtcggaaggcccccccccgcagccgacgcgcttcaaagcagtggcgagtccagtccagaaagtgcgccaggagagggagcagccctgagtctttccagtccggatgccccagatcgccctccgcccaggcatcaggataccgggccttgtttggagaagacccctgctgaaggcagagattcgccgacgcgggagcccggggctctcccatgcgcctgtggccaactgcctgacctggaggatgaactgagtctccttgatcccctgccacgttacctgaaaagctgccaggacctgattgtgccagagcagtgcagatgcgcggacacccgaccaggctctgagcaacctccattggggggtgccgcctcccctgaggttcttgcccccgtttcaaaagaagccgccgatttggccccaactgggccaagcccacggcccggccctggcctcctcctggatgtgtgcacgaaagacctggccgacgccccggctgaagagctacaagaaaaaggctcccccgcaggacccccaccatcccagggccagcctgcagccagaccgccaaaggaggtccccgcaagccgcctggcccagcagcttagagaagaggggtggaatctgcagacctccgaaagtttaaccttggccgaagtgtaccttatgatggggaaaccttccaaacttcaacttgaatacgactggctggggcctgggcggcaggaccctcgaccgggctctcttcccacagccttacataaacagaggctactcagttgtctcctgaagctgatcagcactgaggtgaatcccaaactcgctctggaggccaacacaataagtaccgcatctgtgcgacctgcacaggaggagcagtccatgacaccaccaggcaaagtggtcacagtttcctcaaggagcccaaggtgccccagaaaccaggcttcattaaggagttcaaagacatttcctccttcttctgcaccatgttcatctgggctgcgcaatccaccccggcctttgctggtgccagggcctagtagtaccggctcaaacgactctgacggtgggctgttcgcagttccgactacgttaccccccaactcacgccatggcaaactgttttcccctagcaaggaagcagagttaactttccgacagcacttaaactctatctctatgcagagcgattttttcttgcccaaaccccgaaagctgcgaaatcggcatctgcggaagccacttgtggtgcagagaacacttctaccaaggccctccgagaaccagtctcataatgtgtgttcgtttagcatcctcagcaatagttccgtgaccggtcggggttctttcagacccattcagtctagtctgactaaagcggccctgagcagacccatcgtgcctaaggttctcccacctcaggccacgtcccatctggccagcgctatcgatttggcagcgacgtccgctgggattctcagcggcaatccactgcctgctctggacaccgaagggttgagcgggatttcacccctgagtagcgacgaagtgacaggcgccatctccggacaggactcaaccggtacgcaccaagacggagacaccctccccactgtcggcgggtccgacccctttgtttccatcccttctcggcccgaacaagagcctgtggctgatagctttcagggcagctcagtcctctccctcagcgaacttccaaaggcaccgctgcagaacggcctgagcatcccattatcctcatccgagtcctctagtacccgtctatctcccccagatgtgtccgctttgctagacatctctctccccggaccacctgaggacgccctgtctcaaggggagccagccacccacatctccgatagtattattgaaatagctatatccagtggtcagtacggggagggggtgcctttatcccctgccaagttgaatgggagtgactcttccaaatccctcccaagcccctcaagctccccccagccgcactggatagccagtccaacacatgatcctcaatggtatcccagcgacagcacagattcttctctttcttctctgtttgccagctttattagccccgagaaaagccggaagatgcttccaaccccaattggcaccaactctgggacctcactgttagggcccagtctcctggatgggaacagcagggactcctttgtgtctcgatctttggccgatgtcgctgaggtcgtcgactcacagctggtttgcatgatgaatgagaacagtatcgattatatatcacggttcaacgacttggcccaagagttaagcattgcagagcctggtcggcgtgaggccctgttcgatggcggggggggtggtcccgctgtgtcagatctgtcccagtag

SEQ ID NO: 206028 - DNA, 3810 bp, Artificial Sequence
  derived and/or modified sequence
atgactgttaaacttggggacggcgggagcggggaggatgggcttaagaagcttggtaaacgagcagcggacgaggagtctctcgagggagagggggccggaggtgccgacgccgcagaggaaagttctggcacaaagcgagacgaaaagacacctagagcaggtgcagacggacctccagctcctcccggggctccccaggcaccaagccccccccagggaagcccacaggaccagcaccacttcctacgcagcagcgtccgtccccagtctaaacgccctcgcaaggacccacccagtgcagtaggaagtgggaatgcagggggttccggacccagaggtaagggagcagaggggggcggaagttcttctggaaatgtgtccggcgtggccccagctgcccccgctgggggcagtcgatcttcttcccggaacctgggatcttccggcggagagaaggaggagggaaagaaggtacgaagacaatgggaatcatggagtaccgaagacaaaaacaccttcttcgaaggactttacgagcacggcaaagacttcgaagccatccagaacaatatcgccctgaagtacaaaaaaaagggtaaacctgcaagcatggtcaagaacaaggaacaggtgagacacttttactataggacgtggcataagatcaccaaatacatcgattttgaccatgttttcagccgtgggcttaagaaatccagtcaggagttatacgggctaatttgctacggagagctgagaaagaaaataggaggatgcatggatgataagaatgcaacaaagctaaatgagctgatacaggtcggagccactactgtaaggtacaagggccgaaacctgcgaatcaaagctcccatgtgcagggcccttaaaaagctgtgtgatccagacggattgtcagacgaggaagaccagaaaccagttaggctgcccttgaaagttccaatcgaacttcagccaagaaacaaccatgcttgggctcgggtgcaaagtctggcccagaacccacgtctgcgtatgattgtcgaactgcacagaaaagtgagctcattgattgaatttcttaaacagaagtgggcattacatgaggtcagagtccgcaaaaccttggaggagaggcagctgcaggacagttgctctgctccgatgcaggagaaggttactctgcatctgtttcctggcgagaattgcaccctaacccccctccctggtgtggcacgcgtcgttcacagcaaagccttttgcacagtacattggcaagaaggtggaagatgcaaacagtcagctaaggacgctcacgtcctgccccctgctcagatcctggggatccagagtggtcagggtacagcacgtggccaggtcaaatgcccaaggtccggggcagaaggaaagggtgttggccgaccccccccagctgccgatgcactccaatcgagcggcgagtctagccccgaaagtgcccctggcgaaggggcggctctgagtctcagcagccctgatgcgcctgatagacccccgccacggcatcaggatactggcccgtgcctggagaagacaccggcagagggaagggacagtccaacaagagagcccggggcgttaccctgcgcttgcggacagcttccagatttagaggacgagctgagcctcctggaccctttacccaggtacctcaagtcatgccaggatctgatcgtaccagaacagtgtaggtgtgccgatacacgtcccggcagtgagcagccccccttagggggggccgcttcccccgaagtcctcgcaccagtgtctaaggaggccgctgacctggctccaacagggccctctcccaggcccggccccgggctcctgctagacgtctgtacaaaggacctcgccgacgctcccgccgaggaactccaggagaaaggatccccggctggcccacctccatctcagggccagccagcagcacgcccccccaaggaggtccccgcatctcgcttagcccagcagttgcgggaagaaggatggaacctccagacctccgaatctttaaccctcgcagaggtctatctcatgatgggcaagccaagcaaactacagcttgaatatgactggctcggaccagggcgacaggacccaaggcccggctctcttcctacggccctgcacaagcagagattactgagttgccttctaaaacttataagtaccgaggtgaacccaaagcttgccctagaggcaaataccatatctactgcctccgtaagaccggcccaggaagaacagtctatgaccccaccaggcaaggtggttacagtgagctcacggagtccgcgctgtccgcgaaaccaggcctctcttcgaagcagcaaaacattcccacccagttccgcaccatgttcaagcggcctgcgcaaccccccgagacccttgctcgtgcccggaccatccagtacagggtcaaatgactcggatggcggtctgttcgccgttcccaccactctgccgccaaattcgagacacgggaagttgttttcaccttcaaaagaggccgagctgacatttcgacaacacttaaacagcatctcaatgcagagcgacttcttcctccccaaaccgagaaaactccgaaatcggcacctacgtaaaccacttgttgtccaacgcaccttactgcctaggcctagcgagaaccagtctcacaacgtatgtagcttctctatattatctaattcatctgtgacggggaggggatcctttcgccccattcagtcctcactcaccaaggccgctctatcccggccgatcgtccctaaggtgctcccgcctcaggctacatcccatcttgcctccgccattgatctcgcggcaaccagcgccggtattctatctgggaatcccctgcccgctttggataccgaaggtctatcaggaatttctccactgtcgagcgatgaggtgacaggggcaatttccggacaggattccaccggaacccatcaggacggggacacgttgcccacggttggtggatctgatccattcgtgtctattccttctaggcccgaacaggagccggttgcagacagctttcagggatcttcagttcttagcttaagcgaactccctaaggcacccttgcaaaacggcctaagcatccctctctcaagtagtgaatcctctagcactaggcttagtcctccagacgtgtcagccctgcttgatatctctctcccagggccccccgaggatgcactgagtcagggcgaacctgcaacccacattagcgattcaatcatagagatcgctataagctccggacagtatggcgaaggggtgcccttgagccccgccaaactcaatggcagcgacagttcgaagagcctgccttccccttcttcaagtccccaaccccactggatcgcaagcccgacgcatgatcctcaatggtacccatccgattcaaccgacagtagtctcagttccttgttcgcctcatttatatcgcccgagaaatcgagaaagatgctgcctacgcctatcgggacaaattctggaacatctcttctgggcccttcccttcttgatggcaactcacgggattcattcgtgagtcggtcccttgccgacgtggccgaagttgttgattctcagttggtttgtatgatgaatgagaattcaatcgactacatctcacgctttaacgacctagcccaggaactgtccatcgccgaacccggtcgtcgcgaagcccttttcgatggaggaggaggtggtccagctgtgagcgacctctcacagtag

SEQ ID NO: 206029 - DNA, 3801 bp, Artificial Sequence
  derived and/or modified sequence
atgaccgtgaagctgggcgacggcggctccggagaggacgggctgaagaagctgggtaaacgcgcagcagatgaagaaagtttagagggggaaggggcgggaggcgcggatgcagcagaagaatccagtggaacgaagagagatgagaagaccccccgcgccggagctgacgggccccccgctcctccaggcgctcctcaggccccctcgccccctcaggggagtccgcaggatcagcaccacttcttacgcagctctgtcaggccacagtctaagcgaccaaggaaggaccccccaagtgctgtcgggagcggcaatgcaggtgggtcaggtcccagggggaaagaccggcatctgccgaaggcccagctgtggctgtctatctcccgagtcccttttggcggatccagatcatcttctaggaacctcggctcatctgggggtgaaaaagaagagggaaaaaaggtgagaagacaatgggaatcctggtcaactgaggataagaataccttctttgaaggcctgtatgagcacggcaaagacttcgaagcaatccagaacaacatagccttgaagtacaagaagaaaggcaagcctgcctctatggtgaagaacaaggaacaagtccgccatttttactacaggacttggcacaagatcactaaatatattgatttcgaccacgtctttagtcgtggcctaaaaaaatcaagccaggagctttacggactcatctgttacggagagctccggaaaaagatcggaggatgtatggacgataagaatgcaaccaagctgaatgaactgatacaggtaggagccaccactgtcagatacaagggccgcaaccttaggatcaaggcacccatgtgccgcgcactcaaaaagttatgtgatcctgacggactgagcgacgaggaagaccagaaacccgttcgcctacctcttaaggttcccattgaattgcagcctcggaataaccacgcctgggctagggtgcaaagcttagcccagaatccaagactccggatgatcgtggagctgcacaggaaggtatcttcgttgatcgaatttctgaagcagaaatgggcgctacatgaagttagagtccgaaagacactcgaggagagacagctgcaggactcctgcagtgccccaatgcaggaaaaggtgactctgcatctgtttcccggggaaaactgcaccttaacacccctgcccggcgtcgcccgagtagtgcattctaaggcattttgtacggttcactggcaggagggcgggcgctgtaagcagagcgctaaggacgctcacgtcttacccccagcacagatcctgggcatccaatcaggccagggaaccgctaggggacaggtgaaatgtcccagatctggagcagaaggcaaaggagtgggacgcccccctccagctgccgacgcgctccagtcctccggagaatcgtctcccgaaagtgcccctggggaaggagccgcactgtctctcagcagccctgatgctcctgacaggccccccccaaggcatcaggataccggcccatgtctcgaaaagacccccgcagaggggagagatagccctacacgggagcccggggccctgccttgcgcttgcggtcagctaccagaccttgaagatgagttgtctttgctggacccgctgcctagatatttaaagtcatgtcaggatcttatagttcctgaacagtgtaggtgcgccgacactcgccccgggagtgagcagcccccgctggggggcgccgcgagtccggaagtgcttgcacctgtgtctaaagaagcagccgatctggcgcctacaggaccttctccacggcccggaccaggcctcctgctcgatgtgtgcactaaggaccttgcggacgcgcctgcagaggagctgcaagaaaagggatctcccgcaggacccccgccttcacagggccagccagccgcgcgcccaccaaaagaggtccccgccagccggcttgctcagcagctgcgggaagagggctggaatctgcagaccagcgagagcctgaccctggctgaggtatatctgatgatgggcaaaccatccaagctccagctagagtacgactggctgggacctgggagacaggacccacgacctggttctctgccaacggcccttcacaagcagcggctgctgtcatgtttgctaaagctcatatcaaccgaagtgaacccaaagctggccctggaggccaatacaatttccactgcttcagtgcgtccagcccaagaggaacagagtatgactcctcccgggaaagtcgtgacagtttcatccaggagcccccggtgtcccaggaatcaggctagtttgcgcagctcgaagacattccctcccagtagcgcaccatgctccagtgggcttcggaatccaccaaggccccttttggtccctggcccgagcagtaccggcagtaacgacagtgatggcggcctctttgcagtgcccacgacactacctccgaattcacgccatggcaagttgttttcaccctccaaggaggcagaactgactttccggcagcacctgaatagcatcagcatgcagtcagatttcttcctgcccaaacccagaaagctgagaaacagacacttaaggaaacccctagtggtccagcgaaccctactccctaggccctccgaaaaccagagccacaacgtttgtagcttttccatcctttccaattcctccgtgacaggacgcggttcattcagacctatccaatcgtctcttacaaaggccgctctgagcagaccgattgtgccaaaggtccttcccccccaggccacatcacatttagcatctgccattgatctggccgcgacgagcgccgggatactcagtgggaatcccctgcctgcgctggatacagaagggttgagcggcatcagtccactttccagtgatgaggtcacaggcgctataagcgggcaggattccacaggcacccatcaggacggcgacactctccctaccgtgggagggagcgatccattcgtgtccatcccctctcgccctgagcaagagccagtggccgactcgtttcaggggagctcagtgttaagtctaagtgagctgccaaaagccccacttcagaacggcctgagcatccctctgagcagctcagaatccagctcaaccagactgagccccccagatgtcagtgctttgttggatataagcctacccggccctcccgaagacgctctgtcgcagggcgaaccagccacccacatctcagactcgatcatcgaaatcgccatttcaagtgggcagtacggtgaaggggtccccctgagcccggcaaagctcaatggtagcgattcctcgaagagcctgccatcaccctccagcagcccacagccacattggattgcatcgccaacccacgacccccagtggtacccgtcagattccaccgactcctccttaagctctctctttgccagctttatcagtcccgaaaagtcccggaagatgttgccgacccctatcggaaccaacagtggaactagccttcttggccccagcttgctcgatggcaactctcgggactcttttgtaagccggtcacttgccgacgttgctgaagtggtggactcacagctggtatgcatgatgaacgaaaattcaatcgactacatatccagatttaatgaccttgctcaggagctctctatcgcagagcctggtcgcagggaggcacttttcgacggcggaggcggaggcccggccgtgagtgacctgagtcaatag

SEQ ID NO: 206030 - DNA, 1935 bp, Artificial Sequence
  derived and/or modified sequence
atgctgaggacagatgctggggaggacctggctgatgccccagctgaggagctgcaggagaagggcagccctgctggccccccacccagccagggccagcctgctgcccggccccccaaggaggtgcctgccagccggctggcccagcagctgcgggaggagggctggaacctgcagaccagcgagagcctgaccctggccgaggtgtacctgatgatgggcaagcccagcaagctgcagctggagtatgactggctgggccctggccggcaggaccccaggcctggcagcctgcccacagccctgcacaagcagaggctgctgagctgcctgctgaagctgatcagcacagaggtgaaccccaagctggccctggaggccaacaccatcagcacagcctctgtgcggcctgcccaggaggagcagagcatgaccccacctgggaaggtggtgacagtgagcagccgcagcccccgctgccccaggaaccaggccagcctgcggagcagcaagaccttcccccccagcagcgccccctgcagcagcggcctgagaaatccaccccggcccctgctggtgcccggccccagcagcacaggcagcaatgacagtgatggcggcctgtttgctgtgcccaccaccctgccccccaacagcagacatggcaagctgttcagccccagcaaggaggccgagctgaccttccggcagcacctgaacagcatctccatgcagagcgacttcttcctgcccaagcccaggaagctgaggaacagacacctgaggaagcccctggtggtgcagaggaccctgctgccccggcccagcgagaaccagagccacaacgtgtgcagcttcagcatcctgagcaacagctctgtgacaggccggggcagcttccggcccatccagagcagcctgaccaaggccgccctgagccggcccatcgtgcccaaggtgctgcccccccaggccaccagccacctggccagcgccatcgacctggccgccaccagcgctggcatcctgagcggcaaccccctgcctgccctggacacagagggcctgagcggcatcagccccctgagcagtgatgaggtgactggagccatcagcggccaggacagcacaggcacccaccaggatggagacaccctgcccaccgtgggcggcagtgacccctttgtgtccatccccagcaggcctgagcaggagcctgtggccgacagcttccagggcagctctgtgctgagcctgtctgagctgcccaaggcccccctgcagaatggcctgagcatccccctgagcagcagcgagagcagcagcacccggctgagccccccagatgtgtctgccctgctggacatcagcctgcccggccccccagaagatgccctgagccagggcgagcccgccacccacatcagtgacagcatcatcgagatcgccatcagcagcggggagggcgtgcccctgagccctgccaagctgaatggaagtgacagcagcaagagcctgcccagccccagcagcagcccccagccccactggatcgccagccccacccatgacccccagtggtaccccagcgacagcacagacagcagcctgagcagcctgtttgccagcttcatcagccctgagaagagcaggaagatgctgcccacccccatcggcaccaacagcggcaccagcctgctgggccccagcctgctggatggcaacagccgggacagctttgtgagccgcagcctggctgatgtggccgaggtggtggacagccagctggtgtgcatgatgaatgaaaacagcattgactacatcagccgcttcaatgacctggcccaggagctgagcattgctgagcctggaagaagagaggccctgtttgatggcggcggcggcggccctgctgtgtctgacctgagccagtag

SEQ ID NO: 206031 - DNA, 3810 bp, Artificial Sequence
  derived and/or modified sequence
atgacagtgaagctgggagatggcggcagcggggaggatggcctgaagaagctgggcaagagagctgctgatgaggagagcctggagggggagggcgccggcggcgcagatgctgctgaggagagcagcggcaccaagagagatgagaagaccccccgggccggggctgatggccccccagcccctcctggggccccccaggcccccagccccccccagggcagcccccaggaccagcaccacttcctgcggagctctgtgcggccccagagcaagaggcccaggaaggacccccccagcgctgtgggcagcggaaatgccggcggcagcggcccccggggcaaaggagctgagggcggcggcagcagcagtggaaatgtgtctggagtggccccagctgccccagctgggggcagccgcagcagcagcaggaacctgggcagcagtggaggagagaaggaggagggcaagaaggtgcggcggcagtgggagagctggagcacagaggacaagaacaccttctttgagggcctgtatgaacatggcaaggactttgaggccatccagaacaacatcgccctgaagtacaagaagaagggcaagccagcctccatggtgaagaacaaggagcaggtgcgccacttctactaccgcacctggcacaagatcaccaagtacatcgactttgaccacgtgttcagccggggcctgaagaagagcagccaggagctgtatggcctcatctgctacggggagctgaggaagaagattggaggctgcatggatgacaagaatgccaccaagctgaatgagctgatccaggtgggcgccaccaccgtgcgctacaagggcaggaacctgcgcatcaaggcccccatgtgccgggccctgaagaagctgtgtgaccctgatggcctgagtgatgaggaggaccagaagcctgtgcggctgcccctgaaggtgcccatcgagctgcagcccaggaacaaccacgcctgggcccgggtgcagagcctggcccagaacccccggctgaggatgattgtggagctgcacaggaaggtgagcagcctgattgagttcctgaagcagaagtgggccctgcacgaggtgcgggtgaggaagaccctggaggagcggcagctgcaggacagctgcagcgcccccatgcaggagaaggtgaccctgcacctgtttcctggagagaactgcaccctgacccccctgcccggggtggcccgggtggtgcacagcaaggccttctgcaccgtgcactggcaggagggcggccgctgcaagcagagcgccaaggatgcccacgtgctgcccccagcccagatcctgggcatccagagcggccagggcacagcccggggccaggtgaagtgccccaggtctggagctgagggcaaaggagtgggccggcccccacctgctgctgatgccctgcagagcagcggggagagcagccctgagagcgcccctggagagggcgccgccctgagcctgagcagcccagatgccccagaccggcccccacccaggcaccaggacaccggcccctgcctggagaagaccccagctgagggccgggacagccccacccgggagcccggggccctgccctgtgcctgtggccagctgcctgacctggaggatgagctgagcctgctggaccccctgccccgctacctgaagagctgccaggacctgattgtgcctgagcagtgccgctgtgccgacacccggcccggcagcgagcagccccccctgggcggggccgccagccctgaggtgctggcccctgtgtccaaggaggccgctgacctggcccccaccggccccagccccaggcctggccctggcctgctgctggatgtgtgcaccaaggacctggctgatgccccagctgaggagctgcaggagaagggcagccctgctggccccccacccagccagggccagcctgctgcccggccccccaaggaggtgcctgccagccggctggcccagcagctgcgggaggagggctggaacctgcagaccagcgagagcctgaccctggccgaggtgtacctgatgatgggcaagcccagcaagctgcagctggagtatgactggctgggccctggccggcaggaccccaggcctggcagcctgcccacagccctgcacaagcagaggctgctgagctgcctgctgaagctgatcagcacagaggtgaaccccaagctggccctggaggccaacaccatcagcacagcctctgtgcggcctgcccaggaggagcagagcatgaccccacctgggaaggtggtgacagtgagcagccgcagcccccgctgccccaggaaccaggccagcctgcggagcagcaagaccttcccccccagcagcgccccctgcagcagcggcctgagaaatccaccccggcccctgctggtgcccggccccagcagcacaggcagcaatgacagtgatggcggcctgtttgctgtgcccaccaccctgccccccaacagcagacatggcaagctgttcagccccagcaaggaggccgagctgaccttccggcagcacctgaacagcatctccatgcagagcgacttcttcctgcccaagcccaggaagctgaggaacagacacctgaggaagcccctggtggtgcagaggaccctgctgccccggcccagcgagaaccagagccacaacgtgtgcagcttcagcatcctgagcaacagctctgtgacaggccggggcagcttccggcccatccagagcagcctgaccaaggccgccctgagccggcccatcgtgcccaaggtgctgcccccccaggccaccagccacctggccagcgccatcgacctggccgccaccagcgctggcatcctgagcggcaaccccctgcctgccctggacacagagggcctgagcggcatcagccccctgagcagtgatgaggtgactggagccatcagcggccaggacagcacaggcacccaccaggatggagacaccctgcccaccgtgggcggcagtgacccctttgtgtccatccccagcaggcctgagcaggagcctgtggccgacagcttccagggcagctctgtgctgagcctgtctgagctgcccaaggcccccctgcagaatggcctgagcatccccctgagcagcagcgagagcagcagcacccggctgagccccccagatgtgtctgccctgctggacatcagcctgcccggccccccagaagatgccctgagccagggcgagcccgccacccacatcagtgacagcatcatcgagatcgccatcagcagcggccagtatggagagggcgtgcccctgagccctgccaagctgaatggaagtgacagcagcaagagcctgcccagccccagcagcagcccccagccccactggatcgccagccccacccatgacccccagtggtaccccagcgacagcacagacagcagcctgagcagcctgtttgccagcttcatcagccctgagaagagcaggaagatgctgcccacccccatcggcaccaacagcggcaccagcctgctgggccccagcctgctggatggcaacagccgggacagctttgtgagccgcagcctggctgatgtggccgaggtggtggacagccagctggtgtgcatgatgaatgaaaattccattgactacatcagccgcttcaatgacctggcccaggagctgagcattgctgagcccggccggcgggaggccctgtttgatggcggcggcggcggccctgctgtgtctgacctgagccagtag

SEQ ID NO: 206032 - DNA, 3801 bp, Artificial Sequence
  derived and/or modified sequence
atgacagtgaagctgggagatggcggcagcggggaggatggcctgaagaagctgggcaagagagctgctgatgaggagagcctggagggggagggcgccggcggcgcagatgctgctgaggagagcagcggcaccaagagagatgagaagaccccccgggccggggctgatggccccccagcccctcctggggccccccaggcccccagccccccccagggcagcccccaggaccagcaccacttcctgcggagctctgtgcggccccagagcaagaggcccaggaaggacccccccagcgctgtgggcagcggaaatgccggcggcagcggcccccggggcaaggacagacacctgcccaaggcccagctgtggctgagcatcagccgggtgccctttggaggcagccgcagcagcagcaggaacctgggcagcagcggcggggagaaggaggagggcaagaaggtgcggcggcagtgggagagctggagcacagaggacaagaacaccttctttgagggcctgtatgagcacggcaaggactttgaggccatccagaacaacatcgccctgaagtacaagaagaagggcaagccagcctccatggtgaagaacaaggagcaggtgcgccacttctactaccgcacctggcacaagatcaccaagtacatcgactttgaccacgtgttcagccggggcctgaagaagagcagccaggagctgtatggcctcatctgctatggagagctgaggaagaagattggaggctgcatggatgacaagaatgccaccaagctgaatgaactcatccaggtgggcgccaccaccgtgcgctacaagggcaggaacctgcgcatcaaggcccccatgtgccgggccctgaagaagctgtgtgaccctgatggcctgagtgatgaggaggaccagaagcctgtgcggctgcccctgaaggtgcccatcgagctgcagcccaggaacaaccacgcctgggcccgggtgcagagcctggcccagaacccccggctgaggatgattgtggagctgcacaggaaggtgagcagcctcatcgagttcctgaagcagaagtgggccctgcacgaggtgcgggtgaggaagaccctggaggagcggcagctgcaggacagctgcagcgcccccatgcaggagaaggtgaccctgcacctgtttcctggagagaactgcaccctgacccccctgcccggggtggcccgggtggtgcacagcaaggccttctgcaccgtgcactggcaggagggcggccgctgcaagcagagcgccaaggatgcccacgtgctgcccccagcccagatcctgggcatccagagcggccagggcacagcccggggccaggtgaagtgccccaggtctggagctgagggcaagggcgtgggccggcccccacctgctgctgatgccctgcagagcagtggagagagcagccctgagagcgcccctggagagggcgccgccctgagcctgagcagcccagatgccccagaccggcccccacccaggcaccaggacaccggcccctgcctggagaagaccccagctgagggccgggacagccccacccgggagcccggggccctgccctgtgcctgtggccagctgcctgacctggaggatgagctgagcctgctggaccccctgccccgctacctgaagagctgccaggacctgattgtgcctgagcagtgccgctgtgccgacaccaggcctggcagcgagcagccccccctgggcggggccgccagccctgaggtgctggcccctgtgtccaaggaggccgctgacctggcccccaccggccccagcccccggcccggccctggcctgctgctggatgtgtgcaccaaggacctggctgatgccccagctgaggagctgcaggagaagggcagccctgctggccccccacccagccagggccagcctgctgcccggccccccaaggaggtgcctgccagccggctggcccagcagctgcgggaggagggctggaacctgcagaccagcgagagcctgaccctggccgaggtgtacctgatgatgggcaagcccagcaagctgcagctggagtatgactggctgggccctggccggcaggacccccggcccggcagcctgcccacagccctgcacaagcagaggctgctgagctgcctgctgaagctgatcagcacagaggtgaaccccaagctggccctggaggccaacaccatcagcacagcctctgtgcggcctgcccaggaggagcagagcatgaccccacctgggaaggtggtgacagtgagcagccgcagcccccgctgccccaggaaccaggccagcctgcggagcagcaagaccttcccccccagcagcgccccctgcagcagcggcctgaggaaccccccccggcccctgctggtgcccggccccagcagcacaggcagcaatgacagtgatggcggcctgtttgctgtgcccaccaccctgccccccaacagccgccacggcaagctgttcagccccagcaaggaggccgagctgaccttccggcagcacctgaacagcatctccatgcagagcgacttcttcctgcccaagcccaggaagctgaggaacagacacctgaggaagcccctggtggtgcagaggaccctgctgccccggcccagcgagaaccagagccacaacgtgtgcagcttcagcatcctgagcaacagctctgtgacaggccggggcagcttccggcccatccagagcagcctgaccaaggccgccctgagccggcccatcgtgcccaaggtgctgcccccccaggccaccagccacctggccagcgccatcgacctggccgccaccagcgctggcatcctgagcggcaaccccctgcctgccctggacacagagggcctgagcggcatcagccccctgagcagtgatgaggtgactggagccatcagcggccaggacagcacaggcacccaccaggatggagacaccctgcccaccgtgggcggcagtgacccctttgtgtccatccccagcaggcctgagcaggagcctgtggccgacagcttccagggcagctctgtgctgagcctgtctgagctgcccaaggcccccctgcagaatggcctgagcatccccctgagcagcagcgagagcagcagcacccggctgagccccccagatgtgtctgccctgctggacatcagcctgcccggccccccagaagatgccctgagccagggcgagcccgccacccacatcagtgacagcatcattgaaattgccatcagcagcggccagtacggggagggcgtgcccctgagccctgccaagctgaatggaagtgacagcagcaagagcctgcccagccccagcagcagcccccagccccactggatcgccagccccacccatgacccccagtggtaccccagcgacagcacagacagcagcctgagcagcctgtttgccagcttcatcagccctgagaagagcaggaagatgctgcccacccccatcggcaccaacagcggcaccagcctgctgggccccagcctgctggatggcaacagccgggacagctttgtgagccgcagcctggctgatgtggccgaggtggtggacagccagctggtgtgcatgatgaatgaaaacagcattgactacatcagccgcttcaatgacctggcccaggagctgagcattgctgagcctggaagaagagaggccctgtttgatggcggcggcggcggccctgctgtgtctgacctgagccagtag

SEQ ID NO: 206033 - DNA, 186 bp, Artificial Sequence
  derived and/or modified sequence
atggaggccagcctgggcggccctgagcccaatggagtcatcaatgaggaggccaaggccggggccaccgggaagaggcggggccgggccccagccaatggaggccgggccagcggggagaacagagccttccctgtgctgcagctgcccggcaactggcactgcagaagacggcagggctgctag

SEQ ID NO: 206034 - DNA, 1935 bp, Artificial Sequence
  derived and/or modified sequence
atgctgcggaccgacgccggcgaggacctggccgacgcccccgccgaggagttgcaagaaaagggatcacccgcaggccccccacctagccagggccagccagccgcacgaccgccaaaggaggtgcctgcttcccgtcttgcgcagcagctgagggaagaaggatggaaccttcaaacctctgaaagtctcaccctggcagaggtatatctgatgatgggtaaaccatctaagttgcaattagagtacgattggcttggccccggtagacaggatcccagacccgggagtctgcccacagctctccacaaacagcggctactttcgtgcctgttgaaactgattagcacagaggtgaatcccaagctggctttagaggccaataccataagtactgctagcgtgcggcccgcacaggaggagcaatccatgaccccgcccggaaaggtggtaaccgtgtcatcaaggtcaccccggtgtcctcgtaaccaagcctctctgcgtagttcaaagacatttccaccatccagcgccccatgctcaagtggattacggaacccgccgcgcccgcttctcgtgcccggccctagcagcacaggatccaacgatagtgacggggggctgtttgctgtcccaacaacattgccaccgaattcacgacacgggaagcttttctctccctcaaaggaggctgaactaaccttcaggcagcacctgaattccataagcatgcaatctgacttttttctccctaagccccggaagctgagaaacaggcatctcagaaagcccctggtcgtccagaggactctcctgccgcgtccttcagagaatcagtctcataatgtgtgtagcttctccattctctcaaactccagcgtgactggcaggggatcatttagacccattcaatccagcctaacgaaagctgcactctcccgcccgattgtgccaaaggtattgccaccgcaggccacttcccatctggctagtgccattgacctggccgccacaagcgcagggattctctcagggaaccctctgcctgccctggacactgaagggctgagcggaattagccccctgagctcagatgaggttacaggggcaatctccgggcaggactccacaggaactcatcaggacggcgataccctgcccacagttggtggtagtgacccatttgtttcaatcccctctcgacctgaacaggaacctgtagccgattcatttcagggcagcagtgtcctgtccctgtccgagcttcccaaagccccgttacaaaacggtctgtcaatccctctatcaagcagcgagtcctcctctacacggctgagtccccccgatgtgtctgccctgctggacatcagcttgccaggccctcccgaggacgccctatcgcagggggagcctgcaacccacatctcagactccatcatagagatcgccatctcctccggcgagggagttccactgtcgccggccaaactcaacggatcagactcgtcgaagtcgctccccagtcctagctcctcgcctcagccacattggatcgcatctcctactcatgatccacagtggtatccttctgatagcaccgattcctctctctcttcgctcttcgcttcatttatcagcccggaaaagtcccggaaaatgttaccaacccctatagggactaactctggcacttcattgctcgggccctcccttttagatggcaattccagggactctttcgtttctaggtctctggctgacgtggccgaagtcgtcgattcccagctcgtgtgtatgatgaatgagaactccatcgattacataagccgcttcaacgacctggcccaggaactgagcattgccgagccaggtagaagagaggccctcttcgatggaggaggcgggggaccggcggttagtgatctatctcagtag

SEQ ID NO: 206035 - DNA, 3810 bp, Artificial Sequence
  derived and/or modified sequence
atgaccgtgaagctgggcgacggcggcagcggcgaggacggcctgaagaagctgggcaaaagagccgctgacgaggaatcgctggagggggaaggtgctggtggcgcagatgcagctgaggagtcttccggcaccaaacgcgacgagaagacgcctagagcaggcgccgatggaccacccgcgccaccaggcgcgcctcaagcgccaagtcccccacagggctcaccccaagatcaacatcactttctgagaagttccgtgcgccctcagtccaagagaccaaggaaggacccccccagtgccgttgggtccggaaacgcgggaggctcaggtccccgcggaaagggtgcagaaggtggtggatcgtccagcggcaacgtgtccggcgtggctccggctgccccagccggaggcagccggtcatcttctcgaaatctcggctcatccgggggggaaaaggaggaggggaagaaagtccgaaggcagtgggagagttggagcaccgaggacaagaatacattcttcgagggcctatatgaacacggcaaggacttcgaggcaattcagaacaatatagcattgaagtataaaaaaaagggcaagcccgcctcaatggtgaagaacaaggaacaggtgcgtcatttttattaccgtacttggcataaaatcactaaatacattgatttcgatcacgtcttcagtcggggcttgaagaaatcaagtcaagaactttacggcttgatctgttatggcgagctgcggaagaaaatcggaggctgtatggacgacaagaatgcaaccaagttaaatgagttgatccaagtgggtgcaaccacagtgagatacaagggcagaaacctgcggattaaggcacccatgtgtagagctcttaaaaaactctgcgaccctgatggcctttccgatgaggaggaccagaagcccgtgcggctaccgctaaaagtgcccattgaacttcagccacgcaacaaccatgcgtgggcgagagtccagtccttggcacagaaccctaggctgagaatgattgttgagctgcataggaaagtgtcatcactgatcgagttcttaaaacagaaatgggccttacacgaagtgagagtgcgcaagacactggaggagcgccaacttcaggatagctgctccgcaccaatgcaggagaaagtgacactgcacctgtttcctggcgagaactgtactctaacgcctctaccgggagtcgccagggtggtgcattctaaggccttttgcacagttcactggcaggaagggggtcgttgcaagcagtccgccaaggacgcacacgttctgcccccagcgcagatcttgggcatccagagcgggcaggggactgctcgtggccaggtgaagtgcccgcgctccggcgctgagggcaaaggggtcgggcggccccccccagctgcagatgctctgcagtcctctggagagtcatcgcccgagagcgcaccgggcgaaggggcggctcttagcttatcctcccctgatgcaccagaccgacccccacctcggcatcaggataccggcccctgtctggagaaaacaccggccgaaggccgagattcaccgacccgagaaccaggcgctctgccgtgtgcatgcggtcagctgccagatctggaggacgaactatcattgttggatccccttccgcggtacctgaagtcttgccaggaccttatcgtgccggagcagtgccgctgtgcagacacaaggcccggctctgaacagccccctctcgggggagcggcctcccccgaggttctggcccctgtgtctaaagaggctgcagacttagctcccacaggcccaagtcctcggccaggtcccgggctcttgctcgatgtgtgtacaaaagatctagcagacgcccccgctgaggagctccaggagaagggaagtcctgctggcccacccccgagtcagggacagccagcagcaaggcccccaaaagaggtacctgcatcccgtctggctcagcagctgagggaagaagggtggaacctccaaacatccgagtctctgactctggcagaagtgtacctgatgatgggaaaacccagcaaactgcaattggaatacgattggttgggtcccgggaggcaggatcctagacccgggtcgctcccaacagctctgcataagcaacgcctcctgagctgtctgctcaagctcataagtactgaggttaatccgaagctggcgctagaggcaaacacaatttctaccgcatcagttagacccgcacaggaagaacaaagcatgacaccccccggaaaagtagtcactgtgtcatcgcggagcccaaggtgtcctaggaaccaggcaagcttgaggtcatccaagacatttccaccatccagcgccccatgtagctcaggcctcaggaaccccccccggcccttgctcgttccaggcccctccagcactggcagtaacgactcagatggaggcctgtttgccgtgccaacaactctcccacccaattcgcgccacggcaagttgttcagtccttctaaagaagcggaactgacatttagacagcacttgaacagcatttccatgcagagtgacttcttcctccctaagcctcggaagctccgaaatagacaccttcgcaaaccattagtcgtacagagaactctacttccgaggccttccgaaaatcagagccacaatgtctgtagtttctctatcttgtctaactcctcagtcactggcagggggagcttccggccaattcaatcctcccttaccaaggccgccctgtcacggcctatcgtccctaaggtgctccctccacaggctacttcacatctggcctccgccattgacttagctgctacctctgctgggattctttccggtaatcctctgcctgccctggatactgaagggttgagcggaatctccccactcagctctgatgaggtgaccggcgccatcagcggtcaggattccaccggcactcatcaggacggggacactctgcctaccgtgggagggtccgatcccttcgtgagcatcccaagccggccagaacaggagccagtggccgattcatttcaaggttcctccgtgctgtccctgtctgaactccctaaggcaccactgcagaatggactgtcaatccctttatccagctctgaatcctcctctaccaggctgagccccccagatgtctccgccctgctcgacataagcctgcccgggcctccagaagacgcactgagccaaggggaacccgccactcacatctcagattccattatagagatcgccatcagcagcggccagtacggcgagggcgtgcccctgtcccccgcaaagttgaatggctccgacagctccaagtccctccccagccccagctcgagtccacaaccacattggatagcctcaccgacacatgacccccagtggtaccccagtgacagtactgatagttccctatcttccctctttgcatccttcattagccccgagaagagcaggaaaatgctccccacccctatagggacaaactctgggacgtccctgctgggccctagtttattggacggaaactcccgcgattcttttgtgagccgatccctggccgatgttgccgaggtcgtggattcccagctggtgtgtatgatgaacgagaacagcattgactacattagccgctttaatgatttggctcaggagctatcaattgcggagcctggaagaagggaagctctgttcgacgggggaggagggggcccagctgtctctgatctgtcacagtag

SEQ ID NO: 206036 - DNA, 3810 bp, Artificial Sequence
  derived and/or modified sequence
atgaccgtgaagctgggcgacggcggcagcggcgaggacggcctgaagaagctaggtaaacgggcagccgatgaggaaagtctcgagggcgaaggtgcaggcggcgccgatgcagcagaggagtctagtgggactaagcgtgatgaaaagactcctcgtgcgggagccgacggcccccctgcaccaccgggcgcaccacaggcccccagccctcctcagggatccccccaagatcaacatcattttctgagaagcagtgtccgccctcaaagcaagagacctagaaaggatcccccaagtgcggtgggctcagggaatgctggcggcagcgggccacggggcaagggcgccgagggcggtggctcttcttctggaaacgtgagcggagtggctcccgcagcccccgctggaggtagccgctcctcctcacgtaacttgggatccagcgggggagagaaagaagagggcaaaaaggtccggcgtcagtgggaatcgtggtccacagaagataagaacacgtttttcgaggggctctacgaacacggcaaggattttgaagcaatacaaaataacattgcattgaagtacaaaaaaaaggggaaaccagcctccatggtgaagaataaggagcaggtacgacacttctattaccgcacctggcacaagattacaaagtatatagactttgatcatgtgtttagccgcggcctaaaaaaaagctcccaagaattgtatgggctaatctgctatggcgagctgcgaaagaaaattggtgggtgcatggatgataagaatgccacaaagctcaatgagctgattcaggtgggagccaccacagtcagatataagggcagaaatctgcgcattaaggcccctatgtgcagagctctgaaaaaattgtgtgatcctgacggactctctgatgaggaggatcagaaacccgtacgattgcctctcaaagtaccgatagaacttcaaccgaggaataaccacgcctgggcgagggtgcagagcttagcacaaaaccctcggttgaggatgatcgtggaactccatcggaaagtctccagcctaattgaattcttaaagcagaaatgggcattacacgaagtgagagtgcgaaaaaccctggaggaacggcagttacaggactcatgtagcgcccccatgcaagaaaaggtaacactacacctgtttcccggcgagaactgcacactaacacctctcccaggagtggctcgagtggtgcattctaaggccttctgtacggtgcattggcaggagggaggcagatgcaagcaatccgccaaggacgcccatgtactcccaccagcccagatccttggcattcagtctggccagggaaccgcgcgcggacaagtgaaatgcccacgctccggcgcagaaggaaagggagtggggagaccgcctcctgccgcggatgcactccagtccagtggagaatcttcaccggaaagcgctccaggagaaggagctgctcttagtctgagcagccccgacgctcccgaccgtccacctccccgacaccaggacacggggccttgcctggaaaaaacccccgctgagggtcgggatagtccaacccgggagcccggggctcttccctgcgcttgcgggcaactgcctgacctggaggatgaactgagcctgctggacccactaccccgctatttgaagtcctgccaagacctgatcgtgcctgagcaatgtaggtgcgccgacactcggcccggatcagagcagccacctctcggaggcgcagcgagtcctgaggtgctcgccccagtgtctaaagaagcggctgatcttgcccctacaggtcccagtccacggcccgggcccgggttgctgttggacgtctgcactaaggatctggccgacgctcctgccgaagaactgcaggagaaaggtagccccgcaggtcccccaccttctcaaggacagcccgccgccaggcctcccaaagaagtgccagcttcgagactggctcagcagctgcgggaggaggggtggaatttgcagacgtccgaatcactgactcttgccgaagtgtatctgatgatgggcaaaccttccaaattgcagctggaatacgactggctcggccctggacgtcaggacccacgacccggtagcctgcctacggctttgcacaaacagagactgttgagttgcctgctgaagctaatctccaccgaagtgaatccaaagctcgctcttgaggctaatactatcagcaccgcttcggtccgtcccgcccaggaggagcagtcgatgactcccccaggcaaggtcgtgactgtcagttccagatccccgcgctgccctcgtaatcaggcctccttgaggtcatctaagaccttccccccatcaagtgcaccctgctcttctggtctcagaaatcctccccgcccgctgctcgtgcctggtccgtcctcaacagggtcaaatgacagcgacggtggtctgtttgccgttcctactacgctacctcctaacagtcgtcacggaaagctgttctctccatctaaggaggcagagctgacctttaggcagcaccttaactcaatcagcatgcaaagtgattttttcctcccgaagccccggaagttaaggaatcggcatttgagaaagcctctggttgtgcagcggacgctgttacctcgaccttccgaaaaccagtcccacaacgtgtgctcgtttagtattctgtctaattcctccgtcactggacgtggcagtttccgtcctatccaaagcagccttactaaagccgccctgtcaagacctatcgtcccgaaggtcctcccgcctcaggccacgagccatctggctagcgctattgatctcgctgctacctccgccggaatcctgtctgggaatcctctacctgcgctggatacagagggactcagcgggatctcacctctgagttcagatgaagttaccggcgcaatctctggccaggattctaccggcacccaccaggacggagacacacttccaaccgtcggcggatctgatcccttcgtctccatcccctcgaggccagaacaggagcccgtagccgacagctttcagggctcttcagtcttatccctatcagaattgcctaaggccccgcttcagaacggactgtctattccactctcttcgtccgaatcatcgtctacacggctgagcccacctgacgtttctgcgctgttggatatctctttaccaggtccgcccgaagacgcgctctctcagggagagcccgcaacccatatctccgactctattatcgagatcgccattagctccggacagtacggggaaggggttcccctgtcccctgccaagctaaacgggtccgacagcagcaagagtctgccttctcctagctctagcccacagcctcattggatagcctccccaacacatgatccccagtggtatccatctgacagcactgatagtagcctgagttccctctttgcgtccttcattagccccgaaaagagtaggaagatgctgcctacgcctattggcactaacagcgggacatctcttctgggacctagtcttcttgacggcaacagccgcgacagcttcgtcagcagaagtctggctgacgttgccgaggtggtggatagtcagctagtgtgcatgatgaatgaaaactccattgactacatttccaggttcaatgatttagctcaagagctttctatcgctgagccagggcggagagaagccttattcgacggaggtgggggggggcccgcggtgtccgatctgagtcaatag

SEQ ID NO: 206037 - DNA, 3801 bp, Artificial Sequence
  derived and/or modified sequence
atgaccgtgaagctgggcgacggcggcagcggcgaggacggcctgaagaagctgggaaaaagagccgccgacgaggagagcttggagggagagggcgctggcggcgccgatgccgctgaggagtctagcggcactaaacgcgatgaaaaaacaccccgggctggcgccgatggcccaccagcgcctcccggcgctcctcaggctcccagccctcctcagggaagccctcaagatcagcaccactttctgcggagcagtgtgcgcccgcagagtaagagaccaaggaaagatcctccaagtgcggtagggtccggcaacgccggcgggagcggtcctaggggaaaagacagacaccttcctaaggcccaactgtggctctcgatctcacgggtgccatttggagggtctagatcctcttcccgcaacttgggatcctccggtggggagaaagaagagggcaagaaggtaagacgccagtgggagagctggtcaaccgaagataagaatactttcttcgagggcttgtacgagcacggtaaagacttcgaagcgattcagaataatattgccctaaagtacaagaagaagggaaaaccagcatctatggtcaagaataaggagcaggtgcggcatttttattatagaacttggcacaaaattacaaagtacatcgacttcgatcatgtattctccagggggctcaaaaagtcttcccaggagctgtatgggctgatctgctacggagaactgagaaagaaaatagggggttgtatggatgacaagaacgcaaccaagttgaatgaactgattcaggttggcgccaccacagtaaggtataaaggccgcaatctgcgcatcaaggctcctatgtgtcgagccctgaaaaaactctgtgaccccgacggtctgagtgatgaagaagaccaaaagcccgtaaggctgcccttgaaagttcctattgaactgcaacccaggaacaaccacgcgtgggctcgagtgcagagcctggctcagaacccaagactccgaatgatcgtggaattgcacagaaaggtgagctctttgatcgaattcctcaagcaaaaatgggcgttacatgaggtccgggtgcgcaagacgctcgaggagcggcagctgcaggactcctgcagcgctcccatgcaggaaaaggtaacattgcacctgttcccgggagaaaattgcactctaactcccctccctggcgtggctagggtcgtgcactcaaaagccttctgcactgtacattggcaggaaggcggccgatgcaagcaatctgccaaagacgcacacgtgctccctccagcacagattctggggatccagagtggtcagggcaccgctagaggccaagttaaatgtcccagatccggagccgagggaaagggagtcggcagacctcctcctgccgccgacgccctccagagttccggggagtcgagccccgaatctgctcccggcgagggtgccgccctctcactttccagtcctgacgcccctgacaggccgcccccgagacaccaggacacgggcccttgcctagagaaaactccagcagagggccgcgatagtccaactcgcgagcccggcgccctgccttgtgcatgtggacagttgccggatcttgaagacgagctcagccttcttgacccacttccacggtacctgaaaagctgccaggacctgatagtgcctgaacagtgcaggtgtgccgataccagaccaggcagtgaacaaccacctttggggggcgccgcaagcccggaagtcttggctccagtgtccaaagaagcggcagatctggcccccacaggtccttccccaagacctggcccaggtctgttgttggatgtttgcaccaaggacctggccgatgcccccgctgaggagctgcaggagaagggaagccccgctggacctcctcccagccaggggcagcccgccgctcgtcctcccaaagaagtgcccgcatctcggttagcccagcagctgcgagaggaaggttggaatttgcagacttccgaaagtttgactctggctgaagtgtaccttatgatgggtaagccttccaaactgcagttggaatatgactggctgggaccagggcggcaggacccacggcctggtagcctccccacagctctacacaaacagaggctccttagctgcttgcttaagctgatctccaccgaagtgaatccgaaactggctctggaggccaatactatttccacagccagtgttcgcccagcccaggaggaacaatcaatgacacctccaggcaaagtggtgaccgtcagcagccgaagccccagatgtcctcggaatcaggcatctcttcggtcttccaagaccttccctccttcaagcgccccctgctcatccggcttaagaaatccccctaggccactgcttgttccaggcccctcttccaccgggagcaatgactccgacgggggactcttcgccgtgcccacaaccctgccccctaactctcggcacggtaagctcttctctccgagtaaagaggcagagctcactttccggcagcatcttaattccatttctatgcagagtgattttttccttcctaagccccgcaagctgagaaatcgacacctgcggaagccattggtcgtccaaaggactctgttgccgagaccctctgaaaaccagagccacaacgtgtgcagtttctctatcctcagcaacagtagcgtgacaggtagggggagcttccgccctattcagtcaagtctgactaaggccgcactgtcccggccgattgttccaaaagtgctgcccccgcaggccacttcccacctggcatccgcaattgaccttgcagccacttccgccggaatcttatccgggaatccccttccagctttggatacagaaggcttgagtggaatctccccactgtcaagcgacgaagttaccggggccattagcggacaggactctaccggcacacaccaggacggagacactcttcccaccgtgggaggctccgatccctttgtatccatccccagccggccagagcaggagcctgtcgccgacagcttccagggatcatcagtgctgtctctctcagaactccccaaagccccactacagaacggcctctccatccctctttcaagtagtgagtcctccagcacgcggctgagccctcctgacgtgtctgcactgctagacatcagcctgcccggaccacctgaggatgccctgagccaaggggagcctgccacgcatattagcgactctataatcgaaattgctataagctccggccaatatggcgaaggtgtcccattatctccagccaaactcaacggctcagacagcagcaagtctctgccctcccctagcagctctccacaaccgcactggatagcctctcccacccacgacccgcaatggtacccatcagattcaaccgatagcagtttgtcttcgctgttcgcttcctttatcagccccgagaagtcccgaaaaatgcttcctacaccaatcgggactaattcaggaacgtcgttgttgggaccttccctgctggatgggaatagcagggatagctttgtcagcaggtctctggctgacgtcgccgaggtcgtcgacagccaactggtgtgtatgatgaatgagaatagcattgattatatctctcgctttaacgacctggctcaggaactcagcattgcagaacccggccggcgcgaggcgctcttcgatggcggcggaggtgggcccgccgtcagcgatctatctcagtag

SEQ ID NO: 206038 - DNA, 1935 bp, Artificial Sequence
  derived and/or modified sequence
atgctgaggactgatgccggtgaggatcttgctgatgcaccagccgaggagttgcaggagaaggggtcgccagctgggcctccaccgtcacaagggcaaccggctgctaggcccccaaaagaagtccccgctagccggttagcccaacaactcagagaggagggctggaatttgcagaccagcgagagtcttactctcgcagaagtatacctcatgatggggaagcccagtaaactgcagctggagtatgactggcttgggcctggccgtcaagaccctcggccaggatctctgccaacagcactccacaaacagagactcctgagctgcttgctgaaactgatcagtactgaagtcaacccaaaactcgccctggaagctaatactatatctaccgccagtgtgcgccctgcccaggaggagcagtccatgacacccccagggaaggtagtcactgtgtccagccggagcccacggtgccctagaaaccaagcatccctcagatccagcaagacattccccccatcttccgcaccctgctccagcggacttagaaaccccccacgcccattattagtacctggccctagctccaccggctccaatgattctgatgggggactgtttgcagttccaactacactccccccaaacagccgacatgggaagctgttttcgccctcaaaagaggccgagctaacgtttcgccaacacctcaactctatctcgatgcagtccgactttttcctacccaaacctagaaagttgcggaatcgtcacctgaggaagccactggttgttcagagaacccttttacctcgcccttcggagaaccagtctcacaatgtgtgcagctttagcatcctcagtaactcatcagttaccggacgcggtagcttcagaccaatacaaagctccctaactaaggcggcattatcacgacccattgtcccaaaggtgttacctccacaggccaccagtcatctggcctctgcgattgacttggccgcaacttccgctggaatcctttctgggaatccactcccggctcttgatacagaaggcttgtccgggatttcacccctgagttccgatgaggttacaggcgctatctctgggcaggattccacaggcacccaccaggacggcgacacgcttccaactgtgggcggttcggatcccttcgtcagcatcccctcaaggccagaacaggaacccgtagcagattccttccaagggtcctctgtgctgtcattgtccgagctccctaaagccccactccaaaatgggctctctatcccactgtccagcagtgaaagcagcagcactcgcctttcaccccctgatgtgtcagctttgctggatatcagccttccaggacccccagaggacgccctatcacagggggaaccggctacgcatatcagcgattctatcattgaaatcgccattagctcaggcgaaggcgtgcctctgagcccggcaaagctgaatggctcagattcctccaagtctctacccagtccaagttcatcgccacagccccattggatcgcttccccaacccatgacccccagtggtacccttctgatagtacggacagctccctcagcagtctgttcgcatcctttatttcgcccgaaaagtcacggaagatgctccctacaccaattgggaccaatagtggcacctctttattgggcccttcattgcttgacggtaactcacgtgacagtttcgtgtctcggtcgctagccgatgtggccgaagtcgtggattcacagctcgtgtgtatgatgaacgaaaattccatcgattacattagccgcttcaacgatcttgctcaggaactgtccatcgcggagcccggacggagagaggcattgttcgacgggggtgggggtggacccgcagtgtcagacctgtcccagtag

SEQ ID NO: 206039 - DNA, 3810 bp, Artificial Sequence
  derived and/or modified sequence
atgacagtgaagctgggcgacggcggttctggggaagacggattgaaaaagctggggaaacgcgctgccgatgaggaatccctggagggagagggcgctggaggtgccgatgcagcagaggaaagtagtggcacaaagcgagacgagaagaccccccgtgcgggtgcggatgggccacccgctccacctggagctccccaagccccatcgccccctcaaggctctccccaagaccagcatcattttcttcggagctccgtgaggccgcaaagcaaacgtcctagaaaggatccaccatccgccgtgggatcaggcaatgctggcggatccggtcctcggggtaagggcgcagaagggggaggatctagcagcggaaacgtctccggagtggcgcctgccgcaccagcaggagggagtcggtcctccagccggaacctaggtagtagcggaggggagaaggaagaaggaaaaaaggttagacgccaatgggaatcatggagcacagaagataaaaacaccttttttgagggcttgtacgagcacggcaaggatttcgaagccatccagaataacatcgcacttaaatataagaagaaaggtaagccagcttctatggttaaaaataaggaacaggtcaggcacttctactataggacttggcacaaaattactaagtatatcgactttgaccacgttttttcgaggggcttgaaaaaatccagtcaggaactgtacggcctaatctgttacggtgagttacggaaaaagatcggcggatgcatggatgataagaatgctaccaaactgaacgaactgattcaggttggcgcaacgacagtgcggtacaaaggaagaaatctgcgtattaaggctcctatgtgccgcgctctgaaaaaactgtgcgatccagacgggctgagcgacgaggaagaccagaagccggtgaggctgcctctaaaagtccccatcgagctgcaaccacggaataatcacgcctgggctcgggtgcagtccttagcacagaatccccgtctacgaatgatcgtagaattgcatcgtaaggtaagcagcctgatcgaatttctaaaacagaaatgggccttgcacgaggtcagagtccggaagacactcgaggagcggcagctacaggacagctgctctgcaccgatgcaagagaaagtgaccctgcacctctttcctggtgaaaactgtacattgactccactaccaggcgtcgccagggttgtgcattctaaagctttctgcaccgtgcactggcaggaagggggaagatgcaagcaaagcgccaaggacgcccacgtgttaccacccgctcaaattttgggcatacaatctggccagggaacagccagaggccaggttaagtgtcccagatccggggctgagggcaagggcgttggcaggccccctcccgctgctgatgcgcttcagtcatctggcgagagttcacccgaatccgctcctggggaaggcgctgcactctctttgtcaagtccagacgcacccgacaggccccctccacgtcaccaagacacaggcccttgccttgagaagaccccagccgagggccgtgactctccgacccgtgagccaggggctctgccatgtgcgtgcggtcagctgccagatttagaggacgagttgtccctcctagaccccctacctcggtatctgaagagctgccaggacctgattgttccagagcagtgcaggtgtgctgacacgcggccaggcagcgaacaaccaccactgggcggagctgctagtcccgaggtgctcgctcccgtgagcaaagaggccgcagacctggctcctacgggaccaagtcccaggccaggacccggactgctgctggacgtgtgcactaaggacttggctgacgcccctgccgaggaactccaagaaaaaggatcacccgcaggcccaccaccttcacagggccagcctgctgcgagacctcccaaggaggtgcccgcatccagacttgctcagcagctacgagaggagggatggaatctgcaaacaagtgagtccctgacactggcggaagtctatctgatgatgggtaaaccatctaagcttcaactggaatacgattggctgggacctgggcgacaggatcctcggcctggaagcctgcctacggctctgcacaaacagcgcttactttcttgtttgctgaaactgatcagcactgaagttaaccccaaactcgccctggaagctaatacgatatccacagcatccgtgcgccctgcacaagaggaacagtccatgactccgccaggaaaggtggttaccgtgagttcaaggagtcccaggtgtcccaggaatcaggcaagcctaagatcctcgaagacttttcccccttcttccgcaccctgctcatctggcctgaggaacccacccaggccactgctggtgcctggtccttcctctacaggctcaaacgacagcgatgggggactgtttgcagtccccacaactcttcctcccaatagcaggcacggtaagctattctccccgagcaaagaagccgagctcacattccggcaacatctcaactcaatttcgatgcagagtgattttttccttcctaaacccaggaaactgagaaacagacacctccggaaaccactggtggtccagagaactctgctgccgagaccaagcgaaaatcaaagccacaacgtgtgcagtttttctatcctgtctaattcatccgtaacaggccgtgggagctttcgcccaattcagagtagtctaaccaaggctgccctatccaggcctatcgtgcccaaagtgcttccgcctcaggccacatctcatctggcgtcggctattgacctagcagccactagtgccggaattctttcaggaaaccccttgcccgcattggatacagagggactctctggcatcagcccactgtcatccgacgaggttactggtgccatatctgggcaggacagtaccggtacgcaccaggatggagatacgctgccaacagtagggggtagcgatccattcgtctccatcccctccagacccgagcaagaacctgtggctgactctttccagggcagctccgtgctaagcctgagtgagctcccaaaagcaccactgcagaatggtcttagtatccccttgtctagcagtgagagcagctccacgcgactctcaccccctgacgtctctgctttacttgacatcagccttccagggccaccagaagacgccctgagtcagggcgaacccgctacccacatcagtgactccatcatcgaaatagcaatttcctcgggccagtacggtgagggagttccattgtcccccgcaaagctgaacggaagtgattcttccaagagcctgccttcacctagttcttcgccccaacctcattggatcgcctcccccacccacgatccgcagtggtacccgtccgactctaccgactctagtctgagtagcctgttcgcatcattcatcagtcctgagaagagtcgcaaaatgctgcccactcccataggcacgaattccgggactagcctcctgggcccatccctgttggatggcaatagtagggatagcttcgtgtcccggtctctggccgacgtggcagaagtcgtggacagccagctggtatgcatgatgaacgagaattcaatcgactatatctctcgattcaacgatctggcccaagaactcagtattgcggaacctgggaggagagaagcactgttcgacggagggggtgggggacctgctgtatccgacctttctcagtag

SEQ ID NO: 206040 - DNA, 3810 bp, Artificial Sequence
  derived and/or modified sequence
atgacagtgaaattaggtgacggtggaagcggagaggacggcttaaaaaagctcggcaaaagagctgccgacgaagaatctctggagggtgagggtgctggcggagctgacgctgccgaagaatcctccggaaccaagagagatgagaaaacaccccgagctggcgcagacggcccacctgccccacccggagcccctcaggcacctagtccacctcaggggagtcctcaagaccagcaccactttctgcgttccagcgtcagaccccagtctaaacggccaagaaaggaccctccaagcgcggtggggtccggcaacgctggagggagcggtccgagaggcaagggtgctgaaggcggagggagctcctctgggaacgtgtcgggcgtagccccagccgcacccgcaggcggaagtcgctcctccagtcgcaacctggggtcgtccggcggtgaaaaagaagaaggcaagaaagtgaggcgacagtgggaatcctggagcacagaagacaagaatacttttttcgagggactgtatgagcacggtaaggactttgaagctatacaaaacaatattgccctcaagtacaaaaagaaaggtaagccagcttccatggtcaagaacaaggagcaggttcgccacttctactaccggacctggcacaagattactaagtacatcgattttgatcatgtattttccaggggcctaaaaaagagctcccaggagttgtacggactcatctgctacggagagttgagaaagaagattggaggctgcatggacgacaaaaatgcaaccaaactaaatgaattgatacaggtgggggcaaccaccgttagatataaggggcgaaacctgaggatcaaagcccctatgtgccgagcccttaaaaaactttgcgaccccgatggactatcagacgaagaggatcagaaaccagtccgactgccactgaaggttcctattgagctgcagcccaggaacaatcatgcgtgggcaagagtacagtcactggcacagaaccctagattgcgaatgatcgtggagctacatagaaaggtttccagcctgattgaattcctgaagcagaaatgggccctccatgaagtacgcgtgaggaagactctggaggaacgtcagcttcaggacagctgctcagcgccaatgcaagagaaggtgacgctccacctgtttcccggtgaaaactgtacactgacgcctctaccaggggtcgccagagttgtgcattccaaggccttttgcaccgtgcactggcaggagggcggaagatgtaaacagagcgctaaagatgcccacgtcctcccgccagcgcaaatcctgggtatacagtcgggacaaggcactgctcgcggacaggtgaaatgtcccaggagcggggctgagggcaagggcgtgggacgcccacctccagctgccgatgccctccagtcttcaggtgaaagcagtcctgagagcgcccctggagagggcgcagctttgtctctttcctcccctgatgcacctgatcgcccaccacctcgccaccaggataccgggccatgcctagagaagacccctgcagagggacgagacagtcccacacgtgagcctggtgcccttccctgcgcgtgtggccagctgcccgatcttgaagacgagctgtcactacttgatcccctcccgaggtacttaaagtcctgtcaagatctcatcgtgccagagcagtgtcgatgcgcagatacccggcctggttccgagcagcctcctctcgggggtgccgcttctccagaggtcctcgctcctgtctcaaaagaggccgctgacttagccccaaccggccctagtcccagaccaggcccaggccttctgctggacgtttgcacaaaagatctggcagacgctccagccgaggaactgcaggagaaaggctccccagccggacctcctcctagccagggacagcccgcagcaaggcccccaaaagaggttcccgcaagcaggttggctcaacagttacgagaggaggggtggaatctgcaaacttccgagtctcttaccctggcagaggtgtatctgatgatgggcaagccatcaaaactgcagctggaatacgactggctaggcccagggagacaagacccgaggcctggttccttaccgaccgctcttcacaagcagcggctgctgtcatgtttgctgaagctcatttctaccgaagtcaaccccaaactagctttagaggctaacacaatttccactgcatccgtccgcccagcacaagaagagcagtcgatgacaccgcctggaaaggtggtgacagtgagctctaggtctccaaggtgtcctagaaaccaggcttccctccgctctagtaagacattccccccatcctctgctccatgttcctccggactgagaaatccccctcgcccacttctcgtgcctgggccatcctccacaggctcgaatgactctgacggcggactatttgcagtgcctaccactctgccacctaacagtcgccacggcaagctgttctccccttccaaagaggccgagctgacttttcggcagcatctgaacagcattagtatgcagtcagacttctttctgccaaagcccagaaagctgcgcaacagacatctgaggaaaccactggtcgtgcagcgcaccctgctgcctaggcctagcgaaaatcagtcacacaatgtgtgctccttttcaatactcagcaactcctcagtcacgggaaggggcagcttccggccaatccagagcagtctgaccaaggccgctctcagccgtcccatcgtgccaaaagttctgcccccacaagccacttcacatcttgcttcagcaattgatctggctgcaaccagcgccggaatactgagcgggaacccactccccgctcttgatacagaagggctgtcaggaattagtcccctgtcctctgatgaagttacaggcgcaatttcaggacaggattccaccggtacacaccaagacggagacacactgccaacagtcggaggaagcgacccttttgtgagcattccgtcaagacccgaacaggaaccagttgccgacagcttccagggctcgtctgttctcagtctgtctgagttaccgaaagccccactgcaaaatggcttgtcaatcccgttgagttcatcggagtcttcttctactagactttctccccctgacgtgtccgccctgctggacatctcactccccggacctcccgaggacgcactgtcgcagggggaacccgctacacatatctccgattctataatcgaaatcgctatttctagcggtcagtacggcgagggtgttcctctttcccccgctaagctcaacggcagcgattctagcaaatctctgcctagcccttcatccagcccccagccccattggattgcttctccgacccacgatccgcagtggtacccttccgactctacggactcatctctctctagcctgtttgccagctttatttctcctgaaaaatcccgcaagatgcttcccacaccaatcggcactaattccggaacaagcctgctgggtccgtctttgctggatggaaattccagagatagcttcgtcagcaggtcccttgctgatgtggccgaagttgtggattcccagctggtgtgtatgatgaacgagaatagcattgactacatttctagatttaatgatctggcacaggaactgtccatcgcggagcctgggaggcgagaagccttattcgatggaggtgggggaggccctgccgtgtccgacttgtctcaatag

SEQ ID NO: 206041 - DNA, 3801 bp, Artificial Sequence
  derived and/or modified sequence
atgaccgtgaagctgggcgacggtggctccggagaggacggactcaaaaagctggggaaaagggctgcagacgaggagagtctggaaggggagggagccggtggcgcagacgctgccgaagaaagcagcggcaccaagcgggacgaaaaaactccaagagccggagcggatgggcctccagcaccacctggcgctccacaagccccttccccccctcagggcagtccacaagatcagcatcactttctgagatctagcgtgaggcctcaatccaaacgaccgagaaaggacccacctagcgcggtgggatccggcaacgctgggggttccggtcctcggggaaaggaccgacatctacctaaggcacagctttggctaagcattagtcgggttccttttggtggtagtaggtcctctagccgaaatcttggtagctccggcggagagaaagaggagggaaagaaagtgcgcagacagtgggaaagctggtctacagaggataagaacacgtttttcgagggcctgtacgagcacggaaaggatttcgaagctatccagaataacatcgctttaaaatacaagaagaaaggaaaacccgcttcaatggtcaagaacaaagagcaagtccgacacttttactaccgcacctggcacaaaattaccaagtatatagacttcgaccacgtgttttctcggggacttaagaaaagtagccaagagttgtatggtttgatctgctacggagaactgaggaagaagatcggcggatgtatggatgataagaatgctactaaacttaatgaactaatacaggtgggagcaactacagtacgatataaaggccgtaacctaagaatcaaagccccaatgtgtcgggctcttaagaagctgtgcgatcctgatgggctatccgatgaagaagatcaaaagcccgtcaggctgcccctgaaggtgcccatcgaactccagccgagaaataatcacgcctgggcaagggtgcaatcactggcccagaacccaagactgcgtatgattgtcgaactccaccgaaaggttagctcactgatagagttcctgaagcagaagtgggcattgcacgaagtccgggtgcggaagacattggaagagagacagctgcaggattcctgttcagcacccatgcaggaaaaagttactctccatctgtttccaggagaaaactgcacgctcactcctctgccgggagtggctcgggtggtacactcgaaggccttctgcaccgttcattggcaggagggaggacgctgcaaacagtcagcaaaggacgcacatgtgttgccacctgcacagatcctcggaatacagagcggccagggcactgcccgagggcaggtcaagtgcccacggtccggcgcagagggcaaaggtgtggggagaccaccgccagcagcagacgcacttcagagttcaggcgaaagcagcccggagtccgcacctggcgaaggagcagccctttccctgagtagtcctgacgctccagatcggcctccacctagacatcaagataccggcccttgccttgagaagactcccgctgagggcagggattcccctactagggagcctggtgcgttgccatgcgcctgtggccagttaccagacctggaagatgagctgagcctcctcgaccccttgccacgctatctcaagtcatgtcaagaccttattgtacctgaacagtgccgctgcgccgacacgaggccaggaagcgagcagcctcccctgggaggcgcagcctcgcccgaggtgctcgctcccgtgtcaaaggaagcagcagacttggcacccacaggtcccagccctcggccaggcccaggcttgctcctggacgtgtgcacaaaagacctagccgacgctccagcagaagaacttcaggaaaaagggagccctgctggtccaccaccatctcagggccaaccggcagcaaggccacccaaagaggtgcctgccagtcgcctagcccagcagttgcgcgaggaaggttggaatctacagactagcgaatccctgaccctcgccgaggtatacctgatgatggggaagccctccaaactacagctggagtacgactggttggggcctgggcgtcaggaccccaggcctggttctcttcctaccgctctgcataagcagagacttctgtcctgtctcctgaaactcatctcaactgaggtgaatcccaaattggccctcgaggctaatacgatttccaccgcctccgtccgtcctgctcaagaagaacagtccatgactcctccaggcaaggtcgtgacagtgagttcccgaagccccagatgtcctagaaaccaggcctctcttagatcgtctaaaacattccccccttccagtgctccctgttcgtcggggctcagaaacccccctcgccctctgctcgtccccggaccatctagtaccgggtctaatgactccgatggcggactgtttgctgtgcctacaaccctgccacccaatagcaggcacggcaaattattctcaccttctaaagaggccgagctcaccttcaggcagcatctgaacagtatctcgatgcagtccgactttttccttccaaaaccacggaaacttagaaatcgacacttgcggaagccactggtcgtgcagcgtacactgcttcccaggccttctgagaatcagtcccataatgtctgctctttctctatcctatccaactcctccgtgaccggccgaggatcatttagaccaattcagtcctctctaaccaaagcggctcttagtcgtcccatagtacccaaagtactgcctccacaggctaccagccacctggcatctgcgatcgatctggctgctacaagtgccggaatccttagcggcaaccctctccctgccttggacaccgaaggcctgtccggaatttcacctctgagctctgatgaagtgaccggggcaattagcggtcaggatagtactggaacgcaccaggatggagatacgctgcccactgtgggcggtagtgaccccttcgtgagtattccctcacggcctgagcaggagccagtggctgattcctttcaaggaagtagcgtcttgtccctgtctgaactcccaaaagctcctctccagaatggcctctctatccccctgtcttcctccgagtcatctagcactaggttatctccgccagatgtctcagctctcctggatatctcgctgccaggtccaccggaggacgccttgagtcagggagagcccgcaacacacatcagtgattccattattgagatagcaatatcaagtggacaatacggagaaggcgtacctctgagtcctgcaaaattaaacggatcggacagttctaaatccctgccatcgccttcaagttctcctcagccacactggattgccagcccaacacacgatccccagtggtatccttcagattcgaccgattcctccctgtcttccctctttgcatccttcatttctccagagaaatctcgcaagatgcttccgaccccaatcgggaccaacagcgggacgagcctgttaggccctagccttctagacggcaacagcagagatagctttgtctccagatctttggccgacgtggcggaggtagttgattcccaacttgtatgcatgatgaatgagaactcaattgattatattagtagatttaacgacctggctcaggaactgtccatcgccgaacccggtcgacgggaagctttattcgacgggggtggcggaggacccgcagtgagtgatcttagccagtag

SEQ ID NO: 206042 - protein, 426 aa, Artificial Sequence
  derived and/or modified sequence
MVLSVPVIALGATLGTATSILALCGVTCLCRHMHPKKGLLPRDQDPDLEKAKPSLLGSAQQFNVKKSTEPVQPRALLKFPDIYGPRPAVTAPEVINYADYSLRSTEEPTAPASPQPPNDSRLKRQVTEELFILPQNGVVEDVCVMETWNPEKAASWNQAPKLHYCLDYDCQKAELFVTRLEAVTSNHDGGCDCYVQGSVANRTGSVEAQTALKKRQLHTTWEEGLVLPLAEEELPTATLTLTLRTCDRFSRHSVAGELRLGLDGTSVPLGAAQWGELKTSAKEPSAGAGEVLLSISYLPAANRLLVVLIKAKNLHSNQSKELLGKDVSVKVTLKHQARKLKKKQTKRAKHKINPVWNEMIMFELPDDLLQASSVELEVLGQDDSGQSCALGHCSLGLHTSGSERSHWEEMLKNPRRQIAMWHQLHL

SEQ ID NO: 206043 - DNA, 1281 bp, Artificial Sequence
  derived and/or modified sequence
atggtgctgagcgtgcccgtgatcgccctgggcgccaccctgggcaccgccaccagcatcctggccctgtgcggcgtgacctgcctgtgcagacacatgcaccccaagaagggcctgctgcccagagaccaggaccccgacctggagaaggccaagcccagcctgctgggcagcgcccagcagttcaacgtgaagaagagcaccgagcccgtgcagcccagagccctgctgaagttccccgacatctacggccccagacccgccgtgaccgcccccgaggtgatcaactacgccgactacagcctgagaagcaccgaggagcccaccgcccccgccagcccccagccccccaacgacagcagactgaagagacaggtgaccgaggagctgttcatcctgccccagaacggcgtggtggaggacgtgtgcgtgatggagacctggaaccccgagaaggccgccagctggaaccaggcccccaagctgcactactgcctggactacgactgccagaaggccgagctgttcgtgaccagactggaggccgtgaccagcaaccacgacggcggctgcgactgctacgtgcagggcagcgtggccaacagaaccggcagcgtggaggcccagaccgccctgaagaagagacagctgcacaccacctgggaggagggcctggtgctgcccctggccgaggaggagctgcccaccgccaccctgaccctgaccctgagaacctgcgacagattcagcagacacagcgtggccggcgagctgagactgggcctggacggcaccagcgtgcccctgggcgccgcccagtggggcgagctgaagaccagcgccaaggagcccagcgccggcgccggcgaggtgctgctgagcatcagctacctgcccgccgccaacagactgctggtggtgctgatcaaggccaagaacctgcacagcaaccagagcaaggagctgctgggcaaggacgtgagcgtgaaggtgaccctgaagcaccaggccagaaagctgaagaagaagcagaccaagagagccaagcacaagatcaaccccgtgtggaacgagatgatcatgttcgagctgcccgacgacctgctgcaggccagcagcgtggagctggaggtgctgggccaggacgacagcggccagagctgcgccctgggccactgcagcctgggcctgcacaccagcggcagcgagagaagccactgggaggagatgctgaagaaccccagaagacagatcgccatgtggcaccagctgcacctgtag

SEQ ID NO: 206044 - DNA, 1281 bp, Artificial Sequence
  derived and/or modified sequence
atggttcttagcgtgccagtaatagcgctcggcgccacactcggaactgccacaagcattctagcgctctgcggcgtgacttgtctttgcagacacatgcaccctaaaaaagggctgttgccccgggatcaagatccagacttggagaaggctaagcctagcctgttggggtccgctcagcaattcaatgtcaagaaaagtaccgaaccagtccagcccagggcactgttgaaatttcccgacatctacggtccgaggccagcagtcacagctcccgaggtcataaactatgccgactattctcttagaagtacagaagaacccacggccccagcgagtccccaacctcccaacgattcgcgcttgaagaggcaggtaactgaagaactcttcatcctgccccaaaatggcgtagtcgaggatgtgtgcgttatggagacatggaatcctgaaaaggccgcgtcttggaatcaagcccctaagctgcattattgcctcgattacgactgccagaaagcagagctgtttgtcacccgactggaggccgtcaccagtaaccatgatggcggatgtgactgctacgtacagggatcagtcgcaaaccggaccggctcggtggaggcgcagactgcactaaagaagagacaattacataccacctgggaagaggggttagtccttcccctggctgaagaagagctgcccaccgccaccctaacgctgacactgcgcacttgcgatcgcttctccagacatagtgtggctggcgagttaaggcttggcctggatgggacaagcgtgcctcttggagccgcccagtggggagaactcaaaacctccgccaaggaaccttccgctggcgcaggtgaggtgctcctgagcattagttaccttcccgccgccaaccgattactggtggtcctcataaaggccaagaatcttcacagcaatcagtctaaggagcttctcggtaaggatgttagtgtgaaagtgactctgaagcatcaggccaggaaactcaagaaaaagcagaccaagcgggcaaaacacaagatcaatcccgtgtggaatgagatgatcatgtttgaactccctgacgacctgctgcaagctagctctgtggaactagaggtgttggggcaggatgatagcggccaaagctgtgccctgggccactgtagcctgggtctgcacacctctggttctgaaaggagccactgggaggagatgctgaaaaacccaaggaggcagatcgctatgtggcaccaattacacttgtag

SEQ ID NO: 206045 - DNA, 1281 bp, Artificial Sequence
  derived and/or modified sequence
atggtgctgtctgtgcctgtgattgccctgggcgccaccctgggcacagccaccagcatcctggccctgtgtggggtgacctgcctgtgccgccacatgcaccccaagaagggcctgctgccccgggaccaggaccctgacctggagaaggccaagcccagcctgctgggcagcgcccagcagttcaacgtgaagaagagcacagagcctgtgcagccccgggccctgctgaagttcccagacatctacggccccaggcctgctgtgacagcccctgaggtgatcaactatgctgactacagcctgcggagcacagaggagcccacagccccagccagcccccagcccccaaatgacagccggctgaagaggcaggtgacagaggagctgttcatcctgccccagaatggagtggtggaggatgtgtgtgtgatggagacctggaaccctgagaaggccgcctcctggaaccaggcccccaagctgcactactgcctggactatgactgccagaaggccgagctgtttgtgacccggctggaggccgtgaccagcaaccatgatggcggctgtgactgctacgtgcagggctctgtggccaacagaactggatctgtggaggcccagacagccctgaagaagaggcagctgcacaccacctgggaggagggcctggtgctgcccctggccgaggaggagctgcccacagccaccctgaccctgaccctgcggacctgtgaccgcttcagccgccacagcgtggccggggagctgcggctgggcctggatggcacctctgtgcccctgggcgccgcccagtggggcgagctgaagaccagcgccaaggagcccagcgctggggccggggaggtgctgctgagcatctcctacctgcctgctgccaaccggctgctggtggtgctgatcaaggccaagaacctgcacagcaaccagagcaaggagctgctgggcaaggatgtgtctgtgaaggtgaccctgaagcaccaggccaggaagctgaagaagaagcagaccaagagggccaagcacaagatcaaccctgtgtggaatgagatgatcatgtttgagctgcctgatgacctgctgcaggccagctctgtggagctggaggtgctgggccaggatgacagcggccagagctgtgccctgggccactgcagcctgggcctgcacaccagcggcagcgagaggagccactgggaggagatgctgaagaacccccggcggcagatcgccatgtggcaccagctgcacctgtag

SEQ ID NO: 206046 - DNA, 1281 bp, Artificial Sequence
  derived and/or modified sequence
atggtgctgagcgtgcccgtgatcgccctgggcgccaccctgggcaccgctacttccatactggccctgtgcggcgttacttgcctttgccgacatatgcacccaaagaaaggtttactgcccagagaccaggaccctgacctcgagaaagctaagccctccttgctggggtcggcccagcaattcaacgttaaaaaaagcactgagccagtccagcctagggctctactgaaatttcccgacatttatggaccccgccccgctgttacagcgcccgaggttattaattacgccgactatagcctccgctccacagaggagccaacagcacccgcatccccacagccgccgaatgattcaagacttaagcggcaggtcacagaggaactgttcatcctgcctcagaatggggtggtcgaggacgtgtgtgtcatggagacttggaatcccgagaaggccgcctcctggaatcaagctccgaagctgcattactgccttgactatgactgccagaaggccgagcttttcgtaacgaggctagaggcagtcacatccaatcacgatgggggctgtgattgctacgtgcagggcagtgtggccaatagaaccggctcagtcgaggcccagacagcccttaagaaacggcaattgcatactacttgggaagaagggctcgttcttcccttggccgaggaggagttgccaacagccacactcacgcttacactccgaacatgcgacagattcagtcgtcactccgtggctggagaattgagactgggactagacgggacatccgtgccgctgggcgccgcccagtggggagaattaaaaacgagcgctaaagaaccaagtgccggcgctggcgaggtgcttcttagtatcagctatctccccgctgcaaatcgcctattagtcgtcttgataaaagcaaaaaacctgcattccaatcagtctaaggagctcctgggtaaagatgtgagtgtcaaggtgactctgaaacaccaggctcgaaagttgaagaaaaagcagaccaaaagagccaagcacaagattaatccggtatggaatgaaatgatcatgttcgaattgccagatgatctgctgcaggcgtcctcagtggagcttgaagtgttaggacaggacgacagtggccagtcctgtgccctgggacattgctctctgggactgcatacctccgggtccgagcgcagtcattgggaggaaatgttaaagaatcccagacgccagatcgctatgtggcaccagcttcatttatag

SEQ ID NO: 206047 - DNA, 1281 bp, Artificial Sequence
  derived and/or modified sequence
atggtgctgagcgtcccggtgatagcgctcggcgctaccctgggaaccgcaacctccattctagccctgtgtggagtcacatgcctgtgccgtcacatgcaccctaaaaaaggtctgttgcccagggaccaggacccggatctcgagaaagccaagccctccctccttggttccgctcaacagttcaatgttaagaagtccacagagcccgtgcagccaagagcccttctaaagttccccgatatctatgggcctcggcctgccgtgacagccccagaggtcatcaattatgctgattattcccttaggtcaacagaggagccaacagcccctgcctccccgcagcccccaaatgatagccggctcaagcggcaagttactgaggagctgtttatcctcccccagaatggagtggtggaggacgtctgcgtcatggaaacttggaatcccgaaaaggccgctagctggaatcaggctccaaaactgcattattgcctggactacgattgtcagaaagcagagctttttgtgactcggctggaggccgtgacatccaatcacgacggcggatgtgactgttacgtgcaaggatcagttgctaaccgtactggaagcgtcgaggcacagactgccttgaagaagagacagctgcatactacatgggaagaaggtttggttttgcctctggcggaagaggagttgcctaccgccacgctgacactgaccctgagaacctgcgataggttctcccggcactccgttgctggcgagctgcgactaggtctcgatggaacaagcgtgccgctcggtgccgcacagtggggcgaacttaaaacatcggccaaggagccgtcagctggggctggggaggtgttactgtcaatttcttatctgccagcggcaaaccgattgctggttgtcctaatcaaggccaagaatctgcacagtaatcagagcaaagaactgttgggtaaggatgtatcggtgaaagtgactttaaaacaccaagccaggaagctgaagaagaaacagactaaaagagctaagcataaaattaacccagtgtggaacgagatgatcatgttcgaactgcccgacgacctgctgcaggcttcttcagtagagctcgaagttctggggcaggacgacagtggacaatcttgcgccttggggcactgttcactcgggctgcatacatccggatcagagcggtctcattgggaagagatgctgaagaatccgagaagacagatagcaatgtggcatcagttgcatttgtag

SEQ ID NO: 206048 - DNA, 1281 bp, Artificial Sequence
  derived and/or modified sequence
atggtcctctctgttcctgtaatcgcactcggcgcaaccctgggcacagcaacaagcatcctggcactctgcggcgtaacctgcctgtgtcgccacatgcaccccaaaaagggtctgctgcctcgagaccaagaccctgacctagagaaagcaaagccttcactcctgggtagtgcacagcagtttaatgtgaagaagagcaccgagcccgtgcaaccacgagcactcttaaaattccccgacatctacggcccacgcccagccgtcacagcccccgaggtgattaactatgccgattattcgttgcgctcgacggaggagcccacagcacctgcgtcaccccagcctcctaacgactcgagactgaagaggcaggtgacagaagaactgtttatattaccacagaatggagttgtagaagatgtatgtgtgatggaaacgtggaatccagagaaggctgcctcatggaatcaggcccccaaattgcattattgcctcgattatgactgccagaaggcagagttgttcgttactcgattagaggctgtgacatccaaccacgacggcgggtgtgactgttacgtgcaaggctccgttgctaaccgcaccgggtccgtggaggctcagactgcactgaaaaaacggcaactccatacaacctgggaagaaggattagtgctgccactcgcagaggaagagctgcccacagctaccctgactctgacactgcgtacctgtgaccgcttttcccgtcactctgtcgccggcgaactgaggctgggcttagacggaacatcagtgcctctaggggctgcccagtggggcgagctgaagaccagcgccaaggagccgagtgcaggagccggagaggttctgctttctatctcatatctgccagccgccaatagactactggtggtgctgataaaagccaaaaatctgcatagtaaccaatcaaaggaactccttggcaaagatgtgtctgtgaaggtgacattgaaacaccaggccaggaagcttaaaaaaaaacagaccaaacgtgcaaagcataaaattaatccagtctggaacgagatgatcatgtttgagttaccagatgacctgctgcaagcctcctcagttgagcttgaagttctaggtcaggatgattccggccagtcgtgtgccctgggacactgctccctcggtctgcatacctccggctcagagcgatcccactgggaggaaatgctgaagaaccctcgccgtcagattgccatgtggcatcagttacatctttag

SEQ ID NO: 206049 - DNA, 1281 bp, Artificial Sequence
  derived and/or modified sequence
atggttctcagcgtaccagtcatcgccctcggcgcaacactcgggactgctacaagtattctcgccctctgcggcgttacttgtctttgccgtcacatgcatcctaagaaaggactgttgccacgcgaccaggaccccgatctggagaaagcaaagcccagcctgctaggatccgcccagcagtttaacgtgaagaaatcaaccgaacctgtccagcctagagctctgctgaaattcccagacatctacggccctcggcccgctgttacagcccctgaagttatcaactacgccgactactccttaagaagtaccgaggaaccaaccgcccccgcaagtcctcagcctcccaatgatagccgactgaagcgccaggtcacagaggaattatttatcctgccccagaatggtgtggtggaagatgtctgtgttatggaaacatggaatcctgaaaaggccgcatcttggaaccaggctcccaagcttcattactgcctggattacgattgccagaaggccgaactcttcgtcacacgactcgaagccgtgaccagcaatcatgacggcgggtgtgattgctatgttcagggcagcgttgcaaatcgcaccggatccgtggaagcacaaacagcactaaagaagaggcagctgcatacaacatgggaagagggcctcgttctgcctttggctgaggaggaactcccaacagcaaccctgactcttacactgcggacttgtgaccgattctcgaggcattcagtcgctggtgagttgaggctgggattggacggcacgtccgtgccacttggtgccgcccagtggggagaattgaaaacatcagctaaagaacctagtgctggcgctggagaagtcctgctttcaatatcatacttgcctgcagctaaccgtttgctagtggtgcttataaaagcaaagaatctgcacagtaatcagtctaaggagctcctcggcaaggatgttagcgttaaggtcactctcaaacaccaggcccgtaagctaaaaaagaaacaaacaaagagagccaagcataagattaaccccgtgtggaacgagatgattatgttcgagcttccagacgacctccttcaagcttcctcagtagagctggaagttttggggcaagatgactccggccaatcatgcgctttaggacattgcagcctcggactacatacaagcggatccgagcgctcacactgggaagaaatgctgaagaacccccgacgacagatagcaatgtggcatcaactacatctgtag

SEQ ID NO: 206050 - DNA, 5144 bp, Artificial Sequence
  derived and/or modified sequence
ggcggcgggagagctgctggctcgcccggatcccgggagctgcctggaggcgggcccggcccggggaaggtgagcggctgcgggacccagcccctcgccgggagcgggcaccatggtgctgtcggtgcctgtgatcgcgctgggcgccacgctgggcacagccaccagcatcctcgcgttgtgcggggtcacctgcctgtgtcggcacatgcaccccaagaaggggctgctgccgcgggaccaggaccccgacctggagaaggcgaagcccagcttgctcgggtctgcacaacagttcaatgttaaaaagtccacggaacctgttcagccccgtgccctcctcaagttcccagacatctatggacccaggccagctgtgacggctccagaggtcatcaactatgcagactattcactgaggtctacggaggagcccactgcacctgccagcccccaacccccgaatgacagtcgcctcaagaggcaggtcacagaggagctgttcatcctccctcagaatggtgtggtggaggatgtctgtgtcatggagacctggaacccagagaaggctgccagttggaaccaggcccccaaactccactactgcctggactatgactgtcagaaggcagaattgtttgtgactcgcctggaagctgtgaccagcaaccacgacggaggctgtgactgctacgtccaagggagtgtggccaataggaccggctctgtggaggctcagacagccctaaagaagcggcagctgcacaccacctgggaggagggcctggtgctccccctggcggaggaggagctccccacagccaccctgacgctgaccttgaggacctgcgaccgcttctcccgtcacagcgtggccggggagctccgcctgggcctggacgggacatctgtgcctctaggggctgcccagtggggcgagctgaagacttcagcgaaggagccatctgcaggagctggagaggtcctactatccatcagctacctcccggctgccaaccgcctcctggtggtgctgattaaagccaagaacctccactctaaccagtccaaggagctcctggggaaggatgtctctgtcaaggtgaccttgaagcaccaggctcggaagctgaagaagaagcagactaaacgagctaagcacaagatcaaccccgtgtggaacgagatgatcatgtttgagctgcctgacgacctgctgcaggcctccagtgtggagctggaagtgctgggccaggacgattcagggcagagctgtgcgcttggccactgcagcctgggcctgcacacctcgggctctgagcgcagccactgggaggagatgctcaaaaaccctcgccggcagattgccatgtggcaccagctgcacctgtaaccagctgcccagctgcctcccttcttggacagccctgacccgtcctctgcaacctcctttctgtgcccctttcctcattctgacacccagaagacagtgacagatgtgtttgcaaggctgggatggctctctcatcatactcttgtttcttagaaataagcaagacagagcaggaaatggaatatgcgggtcacactgaggaatgcattttgctcatctgtgttattgaaggaggtgcttattaaatacagttcctatgcctgttttataggtggggttaggccagatgcagagaaagctaaatgtgggaatcatggatgcaaagaagaatttggctttttgaaaaacaagcatttcaaaaatgatgaaggaagtgaaagtatcctggatcaactcctagagttagagattgcccaggtggaaagaaaccttagccagcgttcaatcaagctcaccatgcagggcagtcacccggcagttctcaaactttagcatgtgaagagtcaccagcagattcctgggctcgcctggagacattcctagtcggtattcctggtcgaagcccaggagccttcctttttaacaagctgatgtagagggtggagcactgtatgtggagaaattccttctacaatattccacacaggtttttggccacagtccttgatggagtcccaaaaccatggtgcagccagttccaatgctggacacctcaaccatcagggtgaaatctggggcctcagctttttaatttaattattttaattcttaatactttaatttgtgcatttcataagccccctgctcttggactgaattttgtgctttttattgaagaattttattgtttttatcttaaaatcagtttctattatccttggggagaccatccctaacaaagtacaggtgggatctcctgtgagtcattggctgggttctgattgctagatgtcacacccaccagcatcaccaaagtgactctgagatagaccggtcccttctcagcgttccagtcacttcaggaggaatttagttattgacttagtctatgacatctggctacatgtaggtagagaagaaagataattttaaaaaggaaatcaggtcttttgcaactgtgcctccctctgtctgttttcacttgaatgggtaaataaccagcagctaggttttgaattcctaccttgttattctaaacagatgtccacattgttaattaaatctaaattatgagccttgctgagtggatacggtacttacacctgaaccaggattcctgggttctgttgttgacattgcccttcagcacctgtttggccagctgtgtaagataggactaatgactaggaagcctaccccaatgaatgatatactagatgaaatagtgttcaaaacctgtaggcactctctggctaaaaacaaactctgaggccaccagcagatcatctttaagctaagttactatttttcacctttttttttagacggagttttgctctttgttgcccaggctggagtgcagtggcacgatctcggctcactgcaacctccgcctcccaagttcaagcgattctcctctctcagcctcctgggtagctgggattacaggtgcccaccaacatgcctggctaatttttgtacttttagtagagatggggtttcaccatgttggccaggctggtcttcaactccagatctcaggtgatctaccctcctcggcctcccaaagtactgggattacaggcctgagccaccgcgcccggcctatttttcactttaatttggcagctgagaatgcccagaaagtgccagaagcatcgtggcatttccagaaccatggattctgcctttggacccctctctattaatattaaaactctgggccttcagatgtcaccctaatccacttccctaagacagaatttctggacaagatgggtaagggcttcattccttcaacaagtcaagtcatacttggcctctccctgagaatctgagcaggagccttataacctgtggtcattattttttctttctgtacagaaatagaaaagcattagaaataacttctaaccatcctctgaaaaaacagaaaaaatatcgaatccctctttcatgagaagtcttttggataattggaaaccttcatcactgaggttggccagcccctgccaagtgttgtgtaggcaaagcacttgttagtggcttcctatgaaatgttttagagatctcttcaccatactggtttcttctctttggttggtgtgggtaaaagaaaacaaaacatttcctataagctgaaagctgaccagcattctcttcttggtaacatctactactccaatctagaaaatttggattctagaccaaaaatcaggaaacatggctccttataaatctgtgcagctgccttatagtaccatcaaaggaatttcaggtgggctgggcggggccccgatcccagaattatcaactccacccatcatcatttggtcatgaagcatcctttcattcttcttcttcttttttttgggggggcggggcgggggagggatctcaaagttttagtcttccagaatccaaattaaaggttgcccctgatgggggccaggttccgccacagaacatcttagatgtcagccttgacctcacttagcagggattacagaaatgagatacattttgaaggagagttgtctgttatgttcactgtattctaagtgcctgggataaagctgtctcatgggtgctccatatatattcatatatatttgttgagtgaattaatgaattaagagtggctggcagagtaggcagaaaaagacactgcaaatggcataaaaattaaagtcctagctgagttctcaatggtaaaggcatcagatgtcttagcagtcaagctagaaattcatgacaatgagtattactatttgcctaatggcaactcattgctctccatgtaaatgtaatcaacagatgaagagaatataattgctctgcttttccactaaaactccatcttagtgaattttaaattatccagagatgtcaaactgccaaataaaaatatttcagtagtctttgcatcagcttaccttgtaccagaaacatttccaatttactatcaaattatagtaactgagcctgtgtgaagtatctcatcattttcgaaaggaacaccttgtgtgatgccagtgagcatttctaaaaagggtgtgaggtagaggtaaaaataaggtgagagaccatttcagaatgcactgttgctcaaaaaggtgatctggttctttcttcagagatttctacggggatagaaaatcgggagtctgccctcattaatctgtgattccacctcttgcaccaaatcaatatctatttgttgagcacttattgattaagaccttgcatatgtctgtccattttgatttgagatacaactttttgtgtgggttgaatgacaaatcactccaaacaaagctgggcacagagaatcagctaggagaccagttattcagggtccatttctcttggatgtaaaggagtcctgggtaaaatgtggctgtaacctaaaccaactagtccttgtgatttgtttctgccctctgtgtttcctgttgtcaaatgctaagtgtgtgttttgcagtcatgaactaaagcacaaaaagatgcatgagacattgtagtcatatgtctggtgtgacactttggagcaaaaaccttgcagtggtaaataaaaaatttccaacagggt

SEQ ID NO: 206051 - protein, 1423 aa, Artificial Sequence
  derived and/or modified sequence
MYFLSGWPKRLLCPLGSPAEAPFHVQSDPQRAFFAVLAAARLSIWYSRPSVLIVTYKEPAKSSTQFGSYKQAEWRPDSTMIAVSTANGYILFFHITSTRGDKYLYEPVYPKGSPQMKGTPHFKEEQCAPALNLEMRKILDLQAPIMSLQSVLEDLLVATSDGLLHLIHWEGMTNGRKAINLCTVPFSVDLQSSRVGSFLGFTDVHIRDMEYCATLDGFAVVFNDGKVGFITPVSSRFTAEQLHGVWPQDVVDGTCVAVNNKYRLMAFGCVSGSVQVYTIDNSTGAMLLSHKLELTAKQYPDIWNKTGAVKLMRWSPDNSVVIVTWEYGGLSLWSVFGAQLICTLGGDFAYRSDGTKKDPLKINSMSWGAEGYHLWVISGFGSQNTEIESDLRSVVKQPSILLFQFIKSVLTVNPCMSNQEQVLLQGEDRLYLNCGEASQTQNPRSSSTHSEHKPSREKSPFADGGLESQGLSTLLGHRHWHVVQISSTYLESNWPIRFSAIDKLGQNIAVVGKFGFAHYSLLTKKWKLFGNITQEQNMIVTGGLAWWNDFMVLACYNINDRQEELRVYLRTSNLDNAFAHVTKAQAETLLLSVFQDMVIVFRADCSICLYSIERKSDGPNTTAGIQVLQEVSMSRYIPHPFLVVSVTLTSVSTENGITLKMPQQARGAESIMLNLAGQLIMMQRDRSGPQIREKDSNPNNQRKLLPFCPPVVLAQSVENVWTTCRANKQKRHLLEALWLSCGGAGMKVWLPLFPRDHRKPHSFLSQRIMLPFHINIYPLAVLFEDALVLGAVNDTLLYDSLYTRNNAREQLEVLFPFCVVERTSQIYLHHILRQLLVRNLGEQALLLAQSCATLPYFPHVLELMLHEVLEEEATSREPIPDPLLPTVAKFITEFPLFLQTVVHCARKTEYALWNYLFAAVGNPKDLFEECLMAQDLDTAASYLIILQNMEVPAVSRQHATLLFNTALEQGKWDLCRHMIRFLKAIGSGESETPPSTPTAQEPSSSGGFEFFRNRSISLSQSAENVPASKFSLQKTLSMPSGPSGKRWSKDSDCAENMYIDMMLWRHARRLLEDVRLKDLGCFAAQLGFELISWLCKERTRAARVDNFVIALKRLHKDFLWPLPIIPASSISSPFKNGKYRTVGEQLLKSQSADPFLNLEMDAGISNIQRSQSWLSNIGPTHHEIDTASSHGPQMQDAFLSPLSNKGDECSIGSATDLTESSSMVDGDWTMVDENFSTLSLTQSELEHISMELASKGPHKSQVQLRYLLHIFMEAGCLDWCIVIGLILRESSIINQILVITQSSEVDGEMLQNIKTGLHAVDRWASTDCPGYKPFLNIIKPQLQKLSEITEEQVQPDAFQPITMGKTPEQTSPRAEESRGSSSHGSIPQGEVGSSNMVSRKEEDTAQAEEEEPFQDGTYDCSVS

SEQ ID NO: 206052 - protein, 1344 aa, Artificial Sequence
  derived and/or modified sequence
MIAVSTANGYILFFHITSTRGDKYLYEPVYPKGSPQMKGTPHFKEEQCAPALNLEMRKILDLQAPIMSLQSVLEDLLVATSDGLLHLIHWEGMTNGRKAINLCTVPFSVDLQSSRVGSFLGFTDVHIRDMEYCATLDGFAVVFNDGKVGFITPVSSRFTAEQLHGVWPQDVVDGTCVAVNNKYRLMAFGCVSGSVQVYTIDNSTGAMLLSHKLELTAKQYPDIWNKTGAVKLMRWSPDNSVVIVTWEYGGLSLWSVFGAQLICTLGGDFAYRSDGTKKDPLKINSMSWGAEGYHLWVISGFGSQNTEIESDLRSVVKQPSILLFQFIKSVLTVNPCMSNQEQVLLQGEDRLYLNCGEASQTQNPRSSSTHSEHKPSREKSPFADGGLESQGLSTLLGHRHWHVVQISSTYLESNWPIRFSAIDKLGQNIAVVGKFGFAHYSLLTKKWKLFGNITQEQNMIVTGGLAWWNDFMVLACYNINDRQEELRVYLRTSNLDNAFAHVTKAQAETLLLSVFQDMVIVFRADCSICLYSIERKSDGPNTTAGIQVLQEVSMSRYIPHPFLVVSVTLTSVSTENGITLKMPQQARGAESIMLNLAGQLIMMQRDRSGPQIREKDSNPNNQRKLLPFCPPVVLAQSVENVWTTCRANKQKRHLLEALWLSCGGAGMKVWLPLFPRDHRKPHSFLSQRIMLPFHINIYPLAVLFEDALVLGAVNDTLLYDSLYTRNNAREQLEVLFPFCVVERTSQIYLHHILRQLLVRNLGEQALLLAQSCATLPYFPHVLELMLHEVLEEEATSREPIPDPLLPTVAKFITEFPLFLQTVVHCARKTEYALWNYLFAAVGNPKDLFEECLMAQDLDTAASYLIILQNMEVPAVSRQHATLLFNTALEQGKWDLCRHMIRFLKAIGSGESETPPSTPTAQEPSSSGGFEFFRNRSISLSQSAENVPASKFSLQKTLSMPSGPSGKRWSKDSDCAENMYIDMMLWRHARRLLEDVRLKDLGCFAAQLGFELISWLCKERTRAARVDNFVIALKRLHKDFLWPLPIIPASSISSPFKNGKYRTVGEQLLKSQSADPFLNLEMDAGISNIQRSQSWLSNIGPTHHEIDTASSHGPQMQDAFLSPLSNKGDECSIGSATDLTESSSMVDGDWTMVDENFSTLSLTQSELEHISMELASKGPHKSQVQLRYLLHIFMEAGCLDWCIVIGLILRESSIINQILVITQSSEVDGEMLQNIKTGLHAVDRWASTDCPGYKPFLNIIKPQLQKLSEITEEQVQPDAFQPITMGKTPEQTSPRAEESRGSSSHGSIPQGEVGSSNMVSRKEEDTAQAEEEEPFQDGTYDCSVS

SEQ ID NO: 206053 - DNA, 4272 bp, Artificial Sequence
  derived and/or modified sequence
atgtacttcctgagcggctggcccaagagactgctgtgccccctgggcagccccgccgaggcccccttccacgtgcagagcgacccccagagagccttcttcgccgtgctggccgccgccagactgagcatctggtacagcagacccagcgtgctgatcgtgacctacaaggagcccgccaagagcagcacccagttcggcagctacaagcaggccgagtggagacccgacagcaccatgatcgccgtgagcaccgccaacggctacatcctgttcttccacatcaccagcaccagaggcgacaagtacctgtacgagcccgtgtaccccaagggcagcccccagatgaagggcaccccccacttcaaggaggagcagtgcgcccccgccctgaacctggagatgagaaagatcctggacctgcaggcccccatcatgagcctgcagagcgtgctggaggacctgctggtggccaccagcgacggcctgctgcacctgatccactgggagggcatgaccaacggcagaaaggccatcaacctgtgcaccgtgcccttcagcgtggacctgcagagcagcagagtgggcagcttcctgggcttcaccgacgtgcacatcagagacatggagtactgcgccaccctggacggcttcgccgtggtgttcaacgacggcaaggtgggcttcatcacccccgtgagcagcagattcaccgccgagcagctgcacggcgtgtggccccaggacgtggtggacggcacctgcgtggccgtgaacaacaagtacagactgatggccttcggctgcgtgagcggcagcgtgcaggtgtacaccatcgacaacagcaccggcgccatgctgctgagccacaagctggagctgaccgccaagcagtaccccgacatctggaacaagaccggcgccgtgaagctgatgagatggagccccgacaacagcgtggtgatcgtgacctgggagtacggcggcctgagcctgtggagcgtgttcggcgcccagctgatctgcaccctgggcggcgacttcgcctacagaagcgacggcaccaagaaggaccccctgaagatcaacagcatgagctggggcgccgagggctaccacctgtgggtgatcagcggcttcggcagccagaacaccgagatcgagagcgacctgagaagcgtggtgaagcagcccagcatcctgctgttccagttcatcaagagcgtgctgaccgtgaacccctgcatgagcaaccaggagcaggtgctgctgcagggcgaggacagactgtacctgaactgcggcgaggccagccagacccagaaccccagaagcagcagcacccacagcgagcacaagcccagcagagagaagagccccttcgccgacggcggcctggagagccagggcctgagcaccctgctgggccacagacactggcacgtggtgcagatcagcagcacctacctggagagcaactggcccatcagattcagcgccatcgacaagctgggccagaacatcgccgtggtgggcaagttcggcttcgcccactacagcctgctgaccaagaagtggaagctgttcggcaacatcacccaggagcagaacatgatcgtgaccggcggcctggcctggtggaacgacttcatggtgctggcctgctacaacatcaacgacagacaggaggagctgagagtgtacctgagaaccagcaacctggacaacgccttcgcccacgtgaccaaggcccaggccgagaccctgctgctgagcgtgttccaggacatggtgatcgtgttcagagccgactgcagcatctgcctgtacagcatcgagagaaagagcgacggccccaacaccaccgccggcatccaggtgctgcaggaggtgagcatgagcagatacatcccccaccccttcctggtggtgagcgtgaccctgaccagcgtgagcaccgagaacggcatcaccctgaagatgccccagcaggccagaggcgccgagagcatcatgctgaacctggccggccagctgatcatgatgcagagagacagaagcggcccccagatcagagagaaggacagcaaccccaacaaccagagaaagctgctgcccttctgcccccccgtggtgctggcccagagcgtggagaacgtgtggaccacctgcagagccaacaagcagaagagacacctgctggaggccctgtggctgagctgcggcggcgccggcatgaaggtgtggctgcccctgttccccagagaccacagaaagccccacagcttcctgagccagagaatcatgctgcccttccacatcaacatctaccccctggccgtgctgttcgaggacgccctggtgctgggcgccgtgaacgacaccctgctgtacgacagcctgtacaccagaaacaacgccagagagcagctggaggtgctgttccccttctgcgtggtggagagaaccagccagatctacctgcaccacatcctgagacagctgctggtgagaaacctgggcgagcaggccctgctgctggcccagagctgcgccaccctgccctacttcccccacgtgctggagctgatgctgcacgaggtgctggaggaggaggccaccagcagagagcccatccccgaccccctgctgcccaccgtggccaagttcatcaccgagttccccctgttcctgcagaccgtggtgcactgcgccagaaagaccgagtacgccctgtggaactacctgttcgccgccgtgggcaaccccaaggacctgttcgaggagtgcctgatggcccaggacctggacaccgccgccagctacctgatcatcctgcagaacatggaggtgcccgccgtgagcagacagcacgccaccctgctgttcaacaccgccctggagcagggcaagtgggacctgtgcagacacatgatcagattcctgaaggccatcggcagcggcgagagcgagaccccccccagcacccccaccgcccaggagcccagcagcagcggcggcttcgagttcttcagaaacagaagcatcagcctgagccagagcgccgagaacgtgcccgccagcaagttcagcctgcagaagaccctgagcatgcccagcggccccagcggcaagagatggagcaaggacagcgactgcgccgagaacatgtacatcgacatgatgctgtggagacacgccagaagactgctggaggacgtgagactgaaggacctgggctgcttcgccgcccagctgggcttcgagctgatcagctggctgtgcaaggagagaaccagagccgccagagtggacaacttcgtgatcgccctgaagagactgcacaaggacttcctgtggcccctgcccatcatccccgccagcagcatcagcagccccttcaagaacggcaagtacagaaccgtgggcgagcagctgctgaagagccagagcgccgaccccttcctgaacctggagatggacgccggcatcagcaacatccagagaagccagagctggctgagcaacatcggccccacccaccacgagatcgacaccgccagcagccacggcccccagatgcaggacgccttcctgagccccctgagcaacaagggcgacgagtgcagcatcggcagcgccaccgacctgaccgagagcagcagcatggtggacggcgactggaccatggtggacgagaacttcagcaccctgagcctgacccagagcgagctggagcacatcagcatggagctggccagcaagggcccccacaagagccaggtgcagctgagatacctgctgcacatcttcatggaggccggctgcctggactggtgcatcgtgatcggcctgatcctgagagagagcagcatcatcaaccagatcctggtgatcacccagagcagcgaggtggacggcgagatgctgcagaacatcaagaccggcctgcacgccgtggacagatgggccagcaccgactgccccggctacaagcccttcctgaacatcatcaagccccagctgcagaagctgagcgagatcaccgaggagcaggtgcagcccgacgccttccagcccatcaccatgggcaagacccccgagcagaccagccccagagccgaggagagcagaggcagcagcagccacggcagcatcccccagggcgaggtgggcagcagcaacatggtgagcagaaaggaggaggacaccgcccaggccgaggaggaggagcccttccaggacggcacctacgactgcagcgtgagctag

SEQ ID NO: 206054 - DNA, 4035 bp, Artificial Sequence
  derived and/or modified sequence
atgatcgccgtgagcaccgccaacggctacatcctgttcttccacatcaccagcaccagaggcgacaagtacctgtacgagcccgtgtaccccaagggcagcccccagatgaagggcaccccccacttcaaggaggagcagtgcgcccccgccctgaacctggagatgagaaagatcctggacctgcaggcccccatcatgagcctgcagagcgtgctggaggacctgctggtggccaccagcgacggcctgctgcacctgatccactgggagggcatgaccaacggcagaaaggccatcaacctgtgcaccgtgcccttcagcgtggacctgcagagcagcagagtgggcagcttcctgggcttcaccgacgtgcacatcagagacatggagtactgcgccaccctggacggcttcgccgtggtgttcaacgacggcaaggtgggcttcatcacccccgtgagcagcagattcaccgccgagcagctgcacggcgtgtggccccaggacgtggtggacggcacctgcgtggccgtgaacaacaagtacagactgatggccttcggctgcgtgagcggcagcgtgcaggtgtacaccatcgacaacagcaccggcgccatgctgctgagccacaagctggagctgaccgccaagcagtaccccgacatctggaacaagaccggcgccgtgaagctgatgagatggagccccgacaacagcgtggtgatcgtgacctgggagtacggcggcctgagcctgtggagcgtgttcggcgcccagctgatctgcaccctgggcggcgacttcgcctacagaagcgacggcaccaagaaggaccccctgaagatcaacagcatgagctggggcgccgagggctaccacctgtgggtgatcagcggcttcggcagccagaacaccgagatcgagagcgacctgagaagcgtggtgaagcagcccagcatcctgctgttccagttcatcaagagcgtgctgaccgtgaacccctgcatgagcaaccaggagcaggtgctgctgcagggcgaggacagactgtacctgaactgcggcgaggccagccagacccagaaccccagaagcagcagcacccacagcgagcacaagcccagcagagagaagagccccttcgccgacggcggcctggagagccagggcctgagcaccctgctgggccacagacactggcacgtggtgcagatcagcagcacctacctggagagcaactggcccatcagattcagcgccatcgacaagctgggccagaacatcgccgtggtgggcaagttcggcttcgcccactacagcctgctgaccaagaagtggaagctgttcggcaacatcacccaggagcagaacatgatcgtgaccggcggcctggcctggtggaacgacttcatggtgctggcctgctacaacatcaacgacagacaggaggagctgagagtgtacctgagaaccagcaacctggacaacgccttcgcccacgtgaccaaggcccaggccgagaccctgctgctgagcgtgttccaggacatggtgatcgtgttcagagccgactgcagcatctgcctgtacagcatcgagagaaagagcgacggccccaacaccaccgccggcatccaggtgctgcaggaggtgagcatgagcagatacatcccccaccccttcctggtggtgagcgtgaccctgaccagcgtgagcaccgagaacggcatcaccctgaagatgccccagcaggccagaggcgccgagagcatcatgctgaacctggccggccagctgatcatgatgcagagagacagaagcggcccccagatcagagagaaggacagcaaccccaacaaccagagaaagctgctgcccttctgcccccccgtggtgctggcccagagcgtggagaacgtgtggaccacctgcagagccaacaagcagaagagacacctgctggaggccctgtggctgagctgcggcggcgccggcatgaaggtgtggctgcccctgttccccagagaccacagaaagccccacagcttcctgagccagagaatcatgctgcccttccacatcaacatctaccccctggccgtgctgttcgaggacgccctggtgctgggcgccgtgaacgacaccctgctgtacgacagcctgtacaccagaaacaacgccagagagcagctggaggtgctgttccccttctgcgtggtggagagaaccagccagatctacctgcaccacatcctgagacagctgctggtgagaaacctgggcgagcaggccctgctgctggcccagagctgcgccaccctgccctacttcccccacgtgctggagctgatgctgcacgaggtgctggaggaggaggccaccagcagagagcccatccccgaccccctgctgcccaccgtggccaagttcatcaccgagttccccctgttcctgcagaccgtggtgcactgcgccagaaagaccgagtacgccctgtggaactacctgttcgccgccgtgggcaaccccaaggacctgttcgaggagtgcctgatggcccaggacctggacaccgccgccagctacctgatcatcctgcagaacatggaggtgcccgccgtgagcagacagcacgccaccctgctgttcaacaccgccctggagcagggcaagtgggacctgtgcagacacatgatcagattcctgaaggccatcggcagcggcgagagcgagaccccccccagcacccccaccgcccaggagcccagcagcagcggcggcttcgagttcttcagaaacagaagcatcagcctgagccagagcgccgagaacgtgcccgccagcaagttcagcctgcagaagaccctgagcatgcccagcggccccagcggcaagagatggagcaaggacagcgactgcgccgagaacatgtacatcgacatgatgctgtggagacacgccagaagactgctggaggacgtgagactgaaggacctgggctgcttcgccgcccagctgggcttcgagctgatcagctggctgtgcaaggagagaaccagagccgccagagtggacaacttcgtgatcgccctgaagagactgcacaaggacttcctgtggcccctgcccatcatccccgccagcagcatcagcagccccttcaagaacggcaagtacagaaccgtgggcgagcagctgctgaagagccagagcgccgaccccttcctgaacctggagatggacgccggcatcagcaacatccagagaagccagagctggctgagcaacatcggccccacccaccacgagatcgacaccgccagcagccacggcccccagatgcaggacgccttcctgagccccctgagcaacaagggcgacgagtgcagcatcggcagcgccaccgacctgaccgagagcagcagcatggtggacggcgactggaccatggtggacgagaacttcagcaccctgagcctgacccagagcgagctggagcacatcagcatggagctggccagcaagggcccccacaagagccaggtgcagctgagatacctgctgcacatcttcatggaggccggctgcctggactggtgcatcgtgatcggcctgatcctgagagagagcagcatcatcaaccagatcctggtgatcacccagagcagcgaggtggacggcgagatgctgcagaacatcaagaccggcctgcacgccgtggacagatgggccagcaccgactgccccggctacaagcccttcctgaacatcatcaagccccagctgcagaagctgagcgagatcaccgaggagcaggtgcagcccgacgccttccagcccatcaccatgggcaagacccccgagcagaccagccccagagccgaggagagcagaggcagcagcagccacggcagcatcccccagggcgaggtgggcagcagcaacatggtgagcagaaaggaggaggacaccgcccaggccgaggaggaggagcccttccaggacggcacctacgactgcagcgtgagctag

SEQ ID NO: 206055 - DNA, 4272 bp, Artificial Sequence
  derived and/or modified sequence
atgtactttctctcaggatggcccaaaagactgctctgccctctgggaagcccggctgaggcccctttccacgtccagtccgatccccagcgggcattctttgccgtcctagcagcagctaggttgagcatatggtacagccggccgtcggtcctgatcgtgacctacaaggaaccggcaaagagctcaacccagttcgggagttacaaacaggcggagtggcgccctgatagcactatgatagccgtatccacagctaatggttacattctcttcttccacatcaccagcacccgcggtgacaaatatctgtacgagcctgtgtatcccaaggggtcccctcagatgaaaggcactccccatttcaaggaagaacagtgcgcaccagccctgaacctggagatgcgtaaaatactagatctgcaggctcctatcatgtctctacaatccgtactggaggacctgctagtcgccacgtctgacggcttgctgcatctcatccactgggaaggaatgactaatggcaggaaagcaataaacctgtgcacagttcctttttcagtagacttgcagagttcaagggttggctccttcctaggttttacggatgtgcatatccgagatatggaatattgcgcaacgctcgatggcttcgccgtagtgtttaatgatggcaaagtcggcttcatcactcccgtttctagtcgcttcacagctgaacaactgcatggtgtgtggccacaggatgtggtagacgggacctgtgtcgccgtcaataataagtataggttgatggccttcggatgcgtgtctggcagtgtacaggtgtacaccatagataacagcacaggtgccatgctactcagtcacaagcttgagttaactgctaagcagtaccccgatatctggaataagaccggtgcggttaaacttatgcgttggtccccggataattcagtggtgatcgtaacttgggaatacggtggcttaagcctgtggagcgtattcggtgcacagctgatctgtacactggggggcgattttgcttaccgctctgatggtactaagaaggacccactgaaaattaattctatgtcttggggagcggaagggtaccacctttgggtaatctcaggatttgggtctcagaatacagagatagagtctgacctcagatccgtcgtgaaacagccatctatcctcctgttccagttcatcaagagtgtcctgacggtgaacccctgcatgtcaaatcaggaacaggtgctcctgcagggcgaggatagactttacctcaattgtggcgaggcctcccagactcagaaccctaggtcaagctcaacacactctgaacataaaccttcacgcgagaaatctcccttcgccgacggggggctggagtcccagggactttccacgctgctgggccatcgacactggcatgtggtgcagattagcagcacctacctggagtccaattggcccatcagattttctgcgattgacaaattgggtcagaatattgccgttgtgggtaaattcggattcgcccattactccctcctgacaaagaaatggaaactgttcggcaacattacacaggagcagaatatgattgtgacgggaggactcgcctggtggaatgatttcatggtgttggcctgctacaacataaacgatagacaggaggagctgcgcgtctacctgagaacttccaatcttgataatgcatttgcccatgtgactaaggcccaggctgagaccctcttgctaagcgtgttccaggacatggtaattgtgttccgcgccgactgcagtatttgtctgtattctatcgagaggaaaagcgatgggccaaatactaccgccggtattcaagttcttcaggaggtgtcaatgagtcggtatattcctcaccccttcctggtggtgtccgtgaccctgacgtccgtctccaccgagaatggaattacattgaagatgccacagcaggccaggggtgctgagagcatcatgctaaatcttgctggtcagttgattatgatgcagagggacagatctggtccccaaattagagaaaaggattctaacccgaataatcagcgcaaacttcttccattttgcccccctgtcgttctggcccagtccgtggagaacgtctggaccacttgtagagctaataagcaaaaacgccacctgcttgaggcactgtggctcagctgtggaggtgccggcatgaaagtgtggctgcctctgtttcctcgagaccataggaagccacacagcttcctttctcagcgcataatgctcccattccacatcaatatttatcccctggccgtgttgttcgaggatgccctggtactgggcgccgttaacgacaccctgctgtacgacagcctctacactcgtaacaacgcccgggagcaactcgaagtcctgtttcccttctgcgtcgtggaacgtaccagccagatatatttgcaccacatcctgcggcagctcctggtccgaaacctcggtgagcaggcccttttgctcgctcagtcatgcgcaaccctgccctacttcccccacgtgctggaactaatgctgcacgaggtcctcgaggaggaagcaactagccgggagccaattccagaccctcttttacccaccgtggctaagtttattactgagtttcctctttttttgcagactgtagttcattgtgcccgcaagaccgaatatgccctctggaattacctcttcgccgccgttgggaacccaaaggacctgttcgaagagtgtcttatggcgcaggacctggacactgctgcctcctatctgataattttacagaacatggaggttcccgccgttagcagacagcatgccaccctcctgttcaatacagctttagaacagggtaaatgggatttgtgtaggcacatgatccgctttctcaaagctattggcagcggggagtctgagacacctccttccacacctactgctcaggaaccaagctccagcggcggttttgagttctttagaaatagaagcatctctctcagccagtctgcagagaatgtgcccgcaagcaaattcagcttacaaaagacactgtcaatgccgagtggccccagcgggaaacggtggagcaaggactcagattgcgccgagaacatgtacatcgatatgatgctttggcgccatgcacggcggcttcttgaggacgttcgtctcaaggacctgggctgtttcgcggcgcagctgggattcgagctgattagctggctgtgtaaggagaggacccgagcagccagggttgataatttcgtcatcgccctgaagcgtcttcacaaggacttcctgtggccattgccaattatacctgcctcctctatatcatctccgttcaagaatggtaagtacagaaccgtaggggaacaacttctgaagagtcaatcggccgatcctttcctcaatctcgaaatggatgccggaatctctaacattcaacgctctcaatcatggctgtctaacattggacccacccaccacgaaatcgacacggcatcttctcacgggcctcagatgcaggacgcattcttatcgcccctaagcaataagggagatgaatgcagcatcggcagcgccactgatctgacggaaagctcgagcatggtggacggagattggaccatggtggacgagaatttcagtacactgtcgctgacccagagtgagctggaacatatttccatggagttagcctcaaagggccctcacaagtcacaagtgcagctgcggtatctactgcatattttcatggaagccggctgcctggactggtgcatcgtaataggtctcatcctccgggaaagctccataataaatcagattctagttattacccagagttcggaagtggatggggagatgctgcagaacatcaagaccggacttcacgccgttgatagatgggccagcaccgattgccccggctataaacctttccttaacatcattaagccgcagctacaaaagctgtcagagatcaccgaggagcaggtccagcctgatgcattccaacctattacgatgggcaaaactccagaacaaaccagtccaagagcggaagaatcccgaggatcatcctcccacggctccattccacagggcgaggtgggaagttcgaacatggtgtcacggaaagaggaggatactgcccaggcggaagaggaagaacctttccaggatggaacatacgattgctcagtgtcatag

SEQ ID NO: 206056 - DNA, 4035 bp, Artificial Sequence
  derived and/or modified sequence
atgatcgccgtgtcgactgccaatggctacattttgtttttccatattacctcaacgcggggcgataagtatctctacgagccagtctatcccaagggaagccctcagatgaagggaactccccacttcaaggaggagcagtgtgcccctgccctgaacttggaaatgaggaagatactggacctgcaggctcctattatgtccctccagagcgtcctcgaggacctgctcgttgctacatctgatggcttgctacatttgattcattgggagggtatgacgaacggaaggaaggcaatcaatttgtgcactgttcccttcagtgtcgacctccagagtagcagagtgggaagcttcctgggttttaccgatgttcacatccgggatatggagtactgtgccacactggacggattcgccgttgtgttcaacgacggaaaagtcgggttcattacaccagtaagttctcgatttaccgccgagcagctgcacggcgtttggcctcaggacgtcgtcgatggcacatgcgtggccgtcaacaacaagtaccgcctcatggccttcggatgcgtgagtgggagtgtccaagtctacacaatcgataattcaaccggtgcgatgctcctcagccacaagcttgaactgacagctaaacagtatcccgacatctggaataaaacaggcgccgtcaaactgatgcgatggtcaccagataactctgtggtgatagtgacgtgggaatacggcgggctgtcgctctggtctgtgttcggcgctcagttgatttgcactctagggggggacttcgcatacagaagcgacggaacgaagaaagacccactcaaaattaactccatgtcatggggtgcagaaggctaccatttgtgggtgatcagtggatttggctctcaaaacaccgaaattgaaagcgacctgcgcagtgtggtgaagcagcctagcattctcttgtttcagtttattaagagcgtgctaaccgtgaacccctgcatgtctaatcaagaacaagttctgctgcagggagaggacagactgtacttgaactgcggggaggcaagccagacccagaatcctagaagcagctcaacccactctgagcacaaaccatcgagggaaaagagtccgtttgccgatggcgggttggaaagccagggtctctccaccctgctgggccacagacattggcatgttgtgcagatctcatctacctatctcgaaagcaactggccaatacggttcagcgctatcgataagctgggacagaacattgcagtcgtgggcaagttcgggttcgcccattactccttactgacaaaaaaatggaagctgttcggcaacatcactcaagagcaaaatatgattgtgacaggcggactggcttggtggaatgatttcatggttctcgcctgttacaacatcaacgaccgccaggaagaattgcgggtatatctgcgcacttccaacctggacaatgcatttgcacacgtcacaaaggcacaggcagagacgcttctgttatcagtgtttcaggacatggtgattgtgttcagagctgactgctctatttgtctgtactcaatcgaacgaaagagcgatgggccaaacactactgccggtatccaggtgcttcaggaagtgtccatgtcccgttacatccctcatcctttcctggtcgtgtccgtgacactcactagtgtgtctacagaaaacggcattaccctcaaaatgccccaacaagctaggggtgctgagtctatcatgttaaatctcgcgggtcagttaataatgatgcagagggaccgaagcggaccgcagattagggagaaggatagtaatcccaataatcagagaaaattgctgccattttgccccccagtggtgctggcccagagcgtcgagaacgtctggacgacgtgtcgcgccaataaacagaagagacacctactggaagctctgtggcttagctgcggcggtgcagggatgaaagtttggctgcctctgttccctagagaccatcgcaaacctcattcgttcctgtcacagcgcattatgctgccctttcacataaacatttatcctttggcagttctgttcgaggatgcattggtcctaggggccgtgaacgacactctgctgtatgacagcctgtacacgagaaataatgcacgcgagcaacttgaggtactttttccgttttgtgtggtcgagcggacaagccaaatctatctgcatcacattctgcggcagcttttagtgagaaatctcggagagcaggccctgctcctggctcaaagttgcgccacacttccgtatttccctcacgtattggaactgatgttgcacgaggtgctggaagaagaagctacatcccgtgagccaatacccgatccactactgcccacagtggctaagtttatcaccgaatttcccctgttccttcaaacagtggtgcattgcgcgaggaagaccgagtacgcgttatggaactatctatttgcggcagttgggaacccaaaggacctgtttgaggaatgcctgatggcacaggacttggacacagccgcgagttacctcattatccttcagaacatggaagtgcctgccgtgtcacgccaacatgccacgctgctctttaatacagccctggagcaaggcaaatgggacctgtgtagacacatgattcggtttcttaaggctattggcagcggagaatctgaaacccctccatcaacgcccacagcgcaggaaccaagttcatccggtggatttgaatttttccggaatcgcagtatctctctgtcgcaatcagcagagaacgtgcccgctagcaagtttagcctgcagaaaacccttagcatgcccagcggtccttccggcaaacgttggtctaaggactctgattgtgcagagaacatgtacatcgacatgatgctgtggcggcatgctcgacgcttactggaggacgtgcggctcaaagacctggggtgctttgctgcccagctgggattcgaactcatctcctggttatgcaaagaaaggactcgcgccgccagggtagataattttgttatcgccctcaaaagattgcataaggatttcctttggccactgcccatcatacccgcttcaagcatctcatcccccttcaaaaatggcaaatatagaacggttggagagcaactcctcaagtcccagtctgctgatccgttcctcaacctggaaatggacgccggtatctctaacattcaaagatcccagagctggttatccaatataggtcccactcaccacgagatcgataccgcatccagccacggaccgcaaatgcaggacgctttcctgtcacccctcagtaacaaaggcgatgaatgtagcatagggagtgccacagatctcacagaaagttctagtatggtggatggtgactggactatggtggatgaaaatttctcgacattgagtttaacacaatctgaactggagcacatcagcatggaactagcgtcgaaaggaccacacaagtctcaagtgcagctcaggtatttgttgcacatttttatggaggccggctgtctcgactggtgcattgtgatcggactgatcctccgggaatcaagcatcatcaatcagatcctggtgattactcagagcagtgaggtggatggcgagatgctgcagaacatcaaaaccggtctgcacgcagtcgacagatgggccagcaccgattgcccaggctataagccctttctgaatatcattaagccacagctacagaagttgtctgaaatcacagaagagcaggtgcagcccgatgcctttcagccgataacgatgggcaaaactcccgagcagacgtctccccgcgcagaggagtctcgcggttcatcatcccacgggtcaatcccccaaggggaagtggggtctagtaacatggtgtctcggaaagaggaggacacagctcaggccgaagaggaggagccattccaggatggcacatatgactgctctgtgagctag

SEQ ID NO: 206057 - DNA, 4272 bp, Artificial Sequence
  derived and/or modified sequence
atgtacttcctgagcggctggcccaagaggctgctgtgccccctgggcagccctgctgaggcccccttccacgtgcagagcgacccccagagggccttctttgctgtgctggccgccgcccggctgagcatctggtacagccggcccagcgtgctgattgtgacctacaaggagcccgccaagagcagcacccagtttggcagctacaagcaggccgagtggaggccagacagcaccatgattgctgtgtccacagccaacggctacatcctcttcttccacatcaccagcaccaggggggacaagtacctgtatgagcctgtgtaccccaagggcagcccccagatgaagggcaccccccacttcaaggaggagcagtgtgccccagccctgaacctggagatgaggaagatcctggacctgcaggcccccatcatgagcctgcagagcgtgctggaggacctgctggtggccaccagtgatggcctgctgcacctgatccactgggagggcatgaccaacggcaggaaggccatcaacctgtgcaccgtgcccttctctgtggacctgcagagcagccgggtgggcagcttcctgggcttcacagatgtgcacatccgggacatggagtactgtgccaccctggatggctttgctgtggtgttcaatgatggcaaggtgggcttcatcacccctgtgagcagccgcttcaccgctgagcagctgcatggagtgtggccccaggatgtggtggatggcacctgtgtggccgtgaacaacaagtaccgcctgatggccttcggctgtgtgtctggctctgtgcaggtgtacaccatcgacaacagcactggagccatgctgctgagccacaagctggagctgacagccaagcagtacccagacatctggaacaagacaggagctgtgaagctgatgcgctggagcccagacaacagcgtggtgattgtgacctgggagtatggaggcctgagcctgtggagcgtgtttggagcccagctgatctgcaccctgggcggggactttgcctacagaagtgatggcaccaagaaggaccccctgaagatcaacagcatgtcctggggcgctgagggctaccacctgtgggtgatcagcggcttcggcagccagaacacagaaattgaaagtgacctgcggtctgtggtgaagcagcccagcatcctgctcttccagttcatcaagtctgtgctgactgtgaacccctgcatgagcaaccaggagcaggtgctgctgcagggagaagatcggctgtacctgaactgtggggaggccagccagacccagaaccccaggagcagcagcacccacagcgagcacaagcccagccgggagaagagcccctttgctgatggcggcctggagagccagggcctgagcaccctgctgggccaccgccactggcacgtggtgcagatcagcagcacctacctggagagcaactggcccatccgcttcagcgccatcgacaagctgggccagaacattgctgtggtgggcaagtttggatttgcccactacagcctgctgaccaagaagtggaagctgtttggaaacatcacccaggagcagaacatgattgtgactggaggcctggcctggtggaatgacttcatggtgctggcctgctacaacatcaatgaccggcaggaggagctgcgggtgtacctgcggaccagcaacctggacaatgcctttgcccacgtgaccaaggcccaggccgagaccctgctgctgagcgtcttccaggacatggtgattgtgttccgggctgactgcagcatctgcctgtacagcattgaaaggaagagtgatggccccaacaccacagctggcatccaggtgctgcaggaggtgtccatgagccgctacatcccccaccccttcctggtggtgtctgtgaccctgacctctgtgtccacagaaaatggcatcaccctgaagatgccccagcaggcccggggagctgagagcatcatgctgaacctggccggccagctgatcatgatgcagagggacagaagtggcccccagatccgggagaaggacagcaaccccaacaaccagaggaagctgctgcccttctgcccccctgtggtgctggcccagagcgtggagaatgtgtggaccacctgccgggccaacaagcagaagaggcacctgctggaggccctgtggctgagctgtggcggggccggcatgaaggtgtggctgcccctcttcccccgggaccacaggaagccccacagcttcctgagccagaggatcatgctgcccttccacatcaacatctaccccctggccgtgctgtttgaagatgccctggtgctgggcgctgtgaatgacaccctgctgtatgacagcctgtacaccaggaacaatgcccgggagcagctggaggtgctcttccccttctgtgtggtggagaggaccagccagatctacctgcaccacatcctgcggcagctgctggtgaggaacctgggggagcaggccctgctgctggcccagagctgtgccaccctgccctacttcccccacgtgctggagctgatgctgcacgaggtgctggaggaggaggccaccagccgggagcccatcccagaccccctgctgcccaccgtggccaagttcatcacagagttccccctcttcctgcagacagtggtgcactgtgccaggaagacagaatatgccctgtggaactacctgtttgctgctgtgggcaaccccaaggacctgtttgaagaatgtctgatggcccaggacctggacacagctgccagctacctgatcatcctgcagaacatggaggtgcctgctgtgtcccggcagcacgccaccctgctcttcaacacagccctggagcagggcaagtgggacctgtgccgccacatgatccgcttcctgaaggccatcggcagcggggagagcgagaccccacccagcacccccacagcccaggagcccagcagcagcggcggctttgagttcttcaggaacagaagcatcagcctgagccagagcgcagaaaatgtgcctgccagcaagttcagcctgcagaagaccctgtccatgcccagcggccccagcggcaagcgctggagcaaggacagcgactgtgccgagaacatgtacatcgacatgatgctgtggaggcatgcccggcggctgctggaggatgtgcggctgaaggacctgggctgctttgctgcccagctgggctttgagctgatctcctggctgtgcaaggagaggaccagggctgcccgggtggacaactttgtgattgccctgaagaggctgcacaaggacttcctgtggcccctgcccatcatcccagccagcagcatcagcagccccttcaagaatggcaagtacagaacagtgggggagcagctgctgaagagccagagcgctgaccccttcctgaacctggagatggatgctggcatcagcaacatccagaggagccagagctggctgagcaacatcggccccacccaccacgagattgacacagccagcagccacggcccccagatgcaggatgccttcctgagccccctgagcaacaagggagatgagtgcagcatcggcagcgccacagacctgacagagagcagctccatggtggatggagactggaccatggtggatgagaacttcagcaccctgagcctgacccagagcgagctggagcacatctccatggagctggccagcaagggcccccacaagagccaggtgcagctgcgctacctgctgcacatcttcatggaggccggctgcctggactggtgcatcgtgattggcctcatcctgcgggagagcagcatcatcaaccagatcctggtgatcacccagagcagcgaggtggatggagagatgctgcagaacatcaagacaggcctgcatgctgtggaccgctgggccagcacagactgccccggctacaagcccttcctgaacatcatcaagccccagctgcagaagctgtctgagatcacagaggagcaggtgcagccagatgccttccagcccatcaccatgggcaagaccccagagcagaccagccccagggctgaggagagccggggcagcagcagccacggcagcatcccccagggcgaggtgggcagcagcaacatggtgtccaggaaggaggaggacacagcccaggccgaggaggaggagcccttccaggacggcacctatgactgcagcgtgtcctag

SEQ ID NO: 206058 - DNA, 4035 bp, Artificial Sequence
  derived and/or modified sequence
atgattgctgtgtccacagccaacggctacatcctcttcttccacatcaccagcaccaggggggacaagtacctgtatgagcctgtgtaccccaagggcagcccccagatgaagggcaccccccacttcaaggaggagcagtgtgccccagccctgaacctggagatgaggaagatcctggacctgcaggcccccatcatgagcctgcagagcgtgctggaggacctgctggtggccaccagtgatggcctgctgcacctgatccactgggagggcatgaccaatggaaggaaggccatcaacctgtgcaccgtgcccttctctgtggacctgcagagcagccgggtgggcagcttcctgggcttcacagatgtgcacatccgggacatggagtactgtgccaccctggatggctttgctgtggtgttcaatgatggcaaggtgggcttcatcacccctgtgagcagccgcttcaccgctgagcagctgcacggcgtgtggccccaggatgtggtggatggcacctgtgtggccgtgaacaacaagtaccgcctgatggccttcggctgtgtgtctggctctgtgcaggtgtacaccatcgacaacagcactggagccatgctgctgagccacaagctggagctgacagccaagcagtacccagacatctggaacaagacaggagctgtgaagctgatgcgctggagcccagacaacagcgtggtgattgtgacctgggagtatggaggcctgagcctgtggagcgtgtttggagcccagctgatctgcaccctgggcggggactttgcctacagaagtgatggcaccaagaaggaccccctgaagatcaacagcatgtcctggggcgctgagggctaccacctgtgggtgatcagcggcttcggcagccagaacacagaaattgaaagtgacctgcggtctgtggtgaagcagcccagcatcctgctcttccagttcatcaagtctgtgctgactgtgaacccctgcatgagcaaccaggagcaggtgctgctgcagggcgaggaccggctgtacctgaactgtggggaggccagccagacccagaaccccaggagcagcagcacccacagcgagcacaagcccagccgggagaagagcccctttgctgatggcggcctggagagccagggcctgagcaccctgctgggccaccgccactggcacgtggtgcagatcagcagcacctacctggagagcaactggcccatccgcttcagcgccatcgacaagctgggccagaacattgctgtggtgggcaagtttggatttgcccactacagcctgctgaccaagaagtggaagctgtttggaaacatcacccaggagcagaacatgattgtgactggaggcctggcctggtggaatgacttcatggtgctggcctgctacaacatcaatgaccggcaggaggagctgcgggtgtacctgcggaccagcaacctggacaatgcctttgcccacgtgaccaaggcccaggccgagaccctgctgctgtctgtgttccaggacatggtgattgtgttccgggctgactgcagcatctgcctgtacagcattgaaaggaagagtgatggccccaacaccacagctggcatccaggtgctgcaggaggtgtccatgagccgctacatcccccaccccttcctggtggtgtctgtgaccctgacctctgtgtccacagaaaatggcatcaccctgaagatgccccagcaggcccggggagctgagagcatcatgctgaacctggccggccagctgatcatgatgcagagggacaggagcggcccccagatccgggagaaggacagcaaccccaacaaccagaggaagctgctgcccttctgcccccctgtggtgctggcccagagcgtggagaatgtgtggaccacctgccgggccaacaagcagaagaggcacctgctggaggccctgtggctgagctgtggcggggccggcatgaaggtgtggctgcccctcttcccccgggaccacaggaagccccacagcttcctgagccagaggatcatgctgcccttccacatcaacatctaccccctggccgtgctgtttgaagatgccctggtgctgggcgctgtgaatgacaccctgctgtatgacagcctgtacaccagaaataatgcccgggagcagctggaggtgctcttccccttctgtgtggtggagaggaccagccagatctacctgcaccacatcctgcggcagctgctggtgaggaacctgggggagcaggccctgctgctggcccagagctgtgccaccctgccctacttcccccacgtgctggagctgatgctgcacgaggtgctggaggaggaggccaccagccgggagcccatcccagaccccctgctgcccaccgtggccaagttcatcacagagttccccctcttcctgcagacagtggtgcactgtgccaggaagacagaatatgccctgtggaactacctgtttgctgctgtgggcaaccccaaggacctgtttgaggagtgcctgatggcccaggacctggacacagctgccagctacctgatcatcctgcagaacatggaggtgcctgctgtgtcccggcagcacgccaccctgctcttcaacacagccctggagcagggcaagtgggacctgtgccgccacatgatccgcttcctgaaggccatcggcagcggggagagcgagaccccacccagcacccccacagcccaggagcccagcagcagcggcggctttgagttcttcaggaacagaagcatcagcctgagccagagcgcagaaaatgtgcctgccagcaagttcagcctgcagaagaccctgtccatgcccagcggccccagcggcaagcgctggagcaaggacagcgactgtgccgagaacatgtacatcgacatgatgctgtggaggcatgcccggcggctgctggaggatgtgcggctgaaggacctgggctgctttgctgcccagctgggctttgagctgatctcctggctgtgcaaggagaggacccgggccgcccgggtggacaacttcgtcatcgccctgaagaggctgcacaaggacttcctgtggcccctgcccatcatcccagccagcagcatcagcagccccttcaagaatggcaagtacagaacagtgggggagcagctgctgaagagccagagcgctgaccccttcctgaacctggagatggatgctggcatcagcaacatccagaggagccagagctggctgagcaacatcggccccacccaccatgaaattgacacagccagcagccacggcccccagatgcaggatgccttcctgagccccctgagcaacaagggagatgaatgttccatcggcagcgccacagacctgacagagagcagctccatggtggatggagactggaccatggtggatgagaacttcagcaccctgagcctgacccagagcgagctggagcacatctccatggagctggccagcaagggcccccacaagagccaggtgcagctgcgctacctgctgcacatcttcatggaggccggctgcctggactggtgcatcgtcatcggcctcatcctgcgggagagcagcatcatcaaccagatcctggtgatcacccagagcagcgaggtggatggagagatgctgcagaacatcaagacaggcctgcatgctgtggaccgctgggccagcacagactgccccggctacaagcccttcctgaacatcatcaagccccagctgcagaagctgtctgagatcacagaggagcaggtgcagccagatgccttccagcccatcaccatgggcaagaccccagagcagaccagccccagggctgaggagagccggggcagcagcagccacggcagcatcccccagggcgaggtgggcagcagcaacatggtgtccaggaaggaggaggacacagcccaggccgaggaggaggagcccttccaggacggcacctatgactgcagcgtgtcctag

SEQ ID NO: 206059 - DNA, 4272 bp, Artificial Sequence
  derived and/or modified sequence
atgtacttcctgagcggctggcccaagcggctgctgtgccccctgggctcacctgctgaagctccctttcacgtccagtctgaccctcagcgcgcttttttcgcagtattggccgccgcgagactgtccatctggtactctagaccgagcgtcctcatcgttacttacaaggaacctgccaagtcgagcactcagttcgggtcttacaagcaggctgagtggaggcctgatagcaccatgatcgcggtgtctactgctaatggttatatcctcttctttcatattacaagcacccgcggggacaagtacttgtacgagcccgtttaccccaaaggaagccctcagatgaaaggtacaccgcatttcaaagaggagcagtgcgctccggccttaaatttagaaatgcggaagatactggatctccaggctcctatcatgtcattgcagtccgtgcttgaggaccttcttgtggctacatcagatgggttgttgcacctcatccactgggaaggcatgactaacggacggaaggcaatcaatctgtgtacggtaccgttttctgtggatctgcagtcatcacgcgttggctcattccttggttttactgatgtccacattagagacatggaatattgtgctacactggatggttttgccgtggtctttaacgatggaaaggtcgggttcatcacgccggtgtctagtaggttcactgccgagcagctgcatggagtgtggccacaggacgtggtggatgggacttgtgtcgccgtgaacaacaagtaccgcttgatggcctttggatgcgtttctggctctgttcaggtatacacgatcgacaattccacaggggctatgctgctgtcacacaaactggagctgacagcaaaacaataccccgacatctggaacaagacaggggccgtgaagctcatgcgctggtcccccgacaacagcgtggtgattgttacttgggaatacgggggcctatccctgtggtctgtcttcggtgcacagctcatatgtactttgggaggcgacttcgcctataggagcgacgggaccaagaaagaccctttgaagattaactctatgtcttggggggccgagggatatcacctgtgggttattagtggcttcgggagccagaacaccgagatagaaagtgacctgagaagcgtcgtgaagcagcccagcatactcctttttcagttcatcaagtctgtacttacagtgaacccctgcatgtcgaatcaagaacaggtcttgctgcagggtgaggaccggctctacctcaattgcggcgaagctagtcagacgcagaatccaagaagcagttcaacccactccgagcacaaaccgtcgagggaaaagtcccctttcgctgacggcggcctggaaagtcagggactgtctacactgctgggccacaggcactggcacgtggtgcaaatttccagcacctaccttgaaagcaattggcccatccgattcagcgcaattgataaactcggtcagaacatcgctgtcgtgggaaaatttggattcgctcactactctctgctgactaaaaagtggaagctgttcggtaacatcacccaggagcagaacatgatcgtcaccggcggactggcctggtggaacgatttcatggtattagcctgctacaatataaacgaccgtcaagaggaattgagggtctatcttcgtacaagcaacctagacaacgcatttgcgcacgtaactaaggcacaggccgagacattgcttcttagtgtgtttcaggatatggtgatcgtatttcgagccgactgtagtatttgtttgtacagcatcgagagaaagagtgatggcccaaacaccacagccggcattcaggttttgcaggaggtaagtatgtcgcgatatatcccacatccattcttggtggtgtccgtgacattgacaagcgtgagcacggaaaacggcataactcttaagatgccccagcaggctaggggcgccgaatctatcatgctcaacctggccggccaattgatcatgatgcaaagggatcggtctgggccacagatcagggagaaagacagcaatcctaacaatcagaggaaactcctccctttctgtcccccagttgtgctggcacagtccgtcgagaatgtgtggacgacgtgtcgggcgaataagcagaagcgacaccttctcgaggccctctggctgagttgtgggggagctggaatgaaggtctggttacctctgtttccaagggaccacaggaaaccgcactcatttttatctcagaggatcatgttgccctttcatattaacatctatccacttgccgtattgttcgaggacgccctcgtcctcggagcggtgaacgatactctgctctatgactccctgtatacacggaataatgctagggagcaactggaggttttgtttcctttttgcgttgtcgaacgcacttctcagatttatttacatcacatccttcgtcagctcttggtccgcaatctgggcgagcaggcgttgctgctggcccagtcatgcgcaacgctcccctacttccctcacgtgttggagctgatgttgcatgaggtcctggaggaagaggccacctctcgggagcccatccccgatccactgctaccaacagtagctaagtttattaccgagtttccactattcttacagactgttgtgcattgcgctaggaaaacagagtacgcattgtggaattatctgttcgcagcagtgggcaaccccaaagacctgtttgaagaatgccttatggcacaagatttggacacagctgcgtcctatctcattattctccagaacatggaagtgcccgccgtgtcccgtcaacatgcaactctgcttttcaataccgcattagaacagggcaagtgggatctttgtcgccacatgatccggtttttaaaagcaatcggatccggagaaagtgagacccctccgtcgacccccaccgcacaagaaccaagtagcagcggagggtttgagttcttcagaaaccgcagcatttctttgtcccagagtgctgaaaacgtgccagcatccaaatttagcctccagaaaaccctcagtatgccgtccggtcccagtgggaagcggtggtcaaaagactctgactgcgcggagaatatgtacattgacatgatgctgtggagacacgctaggagactgctggaggatgtgcgactgaaagacctcggctgcttcgccgcccagcttggctttgagctgatttcatggctttgcaaagagaggaccagggccgcaagggtggataacttcgtcatagcactcaagcgcctccataaggatttcttgtggcctctcccaatcatacccgcctccagtatttcatcacccttcaagaacggcaagtacagaacagtaggggaacaactcctgaaaagtcagagtgccgatcccttcctgaaccttgagatggatgcaggcatctctaatattcagaggtctcaatcatggctttcaaatattgggcctacccatcatgagatcgataccgcttcatcccatggaccgcaaatgcaggatgcctttttgtctccgctgtccaacaagggggatgaatgctctataggaagcgctacggacctcacggaatcttcaagcatggtggatggagactggacaatggtcgacgagaacttcagtactttgagtctgacccagagcgaactggagcacatcagtatggaactggcctctaagggacctcataagtcgcaagtgcaactgcggtatctgctgcacatctttatggaggccggctgcctggattggtgcatcgtcattggtctgatcctcagggaatcctccatcatcaatcaaattttggtaatcacccaaagtagcgaagtggatggcgaaatgctgcaaaatattaaaaccggtctgcatgccgtcgatcgatgggcctcaacagattgtccggggtacaaaccatttcttaacattattaagccccagctgcaaaaactgtcagaaattaccgaggagcaggtacaaccagatgcattccagcccataactatgggcaagaccccggaacagactagccctcgtgcggaagagtcccgaggatccagtagccacggctctattccacaaggggaggtcggcagcagcaacatggtgtcgaggaaagaggaggacactgcacaggccgaagaggaggaacctttccaagacggtacttacgactgtagcgtgtcctag

SEQ ID NO: 206060 - DNA, 4035 bp, Artificial Sequence
  derived and/or modified sequence
atgatcgccgtgagcaccgccaacggctacatcctgttcttccacataacatctaccaggggtgataaatacctgtatgaaccagtgtatcccaagggatcccctcagatgaagggtactccccactttaaagaggaacagtgcgcgcctgccttgaacctcgaaatgcgaaaaatcttggatcttcaggctccaatcatgtccctgcagtcagtgcttgaagacctactggtggccacatctgatggtctgctccatctgatccattgggagggcatgaccaacggtagaaaagctataaatctgtgcaccgtgcctttctcagttgacctgcagtcatcccgcgtcggatcgttcttggggtttaccgatgttcatataagggatatggagtactgcgcgacactggatggattcgctgtcgtcttcaacgatggcaaagtggggttcatcacgccagtctcgtccaggttcacagcagagcagcttcatggggtgtggcctcaggacgtggtggacgggacttgtgtggctgttaacaataagtacagattgatggctttcggatgcgtgagcggaagcgtgcaggtttacaccatcgacaatagcacaggcgctatgctcttaagccacaaactggagcttaccgctaaacagtatccggacatatggaacaagaccggcgccgtaaaactgatgcgctggtcacccgataatagtgtcgtgattgtcacttgggagtacggaggactcagtttgtggagtgtgttcggggcacagctcatctgcactctgggcggagactttgcctatagatcagatggcaccaagaaagacccattgaagattaacagcatgtcttggggcgccgagggctatcacttatgggtgatctctgggttcggcagccagaataccgaaatagaaagtgatctgcggtccgtcgtcaaacagccaagcatactactttttcagtttatcaagtcagtgcttactgtgaacccatgtatgagcaaccaggagcaggtattgctgcaaggggaggaccgcctgtacctgaactgtggcgaagcttctcagacacagaatcctcgatcatccagtacacattccgagcacaaaccttcgcgagaaaaatcgccgttcgcagacggaggcctcgagtcgcaggggctgtcaacattactgggccaccggcactggcatgtagttcagatttcaagtacctacttggagtctaattggccaatacgatttagtgccattgacaaacttggccagaatattgccgttgttggtaaattcggttttgcccactacagcttgctgactaagaagtggaaactgttcgggaatattacccaggagcagaacatgattgtaaccggcggcctcgcgtggtggaacgattttatggtgttggcttgttataacataaacgataggcaggaagagctacgggtgtacctgagaacctccaacctggataatgccttcgcgcatgtgactaaagcgcaagccgaaacgctgcttctatcagtgttccaggacatggtgatcgttttcagagcggactgttctatttgtctgtactctatcgagaggaaatcagatggaccaaataccacagcggggatccaggtgctgcaggaggtgagtatgtccaggtatatcccacacccctttctggtagtgagcgtgactcttacatctgtctctacggagaacggcatcacacttaagatgccccagcaggcccgcggtgccgaatctatcatgttgaatctcgcagggcagctgataatgatgcaacgcgatcgttccggccctcagattagggagaaggattccaacccaaataatcagcgaaaactcctgcctttctgccccccagtggtgctagcacagtctgtagaaaatgtgtggacaacgtgccgagcaaacaaacaaaagagacatctgttagaggccctgtggctgagctgtggcggggctggaatgaaagtgtggctgccgcttttcccacgcgatcaccggaagccccatagcttcctctcccaacgaattatgctgcctttccatatcaatatctacccattggcggtgttatttgaagacgcactggttctgggcgccgtcaacgacaccttgctctacgactctctatataccaggaataacgcccgcgaacagctagaggtgttattccccttctgtgtggtggaacggaccagtcagatttacttacatcacattttaaggcagctcctggtgaggaatctcggggaacaggctctcctgttagctcagtcctgtgctacgctcccttacttcccacatgtgctcgagttaatgctccatgaggtgctcgaagaggaagccacctcacgtgaaccaatcccggaccccctccttcctactgtcgcaaagttcattacagaattccccctgtttttacaaaccgtcgttcactgcgctcgcaaaacagagtacgccctctggaattaccttttcgccgccgtgggcaaccctaaagatctgtttgaagagtgcttgatggcccaggatcttgacacggctgccagctacctgattatcctgcagaacatggaggtgcctgcagtgagccgccaacacgccacactgctgttcaacacagccttagagcaaggaaaatgggatctatgccgtcacatgatccggtttctgaaagctattgggagtggtgaatctgaaacgcccccgagcaccccgacagctcaggagcctagcagttctgggggattcgaatttttcagaaaccgatcaatcagcctgtcccagagcgccgaaaatgttcctgcttcaaaatttagcctgcagaaaaccctgtccatgccgtcaggccccagcggaaagaggtggagcaaggactcagactgcgccgagaacatgtacatcgacatgatgttgtggcgccacgcccgccggctgctggaggacgtgagattaaaggacttaggttgctttgcagcccagctcggctttgaactaatcagctggctgtgtaaagagcgcacacgagctgctagggttgacaatttcgtgatagccctcaagagattgcacaaggactttctgtggcccctgcccatcatccccgcttcctctataagcagtccgttcaagaacggaaagtaccgcactgtgggggagcagctgcttaagagtcaatcagccgacccttttctcaacctcgagatggatgcaggcatctctaatatccagcgttcccaaagttggctgtccaatattggcccgacacaccacgagatagatactgccagttctcacggcccacaaatgcaggacgcatttctgtctccccttagtaacaaaggggacgaatgttcaataggcagcgctaccgatcttacggagtctagcagtatggttgatggtgattggactatggtggatgaaaacttctcaaccctctcactgacccagagcgagcttgagcacatcagtatggagctcgccagcaaaggtcctcataagtcccaggtgcagcttcgctacctgctgcacatattcatggaagcggggtgcctagactggtgcattgtgatcggcctgatcttgagagaaagttctatcatcaatcagattctggtcatcacccagagctccgaggtggatggcgagatgctgcagaatattaaaacaggtctccatgccgtcgaccgctgggcaagcactgactgtcccggctataagccattcctcaacataattaaaccacagttgcagaaactcagcgagataactgaggagcaggtgcagcccgacgccttccaaccaatcaccatgggcaaaacgcctgaacagacaagtccccgcgcagaggaaagcagaggctcatcatctcatggctccataccacagggtgaagtcggatcttccaacatggtgtcaagaaaggaggaggatacagcccaggccgaggaagaggagcctttccaggatggtacttacgactgctccgtttcttag

SEQ ID NO: 206061 - DNA, 6774 bp, Artificial Sequence
  derived and/or modified sequence
gtcagcttgggggtgccttcgtcgcgcagccttgcgtcggcccggcccggccaggccagcgggcagatgccccgagctgccgccgccgccgccgccgactcggccggtggcggtgtgggaggtgggcgaccagcccggggccgctgagtgtgacggacgcaactgggggcgccgggggctccgcacggaccatgtattttctgagcggctggcccaagaggctgctgtgccctctggggagcccggccgaggcgcctttccacgttcagtccgacccgcagagggctttcttcgccgtgctggccgcggcccgcctcagcatctggtacagccgacctagtgtgttaattgtaacctacaaggagcctgcaaaatcatctactcagtttggatcctacaagcaagctgaatggaggccagatagtaccatgatagctgtatcaacggcaaatggatacatcttgttttttcatattacatctacaagaggggacaagtacctttatgaaccagtgtatcccaaaggaagtccacaaatgaaggggacaccccattttaaggaagaacagtgtgctccagcattaaatttggagatgaggaaaatactggatttacaagcacccatcatgagtttgcagtctgtgttggaagatctcctggttgctacttctgatggacttcttcatcttattcactgggaaggaatgacaaatggaaggaaagccattaatctttgcacagtacccttttcagtagacctgcagtcatctagagtaggttcattcctgggcttcacagacgtacacatcagagacatggaatactgtgccacacttgatgggtttgctgttgtatttaatgatggtaaagttggatttattacaccagtgtcaagtagatttactgcagagcagcttcatggagtttggccacaagatgttgttgacggaacgtgtgtagcagtaaataacaagtatcgactaatggcatttggctgtgtgagtggttctgtgcaggtctatacaatagataacagcactggagccatgctgctatctcataaattagagctaacagcaaaacagtatcctgacatttggaataaaacaggagctgttaaattgatgagatggtctcctgacaatagtgttgtaatagtgacctgggaatacggaggcctttctttatggagtgtttttggagcacagctgatttgtacacttggaggagattttgcttataggtctgatggcaccaaaaaagatccccttaagatcaactctatgagctggggtgcagaaggctatcacctatgggtaatcagcggatttggttctcaaaacactgaaattgagtctgacctcaggagtgtagttaaacagcccagcatcctgttatttcagtttattaagagtgtactcactgtaaacccttgtatgagtaaccaagagcaggtgttgcttcagggtgaggatcgcttgtacttgaactgtggagaggcttcacaaacccagaatcccaggagttcttcaacacactctgagcataagcccagtcgagaaaagagcccatttgcagatggaggtttagagtctcagggattaagcactttacttggacatcggcattggcatgttgtacagatttccagcacctatctagagagcaattggcctatacggttttcagctattgataagcttggacagaatattgctgtggttggcaagtttggttttgcacattactctttactcaccaaaaaatggaaactttttggaaacattacccaggagcaaaatatgatcgtgacaggtggcttagcctggtggaatgattttatggtccttgcgtgttataacataaatgaccgtcaagaagagcttagagtatacttgcgaacatcaaatctggacaatgcctttgctcatgtcaccaaagcacaagcagaaacattactgcttagtgtcttccaggacatggtaatagtatttagagcagactgttcaatatgcctttacagtattgaaagaaaatctgatggtccaaatactactgctggtattcaagttcttcaggaggtttccatgtcacgctacattcctcaccctttcctggtggtatctgtcactctgacatcagtgagtacagagaatggaatcaccttgaaaatgccacagcaggctcgtggtgcagagagcattatgttaaacctggcaggacagctcatcatgatgcagagggacaggtcaggcccacagatccgggagaaggacagtaaccctaataaccaaaggaaacttctgccattctgtcctcctgttgtactagcccagtctgttgaaaatgtctggacaacgtgtcgagcaaataaacagaaacgtcaccttctggaggccctctggctgagctgtggtggtgcagggatgaaagtttggctccctctcttccctagggatcaccgcaagccccattccttcttgtcccagcggatcatgctgcctttccacatcaacatttacccgctagctgttctgtttgaagatgctttagtccttggtgctgtcaatgacactttgctctatgattctttatatactcggaacaatgctagagaacagctggaggtgctcttccctttctgtgttgtggagagaacctctcagatctacctccaccacattctacgtcaacttctggtcagaaaccttggggagcaagccttgctcttggcccagtcctgtgccacattaccttacttccctcatgtgctggagctcatgctccatgaagtactggaagaagaagctacctcacgggagcccattcccgaccctctgcttcccactgtggcaaaatttatcactgagttccccctcttcctgcagacagttgtccattgtgccaggaagaccgaatatgccctgtggaattacctttttgcagctgttggaaaccctaaggacttgtttgaggagtgtttgatggctcaggatttggacacagctgcctcttaccttattatcttacagaatatggaagtccctgcagtaagtaggcaacatgctacccttctattcaacacagcactagaacaaggcaagtgggacctttgtcgacacatgattcgatttcttaaagccattggctctggagaatctgagacacctccatccacacccacagctcaggaacccagttcaagtggtggatttgagttcttcaggaatcgaagcatcagtttatcccagtcagctgaaaatgttcctgccagtaaattcagtttacagaaaacactaagtatgccatctggtccctctggaaaaagatggagcaaagacagtgactgtgctgagaacatgtatattgacatgatgctctggagacatgctcggcgcctcttagaagatgtgaggttaaaggaccttggctgctttgcagcccagctgggctttgaactaattagttggctatgcaaggaacgtacccgagccgcccgggtagacaactttgtaatagccctgaagagactccacaaagatttcctgtggccacttccaatcatcccagcctcttctatcagttctcctttcaaaaatggaaaataccgaactgtgggagagcagctgttaaagtctcaatcagctgacccatttttgaaccttgagatggatgctggcatctccaacatccagcgaagtcagagctggctcagcaacattggccccacccatcatgagatagacacagcttcatcccatggaccacaaatgcaagatgccttcttgtcacctttatctaataaaggtgatgaatgcagtattggttcagccacagacttgactgaaagtagctccatggtggatggcgactggacaatggtggatgaaaatttctctacactcagtttaactcagtcagagctggagcacatttccatggagttggccagtaaagggcctcataaatcccaggtccagcttcggtatttgctacacattttcatggaggcagggtgcctagactggtgcatcgttataggcctgattcttagagaatcctcaataatcaatcagattttggttattacacagtcttcagaggtagatggagagatgttacagaacataaagacagggctccatgcagtggaccgatgggcctctacagactgtcctggatataagccatttttaaacatcattaagccacaactgcagaagctcagtgagataacagaagagcaggtccagccagatgccttccaaccaataactatgggtaagactccagaacagactagcccccgggcagaggagagcaggggctcctccagccatggaagcatcccccagggtgaagttggaagcagcaatatggtcagccggaaagaggaggacacagcccaagcagaggaggaagaaccttttcaggatgggacttacgactgttctgtgtcctaacagtgaggttccatcacaaaggggcagtattaattagcagcagcgtgcagctcagtacgttgtaacatagttggatgatttaacaggagaactcagttcagagactcttcggtaagtattagtagattttaactaattctttcttgtctaagaaatctttttgactccataaaaatgtgatataaagcatctttcataaaaaaattttaagctgcagtgaaaagtaaatattgtacagatgtacatgagaatattttggttttactcaaaggttggtagctcttaaaccacaggaattgttttgccccaggtgagcttactttttcactacttacatcttctcacatttcccggttctgcattatgtccagattgctttttaaaaaataaatgctaaggtgcttgctatagtctgtcaggtacttgagctacctgtttgctcccttggatacagctggactctttaatcagtcctcctgaatagattgctaccctggggcacaatatgtgccagtgtgatggaaacattctccttggctttactagccagtcaaatcccagtccagaattgatggaagctatttacctgtgagttaatgtgcttgttttagcaagcttgattcccattagaccaatgtgggcagaggtctgagggggttcttctcaattttgctgttagataccactaaactattttgtattaaagaacagtatctttttgtgaatactcttgtgtaaatatattcaaaggcactgttcatattttagggcttgtattataatttgcaaggttttaatgctggattctgcatgtctacacatacaaagacagggcttgctcctctgcaaaactgaggaagacaggtttattggcttggtcatgaagtaacagaaatggtcacactgatcatgaaatgcagcaagttttgtgcaaattaacatagtctcttatttattgcttttgtaaattgaataaagatggacttctatgtaaatagactgctgaatcctgtattaccacggctactaaaaattagtgtgtaaagaatgcattcttcattgtaaacttaaagtattttatgtacttctagaaatgacttaaatttgttttcatacattatgaaaacaactgcatactccttaattgctttaaacacccatccactgtatgtaattctaattaccttataacagtattaagacagcttgtttgtactgtgcaatttgaacaaggaatgcaatgttattttttacaaaaaacaaacttgtttatttttataataacgatgtatttgatgtggaccaaattcgtaccactatctaaaatagcctcttttctcatagtgcagttgtagtttagaaacaaaacttggtcctctctccttgctttttaaagtaaatggctagatttagttgtcttagccaggtttcctttgaagagaaactcaaaaccattttgaaactgcttagttcagaatacatcgaagtatttaaaattactgagttgggtaatttactatcatttactttttacattacaagtgcaataatatttcacaaaatgaaactcccgaatgggtggagtatgtgattattggtacctggtccttctggtgctatttttatttaagtctttgtttcaaaccacctttccctgaatcttaaagataatgttttgcatgtgagtacatgcagcccagcaagaaactaaactgaactctcttctcctatcctagtccattaaggagaagaaccagcattgcttttgtgtttggtgtgaatattcagtcaataaaaatgatttaccattataaagagctgtgatcttttcaagtatctgaaataaaacactgtgctgctgagttcatctcaaacattcttgaaagcagggcaccagtataagttaactgtattcctgtgggttaggccgtgaatgaatcatttcttttatacaatattcttttacaactaatagagataggaggcccccaggcaagaagtttggcaggtttacagaaaatttggtaatttatttgttatataccttaatttttaaaaacccatttttattgtggtgtttggttcacatatcaactgtttaagccataattttagccaatgaatttaaatattcagtataactatttgaggtttactagatgcatttattaataaattatttgctgaaaccaaaacaagtcattgggggtgtgggaataaaatcaacctttgcttgtaattaaagttgctgctatttctgtaatgtgtatttttctccccttggtaaagggcaataaaaccattacacaaa

SEQ ID NO: 206062 - DNA, 6434 bp, Artificial Sequence
  derived and/or modified sequence
cctagtgtgttaattgtaacctacaaggagcctgcaaaatcatctactcagtttggatcctacaagcaagctgaatggaggccagatagtaccatgatagctgtatcaacggcaaatggatacatcttgttttttcatattacatctacaagaggggacaagtacctttatgaaccagtgtatcccaaaggaagtccacaaatgaaggggacaccccattttaaggaagaacagtgtgctccagcattaaatttggagatgaggaaaatactggatttacaagcacccatcatgagtttgcagtctgtgttggaagatctcctggttgctacttctgatggacttcttcatcttattcactgggaaggaatgacaaatggaaggaaagccattaatctttgcacagtacccttttcagtagacctgcagtcatctagagtaggttcattcctgggcttcacagacgtacacatcagagacatggaatactgtgccacacttgatgggtttgctgttgtatttaatgatggtaaagttggatttattacaccagtgtcaagtagatttactgcagagcagcttcatggagtttggccacaagatgttgttgacggaacgtgtgtagcagtaaataacaagtatcgactaatggcatttggctgtgtgagtggttctgtgcaggtctatacaatagataacagcactggagccatgctgctatctcataaattagagctaacagcaaaacagtatcctgacatttggaataaaacaggagctgttaaattgatgagatggtctcctgacaatagtgttgtaatagtgacctgggaatacggaggcctttctttatggagtgtttttggagcacagctgatttgtacacttggaggagattttgcttataggtctgatggcaccaaaaaagatccccttaagatcaactctatgagctggggtgcagaaggctatcacctatgggtaatcagcggatttggttctcaaaacactgaaattgagtctgacctcaggagtgtagttaaacagcccagcatcctgttatttcagtttattaagagtgtactcactgtaaacccttgtatgagtaaccaagagcaggtgttgcttcagggtgaggatcgcttgtacttgaactgtggagaggcttcacaaacccagaatcccaggagttcttcaacacactctgagcataagcccagtcgagaaaagagcccatttgcagatggaggtttagagtctcagggattaagcactttacttggacatcggcattggcatgttgtacagatttccagcacctatctagagagcaattggcctatacggttttcagctattgataagcttggacagaatattgctgtggttggcaagtttggttttgcacattactctttactcaccaaaaaatggaaactttttggaaacattacccaggagcaaaatatgatcgtgacaggtggcttagcctggtggaatgattttatggtccttgcgtgttataacataaatgaccgtcaagaagagcttagagtatacttgcgaacatcaaatctggacaatgcctttgctcatgtcaccaaagcacaagcagaaacattactgcttagtgtcttccaggacatggtaatagtatttagagcagactgttcaatatgcctttacagtattgaaagaaaatctgatggtccaaatactactgctggtattcaagttcttcaggaggtttccatgtcacgctacattcctcaccctttcctggtggtatctgtcactctgacatcagtgagtacagagaatggaatcaccttgaaaatgccacagcaggctcgtggtgcagagagcattatgttaaacctggcaggacagctcatcatgatgcagagggacaggtcaggcccacagatccgggagaaggacagtaaccctaataaccaaaggaaacttctgccattctgtcctcctgttgtactagcccagtctgttgaaaatgtctggacaacgtgtcgagcaaataaacagaaacgtcaccttctggaggccctctggctgagctgtggtggtgcagggatgaaagtttggctccctctcttccctagggatcaccgcaagccccattccttcttgtcccagcggatcatgctgcctttccacatcaacatttacccgctagctgttctgtttgaagatgctttagtccttggtgctgtcaatgacactttgctctatgattctttatatactcggaacaatgctagagaacagctggaggtgctcttccctttctgtgttgtggagagaacctctcagatctacctccaccacattctacgtcaacttctggtcagaaaccttggggagcaagccttgctcttggcccagtcctgtgccacattaccttacttccctcatgtgctggagctcatgctccatgaagtactggaagaagaagctacctcacgggagcccattcccgaccctctgcttcccactgtggcaaaatttatcactgagttccccctcttcctgcagacagttgtccattgtgccaggaagaccgaatatgccctgtggaattacctttttgcagctgttggaaaccctaaggacttgtttgaggagtgtttgatggctcaggatttggacacagctgcctcttaccttattatcttacagaatatggaagtccctgcagtaagtaggcaacatgctacccttctattcaacacagcactagaacaaggcaagtgggacctttgtcgacacatgattcgatttcttaaagccattggctctggagaatctgagacacctccatccacacccacagctcaggaacccagttcaagtggtggatttgagttcttcaggaatcgaagcatcagtttatcccagtcagctgaaaatgttcctgccagtaaattcagtttacagaaaacactaagtatgccatctggtccctctggaaaaagatggagcaaagacagtgactgtgctgagaacatgtatattgacatgatgctctggagacatgctcggcgcctcttagaagatgtgaggttaaaggaccttggctgctttgcagcccagctgggctttgaactaattagttggctatgcaaggaacgtacccgagccgcccgggtagacaactttgtaatagccctgaagagactccacaaagatttcctgtggccacttccaatcatcccagcctcttctatcagttctcctttcaaaaatggaaaataccgaactgtgggagagcagctgttaaagtctcaatcagctgacccatttttgaaccttgagatggatgctggcatctccaacatccagcgaagtcagagctggctcagcaacattggccccacccatcatgagatagacacagcttcatcccatggaccacaaatgcaagatgccttcttgtcacctttatctaataaaggtgatgaatgcagtattggttcagccacagacttgactgaaagtagctccatggtggatggcgactggacaatggtggatgaaaatttctctacactcagtttaactcagtcagagctggagcacatttccatggagttggccagtaaagggcctcataaatcccaggtccagcttcggtatttgctacacattttcatggaggcagggtgcctagactggtgcatcgttataggcctgattcttagagaatcctcaataatcaatcagattttggttattacacagtcttcagaggtagatggagagatgttacagaacataaagacagggctccatgcagtggaccgatgggcctctacagactgtcctggatataagccatttttaaacatcattaagccacaactgcagaagctcagtgagataacagaagagcaggtccagccagatgccttccaaccaataactatgggtaagactccagaacagactagcccccgggcagaggagagcaggggctcctccagccatggaagcatcccccagggtgaagttggaagcagcaatatggtcagccggaaagaggaggacacagcccaagcagaggaggaagaaccttttcaggatgggacttacgactgttctgtgtcctaacagtgaggttccatcacaaaggggcagtattaattagcagcagcgtgcagctcagtacgttgtaacatagttggatgatttaacaggagaactcagttcagagactcttcggtaagtattagtagattttaactaattctttcttgtctaagaaatctttttgactccataaaaatgtgatataaagcatctttcataaaaaaattttaagctgcagtgaaaagtaaatattgtacagatgtacatgagaatattttggttttactcaaaggttggtagctcttaaaccacaggaattgttttgccccaggtgagcttactttttcactacttacatcttctcacatttcccggttctgcattatgtccagattgctttttaaaaaataaatgctaaggtgcttgctatagtctgtcaggtacttgagctacctgtttgctcccttggatacagctggactctttaatcagtcctcctgaatagattgctaccctggggcacaatatgtgccagtgtgatggaaacattctccttggctttactagccagtcaaatcccagtccagaattgatggaagctatttacctgtgagttaatgtgcttgttttagcaagcttgattcccattagaccaatgtgggcagaggtctgagggggttcttctcaattttgctgttagataccactaaactattttgtattaaagaacagtatctttttgtgaatactcttgtgtaaatatattcaaaggcactgttcatattttagggcttgtattataatttgcaaggttttaatgctggattctgcatgtctacacatacaaagacagggcttgctcctctgcaaaactgaggaagacaggtttattggcttggtcatgaagtaacagaaatggtcacactgatcatgaaatgcagcaagttttgtgcaaattaacatagtctcttatttattgcttttgtaaattgaataaagatggacttctatgtaaatagactgctgaatcctgtattaccacggctactaaaaattagtgtgtaaagaatgcattcttcattgtaaacttaaagtattttatgtacttctagaaatgacttaaatttgttttcatacattatgaaaacaactgcatactccttaattgctttaaacacccatccactgtatgtaattctaattaccttataacagtattaagacagcttgtttgtactgtgcaatttgaacaaggaatgcaatgttattttttacaaaaaacaaacttgtttatttttataataacgatgtatttgatgtggaccaaattcgtaccactatctaaaatagcctcttttctcatagtgcagttgtagtttagaaacaaaacttggtcctctctccttgctttttaaagtaaatggctagatttagttgtcttagccaggtttcctttgaagagaaactcaaaaccattttgaaactgcttagttcagaatacatcgaagtatttaaaattactgagttgggtaatttactatcatttactttttacattacaagtgcaataatatttcacaaaatgaaactcccgaatgggtggagtatgtgattattggtacctggtccttctggtgctatttttatttaagtctttgtttcaaaccacctttccctgaatcttaaagataatgttttgcatgtgagtacatgcagcccagcaagaaactaaactgaactctcttctcctatcctagtccattaaggagaagaaccagcattgcttttgtgtttggtgtgaatattcagtcaataaaaatgatttaccattataaagagctgtgatcttttcaagtatctgaaataaaacactgtgctgctgagttcatctcaaacattcttgaaagcagggcaccagtataagttaactgtattcctgtgggttaggccgtgaatgaatcatttcttttatacaatattcttttacaactaatagagataggaggcccccaggcaagaagtttggcaggtttacagaaaatttggtaatttatttgttatataccttaatttttaaaaacccatttttattgtggtgtttggttcacatatcaactgtttaagccataattttagccaatgaatttaaatattcagtataactatttgaggtttactagatgcatttattaataaattatttgctgaaaccaaaacaagtcattgggggtgtgggaataaaatcaacctttgcttgtaattaaagttgctgctatttctgtaatgtgtatttttctccccttggtaaagggcaataaaaccattac

SEQ ID NO: 206063 - DNA, 4272 bp, Artificial Sequence
  derived and/or modified sequence
atgtactttttatccggctggcccaagcgcttgctatgtccactcggctcacccgctgaggcacccttccacgtacagtctgaccctcagcgagccttctttgctgtgcttgccgcagctcgcctcagtatttggtactctcgaccctctgtgctgatagttacctataaggagccagccaagagcagtacgcagtttggcagttacaaacaagcagaatggagaccagatagcaccatgatagccgtatctacggccaatggatacatactcttttttcacatcactagcacgcgcggagacaagtacctttatgaaccagtctacccaaaagggagcccacaaatgaaaggcacgccccatttcaaggaagaacagtgtgctcctgccctcaacttggagatgcgaaaaatcctggacctgcaagcccctatcatgagtctgcagtctgtgttagaggacctactagtggcaacatctgatggcttgttacatctaatacactgggagggcatgaccaatggtagaaaagctatcaacctttgcactgtccccttctctgtggaccttcagtcctcccgggtgggctcctttctcgggtttacggatgtacatatccgagacatggagtactgtgccaccctagatggatttgccgtcgtgttcaacgacggcaaggttggtttcatcacgcctgtctcgagcagattcacggctgagcagctccatggcgtctggcctcaggatgtggtggacggtacctgcgtcgccgtgaacaataagtatcgtctgatggccttcggctgcgtctccgggtccgtgcaggtctacaccatcgacaattcgaccggagccatgcttctctcccacaaactagagctgaccgcaaagcagtaccccgatatttggaataaaaccggcgcagtgaagctgatgcggtggtcccctgacaacagcgtagtaatagtgacatgggagtacggaggactttctctctggagcgtgtttggcgctcagctgatctgtaccctgggcggagatttcgcctaccgttctgatggaactaaaaaggaccctctgaagattaacagtatgtcgtggggagctgagggttaccacctctgggtgatttctggctttggaagtcagaatacagagatagaatccgacctccgctcagttgtaaagcaacccagcattctgttgttccagtttattaagtctgtactaaccgtgaacccctgcatgtccaaccaagagcaggtgctgctgcagggggaagaccgactctacctgaactgcggcgaggcaagccagacacagaacccaaggtctagtagcacgcattccgagcacaagccaagtagagagaagagccccttcgcggacggcggattagaatctcagggcctgagtaccctgctcgggcatcgtcattggcatgtagttcagatctccagtacgtatctggaatctaactggcctatcaggttctccgcgatcgacaaattgggccagaatattgccgttgttggcaaatttggattcgcacattacagcctcttaactaaaaagtggaagctgttcggtaacattacccaggagcagaacatgattgtcaccggagggcttgcttggtggaatgatttcatggtgctcgcgtgctacaacatcaacgataggcaggaggaactccgcgtgtatctgaggacttcaaatctggataacgccttcgcccacgtaacaaaggctcaagctgagactcttctgctttctgtattccaggacatggtcattgttttcagagcagattgctcgatctgtctttactcaatcgaaagaaagtcggatggtcctaacaccaccgccggaattcaggttctccaggaggttagcatgtctcgctacatcccgcatccatttctagtagtatcggttacgctcacttccgtgagcacggagaacggcatcactctgaaaatgcctcagcaagctaggggcgctgagtccattatgctgaacttggccggtcagctgattatgatgcagcgcgatcgttccgggcctcagatcagggaaaaggattccaatccaaacaatcagcggaaattgctaccattttgtccaccagtggttttagctcagagtgtggagaacgtgtggaccacatgtagagcaaacaagcagaagcggcatctgctggaagcactttggttatcctgtgggggagccggtatgaaagtctggctgccgctgtttcctcgcgaccatcgtaagcctcactcttttttgagccagagaattatgcttccctttcacatcaacatctatccgcttgctgtcctgtttgaggatgccctcgtccttggcgcagtgaacgatacactgctgtacgatagtctgtataccaggaacaatgccagggagcagctggaagtgctgttccccttctgtgtcgtggaacgcacctctcagatctacctacatcatatcttgagacagctgctggtaagaaacctgggcgagcaggccctcctacttgcacaatcttgtgctacgcttccctatttcccccacgttctagagcttatgctgcatgaggtcctggaagaggaagccacttctagggaaccaatcccagacccgctgctgcccaccgtagcaaaattcatcaccgagtttcccctcttcctgcaaactgtggttcattgcgcccgaaagacagaatatgcgttatggaactatcttttcgcagcggttggcaatcctaaagacctgttcgaagagtgtctgatggcacaggacctggacacagcggcttcatacttgattatcctgcagaatatggaggtgccagccgtcagtcggcagcacgccactctcctcttcaatactgccctggagcaaggcaaatgggacctgtgccgccatatgatcaggtttctgaaggcgatcgggtccggggagtccgaaactcccccttccacccccaccgctcaggagccttcatctagcggcggatttgagtttttcagaaaccggtccatcagtctttcgcagtctgcagagaatgtccccgcaagcaaattctccctacagaagaccttgtctatgccatccgggccttctggcaagcgatggagtaaggatagtgattgcgcagagaatatgtacattgacatgatgctatggcgtcatgccagacgcctgctggaggacgtgcgactgaaggacctaggctgtttcgccgcacagctgggctttgagctaatttcctggctctgcaaagaacgcacgagagcagcacgggtcgataacttcgtcatagcgctcaagcggttgcacaaagacttcctctggcctttgcctatcattcctgcctcatccatcagttctccatttaagaatggcaaataccggaccgtgggcgagcagctgctgaagagccagtccgccgacccctttctgaatctcgagatggatgcaggcatttctaatatccagagatcacagagctggttgagcaatatcggacctacccaccacgaaattgacacagcatctagccatggccctcagatgcaggatgccttcctgtcgccactcagcaacaagggggacgaatgttctatcggtagtgcaactgacttgacagagtcctcatccatggtcgatggcgattggaccatggtggacgagaatttttctactctgagcctgactcaaagcgagttggaacacatttctatggagttagcttctaaaggaccccacaagtcccaagtgcaactgcgctacctgctgcacatatttatggaggcaggctgcctggactggtgtattgtcatcggcctaatcctgagggagtcttctatcatcaatcagatcctcgtgattacgcagtcctccgaggttgacggcgaaatgctacagaacataaaaacaggactgcatgccgttgacagatgggcttctactgattgtcctggctacaagccttttctcaatatcatcaagccgcagctgcagaaactgagtgaaatcaccgaggaacaagtgcagccagatgcatttcagccaatcaccatggggaaaactcctgaacaaacctcccctagagccgaagagtctaggggctcctcttcccacggtagtataccacagggtgaggtgggctcctcaaatatggtttctagaaaagaggaagacactgctcaggccgaggaagaagaaccttttcaagatgggacgtacgactgttccgtgagttag

SEQ ID NO: 206064 - DNA, 4035 bp, Artificial Sequence
  derived and/or modified sequence
atgattgctgtaagcaccgcaaatggttatatcctattctttcatatcacatcaacaagaggcgacaaatacctatacgaacccgtctaccccaaggggtctccccagatgaaagggactccccacttcaaagaggaacaatgtgcaccggctcttaaccttgagatgcgaaaaatcctggacctccaggcccctataatgtctctgcagtcagtgctggaggaccttctggtggccacctcagacggcctccttcatttaattcactgggagggtatgacaaatggccgtaaggcaatcaatctgtgtacggtcccattttcagttgatttgcagtcctcacgggtaggctcctttcttggatttacagacgtgcacataagggatatggagtactgcgccaccctagatggatttgccgttgttttcaacgacggtaaggtgggattcattactccagtctcatcccgctttacagcagagcagctccacggggtgtggccccaggatgtggtggacgggacatgcgtcgctgtgaacaacaaatatcgactgatggctttcggttgcgtgtctggttcagtgcaggtttacacaattgacaacagcacaggtgcaatgttgctgagccacaagttggagttaaccgccaagcagtacccagacatttggaacaagaccggcgcagtgaaacttatgaggtggtcaccagataacagtgtggtcattgtgacttgggaatacggtgggttatctctgtggtctgtattcggagcacagctgatttgtacattggggggagacttcgcgtaccgctcagatggaaccaaaaaggacccactaaagatcaactcaatgagctggggcgctgaaggttaccacctttgggttatctccgggtttggaagccagaatacagaaattgagtctgaccttcggtcagtcgtgaagcagccatccattctgctgttccagtttattaagagtgtgctgactgtaaacccatgtatgtccaaccaggagcaagtcctcctgcagggagaagaccgtctatacctgaactgtggcgaggccagccaaacccagaatcccagatccagcagcacccattctgagcataaaccttcccgggagaagtcccctttcgctgacggaggcctggagagccaggggttatcaaccctgctgggccacaggcattggcacgtggtgcaaatttccagcacttacctagagtccaactggccaatacgcttttcggccattgataaactgggacagaatatcgcggtggtggggaagtttggattcgcacactattccctactcacaaaaaagtggaagctctttgggaatattacccaggagcagaacatgatcgtgactggtggcctcgcctggtggaatgactttatggtgttggcttgctataacatcaatgaccgccaggaagagctgcgtgtgtacctgcgcacctccaacttggataacgcatttgcacacgtcaccaaagcccaggcagagactctccttttatctgtgttccaggacatggtgattgtgttccgagcagactgctctatctgcctgtactcaatcgaacgaaaatcagatggtccgaataccaccgctggcatccaagtcctgcaagaggtcagcatgtccagatacattccccaccccttcctggtagtgagcgttacccttacaagcgtcagcacagaaaacggcataacacttaagatgccgcaacaggcgagaggtgccgaatcaataatgttaaatctggcagggcagctaatcatgatgcagcgcgatcggtccggtccacaaattagggaaaaggatagtaaccctaacaatcaacgcaaactgctgcccttctgtccaccggtggtgctggcccaaagtgtcgaaaatgtgtggacaacctgccgggcaaataaacagaaacgccacctcctggaggccctttggttatcttgcggaggagcaggaatgaaggtgtggttgccgctcttcccgagggaccatcggaaacctcatagttttctgtcacaaagaatcatgctcccattccacatcaacatctatcccctcgctgtcttgtttgaggatgccctggtactaggagcagtaaacgacacattactgtatgatagcctgtacacaaggaacaacgccagagagcagttggaagtgctttttcccttctgcgttgtggagagaactagccagatatatctacatcatatcctgcggcagctgctggtgagaaacttaggtgaacaggctcttttgctagcacagtcctgtgccaccctcccctattttccccacgtgctagagctgatgttgcatgaggtactcgaggaagaagcaacctctcgggagcccatccctgatcccctgctgcccacagttgcaaagttcattaccgagttcccgttattcctgcagaccgtcgtccattgcgctcgaaagaccgagtacgccctgtggaattacttatttgcagccgtcggaaacccgaaagacctgtttgaggaatgtcttatggctcaggacctggataccgctgccagctacttgataatcttacagaatatggaagtgcctgcagtgagccggcaacacgcgaccttgcttttcaacacagccctcgagcagggaaagtgggacctctgcagacacatgattcgtttcttgaaagccatcggcagcggtgaaagcgagactcccccatcgaccccgacggctcaggagccaagctccagtggcggtttcgagtttttcaggaacaggagtatttctctgagtcagtccgccgaaaacgtgcccgctagcaaattttccctacagaaaacgctttcaatgccttccggcccttctggcaaaagatggagcaaggattctgactgcgcggaaaacatgtatatcgatatgatgttatggcggcacgccagacgcctgctggaagatgtccgcctgaaggatctgggctgttttgcggcacagctaggattcgagcttatatcttggctgtgtaaagagagaactagggctgcacgcgtagacaactttgttatagccctgaagcggttgcacaaggacttcctgtggccattacccattatccccgcaagcagtatttcaagtccctttaagaacggcaagtatcggacggtgggggagcagctgcttaagagccaatctgcggacccattcctgaacctggagatggacgcaggtatttccaatatccaaaggtctcagagctggctgtccaacattggcccaacgcaccacgaaatcgacacggcctcatcacacgggcctcaaatgcaggatgcattcctttcccctctcagtaataagggtgatgaatgctctattggcagtgccacggacctgactgagagcagctctatggtagacggggattggacaatggtggacgagaattttagcactctatcccttacccaatccgagctggaacacatttctatggagctggcttcaaaaggcccacataaatctcaagtgcaattgcgctacctgcttcatatattcatggaagcagggtgccttgactggtgcatcgtcattgggctgattctaagagaatccagcatcatcaaccagatccttgtgataacccagtcaagcgaagtagacggggaaatgctgcagaacatcaagaccggccttcatgccgtggatcgttgggcgagcaccgactgcccgggatataagccatttttgaacataattaagccccaactacagaagctgtccgagatcactgaggagcaggtccagcctgatgcattccagcccattacaatgggcaagacccccgagcaaacatcaccaagagcggaggagagccggggaagttcgtcccatgggtctattccgcagggagaagtcggatcatcgaacatggtgtcaagaaaggaggaggacaccgctcaggctgaggaagaagagccttttcaagacgggacctatgactgttcagtgagctag

SEQ ID NO: 206065 - protein, 550 aa, Artificial Sequence
  derived and/or modified sequence
MVRGWEPPPGLDCAISEGHKSEGTMPPNKEASGLSSSPAGLICLPPISEELQLVWTQAAQTSELDSNEHLLKTFSYFPYPSLADIALLCLRYGLQMEKVKTWFMAQRLRCGISWSSEEIEETRARVVYRRDQLHFKSLLSFTHHAGRPPEEVPPPPVPAPEQVGIGIGPPTLSKPTQTKGLKVEPEEPSQMPPLPQSHQKLKESLMTPGSGAFPYQSDFWQHLQSSGLSKEQAGRGPNQSHGIGTASWNHSTTVPQPQARDKPPPIALIASSCKEESASSVTPSSSSTSSSFQVLANGATAASKPLQPLGCVPQSVSPSEQALPPHLEPAWPQGLRHNSVPGRVGPTEYLSPDMQRQRKTKRKTKEQLAILKSFFLQCQWARREDYQKLEQITGLPRPEIIQWFGDTRYALKHGQLKWFRDNAVPGAPSFQDPAIPTPPPSTRSLNERAETPPLPIPPPPPDIQPLERYWAAHQQLRETDIPQLSQASRLSTQQVLDWFDSRLPQPAEVVVCLDEEEEEEEEELPEDDEEEEEEEEEDDDDDDDDVIIQD

SEQ ID NO: 206066 - protein, 552 aa, Artificial Sequence
  derived and/or modified sequence
MLKSRISMRSRHPRRAISEGHKSEGTMPPNKEASGLSSSPAGLICLPPISEELQLVWTQAAQTSELDSNEHLLKTFSYFPYPSLADIALLCLRYGLQMEKVKTWFMAQRLRCGISWSSEEIEETRARVVYRRDQLHFKSLLSFTHHAGRPPEEVPPPPVPAPEQVGIGIGPPTLSKPTQTKGLKVEPEEPSQMPPLPQSHQKLKESLMTPGSGAFPYQSDFWQHLQSSGLSKEQAGRGPNQSHGIGTASWNHSTTVPQPQARDKPPPIALIASSCKEESASSVTPSSSSTSSSFQVLANGATAASKPLQPLGCVPQSVSPSEQALPPHLEPAWPQGLRHNSVPGRVGPTEYLSPDMQRQRKTKRKTKEQLAILKSFFLQCQWARREDYQKLEQITGLPRPEIIQWFGDTRYALKHGQLKWFRDNAVPGAPSFQDPAIPTPPPSTRSLNERAETPPLPIPPPPPDIQPLERYWAAHQQLRETDIPQLSQASRLSTQQVLDWFDSRLPQPAEVVVCLDEEEEEEEEELPEDDEEEEEEEEEDDDDDDDDVIIQD

SEQ ID NO: 206067 - DNA, 1653 bp, Artificial Sequence
  derived and/or modified sequence
atggtacgggggtgggagcctccgcccggtctggactgtgctatatccgaagggcacaagagcgaaggaacaatgccacctaacaaggaggcttccgggctatcctcctctccagccgggttgatatgcctcccacccattagcgaggaattgcaactggtgtggacccaggccgctcagactagcgaactcgactccaacgaacatctcctcaagacattttcttacttcccctatccttccctcgcggatatcgccctcctgtgcctccgttatggacttcagatggagaaggttaaaacgtggttcatggctcagagactgagatgtggtatctcatggtctagtgaagagatcgaagaaacccgcgcacgagtcgtctacaggcgggaccagctgcacttcaaaagccttctgagcttcacacaccacgcgggaaggcctccggaggaggtgcccccacctccggtacccgcccccgagcaggtcggaatcggaatcgggcccccaacactgtcaaagcccacccaaactaaaggcctgaaagttgaacccgaggaaccgagtcaaatgcccccgctcccccagagccaccaaaagctaaaagaatcactgatgacgcccgggtccggcgcttttccttatcaatcggacttttggcagcatctgcagtccagcggcctttcgaaggagcaggccgggcggggacccaaccagagtcacggtattggaacagcctcctggaaccatagcactacagtgcctcaacctcaggcccgcgacaagcctcctcctatcgccctcattgcctcctcgtgtaaagaggagtcagcttcttctgttacccctagtagttcaagcacttctagttccttccaagtgctggccaacggagcaacagccgcctctaaaccattacagcctctagggtgtgttccgcagagcgtttctccgagcgaacaggccctgcctccgcatctggaaccagcttggccccaggggctcaggcataattccgtgcctggccgtgtgggaccgacggaatacctctcgcccgacatgcagagacagcgtaaaactaaaagaaagacaaaggaacagttggcgatcctgaagtcctttttcttgcagtgccagtgggccaggcgggaggattaccagaaactcgagcagattaccggtctaccccgccccgaaataattcagtggttcggagacactcggtatgccttaaaacatggacagctcaaatggttcagggacaacgctgttcccggggcaccctcttttcaggacccagccatcccgactccccctccctctaccagatctctgaatgagcgcgcagaaactcctcctctgccgatccccccacctcctccagatatacagcccctggagcgatattgggcggctcaccagcagctacgcgaaactgatataccacagcttagtcaggcctcgcgcctgtccacgcagcaggtgttggattggttcgattcgcgtctcccccagcccgctgaagtcgtcgtctgcttagatgaggaggaggaggaggaggaggaggagctccccgaggacgacgaagaagaggaggaggaggaggaagaagacgatgatgacgacgatgatgatgtgattatacaagactag

SEQ ID NO: 206068 - DNA, 1653 bp, Artificial Sequence
  derived and/or modified sequence
atggtgcggggctgggagcccccacctggcctggactgtgccatcagcgagggccacaagtctgagggcaccatgccacccaacaaggaggccagcggcctgagcagcagccctgctggcctcatctgcctgccccccatcagcgaggagctgcagctggtgtggacccaggccgcccagaccagcgagctggacagcaatgagcacctgctgaagaccttctcctacttcccctaccccagcctggccgacatcgccctgctgtgcctgcgctatggcctgcagatggagaaggtgaagacctggttcatggcccagaggctgcgctgtggcatctcctggagcagcgaggagattgaggagacccgggcccgggtggtgtacagaagagaccagctgcacttcaagagcctgctgtccttcacccaccacgccggccggcccccagaggaggtgcccccacctcctgtgcctgcccctgagcaggtgggcattggaattggcccccccaccctgagcaagcccacccagaccaagggcctgaaggtggagcctgaggagcccagccagatgccacccctgccccagagccaccagaagctgaaggagagcctgatgaccccaggcagcggggccttcccctaccagagcgacttctggcagcacctgcagagcagcggcctgagcaaggagcaggccggccggggccccaaccagagccatggaattggaacagcctcctggaaccacagcaccaccgtgccccagccccaggcccgggacaagcccccacccatcgccctgattgccagcagctgcaaggaggagagcgccagctctgtgacccccagcagcagcagcaccagcagcagcttccaggtgctggccaatggagccacagctgccagcaagcccctgcagcccctgggctgtgtgccccagagcgtgagccccagcgagcaggccctgcccccccacctggagcccgcctggccccagggcctgcggcacaacagcgtgcccggccgggtgggccccacagagtacctgagcccagacatgcagaggcagaggaagaccaagaggaagaccaaggagcagctggccatcctgaagagcttcttcctgcagtgccagtgggcccggcgggaggactaccagaagctggagcagatcaccggcctgcccaggcctgagatcatccagtggtttggagacaccaggtatgccctgaagcacggccagctgaagtggttccgggacaatgctgtgcctggggcccccagcttccaggaccctgccatccccaccccaccacccagcaccaggagcctgaatgaaagagctgagaccccacccctgcccatccccccacctcctccagacatccagcccctggagcgctactgggccgcccaccagcagctgcgggagacagacatcccccagctgagccaggccagccggctgagcacccagcaggtgctggactggtttgacagccggctgccccagcctgctgaggtggtggtgtgcctggatgaggaggaggaggaggaggaggaggagctgcctgaagatgatgaggaggaggaggaggaggaggaggaggatgatgatgatgatgatgatgatgtgatcatccaggactag

SEQ ID NO: 206069 - DNA, 1653 bp, Artificial Sequence
  derived and/or modified sequence
atggtgcggggctgggagcccccccccggcctggactgcgccatcagtgaggggcataagagtgaaggcaccatgccacccaacaaagaggcttctggcttgtcttcaagcccagcgggacttatctgtctccctcctattagtgaggaattgcagctcgtttggacccaggccgcccagacctctgagctggactctaatgaacatctgttgaagactttctcatactttccttatccaagtttggcagacatcgcactcttatgtctgagatacggcttacaaatggaaaaagtgaaaacctggttcatggcccagaggcttcgctgtggaatatcatggagctctgaggagattgaagaaactcgtgcccgcgtagtttacagaagagaccaactgcacttcaaaagtttgctctccttcacccaccatgcgggccggccaccagaagaagtgcctcctccacctgtgcccgcaccagaacaagtcgggatcggcattggtcctcctaccctgtccaagcccacacaaaccaagggtcttaaggtagaacccgaagaaccttcgcaaatgccccctctcccacagagccaccagaagctgaaagagagtctcatgaccccgggctctggcgcattcccctatcaatcagatttttggcagcacctgcaaagctccggtctctctaaagagcaagctggaaggggtcccaatcagtcccacggaatcggcacagcgagttggaaccactccacaacagttccccagccacaggctagagacaaacctcctcccatcgcactgatcgcctcgagctgtaaagaggagtcggcctcctctgtgactccatccagctcctcgactagctcttcatttcaggtactggctaatggtgcaactgccgccagtaaaccattgcagccattgggctgtgtaccgcagtcggtctctccgagtgagcaggcgctgccgccccaccttgagcccgcgtggcctcaaggactgcgccataactcggttcctggacgggttggccccacagaatatctctcacctgacatgcaaaggcagcgcaaaacaaagagaaagactaaagagcagctcgccatcctgaaatccttctttctacaatgccagtgggcccgcagggaggattatcagaaactcgaacaaataactggtctcccaagacctgaaattatccaatggttcggtgacaccagatacgcgttgaaacatggccagctaaaatggtttcgtgataacgctgtccccggggctcccagttttcaggacccagcaatccctacccctccaccgtcaacccggagcctcaacgaacgcgccgagacgcctcccctccccatccctccacctccgcccgacatacaacctctggagcggtactgggcggcgcaccaacaacttagggagaccgacattcctcagctgagtcaagcctcccgcctatctacgcagcaagtgctggactggtttgactccagactcccccagcctgccgaagtagtagtgtgcttagacgaagaggaagaggaggaagaggaggaactgcccgaggatgatgaggaggaggaggaggaggaagaagaagatgacgacgacgatgatgacgatgtgattatccaggactag

SEQ ID NO: 206070 - DNA, 1653 bp, Artificial Sequence
  derived and/or modified sequence
atggtgaggggatgggaaccccctccgggacttgattgcgccatcagcgagggacacaagagtgagggtaccatgccgcctaataaggaagcaagcggcctctcaagctcccctgccggtttaatctgcttaccaccaatctccgaggaacttcagttggtctggacccaggctgctcaaacttctgagctcgattcaaacgagcacctgctaaagacttttagttatttcccttatccctccctggccgacatcgctctgctatgcttgaggtatggtcttcagatggagaaggtaaaaacatggtttatggcacagcggctgaggtgtgggattagctggtccagtgaagagatcgaggaaacacgagctagggtcgtgtatagaagggatcagctgcatttcaaaagcttattgtcattcacgcatcacgctggacggccaccagaggaggtacctccacctccggtgccggcaccagagcaagtcggtattggcatcgggcctccaacgcttagcaaacctactcagaccaaggggctcaaggtggagccggaagagcctagccaaatgcctcctttacctcagtcccaccagaaactcaaagaaagcttaatgacccccggtagcggggcttttccataccaatccgacttttggcagcacctccagagctccggattaagcaaagagcaggctggcagggggcctaatcagtcccatggaattggcaccgccagttggaatcactccacaacggtccctcaaccgcaggccagagacaaaccgccacctatagccctgattgcctcctcttgcaaggaagaatccgcatccagcgtcacacctagtagcagctcaaccagcagctctttccaggtcctcgctaatggcgcaacagcagcttcaaagcctctgcaacctctgggttgcgtaccccaaagcgtatctccatccgagcaagcccttcctccccacctcgagcccgcatggccccagggcttacgacataacagtgtccctggtcgagtcggtccaaccgagtatctgtctcccgatatgcagcggcagcgcaaaacaaagcgtaagaccaaagaacagctggctatcctgaagagtttctttttacaatgtcaatgggcacgtcgtgaggattatcaaaaattagaacagatcacggggctacccagacctgaaataatccaatggttcggcgatacccgatatgcactaaagcacggtcagctgaagtggttcagggacaacgcggtccccggagccccatcttttcaggaccctgcaatccctacacccccaccctctacccggtctctgaacgagagggccgagacgccacctcttcccatcccaccgcctcctccagatatccaaccccttgagcgttactgggccgctcatcagcagctgcgtgaaaccgacatcccacaactgtcgcaggcatcacgccttagcacccagcaggtcctagactggttcgattctaggctccctcagcctgctgaggtggtggtatgcttggacgaggaggaggaggaggaagaagaggaactaccagaagacgacgaagaggaagaggaggaggaagaggaagacgatgatgacgacgacgatgatgttatcatccaggactag

SEQ ID NO: 206071 - DNA, 1653 bp, Artificial Sequence
  derived and/or modified sequence
atggtgagaggctgggagcccccccccggcctggactgcgccatcagcgagggccacaagagcgagggcaccatgccccccaacaaggaggccagcggcctgagcagcagccccgccggcctgatctgcctgccccccatcagcgaggagctgcagctggtgtggacccaggccgcccagaccagcgagctggacagcaacgagcacctgctgaagaccttcagctacttcccctaccccagcctggccgacatcgccctgctgtgcctgagatacggcctgcagatggagaaggtgaagacctggttcatggcccagagactgagatgcggcatcagctggagcagcgaggagatcgaggagaccagagccagagtggtgtacagaagagaccagctgcacttcaagagcctgctgagcttcacccaccacgccggcagaccccccgaggaggtgccccccccccccgtgcccgcccccgagcaggtgggcatcggcatcggcccccccaccctgagcaagcccacccagaccaagggcctgaaggtggagcccgaggagcccagccagatgccccccctgccccagagccaccagaagctgaaggagagcctgatgacccccggcagcggcgccttcccctaccagagcgacttctggcagcacctgcagagcagcggcctgagcaaggagcaggccggcagaggccccaaccagagccacggcatcggcaccgccagctggaaccacagcaccaccgtgccccagccccaggccagagacaagcccccccccatcgccctgatcgccagcagctgcaaggaggagagcgccagcagcgtgacccccagcagcagcagcaccagcagcagcttccaggtgctggccaacggcgccaccgccgccagcaagcccctgcagcccctgggctgcgtgccccagagcgtgagccccagcgagcaggccctgcccccccacctggagcccgcctggccccagggcctgagacacaacagcgtgcccggcagagtgggccccaccgagtacctgagccccgacatgcagagacagagaaagaccaagagaaagaccaaggagcagctggccatcctgaagagcttcttcctgcagtgccagtgggccagaagagaggactaccagaagctggagcagatcaccggcctgcccagacccgagatcatccagtggttcggcgacaccagatacgccctgaagcacggccagctgaagtggttcagagacaacgccgtgcccggcgcccccagcttccaggaccccgccatccccacccccccccccagcaccagaagcctgaacgagagagccgagaccccccccctgcccatccccccccccccccccgacatccagcccctggagagatactgggccgcccaccagcagctgagagagaccgacatcccccagctgagccaggccagcagactgagcacccagcaggtgctggactggttcgacagcagactgccccagcccgccgaggtggtggtgtgcctggacgaggaggaggaggaggaggaggaggagctgcccgaggacgacgaggaggaggaggaggaggaggaggaggacgacgacgacgacgacgacgacgtgatcatccaggactag

SEQ ID NO: 206072 - DNA, 3352 bp, Artificial Sequence
  derived and/or modified sequence
aacttgctcgagcagggctgggtagaccggcgcgctcccggggacggtggggggggcagtcccggtttcggccatcgctggggtgggctcggagcggccgcaccgggcagcaaccccactcccactcggaggccccctgccctctcccccacttccccccggcccatggtgcgaggctgggagccgccgcccgggctggactgcgctatctctgaagggcacaaatcagaaggcaccatgcctcctaataaagaggccagcggtctcagtagttcaccagcggggctcatctgcctccctccaatctctgaggagctacagcttgtgtggacgcaagcagcccagaccagtgagctagacagcaatgaacacctgctcaaaaccttcagctactttccctatcccagcctagcagacattgcccttctctgcctacgttatgggttgcagatggagaaagtcaagacttggtttatggcccagcgcctccgctgtggtattagctggtcatctgaagaaatagaagagactcgagcccgagtagtctaccgtcgggaccaactccatttcaaatcccttctctcttttactcatcatgcgggacggcccccagaggaggtgcctcctcctccagtgccagctccagagcaagttggtattggaataggtcctccaactcttagcaagcctacccagacgaaaggattgaaggtagagcctgaggagccctctcagatgccaccactgccacagagtcaccagaaattaaaggagtccctgatgacacctggcagtggagcattcccctaccaatcagatttttggcaacatcttcaaagcagtggcctctcaaaggagcaggcaggcaggggtcccaaccagtcacatggcataggtactgcttcctggaaccactccacaaccgtcccccagccacaagctcgggataaacccccaccaattgcattaattgccagtagttgtaaggaggagtcagcatctagtgttactccctcttcttcctctacctcttcttctttccaggtactggctaatggagctactgccgcctctaaacccctccagccactaggctgtgtcccacagtcagtgtcacccagtgaacaggcattacccccacatctggaaccagcctggccccaagggctacggcataactcagtaccaggtagagttggccccacagagtacctttccccagatatgcaacgccagcgaaagaccaagcgcaaaaccaaagagcagctggctatccttaaatccttttttttacagtgccagtgggcacggcgtgaggattaccaaaagttagaacagatcactggtttacctcggcctgagatcattcagtggtttggtgacacacgctatgccttgaagcatgggcaactaaagtggtttcgggacaacgcagtacctggtgcccctagtttccaagacccagcaattcctacaccaccaccatcaacccgctccttgaacgaaagggctgagacaccacctctgccgatccctccacccccaccggatatacaacccttggagaggtactgggcagcccaccaacagctacgggaaactgatatccctcaattgagtcaggcatcaaggcttagcacccagcaggtgctggattggtttgactctcgattacctcagccagctgaggtggtagtttgtctagatgaagaagaggaagaggaggaggaagaactgccagaagatgatgaggaagaggaggaggaggaggaggaagatgatgatgatgatgatgatgatgtgatcatacaagactgagtggggagctgggggaggggaggtctgttactgaaagatgaaccaacttagtaactgtttaaacaaagaaaccacatttttaaaattaccttgtggcagagaactaaaaagctttgtgttcttcagggtgggtggcagggggatatagtgagggtggaccagggagaatgaccatagggcactaagtaaggctgggattggatcagcagaaatccaaccctctaaccttagggtagggagtgctaaggatctggggaaaccatgggctgggaagctgctcttgctctcctcgtgtctgctgtttttttcccttggtgtactatacagaggccagatgttggcaccacctctccaggaggattggaaaggaggagtaaaggattctgatttgattgatgattccagtgcatccccaatcccaccatcttacctggaatataaggctgccttgtaccccttttctgagcacaagtctgtgcgtaatgcaactgactctcttacttttttcttagtaactgatcatttcctagacaaccaagattctcaataagtcccagtctcatcacaaatattaatatttccttttcctcataccaacttgactatgtttcacccgcttcatgactaaatcacaggtggcagaatttttcagttcttttttttttttttgaggtggagtcttgctctgtcgcccaggctgtagtgcaatggcgcaatctcagctcactgcaagctccgcctcccaggttcatgccattctcctgcctcagcctcccgagtagctgggactacaggcacctgccaccacacccggctacttttttatatttttagtagagacgggtttcatcatgttagccaggatggtcttgatctcctgacctcatgatccgcccaccttggcctcccaaagtgctgggattataggcatgagccaccgtgcccggctattttcagttcttatgctgtgaccactttgccttgtagctttttctatctttccaaaatcctcactctgttcattgtttgtctcagggaaaatcttcccccaccgagcttgtaaaaaactttaataattgggtggagaataatttagaatggatatttattggaggtggtaattagggaagatgtccttttaaacagtagaattgtgttacaaaggggtgaaagagagggaatagtttctccttgttgaagggcagtgaaggtaggtttcaggtttggttttacaaacctgttaactacctcctgtccagcttgacagagactaatttttcatctttttgctgtcaatttgtttccagaaaagagacttttccctctcttgataggatctgtcttagggacagagggaccatcgtctttaagtgaattaattattgatgttttagaatggttttcatcagttgggatcagctatatggcaaataggtatcatcaatgagttaaccatctaaaaataaaagagtggaagccctaaaatgctagaataataataaaaaggccaaaaataaaattgtttctctctcaa

SEQ ID NO: 206073 - DNA, 1659 bp, Artificial Sequence
  derived and/or modified sequence
atgctgaagagcagaatcagcatgagaagcagacaccccagaagagccatcagcgagggccacaagagcgagggcaccatgccccccaacaaggaggccagcggcctgagcagcagccccgccggcctgatctgcctgccccccatcagcgaggagctgcagctggtgtggacccaggccgcccagaccagcgagctggacagcaacgagcacctgctgaagaccttcagctacttcccctaccccagcctggccgacatcgccctgctgtgcctgagatacggcctgcagatggagaaggtgaagacctggttcatggcccagagactgagatgcggcatcagctggagcagcgaggagatcgaggagaccagagccagagtggtgtacagaagagaccagctgcacttcaagagcctgctgagcttcacccaccacgccggcagaccccccgaggaggtgccccccccccccgtgcccgcccccgagcaggtgggcatcggcatcggcccccccaccctgagcaagcccacccagaccaagggcctgaaggtggagcccgaggagcccagccagatgccccccctgccccagagccaccagaagctgaaggagagcctgatgacccccggcagcggcgccttcccctaccagagcgacttctggcagcacctgcagagcagcggcctgagcaaggagcaggccggcagaggccccaaccagagccacggcatcggcaccgccagctggaaccacagcaccaccgtgccccagccccaggccagagacaagcccccccccatcgccctgatcgccagcagctgcaaggaggagagcgccagcagcgtgacccccagcagcagcagcaccagcagcagcttccaggtgctggccaacggcgccaccgccgccagcaagcccctgcagcccctgggctgcgtgccccagagcgtgagccccagcgagcaggccctgcccccccacctggagcccgcctggccccagggcctgagacacaacagcgtgcccggcagagtgggccccaccgagtacctgagccccgacatgcagagacagagaaagaccaagagaaagaccaaggagcagctggccatcctgaagagcttcttcctgcagtgccagtgggccagaagagaggactaccagaagctggagcagatcaccggcctgcccagacccgagatcatccagtggttcggcgacaccagatacgccctgaagcacggccagctgaagtggttcagagacaacgccgtgcccggcgcccccagcttccaggaccccgccatccccacccccccccccagcaccagaagcctgaacgagagagccgagaccccccccctgcccatccccccccccccccccgacatccagcccctggagagatactgggccgcccaccagcagctgagagagaccgacatcccccagctgagccaggccagcagactgagcacccagcaggtgctggactggttcgacagcagactgccccagcccgccgaggtggtggtgtgcctggacgaggaggaggaggaggaggaggaggagctgcccgaggacgacgaggaggaggaggaggaggaggaggaggacgacgacgacgacgacgacgacgtgatcatccaggactag

SEQ ID NO: 206074 - DNA, 1659 bp, Artificial Sequence
  derived and/or modified sequence
atgttgaagagcagaatttcaatgcgctcccgccacccgagacgggccatctccgagggacataagtcagaaggcactatgcctccgaataaggaagctagtgggctttcctctagccccgcaggtcttatttgtttaccccccatcagtgaagagcttcagttggtctggactcaagcagcccagacgagcgagctagacagtaatgaacatctcctgaagactttttcatactttccttacccatcattagcagacatcgctttactgtgtctcaggtacggcctccagatggagaaagtcaagacctggttcatggcccagcgactgcggtgtggtataagctggtctagcgaggagatcgaagaaacacgcgctcgcgtggtctacaggcgcgaccagctccatttcaagagcctcctaagtttcacacatcacgcaggtaggccaccagaagaagtccctccccctcccgttccagcacccgagcaggttggaattggaatcgggccacctactttgtctaaacctacacagaccaagggcctgaaagtggaaccagaggaaccgtcccagatgcctccattgccccaaagccaccagaaactcaaagaaagcctcatgacccccgggagcggggcttttccataccagagcgatttttggcagcaccttcagtcaagcgggctctccaaagaacaggcgggtaggggtcccaaccagtcccacggaatcggtacagcaagctggaatcacagtacaacagtaccgcagccacaggccagggataaacccccacctatcgcactcatcgctagtagctgcaaggaagaatcagcaagctctgtgaccccctctagctcaagcacttcaagcagctttcaggtgttggccaatggagccacagccgcatctaagccgctgcagcctcttggatgtgtgcctcagtcggtgtccccatcagaacaagccttgcctccacatctggagcctgcttggcctcagggcttgcgtcataattctgtgccggggcgcgtaggcccaacagagtacctcagcccagacatgcagaggcagagaaagacaaaacgcaaaacaaaggaacaattagccattctgaagtcattcttcttgcagtgtcagtgggcgaggcgcgaagattatcagaagctagaacaaatcactggactgccgcggccggaaatcattcagtggttcggggacactcgctacgcgctgaagcacggccaactgaaatggtttagagataatgcagttccgggtgcacccagcttccaggatccagcaatcccaacgcctccacccagcacccggtcactgaacgagagagcggagacgcccccactacccattccacccccccctccagatatccagccactggagcgatactgggcagcccaccagcagttacgtgaaacagatatacctcaattgtcccaggccagccggttatcgacacaacaggtgttggattggtttgactcccgactgccccaacccgccgaagtggtggtgtgcctggatgaggaggaagaggaggaagaagaggagttgcctgaggacgacgaagaggaggaagaagaagaagaggaggacgatgatgatgacgacgatgacgtgattatccaggactag

SEQ ID NO: 206075 - DNA, 1659 bp, Artificial Sequence
  derived and/or modified sequence
atgctgaagagccgcatctccatgaggagccgccacccccggcgggccatcagcgagggccacaagtctgagggcaccatgccacccaacaaggaggccagcggcctgagcagcagccctgctggcctcatctgcctgccccccatcagcgaggagctgcagctggtgtggacccaggccgcccagaccagcgagctggacagcaatgagcacctgctgaagaccttctcctacttcccctaccccagcctggccgacatcgccctgctgtgcctgcgctatggcctgcagatggagaaggtgaagacctggttcatggcccagaggctgcgctgtggcatctcctggagcagcgaggagattgaggagacccgggcccgggtggtgtacagaagagaccagctgcacttcaagagcctgctgtccttcacccaccacgccggccggcccccagaggaggtgcccccacctcctgtgcctgcccctgagcaggtgggcattggaattggcccccccaccctgagcaagcccacccagaccaagggcctgaaggtggagcctgaggagcccagccagatgccacccctgccccagagccaccagaagctgaaggagagcctgatgaccccaggcagcggggccttcccctaccagagcgacttctggcagcacctgcagagcagcggcctgagcaaggagcaggccggccggggccccaaccagagccatggaattggaacagcctcctggaaccacagcaccaccgtgccccagccccaggcccgggacaagcccccacccatcgccctgattgccagcagctgcaaggaggagagcgccagctctgtgacccccagcagcagcagcaccagcagcagcttccaggtgctggccaatggagccacagctgccagcaagcccctgcagcccctgggctgtgtgccccagagcgtgagccccagcgagcaggccctgcccccccacctggagcccgcctggccccagggcctgcggcacaacagcgtgcccggccgggtgggccccacagagtacctgagcccagacatgcagaggcagaggaagaccaagaggaagaccaaggagcagctggccatcctgaagagcttcttcctgcagtgccagtgggcccggcgggaggactaccagaagctggagcagatcaccggcctgcccaggcctgagatcatccagtggtttggagacaccaggtatgccctgaagcacggccagctgaagtggttccgggacaatgctgtgcctggggcccccagcttccaggaccctgccatccccaccccaccacccagcaccaggagcctgaatgaaagagctgagaccccacccctgcccatccccccacctcctccagacatccagcccctggagcgctactgggccgcccaccagcagctgcgggagacagacatcccccagctgagccaggccagccggctgagcacccagcaggtgctggactggtttgacagccggctgccccagcctgctgaggtggtggtgtgcctggatgaggaggaggaggaggaggaggaggagctgcctgaagatgatgaggaggaggaggaggaggaggaggaggatgatgatgatgatgatgatgatgtgatcatccaggactag

SEQ ID NO: 206076 - DNA, 1659 bp, Artificial Sequence
  derived and/or modified sequence
atgctgaagagccggatcagcatgcggagccggcacccccggcgggccatctccgaggggcacaagtccgagggcaccatgccccctaataaggaagcctcaggcttgtccagcagcccagccggcctgatatgcctgcctcctatctccgaggaattgcagttggtctggacccaagctgcccagaccagtgaactggattcaaatgagcacctcttgaagacattttcctacttcccctacccttctttagcagatattgcacttctgtgtctccggtatggcctgcagatggaaaaagtgaagacttggtttatggctcagagactacgatgtggtatttcctggtcatccgaggaaatcgaggagacacgcgcccgtgtggtgtatcggagagaccagctacacttcaagagcctcctgtccttcactcaccatgccggccggccacctgaggaggtgcctcctccgcccgtccctgccccggaacaggtgggcatcggtattggcccacctactctgagtaagcctacacagacaaaggggctgaaggtcgagcccgaggagccttcccagatgcccccgctcccccaatcccaccaaaagctgaaagaatcccttatgacgcctgggtcaggcgcattcccttaccaaagcgatttttggcagcatctgcaaagttcaggcctcagtaaggaacaggccggtcgcggtccaaaccagagtcacggtatagggacggcctcctggaatcacagcactactgtcccccagccccaggcgcgggataagcctcctccaatcgcactgatagcctcctcatgtaaagaggaatccgccagcagtgtaaccccgtctagctcctcgacttctagctcatttcaggtgcttgccaatggggccaccgccgcatctaagcctctccagcctctcgggtgtgtgcctcagagcgtatccccatcagagcaggccctgccaccacacctcgagcctgcgtggcctcaaggccttaggcataatagtgttccaggccgggtcggaccaactgagtacctaagcccggatatgcagaggcagagaaagaccaagagaaagaccaaagaacagctggcgatcctgaaatctttctttcttcagtgtcaatgggcacgccgcgaagactatcaaaaactcgaacagatcactgggctcccccgccccgaaataatccaatggttcggagacacaaggtatgcccttaagcatggccagctgaagtggtttagggacaatgctgtaccaggcgcacctagctttcaagaccccgccattcctacgcccccaccatcaactaggtccctcaatgagagagctgaaaccccccctctacctattccacccccgccccctgacatccaacctcttgagcgctattgggccgcccatcagcaattgagagagactgatattccccagctctctcaggcttcaagactctctactcagcaggttttggattggttcgatagcaggctgcctcagccagccgaggtagtggtctgtctagatgaagaggaagaggaggaggaggaggagttacccgaggatgatgaggaggaggaggaagaggaagaagaagatgacgatgatgacgatgacgatgtgataattcaggattag

SEQ ID NO: 206077 - DNA, 1659 bp, Artificial Sequence
  derived and/or modified sequence
atgctcaagtcaaggatcagtatgcggtctaggcaccctcggagggcaatcagcgagggtcacaaaagcgaaggcacaatgccgccaaataaggaggcgtctggactgtcatcatccccagccggtctcatttgcctgccacctatctcagaggagctgcagctggtttggactcaggcagctcagacatccgagcttgactctaatgaacatctcctcaagacgttcagctactttccttaccccagcctggcagatatcgccctgttgtgcctgaggtatggcctgcagatggaaaaggtcaagacatggttcatggctcagagactcagatgcggcatatcctggagtagcgaggaaatcgaggaaactagggccagggtagtgtacagaagggatcagctgcattttaaatctttgctgtccttcactcatcatgccggtcgacctcctgaggaagtgccccctcctcctgttcccgcacctgagcaggttggcatcggtattgggccaccaactctctccaaaccaacccaaactaaaggactgaaggtggagcctgaggagccctcacaaatgcctcctctcccccaaagccaccagaagctgaaagagtccctcatgacccctggcagtggcgcatttccatatcagtccgacttttggcagcatctccagagctccgggctgtccaaagaacaggcagggaggggcccaaatcagtctcacggaatcggaacggcctcttggaatcattccaccacagtgcctcaaccccaggctcgtgataaaccacctccaatcgccttaatcgctagttcctgcaaagaagaaagtgcctcttccgtgacaccaagctccagcagtactagttcttccttccaggtgctggccaacggtgcgacagccgctagcaagccactgcagcctctgggctgtgtgccgcaatctgtgtctccaagtgaacaggcattgccgcctcacctagagcccgcatggccgcaaggactgcggcacaactctgtgcctggaagagtgggccctaccgagtacttgagcccggacatgcaaaggcagagaaaaaccaagagaaagactaaagaacaactagctatattaaagtcctttttcctgcagtgccaatgggcgcgtcgcgaagactatcaaaaactcgagcaaatcaccggcctccctaggcctgaaattatccagtggttcggagatacccgctacgcccttaaacatggacaattaaaatggtttagagataacgctgttccgggagctccaagtttccaggacccagctatacccacaccacctccgtcaaccaggtccctgaatgagcgagcggagaccccaccattgcccatccccccaccaccacccgatattcaaccgcttgagcgctactgggctgcacaccaacagctccgagaaacagatattcctcagcttagccaggcttcccggctgtctacccagcaggtcctcgactggtttgatagccgcctgccccagccagctgaagtcgtggtttgcctcgatgaagaggaggaagaagaggaagaagaactccctgaggatgatgaggaagaggaggaagaagaggaagaggatgatgacgacgacgatgacgacgttattatccaagactag

SEQ ID NO: 206078 - DNA, 1748 bp, Artificial Sequence
  derived and/or modified sequence
atatgctgaagagcagaatcagcatgaggagcagacaccccaggagagctatctctgaagggcacaaatcagaaggcaccatgcctcctaataaagaggccagcggtctcagtagttcaccagcggggctcatctgcctccctccaatctctgaggagctacagcttgtgtggacgcaagcagcccagaccagtgagctagacagcaatgaacacctgctcaaaaccttcagctactttccctatcccagcctagcagacattgcccttctctgcctacgttatgggttgcagatggagaaagtcaagacttggtttatggcccagcgcctccgctgtggtattagctggtcatctgaagaaatagaagagactcgagcccgagtagtctaccgtcgggaccaactccatttcaaatcccttctctcttttactcatcatgcgggacggcccccagaggaggtgcctcctcctccagtgccagctccagagcaagttggtattggaataggtcctccaactcttagcaagcctacccagacgaaaggattgaaggtagagcctgaggagccctctcagatgccaccactgccacagagtcaccagaaattaaaggagtccctgatgacacctggcagtggagcattcccctaccaatcagatttttggcaacatcttcaaagcagtggcctctcaaaggagcaggcaggcaggggtcccaaccagtcacatggcataggtactgcttcctggaaccactccacaaccgtcccccagccacaagctcgggataaacccccaccaattgcattaattgccagtagttgtaaggaggagtcagcatctagtgttactccctcttcttcctctacctcttcttctttccaggtactggctaatggagctactgccgcctctaaacccctccagccactaggctgtgtcccacagtcagtgtcacccagtgaacaggcattacccccacatctggaaccagcctggccccaagggctacggcataactcagtaccaggtagagttggccccacagagtacctttccccagatatgcaacgccagcgaaagaccaagcgcaaaaccaaagagcagctggctatccttaaatccttttttttacagtgccagtgggcacggcgtgaggattaccaaaagttagaacagatcactggtttacctcggcctgagatcattcagtggtttggtgacacacgctatgccttgaagcatgggcaactaaagtggtttcgggacaacgcagtacctggtgcccctagtttccaagacccagcaattcctacaccaccaccatcaacccgctccttgaacgaaagggctgagacaccacctctgccgatccctccacccccaccggatatacaacccttggagaggtactgggcagcccaccaacagctacgggaaactgatatccctcaattgagtcaggcatcaaggcttagcacccagcaggtgctggattggtttgactctcgattacctcagccagctgaggtggtagtttgtctagatgaagaagaggaagaggaggaggaagaactgccagaagatgatgaggaagaggaggaggaggaggaggaagatgatgatgatgatgatgatgatgtgatcatacaagactgagtggggagctgggggaggggaggtctgttactgaaagatgaaccaacttagtaactgtttaaacaaagaaaccacatttttaaaatt

SEQ ID NO: 206079 - protein, 677 aa, Artificial Sequence
  derived and/or modified sequence
MAAHHRQNTAGRRKVQVSYVIRDEVEKYNRNGVNALQLDPALNRLFTAGRDSIIRIWSVNQHKQDPYIASMEHHTDWVNDIVLCCNGKTLISASSDTTVKVWNAHKGFCMSTLRTHKDYVKALAYAKDKELVASAGLDRQIFLWDVNTLTALTASNNTVTTSSLSGNKDSIYSLAMNQLGTIIVSGSTEKVLRVWDPRTCAKLMKLKGHTDNVKALLLNRDGTQCLSGSSDGTIRLWSLGQQRCIATYRVHDEGVWALQVNDAFTHVYSGGRDRKIYCTDLRNPDIRVLICEEKAPVLKMELDRSADPPPAIWVATTKSTVNKWTLKGIHNFRASGDYDNDCTNPITPLCTQPDQVIKGGASIIQCHILNDKRHILTKDTNNNVAYWDVLKACKVEDLGKVDFEDEIKKRFKMVYVPNWFSVDLKTGMLTITLDESDCFAAWVSAKDAGFSSPDGSDPKLNLGGLLLQALLEYWPRTHVNPMDEEENEVNHVNGEQENRVQKGNGYFQVPPHTPVIFGEAGGRTLFRLLCRDSGGETESMLLNETVPQWVIDITVDKNMPKFNKIPFYLQPHASSGAKTLKKDRLSASDMLQVRKVMEHVYEKIINLDNESQTTSSSNNEKPGEQEKEEDIAVLAEEKIELLCQDQVLDPNMDLRTVKHFIWKSGGDLTLHYRQKST

SEQ ID NO: 206080 - DNA, 2034 bp, Artificial Sequence
  derived and/or modified sequence
atggccgcccaccacagacagaacaccgccggcagaagaaaggtgcaggtgagctacgtgatcagagacgaggtggagaagtacaacagaaacggcgtgaacgccctgcagctggaccccgccctgaacagactgttcaccgccggcagagacagcatcatcagaatctggagcgtgaaccagcacaagcaggacccctacatcgccagcatggagcaccacaccgactgggtgaacgacatcgtgctgtgctgcaacggcaagaccctgatcagcgccagcagcgacaccaccgtgaaggtgtggaacgcccacaagggcttctgcatgagcaccctgagaacccacaaggactacgtgaaggccctggcctacgccaaggacaaggagctggtggccagcgccggcctggacagacagatcttcctgtgggacgtgaacaccctgaccgccctgaccgccagcaacaacaccgtgaccaccagcagcctgagcggcaacaaggacagcatctacagcctggccatgaaccagctgggcaccatcatcgtgagcggcagcaccgagaaggtgctgagagtgtgggaccccagaacctgcgccaagctgatgaagctgaagggccacaccgacaacgtgaaggccctgctgctgaacagagacggcacccagtgcctgagcggcagcagcgacggcaccatcagactgtggagcctgggccagcagagatgcatcgccacctacagagtgcacgacgagggcgtgtgggccctgcaggtgaacgacgccttcacccacgtgtacagcggcggcagagacagaaagatctactgcaccgacctgagaaaccccgacatcagagtgctgatctgcgaggagaaggcccccgtgctgaagatggagctggacagaagcgccgaccccccccccgccatctgggtggccaccaccaagagcaccgtgaacaagtggaccctgaagggcatccacaacttcagagccagcggcgactacgacaacgactgcaccaaccccatcacccccctgtgcacccagcccgaccaggtgatcaagggcggcgccagcatcatccagtgccacatcctgaacgacaagagacacatcctgaccaaggacaccaacaacaacgtggcctactgggacgtgctgaaggcctgcaaggtggaggacctgggcaaggtggacttcgaggacgagatcaagaagagattcaagatggtgtacgtgcccaactggttcagcgtggacctgaagaccggcatgctgaccatcaccctggacgagagcgactgcttcgccgcctgggtgagcgccaaggacgccggcttcagcagccccgacggcagcgaccccaagctgaacctgggcggcctgctgctgcaggccctgctggagtactggcccagaacccacgtgaaccccatggacgaggaggagaacgaggtgaaccacgtgaacggcgagcaggagaacagagtgcagaagggcaacggctacttccaggtgcccccccacacccccgtgatcttcggcgaggccggcggcagaaccctgttcagactgctgtgcagagacagcggcggcgagaccgagagcatgctgctgaacgagaccgtgccccagtgggtgatcgacatcaccgtggacaagaacatgcccaagttcaacaagatccccttctacctgcagccccacgccagcagcggcgccaagaccctgaagaaggacagactgagcgccagcgacatgctgcaggtgagaaaggtgatggagcacgtgtacgagaagatcatcaacctggacaacgagagccagaccaccagcagcagcaacaacgagaagcccggcgagcaggagaaggaggaggacatcgccgtgctggccgaggagaagatcgagctgctgtgccaggaccaggtgctggaccccaacatggacctgagaaccgtgaagcacttcatctggaagagcggcggcgacctgaccctgcactacagacagaagagcacctag

SEQ ID NO: 206081 - DNA, 2034 bp, Artificial Sequence
  derived and/or modified sequence
atggccgcacaccatcggcaaaacaccgctggccgacgcaaagtacaggttagttatgtgatccgggacgaagtcgagaagtacaacaggaacggggtgaacgcgttacagttggatccggcgctcaacaggctctttactgcaggacgggacagcataatcaggatctggagcgtcaaccaacataagcaagatccctatattgccagtatggagcaccacactgactgggttaacgacatcgtgctgtgttgtaacggcaagactctgatttcggcttcatccgacaccaccgtcaaagtgtggaatgcgcataaaggcttctgcatgagcacactccggacacataaagactatgtgaaggctttggcatacgcaaaagacaaggagttggtagctagtgccggccttgatcggcagatcttcctgtgggatgtcaacacgctcacagcactaaccgctagtaacaataccgtgacaactagtagtctgtcaggcaacaaagactccatctactctctggccatgaatcaactgggtacaatcattgtctctgggagtaccgaaaaggtgctgcgggtttgggatccgagaacctgtgccaagttgatgaaactgaaggggcatacagacaatgtgaaagccctgctgctgaacagggacggtacacagtgcctgtccgggagcagcgacggcacgatcagactctggtccctaggacagcagcggtgcatagccacataccgcgttcacgacgagggagtgtgggccttgcaagttaatgacgcctttacacatgtgtactcaggtggcagagaccggaagatctattgtaccgaccttcggaaccctgacattcgcgtgcttatatgtgaggaaaaggcccctgtcctcaagatggaactcgacagatctgctgaccccccccctgcaatctgggtcgccaccaccaagtccacagtgaacaagtggaccctgaaaggtatccacaacttccgggcttctggcgactacgataacgactgcacaaacccaattacgcctctgtgtacacagccagaccaggtcattaaaggtggtgcttccattattcagtgtcacatccttaacgataaacggcatattctcacaaaggataccaacaacaatgtggcttattgggatgttctgaaagcctgcaaagtggaggacctagggaaggtggatttcgaagacgagattaagaagcggttcaaaatggtgtacgtgcctaactggttttcagtggacctaaaaaccggcatgctcaccatcacgttagatgaaagcgactgctttgccgcctgggtgtccgctaaggacgccgggttttcaagcccggatgggtccgatccgaaactcaatttgggtggcctgctactgcaggcactgctggagtattggcccagaacccatgtcaacccaatggacgaagaggagaatgaggtcaatcatgtgaatggggaacaggaaaacagggtgcagaaaggaaatgggtactttcaggttcctccccatacacctgtgatattcggagaggccggggggcgaacacttttccgactcctctgtcgcgattctgggggcgaaacagaatcgatgctgctgaatgagaccgtgccccagtgggtgatagatatcacagtagataagaacatgccgaaatttaacaaaatccccttttacctgcaacctcatgcgtcatccggcgcaaaaacactgaaaaaagaccggctctctgccagtgacatgctccaagtgcgtaaggtgatggagcacgtatatgagaaaattatcaacctagacaatgagagccagacgaccagctccagtaacaatgagaaacccggggagcaagaaaaggaggaggatatagctgtgctggccgaagagaagatcgaactcttgtgtcaggaccaggtactcgatccaaacatggaccttcgaactgtcaagcactttatctggaagtctggaggcgatctcacgctccactacaggcagaaatccacgtag

SEQ ID NO: 206082 - DNA, 2034 bp, Artificial Sequence
  derived and/or modified sequence
atggccgcccaccaccggcagaacacagctggccgcaggaaggtgcaggtgtcctatgtgatcagagatgaggtggagaagtacaacagaaatggagtgaatgccctgcagctggaccctgccctgaacagactcttcaccgctggccgggacagcatcatccgcatctggagcgtgaaccagcacaagcaggacccctacatcgcctccatggagcaccacacagactgggtgaatgacatcgtgctgtgctgcaatggcaagaccctcatcagcgccagcagtgacaccaccgtgaaggtgtggaatgcccacaagggcttctgcatgagcaccctgcggacccacaaggactatgtgaaggccctggcctatgccaaggacaaggagctggtggccagcgctggcctggaccggcagatcttcctgtgggatgtgaacaccctgacagccctgacagccagcaacaacacagtgaccaccagcagcctgagcggcaacaaggacagcatctacagcctggccatgaaccagctgggcaccatcatcgtgtctggcagcacagagaaggtgctgcgggtgtgggaccccaggacctgtgccaagctgatgaagctgaagggccacacagacaacgtgaaggccctgctgctgaacagagatggcacccagtgcctgagcggcagcagtgatggcaccatccggctgtggagcctgggccagcagcgctgcatcgccacctacagagtgcatgatgagggcgtgtgggccctgcaggtgaatgatgccttcacccacgtgtacagcggcggccgggacaggaagatctactgcacagacctgaggaacccagacatccgggtgctgatctgtgaggagaaggcccctgtgctgaagatggagctggacagatctgctgaccccccaccagccatctgggtggccaccaccaagagcacagtgaacaagtggaccctgaagggcatccacaacttccgggccagcggggactatgacaatgactgcaccaaccccatcacccccctgtgcacccagcctgaccaggtgatcaagggcggggccagcatcatccagtgccacatcctgaatgacaagaggcacatcctgaccaaggacaccaacaacaacgtggcctactgggatgtgctgaaggcctgcaaggtggaggacctgggcaaggtggactttgaagatgagatcaagaagcgcttcaagatggtgtatgtgcccaactggttctctgtggacctgaagacaggcatgctgaccatcaccctggatgaaagtgactgctttgctgcctgggtgtctgccaaggatgctggcttcagcagcccagatggcagtgaccccaagctgaacctgggcggcctgctgctgcaggccctgctggagtactggcccaggacccacgtgaaccccatggatgaggaggagaatgaggtgaaccacgtgaatggagagcaggagaacagagtgcagaagggaaatggctacttccaggtgcccccccacacccctgtgatctttggagaggccggcggccgcaccctcttccggctgctgtgccgggacagcggcggggagacagagagcatgctgctgaatgaaacagtgccccagtgggtgattgacatcaccgtggacaagaacatgcccaagttcaacaagatccccttctacctgcagccccacgccagcagcggggccaagaccctgaagaaggaccggctgagcgccagtgacatgctgcaggtgaggaaggtgatggagcacgtgtatgagaagatcatcaacctggacaatgaaagccagaccaccagcagcagcaacaatgagaagccaggagagcaggagaaggaggaggacattgctgtgctggccgaggagaagattgagctgctgtgccaggaccaggtgctggaccccaacatggacctgaggacagtgaagcacttcatctggaagagcggcggggacctgaccctgcactaccggcagaagagcacctag

SEQ ID NO: 206083 - DNA, 2034 bp, Artificial Sequence
  derived and/or modified sequence
atggccgcccaccaccggcagaacaccgccggccggcggaaggtgcaggttagctatgtcatcagggatgaggtagagaagtacaatcggaacggggtcaacgcgctccagttagatccagccctgaaccggctgtttacggctggccgggatagcataataagaatctggtctgtgaatcagcacaagcaagatccatatatcgcctctatggagcatcacacggactgggtaaatgacatagttctctgttgtaatgggaaaacactgatcagtgccagctcagatactacagtaaaagtatggaacgcccacaaaggattctgtatgtctactctgcgaacccacaaggattacgtgaaagcactggcatatgctaaggacaaagagctggttgcaagcgctggtctcgacaggcagatcttcctgtgggatgtaaacaccctgacagcactcaccgcatccaataataccgtgactacttcatcactgagcggcaacaaagactcaatttactctctagcaatgaatcaactgggcaccatcatagtatctgggtcgacggagaaagtgttacgggtctgggatcctcggacttgtgcaaagctgatgaagctaaaaggccacacagataacgtgaaggcattgcttctcaatcgggacggcacccaatgtttaagtgggagtagcgatggcacaattcgcctttggagcctgggacaacaaagatgcattgcaacatatcgcgttcatgatgagggagtgtgggccctccaagtcaacgacgctttcacccatgtgtattctggtgggagggatcggaagatttattgtactgacctgcgcaaccctgacattagagtactaatctgtgaagaaaaggcccccgttctgaaaatggaactggatcggtccgccgacccaccgccagccatctgggttgctacaactaaaagtactgtgaacaagtggaccctgaaaggaatccacaactttcgtgcatccggcgattacgacaatgactgtacgaatcccattacaccactctgcacccaaccagatcaggttattaagggtggagcgagcattatacagtgccatatcctcaacgataaaagacacatccttactaaagataccaacaacaatgtcgcatactgggacgtgttgaaagcatgcaaagtggaggacctggggaaggtagactttgaggacgagattaagaaaaggttcaaaatggtgtatgtgcccaactggttctcagtggacctgaaaacaggaatgctgaccatcaccctggatgagtctgactgtttcgcagcctgggtcagcgcgaaggacgctggtttctcctcccctgacggaagtgatccaaagctgaatctgggaggactgttattacaggcgcttcttgagtattggcccaggacgcacgtaaatcccatggacgaagaagagaatgaagtgaaccacgttaatggcgaacaggagaacagagttcaaaagggaaacgggtatttccaggtgcctccacacacgccggtcatatttggagaggctgggggccgcaccctcttcaggttgctgtgtcgagactccggaggagagacggagagcatgctgctgaacgaaacagttccccagtgggtgattgacataacagttgacaaaaatatgccaaagttcaacaaaatccccttttacctgcagccccacgccagctcaggtgcgaaaaccttaaaaaaggacagactttctgcctctgacatgctccaggtcaggaaagtcatggagcacgtctatgagaaaatcatcaatctggataatgagtctcagactacatctagtagcaataacgagaagccaggtgagcaggaaaaggaagaggacatcgccgtcctcgctgaagaaaagattgagctcctctgccaggaccaagtgctggatcctaacatggacctcaggaccgtgaagcatttcatctggaagtctggcggagatctcactctacattaccgtcaaaagtccacctag

SEQ ID NO: 206084 - DNA, 2034 bp, Artificial Sequence
  derived and/or modified sequence
atggcggctcatcatagacagaatactgccggacggaggaaggtacaggtgtcctacgtgattagggacgaagtagagaagtacaatcgcaatggcgtaaacgcgttgcagctcgatccagccctgaaccgcctgttcacagctggaagggacagcattattaggatctggtccgtgaaccaacataagcaggacccttacatcgcctctatggaacatcatactgactgggtgaatgacatcgttctgtgctgtaatggcaagacactgattagcgcctcatctgacaccaccgtaaaggtatggaatgctcataagggtttctgcatgagcacactgcggacacacaaagactacgtgaaagctcttgcctacgcaaaggataaggagttagtggcctcagctggcctcgacagacagatcttcctgtgggatgtaaacactttgaccgctctcacagcgtcaaataacactgtgaccacctcctccctctcgggtaacaaggactctatttacagtttggcaatgaaccagttgggaaccattatagtgtcaggttctacagagaaagtgcttcgagtgtgggaccccagaacttgcgcgaagctgatgaagcttaaaggacataccgacaatgtgaaggccctgttgctgaaccgtgatgggacgcagtgtctgtccgggtccagcgacggcacgataagactgtggagcttagggcaacagaggtgcatagccacataccgggtccatgacgagggcgtttgggccctacaggtcaacgacgcttttactcacgtttactctgggggacgcgataggaagatttattgcacggatttgcggaatccagacattagagtgctgatctgtgaagaaaaggcgccagtgttgaagatggaattggaccgctctgctgatcccccacccgcaatctgggtcgccaccacaaagtccacagtaaacaaatggactctcaaggggattcacaattttcgggcttccggtgactacgacaacgattgtaccaacccgatcactcccctttgtacacagccagaccaggttattaaagggggagctagtatcattcagtgtcacattctcaatgacaaacgacatattctaaccaaggataccaataataatgttgcttattgggacgtactcaaggcgtgcaaagttgaggacctgggcaaggttgatttcgaggatgagataaaaaaaaggtttaagatggtgtacgtgcctaactggttttcagtggacctcaagacaggtatgttgactatcaccctggatgagtcagactgcttcgccgcatgggtaagtgcgaaagatgcgggttttagtagccccgatggttctgacccaaagttgaacctcggagggctgctccttcaggccctcttggagtattggccacgaacccacgtgaaccccatggacgaggaggagaatgaggtgaaccacgtgaatggcgagcaggagaatcgcgttcagaaggggaatggctacttccaagtgcctcctcacacccccgtcattttcggggaggcaggcggtcgaaccctgtttcgtttgttgtgtagagattctggaggggagaccgaatccatgctgctgaacgagactgtacctcagtgggtcattgatattactgtggataaaaacatgccaaagttcaacaaaatacccttttaccttcagcctcacgcttccagcggggctaaaacactgaaaaaagacaggctttctgcctccgacatgcttcaggtgcgcaaagtgatggagcacgtttacgaaaagatcattaatctggacaatgagtcccagactacctcttcatctaacaatgagaagcctggtgaacaggagaaagaggaagacattgcagttctggccgaggaaaaaatagagctcctctgtcaggaccaggtcctggatcctaacatggaccttcgtaccgtgaagcactttatctggaagagcggaggtgatctcacgttgcattataggcagaagtccacgtag

SEQ ID NO: 206085 - DNA, 3707 bp, Artificial Sequence
  derived and/or modified sequence
aagtgacgtcggagtgtcaacatgcaagatggcggcccatcaccggcagaacacagcagggcggaggaaagtgcaggtttcctatgttattcgagatgaagtggagaagtacaaccgaaatggagtcaatgctctgcagctggatccagcactaaatagacttttcacagccggtcgagactctatcataagaatatggagtgtcaatcagcacaagcaagatccatatatagcatctatggaacaccatactgattgggtaaacgacattgtactctgttgtaatgggaaaacattaatatctgcttcttctgacacgacagtaaaagtatggaatgcacacaagggattttgcatgtcaacattaaggacacataaggattacgtaaaggccttagcatatgccaaggataaagaactagtagcatcagctgggttggacagacaaatattcctttgggatgtgaatactctaacagcattgactgcctcaaataacactgtcacaacttcttctttaagtggaaacaaagattccatttatagcctggccatgaatcaactgggaacaatcattgtatcagggtccactgaaaaggtgttacgggtatgggatccaagaacatgtgcaaaactaatgaagcttaaagggcacacggataatgtgaaggcattgctattaaacagagatggcacgcaatgcctgtcaggcagttctgatgggacaattcgcctttggtcccttggccagcagagatgtatagcaacataccgagtccatgatgaaggtgtttgggcgctgcaagtcaatgatgccttcacacatgtgtattctggtggaagggacaggaagatttattgtacagacctaagaaaccctgacattcgggtgctaatttgtgaagaaaaagcaccagttctcaagatggagcttgatagatcagctgatcctcctcctgcaatttgggttgcaacaactaagtctacagtaaataaatggactttgaaaggaattcataattttagagcctctggagattatgacaatgactgtacaaatcctataacacctctttgtacacaacctgaccaggttattaaagggggtgctagtattattcagtgccacattcttaatgataagagacatatattaaccaaagataccaataataatgtggcatattgggatgtattgaaggcatgtaaagttgaagatctgggcaaagtggattttgaagatgaaattaagaaaagatttaaaatggtgtatgtgccaaattggttctcagtagacttaaaaacagggatgttaactattactttggatgaaagtgattgttttgctgcctgggtttctgcaaaagatgctggtttcagcagccctgatgggtcagatccaaaattgaatttaggaggacttttactccaagcactcctggaatattggcctagaacacatgtgaatccaatggatgaagaggaaaatgaagtaaaccatgtaaatggggagcaggagaaccgagtgcagaagggaaatggatattttcaagtgcccccacatacacccgtgatctttggtgaagctggaggtcgcacactgttcaggctgctctgccgagattccgggggtgagactgagtctatgcttcttaatgaaacagtgccacaatgggtaattgacatcactgtggataaaaatatgcccaaattcaacaaaattcctttctacctccaacctcatgcatcttcaggagcaaaaaccttaaaaaaagatagactctctgctagtgacatgctccaagtccgaaaagttatggaacatgtttatgaaaaaattatcaacttggataatgagtctcaaaccactagctcttctaataatgaaaaaccaggagaacaggaaaaagaagaagatattgctgtgttggcagaggagaaaattgaacttttgtgccaggaccaggttttggatccaaatatggaccttcgaacagtgaaacacttcatatggaagagcggtggagacctcaccctccattaccgtcagaagtccacgtgaaggctgggctaatgctcctggatattcatttacgaccttcctctatggccccaagagtagtcctaggaagcccactgatccccaacgggagcaagacttctaacggctgattggtatggaccgagattatctttcaattgaagtgactaatcgagatgtaatatagaaaccagtctccatgtgtagattaagctgtccccagggaagcagagtgcaagagcagaagagccccaagcagactatgtctttcaagatgtacagaagactgacaacaggccagtgcagactttgcttcctccttttgtttcaaaggaccttatctacccattaacacttgttagagacacctcagtcgggccacaactgtctctgtttcaactttaagcccacacactctgtagcttttctaaaacagtacattccattcatgcagtagatatgaaggctttttccaagtttgtcatataaagtaatcaaattgttttcaccgtttaagacagttatttttaatgggaatttgctgttgcacaatttgagaaccagcccatttcataataaaagattaatgttgggcttgttgttaatattgcatctcagatgtgttcttgtaggaagatctgttgaaattccaggtgctggatcatagcacttggactgttgggccggagtttgtgcagcccatgcctagcgatgctgcacctcccatgatgtcctggctttgtggcaaccccagggaggtgcagcagtttcactccttcctccactgtgtccagttttatttacacaaagcgagctgagaccacaggttcttgctctggatgagcagcatgacaccatcaaaatttaagaccatgatgaaatttcagtttcattcaaatgttacctaaaatttatggtgtcagaataaagggagatcatagtgagttaatttgatattcatatcctggaagtatacatatttgtttttccaaagttttatatgcaggtttttgttgtacctgtatccagatcttcttttcactgttctaacaatctaacactttcatagaatcatttggatcttgtatagagtgtaacttattggggataaacacttcaacttttggcagaaaatactttggattctccccaaggtcatttgtattcagagtaaatcagtggtccacccccataaaactgtaagacaagcctcctgtatgaagccagaagcacaagtgccttcagagggcagttgattccagtccagttgcctccctagcttgtgtgtggcctgcctccaccatagcagggactagggagggaggcagggaacgttttttcttttctacatcttcacaggttcggctgggggcagctgataggcctaaggccataccttactatttaagatactctgatcgcacaactgcagagacagggttccctcactgctagtcagcttcttttggaaactggacaggccattgccacctgcactttgaagaagtgagcaaagacgtggccacatttctaataagttgaaatggtctttctcccttcctcagagagcaaccagcttctttttttttaaaagtcctttctatctgttggatacaacagtgtgcttttggtgcacattttttagcaatagttgtgaattaatggc

SEQ ID NO: 206086 - protein, 889 aa, Artificial Sequence
  derived and/or modified sequence
MEGGLADGEPDRTSLLGDSKDVLGPSTVVANSDESQLLTPGKMSQRQGKEAYPTPTKDLHQPSLSPASPHSQGFERGKEDISQNKDESSLSMSKSKSESKLYNGSEKDSSTSSKLTKKESLKVQKKNYREEKKRATKELLSTITDPSVIVMADWLKIRGTLKSWTKLWCVLKPGVLLIYKTQKNGQWVGTVLLNACEIIERPSKKDGFCFKLFHPLEQSIWAVKGPKGEAVGSITQPLPSSYLIIRATSESDGRCWMDALELALKCSSLLKRTMIREGKEHDLSVSSDSTHVTFYGLLRANNLHSGDNFQLNDSEIERQHFKDQDMYSDKSDKENDQEHDESDNEVMGKSEESDTDTSERQDDSYIEPEPVEPLKETTYTEQSHEELGEAGEASQTETVSEENKSLIWTLLKQVRPGMDLSKVVLPTFILEPRSFLDKLSDYYYHADFLSEAALEENPYFRLKKVVKWYLSGFYKKPKGLKKPYNPILGETFRCLWIHPRTNSKTFYIAEQVSHHPPISAFYVSNRKDGFCLSGSILAKSKFYGNSLSAILEGEARLTFLNRGEDYVMTMPYAHCKGILYGTMTLELGGTVNITCQKTGYSAILEFKLKPFLGSSDCVNQISGKLKLGKEVLATLEGHWDSEVFITDKKTDNSEVFWNPTPDIKQWRLIRHTVKFEEQGDFESEKLWQRVTRAINAKDQTEATQEKYVLEEAQRQAARDRKTKNEEWSCKLFELDPLTGEWHYKFADTRPWDPLNDMIQFEKDGVIQTKVKHRTPMVSVPKMKHKPTRQQKKVAKGYSSPEPDIQDSSGSEAQSVKPSTRRKKGIELGDIQSSIESIKQTQEEIKRNIMALRNHLVSSTPATDYFLQQKDYFIIFLLILLQVIINFMFK

SEQ ID NO: 206087 - protein, 847 aa, Artificial Sequence
  derived and/or modified sequence
MSQRQGKEAYPTPTKDLHQPSLSPASPHSQGFERGKEDISQNKDESSLSMSKSKSESKLYNGSEKDSSTSSKLTKKESLKVQKKNYREEKKRATKELLSTITDPSVIVMADWLKIRGTLKSWTKLWCVLKPGVLLIYKTQKNGQWVGTVLLNACEIIERPSKKDGFCFKLFHPLEQSIWAVKGPKGEAVGSITQPLPSSYLIIRATSESDGRCWMDALELALKCSSLLKRTMIREGKEHDLSVSSDSTHVTFYGLLRANNLHSGDNFQLNDSEIERQHFKDQDMYSDKSDKENDQEHDESDNEVMGKSEESDTDTSERQDDSYIEPEPVEPLKETTYTEQSHEELGEAGEASQTETVSEENKSLIWTLLKQVRPGMDLSKVVLPTFILEPRSFLDKLSDYYYHADFLSEAALEENPYFRLKKVVKWYLSGFYKKPKGLKKPYNPILGETFRCLWIHPRTNSKTFYIAEQVSHHPPISAFYVSNRKDGFCLSGSILAKSKFYGNSLSAILEGEARLTFLNRGEDYVMTMPYAHCKGILYGTMTLELGGTVNITCQKTGYSAILEFKLKPFLGSSDCVNQISGKLKLGKEVLATLEGHWDSEVFITDKKTDNSEVFWNPTPDIKQWRLIRHTVKFEEQGDFESEKLWQRVTRAINAKDQTEATQEKYVLEEAQRQAARDRKTKNEEWSCKLFELDPLTGEWHYKFADTRPWDPLNDMIQFEKDGVIQTKVKHRTPMVSVPKMKHKPTRQQKKVAKGYSSPEPDIQDSSGSEAQSVKPSTRRKKGIELGDIQSSIESIKQTQEEIKRNIMALRNHLVSSTPATDYFLQQKDYFIIFLLILLQVIINFMFK

SEQ ID NO: 206088 - protein, 728 aa, Artificial Sequence
  derived and/or modified sequence
MEGGLADGEPDRTSLLGDSKDVLGPSTVVANSDESQLLTPGKMSQRQGKEAYPTPTKDLHQPSLSPASPHSQGFERGKEDISQNKDESSLSMSKSKSESKLYNGSEKDSSTSSKLTKKESLKVQKKNYREEKKRATKELLSTITDPSVIVMADWLKIRGTLKSWTKLWCVLKPGVLLIYKTQKNGQWVGTVLLNACEIIERPSKKDGFCFKLFHPLEQSIWAVKGPKGEAVGSITQPLPSSYLIIRATSESDGRCWMDALELALKCSSLLKRTMIREGKEHDLSVSSDSTHVTFYGLLRANNLHSGDNFQLNDSEIERQHFKDQDMYSDKSDKENDQEHDESDNEVMGKSEESDTDTSERQDDSYIEPEPVEPLKETTYTEQSHEELGEAGEASQTETVSEENKSLIWTLLKQVRPGMDLSKVVLPTFILEPRSFLDKLSDYYYHADFLSEAALEENPYFRLKKVVKWYLSGFYKKPKGLKKPYNPILGETFRCLWIHPRTNSKTFYIAEQVSHHPPISAFYVSNRKDGFCLSGSILAKSKFYGNSLSAILEGEARLTFLNRGEDYVMTMPYAHCKGILYGTMTLELGGTVNITCQKTGYSAILEFKLKPFLGSSDCVNQISGKLKLGKEVLATLEGHWDSEVFITDKKTDNSEVFWNPTPDIKQWRLIRHTVKFEEQGDFESEKLWQRVTRAINAKDQTEATQEKYVLEEAQRQAARDRKTKNEKKK

SEQ ID NO: 206089 - protein, 58 aa, Artificial Sequence
  derived and/or modified sequence
MEGGLADGEPDRTSLLGDSKDVLGPSTVVANSDESQLLTPGKMSQRQGKEAYPTPTKD

SEQ ID NO: 206090 - DNA, 2670 bp, Artificial Sequence
  derived and/or modified sequence
atggaggggggcctcgcagacggagagcccgatcgcacctcactgctgggcgacagcaaagacgtcttgggcccgagcaccgtggtcgccaattctgatgaaagccagctgttgactcccggaaagatgtcccagcgtcaaggaaaagaggcttacccgacgcctactaaagaccttcaccaaccttccctgtcccctgcatccccgcacagtcaaggttttgagcgaggtaaggaggatattagccagaacaaggatgagtcctcactctccatgagtaaaagtaaatctgagtctaagctgtataacggaagtgagaaggacagttccacttcaagcaagttaacaaagaaagaaagcctgaaagttcagaaaaaaaattaccgtgaagagaagaagcgcgccactaaagagctgctgtccacaatcacagatccatccgttatcgtaatggccgattggctgaagatccgtggaacgctgaaatcatggactaagttatggtgtgttctgaagcccggggtcctgttgatctataaaacccagaagaacggacaatgggtgggcacagtgctgttgaacgcatgcgaaataatcgaaagaccatcaaaaaaagacggcttttgtttcaagctgtttcatccactcgaacagagtatatgggcagtgaagggccctaagggagaggcagtgggaagcatcacccagccactcccatccagctatttgatcattcgggctacctctgagtcggacgggcgctgttggatggatgctctggagctcgctttgaaatgcagctcattactgaaacgtacgatgattcgagaaggcaaggaacacgacctgtctgtgtcctctgattcaacacacgtaaccttttacggcctgctgagagcaaataatctccattcaggagataacttccagctgaatgactcggagattgagcgccagcattttaaagatcaggacatgtacagcgacaaatcagataaggaaaatgaccaggagcacgatgaatcagacaacgaagtgatgggtaaatcggaggaatctgacactgacacaagcgaaagacaggatgattcctatatcgaaccggaacctgtggaacctctgaaggaaacgacctacacagagcaaagccacgaggaactcggggaggccggcgaagcctcccagacagagaccgtgagcgaggagaacaaaagccttatctggaccctcctcaagcaagtgagaccaggaatggatctgtcaaaggttgtcttacccacatttatcctggagccacgttcgtttctggacaagctgtccgattactactaccacgccgattttttgtccgaagccgcactggaggaaaatccttacttcaggctgaagaaagtcgtgaaatggtatcttagtggcttctacaagaaacctaaggggctgaagaagccatataatccaatcttgggagaaacattcagatgcctgtggatccatcctcgcacaaacagcaaaacgttctatattgccgagcaggtttcacaccatcctcctatcagtgcgttttacgtctccaatcgcaaagatggattttgtcttagcggctctatattagccaaatcaaagttttacggtaactctctttcagcaatactggagggtgaagccagactaacatttctgaacaggggtgaggactatgtaatgacaatgccttatgctcactgcaagggcatcctttacgggacaatgacccttgagctcgggggaaccgtgaatataacctgtcagaaaacaggctatagcgccattttggagtttaagcttaagcctttcctgggatcttctgactgtgttaatcagatttctggcaaattgaagctcggaaaagaagtgctggccaccctggaaggtcattgggatagcgaagtgtttataactgataaaaaaaccgacaactccgaggtcttttggaaccccacgcctgacatcaagcagtggcgcctgatcagacacacggtgaagttcgaagagcagggagacttcgagtccgagaaactgtggcagcgagttacaagagcgatcaatgccaaagaccaaaccgaagccactcaagaaaaatacgtgctggaagaggctcagaggcaggcagctcgggaccgtaaaacaaaaaacgaggagtggtcttgtaagttgtttgaactggacccgctcactggcgaatggcactacaaatttgccgacacccggccctgggacccattgaacgacatgatccagtttgagaaggatggcgtgatacagacaaaggttaaacacagaacaccaatggtgtcagtaccaaagatgaagcacaaaccgactcgccagcaaaagaaggttgccaaaggttattccagccccgaacctgacatacaggactcttcaggaagcgaggcacaaagtgtgaaaccgtcgactaggagaaaaaagggtatcgagttgggggacatacagagttccatcgaatctatcaagcaaacccaggaagagattaagcgaaacataatggccttgcggaaccacctggttagctctactccagccactgactacttcctgcagcaaaaagactacttcattatttttctcctcattctattgcaggtcatcataaatttcatgtttaaatag

SEQ ID NO: 206091 - DNA, 2187 bp, Artificial Sequence
  derived and/or modified sequence
atggagggaggacttgctgatggcgaacctgataggacctcccttctaggcgacagtaaagacgtcctgggacccagcacagttgtggcgaacagtgatgagtctcagctcctgactcccggtaaaatgtcgcaacggcaaggcaaggaggcctacccaacacccacgaaggatctgcatcagcctagcctttcaccagcctcacctcactctcagggatttgagcgtggcaaggaagacatctcgcaaaataaggatgaatcctcgctgagcatgagtaaatctaaaagtgagagtaagctttataacggctccgagaaggattccagcacatcttctaaactcacaaagaaagagtccctgaaagtgcagaagaagaactacagagaggagaaaaagagggcgacaaaagagttgctctccacgatcacagacccttctgtgatcgtcatggcagactggcttaagattagagggaccctcaagagttggactaaactgtggtgtgttctgaaacctggcgttctcttgatctataaaacacaaaagaacggacagtgggtggggaccgtgttactgaacgcctgtgaaatcattgagcgtccctctaaaaaagacgggttttgtttcaaactcttccacccgttggaacaaagcatttgggccgtcaaaggcccgaagggagaagcagtgggcagcattactcagcccctgccttcatcatacttaatcatccgcgctacttccgaaagcgatgggaggtgttggatggacgccctggaactcgctctgaaatgttcatcattgcttaaaaggacaatgattcgggaggggaaggagcacgatctgagcgtgagtagtgatagcactcacgtaacattctatggactgctcagggcaaacaatttgcacagtggggacaatttccaattgaatgacagcgaaatcgaacggcagcacttcaaggatcaggatatgtactccgacaaatccgacaaagagaacgatcaggaacacgacgagagcgataacgaggttatgggaaagtcagaagaaagtgatacggacacctccgagcgtcaggacgacagctatatcgagcctgaaccggtcgagcctcttaaggaaacgacttacacagaacagtcccatgaggagttgggggaggccggggaggcttcccagactgagaccgtttctgaagaaaacaaatctcttatatggacccttttaaagcaggtccggcccgggatggatctgagcaaggtggttctgccgacttttatcctcgaacctaggtcgttcctggataagctctccgactactactaccacgcggattttctctccgaagcagcccttgaagagaacccttattttcgtttaaaaaaagtcgttaaatggtacctgtccggcttctacaagaaacccaaaggactcaagaaaccctacaacccgatactgggggaaacgtttcgatgcctgtggattcatccgcgcaccaattctaagacgttttacattgccgaacaggtgagccatcacccaccaatctctgcattttacgtctcaaaccggaaggacgggttttgtctgtcgggctccatcctcgcgaagtccaaattttatggaaattcactgtccgccatcctcgaaggggaagccaggctgacctttctcaaccggggcgaggactacgttatgaccatgccatatgcacattgcaaggggatattgtacggcaccatgaccctggaacttggaggaaccgtcaatatcacttgtcaaaaaactggctacagcgccatcctagagtttaagctgaagccttttctcggttcatccgactgtgttaaccaaatatctggaaagctaaaactaggtaaggaagtcctcgccacgctggaaggccactgggattccgaagtgtttattacggacaagaagacagataacagtgaggtgttttggaaccccactccagatatcaagcaatggaggctgattcggcacacagtaaaattcgaagagcagggggactttgagagcgaaaagctatggcagcgagtgacccgcgctattaatgctaaagaccagaccgaagcaactcaggaaaaatacgtccttgaagaggctcagcgacaggccgccagagatcgaaagacaaaaaatgagaagaagaagtag

SEQ ID NO: 206092 - DNA, 2625 bp, Artificial Sequence
  derived and/or modified sequence
atggagggagggctggccgatggggaacctgataggacctctgccaactctgacgaaagccagctgctgacaccaggtaaaatgtcccagaggcaaggaaaggaagcgtatcctactcccaccaaggatctccaccagccatccttgagtccggcatctccccactcccagggatttgagcggggcaaggaagacataagccagaataaagacgaatcgagtctctcgatgtctaagtccaagagcgagtcaaagctatataatggatcagaaaaagacagttctaccagctccaagttaaccaaaaaggagagcctgaaggtgcagaaaaaaaattaccgggaggagaaaaaaagagctactaaagaactgctgagcacgattaccgacccgagtgtgatcgttatggcagattggctgaaaattagaggaaccctaaagagctggacaaaactgtggtgcgtgctaaagcctggagttttactgatttataagacccagaaaaacggtcagtgggttgggaccgtgttgcttaacgcttgcgagatcattgaaagaccctctaaaaaggatggattctgtttcaaactgtttcacccattagagcagagtatctgggcagttaaggggcctaagggcgaagcggttggctctattacacagcccttgccttcaagttacctgataatcagggccacaagtgagagtgacggtcgctgttggatggacgccctcgagttagctttaaagtgtagctccctcttgaagcggaccatgatcagagaaggcaaggagcacgacctctctgtgtcctcagattcgacacatgtcactttctatggcttacttcgggctaacaacctccactctggcgataatttccagctgaatgactccgagatagagaggcagcacttcaaggatcaagacatgtactcagataaatccgacaaagaaaatgatcaagaacacgacgagtctgacaatgaggtgatgggtaagagtgaggaatccgacactgacacttccgaaaggcaggatgactcctacatagagccagagcccgtcgagccgttaaaggagaccacatataccgagcagagccacgaggagcttggtgaggctggggaagcgtctcagacagagacggtcagcgaggagaataaatccctcatatggactctgctgaagcaggtgaggccaggtatggacctgtcaaaagtggtgctgccaacattcatcttagaaccccggtccttcctggataaactgtctgattactactatcacgccgacttcctgtctgaggcagccctggaggagaacccatatttcagacttaaaaaggtcgtcaagtggtatttaagcggcttttataagaagccgaagggtctgaaaaaaccgtacaatcctatcctgggggagacatttaggtgtctgtggatccacccgcgaaccaactccaagacgttctacatcgctgaacaggtaagccatcacccaccaatttctgcgttttacgtgagcaaccggaaggacggcttctgtctgtccggctccatcctggcaaagtctaagttctacggaaattctttatcagccatacttgagggcgaagcgaggctgacatttttaaacaggggcgaggattatgtgatgacaatgccctatgcgcactgcaagggaatcctgtacggaaccatgacgctggaacttggggggacagttaacattacatgccaaaagacgggatacagcgccattcttgaattcaaactcaagccattcctgggctcttccgattgcgtgaatcaaatttccggcaagctcaagctcggcaaggaggtccttgccacactggaaggtcactgggatagtgaagtctttatcaccgataaaaaaacggacaattccgaggttttttggaatccaacgcctgacattaagcagtggagactgatacgccatacagtgaagttcgaagaacagggtgatttcgaatccgagaagctttggcaacgggttacgcgcgctattaatgctaaagatcagactgaggctacccaggagaaatacgtgcttgaagaagctcaacgccaagctgcacgggatcgaaaaactaagaatgaagagtggagctgtaagttgttcgagttagatcccctgaccggggagtggcactataagtttgcggacacccggccatgggacccattaaatgacatgatccaatttgaaaaggatggcgtgattcagaccaaagtaaagcatagaaccccaatggtttccgtcccaaagatgaagcacaaacccaccagacagcagaagaaggtggctaagggctactcctcccctgaaccagatatccaggacagctccggctcagaggcccagtccgttaaacctagcacccgacgcaagaagggaattgaactcggcgatatacagtccagtattgaatcgatcaagcaaacgcaggaagagattaaacggaacattatggcactgcgaaatcacctggtgtctagtacgcccgccacagattactttctgcagcagaaagactacttcataatctttctgctcatcttgctacaggtcatcatcaactttatgttcaaatag

SEQ ID NO: 206093 - DNA, 177 bp, Artificial Sequence
  derived and/or modified sequence
atggagggaggcctggctgatggggagcccgatagaacgagtttgctgggagatagtaaggacgttctcggcccgagcaccgttgtggcgaattccgacgagagccagcttctaacacctgggaagatgtcccaaaggcagggtaaagaagcctaccctacacccacaaaggactag

SEQ ID NO: 206094 - DNA, 2670 bp, Artificial Sequence
  derived and/or modified sequence
atggagggcggcctggctgatggagagccagacaggaccagcctgctgggggacagcaaggatgtgctgggccccagcacagtggtggccaacagtgatgagagccagctgctgacccctgggaagatgagccagaggcagggcaaggaggcctaccccacccccaccaaggacctgcaccagcccagcctgagccctgccagcccccacagccagggctttgagcggggcaaggaggacatcagccagaacaaggatgagagcagcctgtccatgagcaagagcaagtctgagagcaagctgtacaatggaagtgagaaggacagcagcaccagcagcaagctgaccaagaaggagagcctgaaggtgcagaagaagaactaccgggaggagaagaagagggccaccaaggagctgctgagcaccatcacagaccccagcgtgattgtgatggctgactggctgaagatccggggcaccctgaagtcctggaccaagctgtggtgtgtgctgaagccaggagtgctgctgatctacaagacccagaagaatggccagtgggtgggcaccgtgctgctgaatgcctgtgagatcatcgagcggcccagcaagaaggatggcttctgcttcaagctgttccaccccctggagcagagcatctgggccgtgaagggccccaagggggaggccgtgggcagcatcacccagcccctgcccagcagctacctgatcatccgggccaccagcgagagtgatggccgctgctggatggatgccctggagctggccctgaagtgcagcagcctgctgaagaggaccatgatccgggagggcaaggagcatgacctgtctgtgtccagtgacagcacccacgtgaccttctacggcctgctgcgggccaacaacctgcacagcggggacaacttccagctgaatgacagcgagattgaaaggcagcacttcaaggaccaggacatgtacagcgacaagagtgacaaggaaaatgaccaggagcatgatgaaagtgacaatgaggtgatgggcaagtctgaggagagtgacacagacaccagcgagcggcaggatgacagctacatcgagcctgagcctgtggagcccctgaaggagaccacctacacagagcagagccatgaggagctgggggaggccggggaggccagccagacagagaccgtgtctgaggagaacaagagcctcatctggaccctgctgaagcaggtgcggcccggcatggacctgagcaaggtggtgctgcccaccttcatcctggagcccaggagcttcctggacaagctgagtgactactactaccacgccgacttcctgtctgaggccgccctggaggagaacccctacttccggctgaagaaggtggtgaagtggtacctgagcggcttctacaagaagcccaagggcctgaagaagccctacaaccccatcctgggggagaccttccgctgcctgtggatccaccccaggaccaacagcaagaccttctacatcgccgagcaggtgagccaccacccccccatcagcgccttctacgtgagcaacaggaaggatggcttctgcctgagcggcagcatcctggccaagagcaagttctacggcaacagcctgagcgccatcctggagggggaggcccggctgaccttcctgaacagaggagaggactatgtgatgaccatgccctatgcccactgcaagggcatcctgtatggcaccatgaccctggagctgggcggcaccgtgaacatcacctgccagaagacaggctacagcgccatcctggagttcaagctgaagcccttcctgggcagcagtgactgtgtgaaccagatcagcggcaagctgaagctgggcaaggaggtgctggccaccctggagggccactgggacagcgaggtgttcatcacagacaagaagacagacaacagcgaggtgttctggaaccccaccccagacatcaagcagtggaggctcatccgccacacagtgaagtttgaggagcagggcgactttgaaagtgagaagctgtggcagagggtgacccgggccatcaatgccaaggaccagacagaggccacccaggagaagtatgtgctggaggaggcccagaggcaggccgcccgggacaggaagaccaagaatgaggagtggagctgcaagctgtttgagctggaccccctgaccggggagtggcactacaagtttgctgacacccggccctgggaccccctgaatgacatgatccagtttgagaaggatggagtcatccagaccaaggtgaagcacaggacccccatggtgtctgtgcccaagatgaagcacaagcccacccggcagcagaagaaggtggccaagggctacagcagccctgagccagacatccaggacagcagcggcagcgaggcccagagcgtgaagcccagcaccaggaggaagaagggcatcgagctgggggacatccagagcagcattgagagcatcaagcagacccaggaggagatcaagaggaacatcatggccctgaggaaccacctggtgagcagcaccccagccacagactacttcctgcagcagaaggactacttcatcatcttcctgctgatcctgctgcaggtgatcatcaacttcatgttcaagtag

SEQ ID NO: 206095 - DNA, 2187 bp, Artificial Sequence
  derived and/or modified sequence
atggagggcggcctggctgatggagagccagacaggaccagcctgctgggggacagcaaggatgtgctgggccccagcacagtggtggccaacagtgatgagagccagctgctgacccctgggaagatgagccagaggcagggcaaggaggcctaccccacccccaccaaggacctgcaccagcccagcctgagccctgccagcccccacagccagggctttgagcggggcaaggaggacatcagccagaacaaggatgagagcagcctgtccatgagcaagagcaagtctgagagcaagctgtacaatggaagtgagaaggacagcagcaccagcagcaagctgaccaagaaggagagcctgaaggtgcagaagaagaactaccgggaggagaagaagagggccaccaaggagctgctgagcaccatcacagaccccagcgtgattgtgatggctgactggctgaagatccggggcaccctgaagtcctggaccaagctgtggtgtgtgctgaagccaggagtgctgctgatctacaagacccagaagaatggccagtgggtgggcaccgtgctgctgaatgcctgtgagatcatcgagcggcccagcaagaaggatggcttctgcttcaagctgttccaccccctggagcagagcatctgggccgtgaagggccccaagggggaggccgtgggcagcatcacccagcccctgcccagcagctacctgatcatccgggccaccagcgagagtgatggccgctgctggatggatgccctggagctggccctgaagtgcagcagcctgctgaagaggaccatgatccgggagggcaaggagcatgacctgtctgtgtccagtgacagcacccacgtgaccttctacggcctgctgcgggccaacaacctgcacagcggggacaacttccagctgaatgacagcgagattgaaaggcagcacttcaaggaccaggacatgtacagcgacaagagtgacaaggaaaatgaccaggagcatgatgaaagtgacaatgaggtgatgggcaagtctgaggagagtgacacagacaccagcgagcggcaggatgacagctacatcgagcctgagcctgtggagcccctgaaggagaccacctacacagagcagagccatgaggagctgggggaggccggggaggccagccagacagagaccgtgtctgaggagaacaagagcctcatctggaccctgctgaagcaggtgcggcccggcatggacctgagcaaggtggtgctgcccaccttcatcctggagcccaggagcttcctggacaagctgagtgactactactaccacgccgacttcctgtctgaggccgccctggaggagaacccctacttccggctgaagaaggtggtgaagtggtacctgagcggcttctacaagaagcccaagggcctgaagaagccctacaaccccatcctgggggagaccttccgctgcctgtggatccaccccaggaccaacagcaagaccttctacatcgccgagcaggtgagccaccacccccccatcagcgccttctacgtgagcaacaggaaggatggcttctgcctgagcggcagcatcctggccaagagcaagttctacggcaacagcctgagcgccatcctggagggggaggcccggctgaccttcctgaacagaggagaggactatgtgatgaccatgccctatgcccactgcaagggcatcctgtatggcaccatgaccctggagctgggcggcaccgtgaacatcacctgccagaagacaggctacagcgccatcctggagttcaagctgaagcccttcctgggcagcagtgactgtgtgaaccagatcagcggcaagctgaagctgggcaaggaggtgctggccaccctggagggccactgggacagcgaggtgttcatcacagacaagaagacagacaacagcgaggtgttctggaaccccaccccagacatcaagcagtggaggctcatccgccacacagtgaagtttgaggagcagggcgactttgaaagtgagaagctgtggcagagggtgacccgggccatcaatgccaaggaccagacagaggccacccaggagaagtatgtgctggaggaggcccagaggcaggccgcccgggacaggaagaccaagaatgagaagaagaagtag

SEQ ID NO: 206096 - DNA, 2625 bp, Artificial Sequence
  derived and/or modified sequence
atggagggcggcctggctgatggagagccagacaggaccagcgccaacagtgatgagagccagctgctgaccccaggcaagatgagccagaggcagggcaaggaggcctaccccacccccaccaaggacctgcaccagcccagcctgagccctgccagcccccacagccagggctttgagcggggcaaggaggacatcagccagaacaaggatgagagcagcctgtccatgagcaagagcaagtctgagagcaagctgtacaacggcagcgagaaggacagcagcaccagcagcaagctgaccaagaaggagagcctgaaggtgcagaagaagaactaccgggaggagaagaagagggccaccaaggagctgctgagcaccatcacagaccccagcgtcatcgtgatggctgactggctgaagatccggggcaccctgaagtcctggaccaagctgtggtgtgtgctgaagccaggagtgctgctgatctacaagacccagaagaatggccagtgggtgggcaccgtgctgctgaatgcctgtgagatcatcgagcggcccagcaagaaggatggcttctgcttcaagctgttccaccccctggagcagagcatctgggccgtgaagggccccaagggggaggccgtgggcagcatcacccagcccctgcccagcagctacctgatcatccgggccaccagcgagagtgatggccgctgctggatggatgccctggagctggccctgaagtgcagcagcctgctgaagaggaccatgatccgggagggcaaggagcatgacctgtctgtgtccagtgacagcacccacgtgaccttctacggcctgctgcgggccaacaacctgcacagcggggacaacttccagctgaatgattctgaaattgagcggcagcacttcaaggaccaggacatgtacagcgacaagagtgacaaggaaaatgaccaggagcatgatgaaagtgacaatgaggtgatgggcaagtctgaggagagtgacacagacaccagcgagcggcaggatgacagctacatcgagcctgagcctgtggagcccctgaaggagaccacctacacagagcagagccatgaggagctgggggaggccggggaggccagccagacagaaacagtgtctgaggagaacaagagcctcatctggaccctgctgaagcaggtgcggcccggcatggacctgagcaaggtggtgctgcccaccttcatcctggagcccaggagcttcctggacaagctgagtgactactactaccacgccgacttcctgtctgaggccgccctggaggagaacccctacttccggctgaagaaggtggtgaagtggtacctgagcggcttctacaagaagcccaagggcctgaagaagccctacaaccccatcctgggggagaccttccgctgcctgtggatccaccccaggaccaacagcaagaccttctacatcgccgagcaggtgagccaccacccccccatcagcgccttctacgtgagcaacaggaaggatggcttctgcctgagcggcagcatcctggccaagagcaagttctacggcaacagcctgagcgccatcctggagggggaggcccggctgaccttcctgaacagaggagaagattatgtgatgaccatgccctatgcccactgcaagggcatcctgtatggcaccatgaccctggagctgggcggcaccgtgaacatcacctgccagaagacaggctacagcgccatcctggagttcaagctgaagcccttcctgggcagcagtgactgtgtgaaccagatcagcggcaagctgaagctgggcaaggaggtgctggccaccctggagggccactgggacagcgaggtgttcatcacagacaagaagacagacaacagcgaggtgttctggaaccccaccccagacatcaagcagtggaggctcatccgccacacagtgaagtttgaggagcagggcgactttgagagcgagaagctgtggcagagggtgacccgggccatcaatgccaaggaccagacagaggccacccaggagaagtatgtgctggaggaggcccagaggcaggccgcccgggacaggaagaccaagaatgaggagtggagctgcaagctgtttgagctggaccccctgactggagagtggcactacaagtttgctgacacccggccctgggaccccctgaatgacatgatccagtttgagaaggatggagtcatccagaccaaggtgaagcacaggacccccatggtgtctgtgcccaagatgaagcacaagcccacccggcagcagaagaaggtggccaagggctacagcagccctgagccagacatccaggacagcagcggcagcgaggcccagagcgtgaagcccagcaccaggaggaagaagggcatcgagctgggggacatccagagcagcattgagagcatcaagcagacccaggaggagatcaagaggaacatcatggccctgaggaaccacctggtgagcagcaccccagccacagactacttcctgcagcagaaggactacttcatcatcttcctgctgatcctgctgcaggtgatcatcaacttcatgttcaagtag

SEQ ID NO: 206097 - DNA, 177 bp, Artificial Sequence
  derived and/or modified sequence
atggagggcggcctggctgatggagagccagacaggaccagcctgctgggggacagcaaggatgtgctgggccccagcacagtggtggccaacagtgatgagagccagctgctgacccctgggaagatgagccagaggcagggcaaggaggcctaccccacccccaccaaggactag

SEQ ID NO: 206098 - DNA, 2670 bp, Artificial Sequence
  derived and/or modified sequence
atggagggcggcctggccgacggcgagcccgaccggaccagcctgttgggggactcaaaggacgtcctgggcccatcgaccgtggtcgccaactccgacgagagccaattgctgacccctggaaagatgtctcagaggcaaggcaaggaggcttatcccacacctaccaaggaccttcaccagccaagtctctccccggcaagcccacactcccagggcttcgagcgaggaaaggaggacatatcccagaataaggatgagtcaagtctcagcatgtccaaatcaaaatctgaatccaaactttacaatggcagtgagaaggatagtagcacatctagcaaactgactaagaaagagagtctgaaggtccaaaagaaaaattatagagaggaaaagaaacgcgctaccaaggaactgctttcgaccattacagacccgagtgtgatagtaatggcggattggctgaaaatccggggtacgctgaagtcgtggactaaattgtggtgtgtacttaagccgggggtactcctaatttacaaaacacagaagaacgggcaatgggtgggcacagtcctgctgaacgcttgcgagattattgagcggccaagcaaaaaggatggcttctgctttaagctcttccaccccctagagcagagcatttgggccgtgaagggcccgaagggggaagcagtggggtccatcacacagccactcccttcaagttatttgattataagagcaactagcgaatctgatggaaggtgctggatggatgccttggagttggctttgaagtgttcctccctgctgaagcggactatgatcagggagggtaaagagcacgacctgagcgtgtcgagcgactccacacatgtcaccttctacggactgctgagggccaacaacctccattcgggcgataactttcagctgaacgatagcgagatcgaacgccaacatttcaaagaccaggacatgtacagcgataagagcgacaaagagaatgatcaagagcacgacgaatcagataacgaagtcatgggcaagtccgaagagagcgacacagatactagtgagagacaggacgattcttacatagagcccgagccggtagagcccctgaaagagacgacctacacagaacagagtcatgaagaactgggcgaggcaggcgaagcctcccaaaccgagaccgtcagcgaagagaataaatccctcatttggacactattaaagcaggtgagaccaggaatggacctgagcaaggtggttctgccgacgttcattttggaacccaggtcttttttagacaaattgtcggactactactatcacgcagacttcttgagcgaagcggccctggaggagaacccatatttcagactgaaaaaggttgtgaagtggtatctgtcaggcttttacaagaaaccaaaaggactgaagaaaccatataacccaatcctgggagaaacattccgctgtctgtggatccacccacgaaccaattctaaaacattttatatcgccgagcaggtgtcacatcacccccccattagcgcattttatgtgtctaatcggaaggacggcttctgtttgtcagggtctattctagcgaagtccaagttctacggcaattctttgagtgcaatactggaaggcgaggcccggctgaccttcctcaacaggggagaggattacgtcatgaccatgccatacgcccattgcaaaggtatactgtacggtacgatgacactagagctgggtggaaccgtcaatatcacctgccaaaagacaggttactctgccattctggagtttaagctgaagccatttttaggctccagtgattgtgttaatcagatcagcggcaagctcaagttagggaaggaagtcctggccacactagaaggccactgggattcagaggtttttatcaccgataaaaagaccgacaactcagaggtgttctggaatccaacccctgacatcaagcagtggcgattgataagacatacagtgaagttcgaagaacaaggcgattttgagagcgaaaaactatggcagcgtgtgacccgtgctatcaatgccaaagaccagacagaggcaacacaggaaaaatatgttctggaggaagctcagcgtcaggcagcacgagatagaaagacaaaaaatgaggagtggagttgtaagctgttcgagctagatccactcaccggggaatggcactataagttcgccgatacccgtccctgggaccctctgaacgatatgatccaatttgaaaaggacggcgtcatccaaacaaaggttaaacacaggactccaatggtctccgtcccaaaaatgaaacacaagccaactagacagcagaagaaggtagctaagggctactcctcccccgagccagatattcaggactcttcaggatcagaagctcagtctgtcaagccgagcacacgccgcaaaaagggcattgagcttggggatattcagagcagcatcgagtcaatcaaacaaacgcaggaagaaatcaaacggaatatcatggccctgcgcaatcatctggtttccagtactccagctacagattatttcctccaacagaaagactattttatcatctttctcttgatcctgctccaagttatcatcaatttcatgttcaagtag

SEQ ID NO: 206099 - DNA, 2187 bp, Artificial Sequence
  derived and/or modified sequence
atggagggcggcctggccgacggcgagcccgaccggaccagcctgttaggagacagtaaagatgttctggggccttccaccgtggtggcgaatagtgacgaaagccagctgctcacccctgggaaaatgtctcagcgccaaggcaaagaagcctatcccaccccaaccaaagacttgcatcaaccatctctaagtccagcgagtccccactctcagggctttgagagaggcaaagaagatatctcccagaataaagacgaatcttcgctctctatgtccaagagcaagagcgagtcaaagctttataatggctccgagaaggactctagcactagtagcaaactcaccaagaaagaatcccttaaggtgcagaaaaagaactacagagaagaaaagaagcgcgctactaaagaactcctgtcaactattaccgatccctcggtcattgtcatggctgactggttgaaaatcagagggacccttaaatcttggaccaaactttggtgtgtcttgaagcccggcgtcctgctgatatataagacacagaaaaacggccagtgggtgggaacagtgctgcttaacgcgtgtgaaatcattgaacgtccgtccaagaaggacggtttctgctttaagctttttcacccactggaacagtctatctgggcagtgaagggccccaagggtgaggctgtcggcagcatcactcaacctctcccctcctcatacttgattattcgcgcgacctcagaatctgatggtcggtgctggatggacgcactggaactggccctgaagtgctccagcctgctcaagcgcacaatgatcagggaggggaaagagcacgatcttagcgtgagttcagactctacccacgtgactttttacgggctcttacgcgccaataatctccactccggagacaactttcaactgaacgatagcgagattgagagacagcatttcaaagatcaagatatgtacagcgacaaatcagacaaagagaacgaccaggaacacgacgagtccgacaatgaggtgatgggcaagagcgaagagagcgatactgacacctctgagcgccaggacgactcttacatcgagcccgagcctgttgagcctttgaaggaaactacctacaccgagcagtcccacgaggagctgggtgaagctggagaggccagccaaactgagaccgtttccgaggaaaacaagtccttgatctggaccctgttgaagcaggtgagacctggaatggacctgagcaaagttgttttgcctacattcatactggagccccggtcttttcttgataagctctctgattactattatcatgctgacttcctctcagaagcagcacttgaagagaacccttactttagactcaagaaggttgttaaatggtatctaagtggcttctacaagaaacccaagggcctcaagaaaccgtataatcctatacttggtgagactttccggtgtctgtggatacatccaaggacgaatagtaaaactttttacattgctgagcaagttagtcaccacccacccatttctgcgttttacgtaagcaacagaaaggacggcttttgtttgtccggctccatccttgcaaagagcaaattttacggcaattcactctcagccattctggagggcgaggcacggctgacctttttaaaccggggggaggattacgtcatgaccatgccgtatgctcactgtaaaggtatactatatgggacaatgaccctggaacttggaggaactgtgaacatcacttgccagaaaaccggatatagtgcaatactcgaatttaaactgaaacccttcctaggatctagcgactgcgtcaatcagattagcggaaagctcaagctaggcaaggaagtgcttgccaccctcgagggccactgggatagcgaagtgtttatcacagacaaaaaaacagacaattctgaggtgttttggaatccgactcccgacataaaacagtggaggcttatcagacatactgtgaaatttgaggaacagggcgattttgaaagcgagaaactttggcagcgcgtgacaagagcaattaacgcaaaagaccagaccgaagcaacccaggagaagtacgtgctggaagaggcacagcgacaggccgctcgggataggaaaacaaaaaatgagaagaagaagtag

SEQ ID NO: 206100 - DNA, 2625 bp, Artificial Sequence
  derived and/or modified sequence
atggagggcggcctggccgacggcgagcccgaccggaccagcgccaatagcgacgagtctcagctgctgacacctggtaagatgtcgcagagacaagggaaagaagcttatcctacgccaacaaaagacctgcaccaaccaagtcttagccccgccagcccccactcccagggattcgaacggggtaaggaagatatatctcagaataaagatgagtctagcttgtccatgagcaagtccaaaagcgaatctaagttatataacgggtccgagaaggatagttcgaccagcagcaagttaaccaagaaagaatcgcttaaagttcagaagaagaattacagagaggaaaaaaagcgggccacgaaagaacttctgtctacaatcacggacccgtctgtaatcgtgatggccgactggctcaagatccgtgggactctgaagagctggacaaagctttggtgcgttctgaagccaggagtgctcctcatatacaaaacgcagaagaatgggcagtgggtcggaacagtgctcctcaacgcttgcgaaatcatagaacggccaagtaagaaagacgggttttgcttcaaattgtttcaccccctggagcaatccatatgggccgtgaagggccctaagggggaagcagtgggatccattacacagccactcccttcatcctaccttatcatccgcgccacttcagagagcgacgggcgctgttggatggatgctcttgagcttgcactgaaatgcagcagcttgttgaagcgcacgatgattagggagggcaaggaacatgacttaagtgtgagtagtgacagtacccacgtaaccttctatggactgttgcgagccaacaacctacacagtggagataactttcagcttaatgactctgaaattgagagacagcatttcaaggatcaggatatgtacagtgacaaatccgataaggagaacgaccaggaacatgacgagagcgacaatgaagtgatgggaaagagtgaggagtccgacactgacacaagtgagcggcaagatgactcctacatcgagcctgaaccggttgagcccttaaaggaaactacgtatacggagcagtcccacgaggagctgggggaagcgggtgaggcctcccagacagaaacagtgagtgaggaaaacaagagcttaatctggacattgctaaagcaggttaggcctggaatggatctgtcaaaagttgtcttgccgaccttcattcttgaaccacgatcattcctggataaactgtccgactactattaccatgccgatttcctgtctgaagctgcactggaggagaacccatatttccgtctgaagaaggtcgttaagtggtatttgtccggcttttataaaaagcctaagggcctgaaaaaaccctacaacccaattctgggggagaccttcaggtgcctatggatccacccccggacaaactccaaaactttttatatcgccgaacaggtctcacaccatcctcccatatctgctttttatgtgtccaacaggaaagatggattttgcctatccggaagcattctggccaagtctaagttctacgggaacagtctgagcgctattttagagggggaagcacggctcaccttcctgaatagaggggaggactatgtcatgacaatgccctacgcgcactgtaaaggtatcctctacgggacaatgacactcgagctcggcggtaccgttaatatcacttgccagaagactgggtactcagccatcctggagtttaaactgaagccgtttttgggctccagtgattgcgtgaaccagatctcaggtaaactgaaactcggcaaggaagtattagcaactcttgaaggccattgggattcggaggtcttcatcacagacaaaaagactgataactctgaagtgttctggaaccctacacctgacattaaacagtggaggcttatcaggcacacggtgaagtttgaagagcagggggacttcgagagcgagaagctgtggcagagggtcacgagggctataaatgctaaagaccaaacagaggctacccaggagaagtacgtactggaggaagcgcagcgccaggcagcaagagaccggaagacgaaaaacgaggagtggtcctgcaagctctttgaactcgatccactgactggcgagtggcactataagttcgcagacaccaggccgtgggaccccctgaatgacatgattcagtttgaaaaggatggtgtgatccagacaaaggtcaagcaccggaccccaatggtgtccgtacctaagatgaaacacaagcccactaggcagcagaaaaaggtggccaagggctactcctcaccagagcctgatatccaagactccagtggctccgaggcacagagcgtgaaacctagtacccgaagaaaaaaggggatcgagcttggagacatccagagctcaatcgaaagtatcaaacagacacaggaggagattaagcgcaacatcatggcattacgcaaccacctggttagcagcactcccgccaccgactactttctgcagcaaaaagattacttcattatatttcttcttatactgctacaggtcatcattaactttatgttcaagtag

SEQ ID NO: 206101 - DNA, 177 bp, Artificial Sequence
  derived and/or modified sequence
atggagggcggcctggccgacggcgagcccgaccggaccagcctgttgggagacagcaaagatgtgcttgggccgagcactgttgttgccaattctgacgaaagccaattgctgactccagggaagatgtcccagagacaggggaaggaagcttacccgactcctacaaaagattag

SEQ ID NO: 206102 - DNA, 7239 bp, Artificial Sequence
  derived and/or modified sequence
cactagaatgtgaaggatcttcgcggttctgggtgcccagaaaggcggcgacgcggcggatgacaacattaggccgcgacgcgctcctggccaggcggcggctgtagtgttagctttggacgccgcagtagccgctgccggtagcaagccgactgagggaaggtgggggtccgcccgggctggtggacctcggggccgaaagttcccgccccgctcgggggctgagccggcagtgcctccgcggccgctgggcagcgcccttcgtccaggctcgcgccccagctgccgccgacgacagcggccgagagaagttggggtctgactagacgcttacggggcctcggaccccggcgccgcggcgacctcggaggaaccggctccttgcgtcccgcctccctgggagctccgcacgggatttgcagatttacagaatggctgcacattaatggaaagagaagcataaacctatcttctttcattatggagggaggtttggcagatggagaacctgatcgaacttcgcttcttggtgatagcaaagatgtccttgggccatcaactgttgtagcaaacagtgacgaatctcagcttctgacaccaggaaagatgagtcagcgccaaggaaaagaagcttatccaacgccaaccaaagatttgcatcagccatctcttagtccagcaagtcctcatagccagggttttgaaagagggaaggaagatatttctcaaaataaagatgaatcttcactttctatgtcaaagagcaagtctgaatctaaactttataatggctcagagaaggacagttcaacttcaagcaaactcacaaaaaaagaatctcttaaggtacaaaagaaaaattaccgagaagaaaagaaaagagccacaaaggagctgctcagtacaatcacagatccttctgttattgttatggctgattggttaaagattcgtggtactctaaagagctggaccaagttatggtgtgtgttgaaacctggggtgctactgatctataaaacccaaaaaaatggtcagtgggtaggaacagttcttctgaatgcctgtgaaatcattgaacgtccatcaaaaaaggatggcttttgtttcaaacttttccatcctttggagcaatctatttgggcagtgaagggtccaaaaggtgaagcggttggatccattactcaacccttacctagcagttatttgatcatccgagctacttcagagtcagatggaaggtgctggatggatgctttggagttggctttgaaatgttctagtcttcttaaacgtacaatgatcagagaaggaaaggaacatgacctgagcgtttcatcagatagcacacatgtgactttctatggcttactacgtgctaacaatctccacagtggtgataacttccagttaaatgatagtgaaattgaacgacaacattttaaggaccaagatatgtattctgataaatctgataaagaaaatgatcaagaacatgatgagtctgataatgaggtgatggggaaaagtgaagaaagtgacacagatacatcagaaagacaagatgactcatatatcgaacctgagcctgttgagcctttaaaggagactacctacactgaacagagccatgaagaacttggagaggcaggtgaggcttctcaaacagaaactgtatctgaagaaaacaaaagccttatctggacactattgaaacaagtccgtcctggcatggacctatccaaggtggttctgcctacatttattttggaaccccgttctttcctggataaactttcagattactactatcatgcagatttcctatctgaggcagctcttgaagaaaatccttatttccgtttgaagaaagtagtgaaatggtatttgtcaggattctataaaaagccaaagggactgaagaaaccttataatcctatacttggcgagactttccgttgtttatggattcatcccagaacaaacagcaaaactttttatattgctgaacaggtgtcccatcatccaccaatatctgccttttatgttagtaatcgaaaagatggattttgccttagcggtagtatcctggctaagtctaagttttatggaaactcattatctgcaatattagagggagaagcacggttaactttcttgaatagaggtgaagattatgtaatgacaatgccatacgctcattgtaaaggaattctttatggtacaatgacactggagcttggtggaacagtcaatattacatgtcaaaaaactggatacagtgcaatacttgaatttaaactaaagccattcctagggagtagtgactgtgttaatcaaatatcagggaaacttaaactgggaaaagaagtcctagctactttggaaggtcattgggatagtgaagtttttattactgataaaaagactgataattcagaggttttctggaatccaacacctgacattaagcaatggagattaataaggcacactgtaaaatttgaagaacagggagattttgaatcagagaaactctggcaacgggtaactcgagccataaatgccaaagaccaaactgaagctacccaagagaagtatgttttggaagaagctcaaagacaagctgccagggatcggaaaacaaaaaatgaagagtggtcttgcaaattatttgaacttgatccactcacaggagaatggcattacaagtttgcagatacccgaccatgggacccacttaatgatatgatacagtttgaaaaagatggtgttattcagaccaaagtgaaacatcgtactccaatggttagcgtccccaaaatgaaacataagccaaccaggcaacagaagaaagtagcaaaaggctattcctccccagaacctgacattcaagactcctctggaagtgaagctcaatcagtaaaaccaagtacaagaagaaagaaaggaatagaactgggagacattcagagttccatcgaatctataaaacaaacacaggaagaaattaaaagaaatattatggctcttcgaaatcatttagtttcaagcacaccggccacggattattttctgcaacaaaaagactacttcatcattttcctcctgattttgcttcaagtcataataaacttcatgttcaagtagaagttctctaccattgaatcagtgaactagaaagatctgatttggcctgggaccagtgttcaagttggtttggtctttattaaaaatcacaatattccgaaaacaaaaaaacctaggagataaatgtagaggtattgacttttcgtatcttttatcttcacactgaaacaagagctatcctatttgattattaaagtgagctatgtgttaagtgccaggacatttctagcttttgtgagaatgtgtctacatatgagtataataaacccacatgtatacacaattgtctcttatgtactcctacctgacagtagtctttgtattctatagtatgttctgagatataatgttaacattgttcataacaaaaaatgctatcaatcttataaatatatgtaatctattttcttcataaaacaggcacaaaagttttatcagtaaggaattacagattgagaaatgatggaataatagacataattaattcaatacactactgttaaaatcatttgcaaagcactcagctcaattatcttcttagaaagaaagaaaaagtatgaatggtcaaaatgaatacatcgagagagataaatggcaaattgcttttttaaaagtttacataagttttttttaacccctagaatttaatatttgtagatgcaggtaaatatatatacttacgtgtatatcagtataaaaacactggtgtgcaattaattggattgattataataccaccttaagcacttgctgaaaaaagtgtggtcaaaattgattgctgtccttttgtcttatttttgtttttcttaagtcagctggttcataacataggccaaattctagagatgtttatagagcatttgaagtgctgataatttatgttttttcattatgaaaacttattttagctttagactccagtgtgttcagtgaataagtagaatataaaaaaatataaccagtattttacttcaaaagccaaaaagaggcaataagaaaagacactttgtggtggcctttatgtgtgcattaaaattggtttctgtaaaacgtgtaataagttgagtatctacgaagagtatcaagttctgaagtttaatttttttattatcctcctctcttcttagtaacttctttctgtggcaaaaccacaattctttaagattcctattgttcaggctaaggcaaatttttttgtttgtttcttcagtttaatattttgattttgtgtttttacgtaaatatttatattccttgaaagcaatttttgccaaggtagttcagtttaggaatatgttgttctaaaatatgtcttagaatcctgaaagcatagattttgaaatgtttttttaatgaaaatgaaggtcagagagaataattgccctgaccacatttgcctttcagtaggaggaggctgtgaaatagtaaaattataatcgtttatgccatgataaatacaagattggtaaataaatacattgattggtaaattatgagaatcaaaatgataaaaagagcctgcttttttccctaaccaatatagctatcttaagtatccttaggtttctgtgaagaaccatttcccatgttttcttggcaaaataatgctgtattccatatgtacatgtgaaatgatgttttaaattgataaaagcttaaataagatctacctatacccagtattttcatgatattagaacaaatgggtttttggttatattttatatttgtcaatataatttttgtattcacattctgttacactctgcctattcattgatatatgatattctgtaaatattgtacaatttgatcttttttatggtttaaattagttaattacatacaaattgattggcttatcacaaaaatcatttcatcagtaaaccttgttaacattttgtactggtgacccacctcttaggactttggtcttatccacgtgtatgttgttttcatttggtccaaataatattttatttgtatgggtatcttctaagactaaataggtagttgtgttctttatttttaaaatttctttttagagcaaatgttatgggttcttacccaaagagtcaaaaactatttcttaagaaagagcagagttattcatgactgttctttatacactaaaagcatgcatctaatctaatagtcctcttattatgcttttagttgtatgagtctctttctatgaactgaacacaaaactcaggaattggtggcttaattttagatcagtgcttgtactaggcttagttatatgaatctttataacacataattactaactttgtagccatatatgtaattgactttgaatgttatttacctgaaattaatcttccttcacacatggaccgtaaacggttcccagttgtctgagagcctcatgagggtttctaggatttatgaccttatgaccagtttttttcatttaccaagattttattttcctacatgaaaatttaattgagtaataattattcacatgtgcattttctttttagctgttaaatgtactatgccatcatccaccatttagtaaaatgtagctggcccaggacatgtaaaaaaaaaaaaaaaacaacaacaataaatagggcatgtgaaatgttaagttacagcaatagatattttatttgtatttcatgttagtacttttttgttttatatcacttataaaggtacagtgtactctttgtcacagctcagttggtaaccgcattccattgaaaagttggccttgtaaaatacaactctcatttaatattcatgcttttgtgcctttaagaaaatattttttgtcattttttgtgttacagaactataatgtgattcaaggtgtttataggcttgtcataaaagggtcatttctgtgtgttactttctttttatatagctatagtatatttaaacaataatactatcttttataggggtttgtctatttacctattctttactcagacattgatgtagacttgtcagattattctgagtattgttaacagtgccttttcgatggaatcacactttttggctgtcaccttgtgccatatacacacaaaattttgtggaaggcagttttaactttctgaagaatatctgtcaaaatttaagaaaacaaatgtataaaattccattttttccagtgtttagcatttctagtaagcagtgaggttgtttgacatacagtgatgatggcattattgataagccatacatgagactgcagattatattgaatcatattaaatgtacagaaataaaatattagatttatatcaaattttccaatttgaaccagtggggaaaatcccacagaaatcagtaagtttacatttcaatttctatcttatttgactaagtggaaagagattctttaaaatgtataacctgccattatgtaatttggtttcattttattctacctgttgtgtgagtttagtatatttaatttactttttgttactctttacatactgtttatttttgttagtttttaattgaagatggactgttgaaattgtataggaccagtgtcttattaatatgattaatatatttagaagagccacgtgaaacccatgacaaaatgaatgtgaatattctttctaaaaatttagaaaatgttatctttttgcatttattatgtaaaactgttttacagtatcaaaatttttcacttaaagaaaaaaaatgccatgaaacatttgaactgatgagccacagaacttcagttgaaatttttttcactttttagcatgctaaatatacatctgagtttaaatgttctgtttaatggccattcataaattcaagcactaccactggtcagttttgtgtgatagaataaaaatatgttacctgcagtgtaagtacagcacactgtcaaattcttttccttaaggtgcacagtaaatgtacagatagttataggccactgttttgtaatgtagtacatttctaatctattattcctaacctattataactgtttgcagaaagaaaagaatttttctaataatctgtaaaattatgctaacttctacaagtaggcttctaaataaaatttttaaaaagagc

SEQ ID NO: 206103 - DNA, 7047 bp, Artificial Sequence
  derived and/or modified sequence
cgccccagctgccgccgacgacagcggccgagagaagttggggtctgactagacgcttacggggcctcggaccccggcgccgcggcgacctcggaggaaccggctccttgcgtcccgcctccctgggagctccgcacggcaatctccattggtgctactgcgtttaaagaactgtggctaacctccaagagactgaagctggtaattaaacattcctatccttgcctgaagcagtcttttgcaggaacatttgaggatttgcagatttacagaatggctgcacattaatggaaagagaagcataaacctatcttctttcattatggagggaggtttggcagatggagaacctgatcgaacttcgctgttgtagcaaacagtgacgaatctcagcttctgacaccaggaaagatgagtcagcgccaaggaaaagaagcttatccaacgccaaccaaagatttgcatcagccatctcttagtccagcaagtcctcatagccagggttttgaaagagggaaggaagatatttctcaaaataaagatgaatcttcactttctatgtcaaagagcaagtctgaatctaaactttataatggctcagagaaggacagttcaacttcaagcaaactcacaaaaaaagaatctcttaaggtacaaaagaaaaattaccgagaagaaaagaaaagagccacaaaggagctgctcagtacaatcacagatccttctgttattgttatggctgattggttaaagattcgtggtactctaaagagctggaccaagttatggtgtgtgttgaaacctggggtgctactgatctataaaacccaaaaaaatggtcagtgggtaggaacagttcttctgaatgcctgtgaaatcattgaacgtccatcaaaaaaggatggcttttgtttcaaacttttccatcctttggagcaatctatttgggcagtgaagggtccaaaaggtgaagcggttggatccattactcaacccttacctagcagttatttgatcatccgagctacttcagagtcagatggaaggtgctggatggatgctttggagttggctttgaaatgttctagtcttcttaaacgtacaatgatcagagaaggaaaggaacatgacctgagcgtttcatcagatagcacacatgtgactttctatggcttactacgtgctaacaatctccacagtggtgataacttccagttaaatgatagtgaaattgaacgacaacattttaaggaccaagatatgtattctgataaatctgataaagaaaatgatcaagaacatgatgagtctgataatgaggtgatggggaaaagtgaagaaagtgacacagatacatcagaaagacaagatgactcatatatcgaacctgagcctgttgagcctttaaaggagactacctacactgaacagagccatgaagaacttggagaggcaggtgaggcttctcaaacagaaactgtatctgaagaaaacaaaagccttatctggacactattgaaacaagtccgtcctggcatggacctatccaaggtggttctgcctacatttattttggaaccccgttctttcctggataaactttcagattactactatcatgcagatttcctatctgaggcagctcttgaagaaaatccttatttccgtttgaagaaagtagtgaaatggtatttgtcaggattctataaaaagccaaagggactgaagaaaccttataatcctatacttggcgagactttccgttgtttatggattcatcccagaacaaacagcaaaactttttatattgctgaacaggtgtcccatcatccaccaatatctgccttttatgttagtaatcgaaaagatggattttgccttagcggtagtatcctggctaagtctaagttttatggaaactcattatctgcaatattagagggagaagcacggttaactttcttgaatagaggtgaagattatgtaatgacaatgccatacgctcattgtaaaggaattctttatggtacaatgacactggagcttggtggaacagtcaatattacatgtcaaaaaactggatacagtgcaatacttgaatttaaactaaagccattcctagggagtagtgactgtgttaatcaaatatcagggaaacttaaactgggaaaagaagtcctagctactttggaaggtcattgggatagtgaagtttttattactgataaaaagactgataattcagaggttttctggaatccaacacctgacattaagcaatggagattaataaggcacactgtaaaatttgaagaacagggagattttgaatcagagaaactctggcaacgggtaactcgagccataaatgccaaagaccaaactgaagctacccaagagaagtatgttttggaagaagctcaaagacaagctgccagggatcggaaaacaaaaaatgaagagtggtcttgcaaattatttgaacttgatccactcacaggagaatggcattacaagtttgcagatacccgaccatgggacccacttaatgatatgatacagtttgaaaaagatggtgttattcagaccaaagtgaaacatcgtactccaatggttagcgtccccaaaatgaaacataagccaaccaggcaacagaagaaagtagcaaaaggctattcctccccagaacctgacattcaagactcctctggaagtgaagctcaatcagtaaaaccaagtacaagaagaaagaaaggaatagaactgggagacattcagagttccatcgaatctataaaacaaacacaggaagaaattaaaagaaatattatggctcttcgaaatcatttagtttcaagcacaccggccacggattattttctgcaacaaaaagactacttcatcattttcctcctgattttgcttcaagtcataataaacttcatgttcaagtagaagttctctaccattgaatcagtgaactagaaagatctgatttggcctgggaccagtgttcaagttggtttggtctttattaaaaatcacaatattccgaaaacaaaaaaacctaggagataaatgtagaggtattgacttttcgtatcttttatcttcacactgaaacaagagctatcctatttgattattaaagtgagctatgtgttaagtgccaggacatttctagcttttgtgagaatgtgtctacatatgagtataataaacccacatgtatacacaattgtctcttatgtactcctacctgacagtagtctttgtattctatagtatgttctgagatataatgttaacattgttcataacaaaaaatgctatcaatcttataaatatatgtaatctattttcttcataaaacaggcacaaaagttttatcagtaaggaattacagattgagaaatgatggaataatagacataattaattcaatacactactgttaaaatcatttgcaaagcactcagctcaattatcttcttagaaagaaagaaaaagtatgaatggtcaaaatgaatacatcgagagagataaatggcaaattgcttttttaaaagtttacataagttttttttaacccctagaatttaatatttgtagatgcaggtaaatatatatacttacgtgtatatcagtataaaaacactggtgtgcaattaattggattgattataataccaccttaagcacttgctgaaaaaagtgtggtcaaaattgattgctgtccttttgtcttatttttgtttttcttaagtcagctggttcataacataggccaaattctagagatgtttatagagcatttgaagtgctgataatttatgttttttcattatgaaaacttattttagctttagactccagtgtgttcagtgaataagtagaatataaaaaaatataaccagtattttacttcaaaagccaaaaagaggcaataagaaaagacactttgtggtggcctttatgtgtgcattaaaattggtttctgtaaaacgtgtaataagttgagtatctacgaagagtatcaagttctgaagtttaatttttttattatcctcctctcttcttagtaacttctttctgtggcaaaaccacaattctttaagattcctattgttcaggctaaggcaaatttttttgtttgtttcttcagtttaatattttgattttgtgtttttacgtaaatatttatattccttgaaagcaatttttgccaaggtagttcagtttaggaatatgttgttctaaaatatgtcttagaatcctgaaagcatagattttgaaatgtttttttaatgaaaatgaaggtcagagagaataattgccctgaccacatttgcctttcagtaggaggaggctgtgaaatagtaaaattataatcgtttatgccatgataaatacaagattggtaaataaatacattgattggtaaattatgagaatcaaaatgataaaaagagcctgcttttttccctaaccaatatagctatcttaagtatccttaggtttctgtgaagaaccatttcccatgttttcttggcaaaataatgctgtattccatatgtacatgtgaaatgatgttttaaattgataaaagcttaaataagatctacctatacccagtattttcatgatattagaacaaatgggtttttggttatattttatatttgtcaatataatttttgtattcacattctgttacactctgcctattcattgatatatgatattctgtaaatattgtacaatttgatcttttttatggtttaaattagttaattacatacaaattgattggcttatcacaaaaatcatttcatcagtaaaccttgttaacattttgtactggtgacccacctcttaggactttggtcttatccacgtgtatgttgttttcatttggtccaaataatattttatttgtatgggtatcttctaagactaaataggtagttgtgttctttatttttaaaatttctttttagagcaaatgttatgggttcttacccaaagagtcaaaaactatttcttaagaaagagcagagttattcatgactgttctttatacactaaaagcatgcatctaatctaatagtcctcttattatgcttttagttgtatgagtctctttctatgaactgaacacaaaactcaggaattggtggcttaattttagatcagtgcttgtactaggcttagttatatgaatctttataacacataattactaactttgtagccatatatgtaattgactttgaatgttatttacctgaaattaatcttccttcacacatggaccgtaaacggttcccagttgtctgagagcctcatgagggtttctaggatttatgaccttatgaccagtttttttcatttaccaagattttattttcctacatgaaaatttaattgagtaataattattcacatgtgcattttctttttagctgttaaatgtactatgccatcatccaccatttagtaaaatgtagctggcccaggacatgtaaaaaaaaaaaaaaaacaacaacaataaatagggcatgtgaaatgttaagttacagcaatagatattttatttgtatttcatgttagtacttttttgttttatatcacttataaaggtacagtgtactctttgtcacagctcagttggtaaccgcattccattgaaaagttggccttgtaaaatacaactctcatttaatattcatgcttttgtgcctttaagaaaatattttttgtcattttttgtgttacagaactataatgtgattcaaggtgtttataggcttgtcataaaagggtcatttctgtgtgttactttctttttatatagctatagtatatttaaacaataatactatcttttataggggtttgtctatttacctattctttactcagacattgatgtagacttgtcagattattctgagtattgttaacagtgccttttcgatggaatcacactttttggctgtcaccttgtgccatatacacacaaaattttgtggaaggcagttttaactttctgaagaatatctgtcaaaatttaagaaaacaaatgtataaaattccattttttccagtgtttagcatttctagtaagcagtgaggttgtttgacatacagtgatgatggcattattgataagccatacatgagactgcagattatattgaatcatattaaatgtacagaaataaaatattagatttatatcaaattttccaatttgaaccagtggggaaaatcccacagaaatcagtaagtttacatttcaatttctatcttatttgactaagtggaaagagattctttaaaatgtataacctgccattatgtaatttggtttcattttattctacctgttgtgtgagtttagtatatttaatttactttttgttactctttacatactgtttatttttgttagtttttaattgaagatggactgttgaaattgtataggaccagtgtcttattaatatgattaatatatttagaagagccacgtgaaacccatgacaaaatgaatgtgaatattctttctaaaaatttagaaaatgttatctttttgcatttattatgtaaaactgttttacagtatcaaaatttttcacttaaagaaaaaaaatgccatgaaacatttgaactgatgagccacagaacttcagttgaaatttttttcactttttagcatgctaaatatacatctgagtttaaatgttctgtttaatggccattcataaattcaagcactaccactggtcagttttgtgtgatagaataaaaatatgttacctgcagtgtaagtacagcacactgtcaaattcttttccttaaggtgcacagtaaatgtacagatagttataggccactgttttgtaatgtagtacatttctaatctattattcctaacctattataactgtttgcagaaagaaaagaatttttctaataatctgtaaaattatgctaacttctacaagtaggcttctaaataaaatttttaaaaagagcaaa

SEQ ID NO: 206104 - DNA, 3157 bp, Artificial Sequence
  derived and/or modified sequence
cactagaatgtgaaggatcttcgcggttctgggtgcccagaaaggcggcgacgcggcggatgacaacattaggccgcgacgcgctcctggccaggcggcggctgtagtgttagctttggacgccgcagtagccgctgccggtagcaagccgactgagggaaggtgggggtccgcccgggctggtggacctcggggccgaaagttcccgccccgctcgggggctgagccggcagtgcctccgcggccgctgggcagcgcccttcgtccaggctcgcgccccagctgccgccgacgacagcggccgagagaagttggggtctgactagacgcttacggggcctcggaccccggcgccgcggcgacctcggaggaaccggctccttgcgtcccgcctccctgggagctccgcacgggatttgcagatttacagaatggctgcacattaatggaaagagaagcataaacctatcttctttcattatggagggaggtttggcagatggagaacctgatcgaacttcgcaaacagtgacgaatctcagcttctgacaccaggaaagatgagtcagcgccaaggaaaagaagcttatccaacgccaaccaaagatttgcatcagccatctcttagtccagcaagtcctcatagccagggttttgaaagagggaaggaagatatttctcaaaataaagatgaatcttcactttctatgtcaaagagcaagtctgaatctaaactttataatggctcagagaaggacagttcaacttcaagcaaactcacaaaaaaagaatctcttaaggtacaaaagaaaaattaccgagaagaaaagaaaagagccacaaaggagctgctcagtacaatcacagatccttctgttattgttatggctgattggttaaagattcgtggtactctaaagagctggaccaagttatggtgtgtgttgaaacctggggtgctactgatctataaaacccaaaaaaatggtcagtgggtaggaacagttcttctgaatgcctgtgaaatcattgaacgtccatcaaaaaaggatggcttttgtttcaaacttttccatcctttggagcaatctatttgggcagtgaagggtccaaaaggtgaagcggttggatccattactcaacccttacctagcagttatttgatcatccgagctacttcagagtcagatggaaggtgctggatggatgctttggagttggctttgaaatgttctagtcttcttaaacgtacaatgatcagagaaggaaaggaacatgacctgagcgtttcatcagatagcacacatgtgactttctatggcttactacgtgctaacaatctccacagtggtgataacttccagttaaatgatagtgaaattgaacgacaacattttaaggaccaagatatgtattctgataaatctgataaagaaaatgatcaagaacatgatgagtctgataatgaggtgatggggaaaagtgaagaaagtgacacagatacatcagaaagacaagatgactcatatatcgaacctgagcctgttgagcctttaaaggagactacctacactgaacagagccatgaagaacttggagaggcaggtgaggcttctcaaacagaaactgtatctgaagaaaacaaaagccttatctggacactattgaaacaagtccgtcctggcatggacctatccaaggtggttctgcctacatttattttggaaccccgttctttcctggataaactttcagattactactatcatgcagatttcctatctgaggcagctcttgaagaaaatccttatttccgtttgaagaaagtagtgaaatggtatttgtcaggattctataaaaagccaaagggactgaagaaaccttataatcctatacttggcgagactttccgttgtttatggattcatcccagaacaaacagcaaaactttttatattgctgaacaggtgtcccatcatccaccaatatctgccttttatgttagtaatcgaaaagatggattttgccttagcggtagtatcctggctaagtctaagttttatggaaactcattatctgcaatattagagggagaagcacggttaactttcttgaatagaggtgaagattatgtaatgacaatgccatacgctcattgtaaaggaattctttatggtacaatgacactggagcttggtggaacagtcaatattacatgtcaaaaaactggatacagtgcaatacttgaatttaaactaaagccattcctagggagtagtgactgtgttaatcaaatatcagggaaacttaaactgggaaaagaagtcctagctactttggaaggtcattgggatagtgaagtttttattactgataaaaagactgataattcagaggttttctggaatccaacacctgacattaagcaatggagattaataaggcacactgtaaaatttgaagaacagggagattttgaatcagagaaactctggcaacgggtaactcgagccataaatgccaaagaccaaactgaagctacccaagagaagtatgttttggaagaagctcaaagacaagctgccagggatcggaaaacaaaaaatgaagagtggtcttgcaaattatttgaacttgatccactcacaggagaatggcattacaagtttgcagatacccgaccatgggacccacttaatgatatgatacagtttgaaaaagatggtgttattcagaccaaagtgaaacatcgtactccaatggttagcgtccccaaaatgaaacataagccaaccaggcaacagaagaaagtagcaaaaggctattcctccccagaacctgacattcaagactcctctggaagtgaagctcaatcagtaaaaccaagtacaagaagaaagaaaggaatagaactgggagacattcagagttccatcgaatctataaaacaaacacaggaagaaattaaaagaaatattatggctcttcgaaatcatttagtttcaagcacaccggccacggattattttctgcaacaaaaagactacttcatcattttcctcctgattttgcttcaagtcataataaacttcatgttcaagtagaagttctctaccattgaatcagtgaactagaaagatctgatttggcctgggac

SEQ ID NO: 206105 - DNA, 2664 bp, Artificial Sequence
  derived and/or modified sequence
cactagaatgtgaaggatcttcgcggttctgggtgcccagaaaggcggcgacgcggcggatgacaacattaggccgcgacgcgctcctggccaggcggcggctgtagtgttagctttggacgccgcagtagccgctgccggtagcaagccgactgagggaaggtgggggtccgcccgggctggtggacctcggggccgaaagttcccgccccgctcgggggctgagccggcagtgcctccgcggccgctgggcagcgcccttcgtccaggctcgcgccccagctgccgccgacgacagcggccgagagaagttggggtctgactagacgcttacggggcctcggaccccggcgccgcggcgacctcggaggaaccggctccttgcgtcccgcctccctgggagctccgcacgggatttgcagatttacagaatggctgcacattaatggaaagagaagcataaacctatcttctttcattatggagggaggtttggcagatggagaacctgatcgaacttcgcttcttggtgatagcaaagatgtccttgggccatcaactgttgtagcaaacagtgacgaatctcagcttctgacaccaggaaagatgagtcagcgccaaggaaaagaagcttatccaacgccaaccaaagatttgcatcagccatctcttagtccagcaagtcctcatagccagggttttgaaagagggaaggaagatatttctcaaaataaagatgaatcttcactttctatgtcaaagagcaagtctgaatctaaactttataatggctcagagaaggacagttcaacttcaagcaaactcacaaaaaaagaatctcttaaggtacaaaagaaaaattaccgagaagaaaagaaaagagccacaaaggagctgctcagtacaatcacagatccttctgttattgttatggctgattggttaaagattcgtggtactctaaagagctggaccaagttatggtgtgtgttgaaacctggggtgctactgatctataaaacccaaaaaaatggtcagtgggtaggaacagttcttctgaatgcctgtgaaatcattgaacgtccatcaaaaaaggatggcttttgtttcaaacttttccatcctttggagcaatctatttgggcagtgaagggtccaaaaggtgaagcggttggatccattactcaacccttacctagcagttatttgatcatccgagctacttcagagtcagatggaaggtgctggatggatgctttggagttggctttgaaatgttctagtcttcttaaacgtacaatgatcagagaaggaaaggaacatgacctgagcgtttcatcagatagcacacatgtgactttctatggcttactacgtgctaacaatctccacagtggtgataacttccagttaaatgatagtgaaattgaacgacaacattttaaggaccaagatatgtattctgataaatctgataaagaaaatgatcaagaacatgatgagtctgataatgaggtgatggggaaaagtgaagaaagtgacacagatacatcagaaagacaagatgactcatatatcgaacctgagcctgttgagcctttaaaggagactacctacactgaacagagccatgaagaacttggagaggcaggtgaggcttctcaaacagaaactgtatctgaagaaaacaaaagccttatctggacactattgaaacaagtccgtcctggcatggacctatccaaggtggttctgcctacatttattttggaaccccgttctttcctggataaactttcagattactactatcatgcagatttcctatctgaggcagctcttgaagaaaatccttatttccgtttgaagaaagtagtgaaatggtatttgtcaggattctataaaaagccaaagggactgaagaaaccttataatcctatacttggcgagactttccgttgtttatggattcatcccagaacaaacagcaaaactttttatattgctgaacaggtgtcccatcatccaccaatatctgccttttatgttagtaatcgaaaagatggattttgccttagcggtagtatcctggctaagtctaagttttatggaaactcattatctgcaatattagagggagaagcacggttaactttcttgaatagaggtgaagattatgtaatgacaatgccatacgctcattgtaaaggaattctttatggtacaatgacactggagcttggtggaacagtcaatattacatgtcaaaaaactggatacagtgcaatacttgaatttaaactaaagccattcctagggagtagtgactgtgttaatcaaatatcagggaaacttaaactgggaaaagaagtcctagctactttggaaggtcattgggatagtgaagtttttattactgataaaaagactgataattcagaggttttctggaatccaacacctgacattaagcaatggagattaataaggcacactgtaaaatttgaagaacagggagattttgaatcagagaaactctggcaacgggtaactcgagccataaatgccaaagaccaaactgaagctacccaagagaagtatgttttggaagaagctcaaagacaagctgccagggatcggaaaacaaaaaatgaaaagaagaaa

SEQ ID NO: 206106 - DNA, 7185 bp, Artificial Sequence
  derived and/or modified sequence
cactagaatgtgaaggatcttcgcggttctgggtgcccagaaaggcggcgacgcggcggatgacaacattaggccgcgacgcgctcctggccaggcggcggctgtagtgttagctttggacgccgcagtagccgctgccggtagcaagccgactgagggaaggtgggggtccgcccgggctggtggacctcggggccgaaagttcccgccccgctcgggggctgagccggcagtgcctccgcggccgctgggcagcgcccttcgtccaggctcgcgccccagctgccgccgacgacagcggccgagagaagttggggtctgactagacgcttacggggcctcggaccccggcgccgcggcgacctcggaggaaccggctccttgcgtcccgcctccctgggagctccgcacgggatttgcagatttacagaatggctgcacattaatggaaagagaagcataaacctatcttctttcattatggagggaggtttggcagatggagaacctgatcgaacttcggcaaacagtgacgaatctcagcttctgacaccaggaaagatgagtcagcgccaaggaaaagaagcttatccaacgccaaccaaagatttgcatcagccatctcttagtccagcaagtcctcatagccagggttttgaaagagggaaggaagatatttctcaaaataaagatgaatcttcactttctatgtcaaagagcaagtctgaatctaaactttataatggctcagagaaggacagttcaacttcaagcaaactcacaaaaaaagaatctcttaaggtacaaaagaaaaattaccgagaagaaaagaaaagagccacaaaggagctgctcagtacaatcacagatccttctgttattgttatggctgattggttaaagattcgtggtactctaaagagctggaccaagttatggtgtgtgttgaaacctggggtgctactgatctataaaacccaaaaaaatggtcagtgggtaggaacagttcttctgaatgcctgtgaaatcattgaacgtccatcaaaaaaggatggcttttgtttcaaacttttccatcctttggagcaatctatttgggcagtgaagggtccaaaaggtgaagcggttggatccattactcaacccttacctagcagttatttgatcatccgagctacttcagagtcagatggaaggtgctggatggatgctttggagttggctttgaaatgttctagtcttcttaaacgtacaatgatcagagaaggaaaggaacatgacctgagcgtttcatcagatagcacacatgtgactttctatggcttactacgtgctaacaatctccacagtggtgataacttccagttaaatgatagtgaaattgaacgacaacattttaaggaccaagatatgtattctgataaatctgataaagaaaatgatcaagaacatgatgagtctgataatgaggtgatggggaaaagtgaagaaagtgacacagatacatcagaaagacaagatgactcatatatcgaacctgagcctgttgagcctttaaaggagactacctacactgaacagagccatgaagaacttggagaggcaggtgaggcttctcaaacagaaactgtatctgaagaaaacaaaagccttatctggacactattgaaacaagtccgtcctggcatggacctatccaaggtggttctgcctacatttattttggaaccccgttctttcctggataaactttcagattactactatcatgcagatttcctatctgaggcagctcttgaagaaaatccttatttccgtttgaagaaagtagtgaaatggtatttgtcaggattctataaaaagccaaagggactgaagaaaccttataatcctatacttggcgagactttccgttgtttatggattcatcccagaacaaacagcaaaactttttatattgctgaacaggtgtcccatcatccaccaatatctgccttttatgttagtaatcgaaaagatggattttgccttagcggtagtatcctggctaagtctaagttttatggaaactcattatctgcaatattagagggagaagcacggttaactttcttgaatagaggtgaagattatgtaatgacaatgccatacgctcattgtaaaggaattctttatggtacaatgacactggagcttggtggaacagtcaatattacatgtcaaaaaactggatacagtgcaatacttgaatttaaactaaagccattcctagggagtagtgactgtgttaatcaaatatcagggaaacttaaactgggaaaagaagtcctagctactttggaaggtcattgggatagtgaagtttttattactgataaaaagactgataattcagaggttttctggaatccaacacctgacattaagcaatggagattaataaggcacactgtaaaatttgaagaacagggagattttgaatcagagaaactctggcaacgggtaactcgagccataaatgccaaagaccaaactgaagctacccaagagaagtatgttttggaagaagctcaaagacaagctgccagggatcggaaaacaaaaaatgaagagtggtcttgcaaattatttgaacttgatccactcacaggagaatggcattacaagtttgcagatacccgaccatgggacccacttaatgatatgatacagtttgaaaaagatggtgttattcagaccaaagtgaaacatcgtactccaatggttagcgtccccaaaatgaaacataagccaaccaggcaacagaagaaagtagcaaaaggctattcctccccagaacctgacattcaagactcctctggaagtgaagctcaatcagtaaaaccaagtacaagaagaaagaaaggaatagaactgggagacattcagagttccatcgaatctataaaacaaacacaggaagaaattaaaagaaatattatggctcttcgaaatcatttagtttcaagcacaccggccacggattattttctgcaacaaaaagactacttcatcattttcctcctgattttgcttcaagtcataataaacttcatgttcaagtagaagttctctaccattgaatcagtgaactagaaagatctgatttggcctgggaccagtgttcaagttggtttggtctttattaaaaatcacaatattccgaaaacaaaaaaacctaggagataaatgtagaggtattgacttttcgtatcttttatcttcacactgaaacaagagctatcctatttgattattaaagtgagctatgtgttaagtgccaggacatttctagcttttgtgagaatgtgtctacatatgagtataataaacccacatgtatacacaattgtctcttatgtactcctacctgacagtagtctttgtattctatagtatgttctgagatataatgttaacattgttcataacaaaaaatgctatcaatcttataaatatatgtaatctattttcttcataaaacaggcacaaaagttttatcagtaaggaattacagattgagaaatgatggaataatagacataattaattcaatacactactgttaaaatcatttgcaaagcactcagctcaattatcttcttagaaagaaagaaaaagtatgaatggtcaaaatgaatacatcgagagagataaatggcaaattgcttttttaaaagtttacataagttttttttaacccctagaatttaatatttgtagatgcaggtaaatatatatacttacgtgtatatcagtataaaaacactggtgtgcaattaattggattgattataataccaccttaagcacttgctgaaaaaagtgtggtcaaaattgattgctgtccttttgtcttatttttgtttttcttaagtcagctggttcataacataggccaaattctagagatgtttatagagcatttgaagtgctgataatttatgttttttcattatgaaaacttattttagctttagactccagtgtgttcagtgaataagtagaatataaaaaaatataaccagtattttacttcaaaagccaaaaagaggcaataagaaaagacactttgtggtggcctttatgtgtgcattaaaattggtttctgtaaaacgtgtaataagttgagtatctacgaagagtatcaagttctgaagtttaatttttttattatcctcctctcttcttagtaacttctttctgtggcaaaaccacaattctttaagattcctattgttcaggctaaggcaaatttttttgtttgtttcttcagtttaatattttgattttgtgtttttacgtaaatatttatattccttgaaagcaatttttgccaaggtagttcagtttaggaatatgttgttctaaaatatgtcttagaatcctgaaagcatagattttgaaatgtttttttaatgaaaatgaaggtcagagagaataattgccctgaccacatttgcctttcagtaggaggaggctgtgaaatagtaaaattataatcgtttatgccatgataaatacaagattggtaaataaatacattgattggtaaattatgagaatcaaaatgataaaaagagcctgcttttttccctaaccaatatagctatcttaagtatccttaggtttctgtgaagaaccatttcccatgttttcttggcaaaataatgctgtattccatatgtacatgtgaaatgatgttttaaattgataaaagcttaaataagatctacctatacccagtattttcatgatattagaacaaatgggtttttggttatattttatatttgtcaatataatttttgtattcacattctgttacactctgcctattcattgatatatgatattctgtaaatattgtacaatttgatcttttttatggtttaaattagttaattacatacaaattgattggcttatcacaaaaatcatttcatcagtaaaccttgttaacattttgtactggtgacccacctcttaggactttggtcttatccacgtgtatgttgttttcatttggtccaaataatattttatttgtatgggtatcttctaagactaaataggtagttgtgttctttatttttaaaatttctttttagagcaaatgttatgggttcttacccaaagagtcaaaaactatttcttaagaaagagcagagttattcatgactgttctttatacactaaaagcatgcatctaatctaatagtcctcttattatgcttttagttgtatgagtctctttctatgaactgaacacaaaactcaggaattggtggcttaattttagatcagtgcttgtactaggcttagttatatgaatctttataacacataattactaactttgtagccatatatgtaattgactttgaatgttatttacctgaaattaatcttccttcacacatggaccgtaaacggttcccagttgtctgagagcctcatgagggtttctaggatttatgaccttatgaccagtttttttcatttaccaagattttattttcctacatgaaaatttaattgagtaataattattcacatgtgcattttctttttagctgttaaatgtactatgccatcatccaccatttagtaaaatgtagctggcccaggacatgtaaaaaaaaaaaaaaaacaacaacaataaatagggcatgtgaaatgttaagttacagcaatagatattttatttgtatttcatgttagtacttttttgttttatatcacttataaaggtacagtgtactctttgtcacagctcagttggtaaccgcattccattgaaaagttggccttgtaaaatacaactctcatttaatattcatgcttttgtgcctttaagaaaatattttttgtcattttttgtgttacagaactataatgtgattcaaggtgtttataggcttgtcataaaagggtcatttctgtgtgttactttctttttatatagctatagtatatttaaacaataatactatcttttataggggtttgtctatttacctattctttactcagacattgatgtagacttgtcagattattctgagtattgttaacagtgccttttcgatggaatcacactttttggctgtcaccttgtgccatatacacacaaaattttgtggaaggcagttttaactttctgaagaatatctgtcaaaatttaagaaaacaaatgtataaaattccattttttccagtgtttagcatttctagtaagcagtgaggttgtttgacatacagtgatgatggcattattgataagccatacatgagactgcagattatattgaatcatattaaatgtacagaaataaaatattagatttatatcaaattttccaatttgaaccagtggggaaaatcccacagaaatcagtaagtttacatttcaatttctatcttatttgactaagtggaaagagattctttaaaatgtataacctgccattatgtaatttggtttcattttattctacctgttgtgtgagtttagtatatttaatttactttttgttactctttacatactgtttatttttgttagtttttaattgaagatggactgttgaaattgtataggaccagtgtcttattaatatgattaatatatttagaagagccacgtgaaacccatgacaaaatgaatgtgaatattctttctaaaaatttagaaaatgttatctttttgcatttattatgtaaaactgttttacagtatcaaaatttttcacttaaagaaaaaaaatgccatgaaacatttgaactgatgagccacagaacttcagttgaaatttttttcactttttagcatgctaaatatacatctgagtttaaatgttctgtttaatggccattcataaattcaagcactaccactggtcagttttgtgtgatagaataaaaatatgttacctgcagtgtaagtacagcacactgtcaaattcttttccttaaggtgcacagtaaatgtacagatagttataggccactgttttgtaatgtagtacatttctaatctattattcctaacctattataactgtttgcagaaagaaaagaatttttctaataatctgtaaaattatgctaacttctacaagtaggcttctaaataaaattttt

SEQ ID NO: 206107 - DNA, 732 bp, Artificial Sequence
  derived and/or modified sequence
gcggctgtagtgttagctttggacgccgcagtagccgctgccggtagcaagccgactgagggaaggtgggggtccgcccgggctggtggacctcggggccgaaagttcccgccccgctcgggggctgagccggcagtgcctccgcggccgctgggcagcgcccttcgtccaggctcgcgccccagctgccgccgacgacagcggccgagagaagttggggtctgactagacgcttacggggcctcggaccccggcgccgcggcgacctcggaggaaccggctccttgcgtcccgcctccctgggagctccgcacggcaatctccattggtgctactgcgtttaaaggatttgcagatttacagaatggctgcacattaatggaaagagaagcataaacctatcttctttcattatggagggaggtttggcagatggagaacctgatcgaacttcgctgttgtagcaaacagtgacgaatctcagcttctgacaccaggaaagatgagtcagcgccaaggaaaagaagcttatccaacgccaaccaaagatttgcatcagccatctcttagtccagcaagtcctcatagccagggttttgaaagagggaaggaagatatttctcaaaataaagatgaatcttcactttctatgtcaaagagcaagtctgaatctaaactttataatggctcagagaaggacagttcaacttcaagcaaactcacaaaaaaaga

SEQ ID NO: 206108 - DNA, 531 bp, Artificial Sequence
  derived and/or modified sequence
gcggccgctgggcagcgcccttcgtccaggctcgcgccccagctgccgccgacgacagcggccgagagaagttggggtctgactagacgcttacggggcctcggaccccggcgccgcggcgacctcggaggaaccggctccttgcgtcccgcctccctgggagctccgcacggcaatctccattggtgctactgcgtttaaagaactgtggctaacctccaagagactgaagctggtaattaaacattcctatccttgcctgaagcagtcttttgcaggaacatttgaggatttgcagatttacagaatggctgcacattaatggaaagagaagcataaacctatcttctttcattatggagggaggtttggcagatggagaacctgatcgaacttcgcttcttggtgatagcaaagatgtccttgggccatcaactgttgtagcaaacagtgacgaatctcagcttctgacaccaggaaagatgagtcagcgccaaggaaaagaagcttatccaacgccaaccaaagatt

SEQ ID NO: 206109 - DNA, 2670 bp, Artificial Sequence
  derived and/or modified sequence
atggagggaggtttagctgacggcgagcctgacaggacctctctcttaggcgactccaaggacgttctgggcccttcaacagtcgttgctaacagtgacgagtcacaacttctcactccgggaaagatgtctcagcggcagggaaaggaggcctatccgactccaacaaaggacctgcaccagccatccttatctccggcttctccccattcacaagggttcgagagaggtaaggaagatatttctcagaataaggatgaatccagcctctcaatgagcaaaagcaagagtgaatccaagctctacaacggctctgagaaagattcatccacaagtagtaaactgaccaagaaagaaagtctcaaagttcagaaaaagaattaccgggaggaaaagaagcgcgctacgaaagagctcctctctaccataaccgacccaagcgtgatagtgatggctgattggctcaaaattcggggaacactgaagtcctggaccaaactctggtgtgtcctgaagcccggagtcctgctcatctacaagactcagaaaaacgggcaatgggttgggaccgttttacttaatgcctgtgagattatcgagaggccctcaaagaaggatggcttctgtttcaaactcttccacccactcgaacaaagcatttgggctgtcaagggtcccaaaggcgaggcagtaggttctattactcagccactgccttccagctacctgattatcagagccacttcagagtccgatggcaggtgctggatggacgcactggagcttgctttgaagtgcagctctttgctgaagagaacaatgattcgagaaggaaaggaacacgatctttctgtgagcagtgactccacacatgttacattctacggcctgcttagggcaaataatctgcactccggggacaacttccagctcaacgacagcgagatcgagcggcaacattttaaggaccaggatatgtattctgacaaatccgacaaagagaacgaccaggaacatgacgagagcgacaatgaggtcatgggtaaatctgaggagtctgacacagataccagtgaacggcaggatgacagttatatcgaacccgagcccgtggagccccttaaggagactacatacacagaacagtcccatgaagagttaggcgaggcaggagaggcttcacagacagagactgtctccgaggagaataaaagcctaatatggaccctgctgaaacaggtgcggcctggcatggaccttagtaaggtggtgttgcccacatttattcttgaacctcgatcctttttagacaaactttcagactattattatcacgccgacttcttaagcgaagccgctttagaggaaaatccttactttagacttaagaaagttgtgaaatggtatctcagcggcttttacaagaaacccaaaggcctgaagaaaccatataatccgattcttggagaaacttttcggtgtctgtggatccatccacggacaaattctaagaccttctacatagccgagcaggtctcgcaccacccccctatcagcgccttttatgtttccaatcgaaaagacgggttctgcctcagtgggagtatattggcaaagtccaaattttacggaaacagcctgtctgctatcctggaaggtgaagctaggctgactttcctgaacagaggcgaggattatgttatgactatgccctacgcccattgcaaaggaatactctacggcacaatgacactggagctagggggtacagtcaatatcacttgtcaaaagacaggttactccgcaatcctcgagttcaaattgaaacccttcctggggtcgtctgactgtgtgaatcagatttccgggaaactgaagctgggcaaagaagtgctcgctaccctcgagggacactgggactctgaggtgttcataaccgataaaaaaacggacaatagcgaagtattctggaatcctactcctgacattaagcagtggcgtctgatccgacacactgtgaagtttgaggagcagggcgattttgaaagcgaaaagttgtggcagcgcgtgacccgtgcgatcaatgcaaaggatcagactgaggcaacgcaggagaagtacgtcctggaagaggcccagagacaagcagcacgcgatagaaagacgaaaaatgaggagtggagttgcaagctttttgagttggaccctctcacaggagagtggcattacaagtttgcagatactaggccgtgggatccccttaatgacatgatccagtttgaaaaggacggagttatacagaccaaagtcaaacacaggacgcctatggtcagcgtgcccaagatgaaacacaaacctacccgtcaacagaagaaagtggctaagggctactctagccccgagcctgatattcaggactcaagtggttcagaggcacagtctgtcaagccctcgacgaggcgtaagaagggaatagagctcggcgacattcagtcgtccattgagtccattaaacagactcaggaggaaatcaaaaggaacattatggcccttcgtaatcatctcgtctcgtcaactcccgcaacggattattttctgcagcaaaaagactacttcataatcttcctccttattctgctacaggtgattataaactttatgttcaaatag

SEQ ID NO: 206110 - DNA, 2187 bp, Artificial Sequence
  derived and/or modified sequence
atggagggagggttagccgacggggagccggaccggacttcccttctgggcgactccaaggacgtcctcgggccttcgactgtggttgccaactcagacgagtcccagcttcttaccccagggaagatgtcgcaaaggcagggtaaggaagcctacccaacaccaacaaaagatctccaccaaccgtctctctcacctgcgagccctcacagccagggattcgaacgaggcaaagaggacatcagccagaacaaggacgagtcttccctatctatgtctaaatctaagtctgaaagcaagctgtacaatggtagtgagaaggatagcagcacttcttccaagctgactaagaaggaaagtctgaaagttcagaagaagaattatagagaagagaagaaacgtgcaacaaaagagctcttgtcgactatcacagacccgagcgtaatcgttatggcagactggctaaaaatcagagggaccctgaaaagttggacaaagttatggtgcgttctgaagcctggtgtgctgctcatctataaaacacagaaaaatggccagtgggtgggaactgtgttactgaatgcgtgcgagatcatcgagcggccatcaaagaaagacggcttttgcttcaaactcttccaccccctggaacagtctatctgggccgtgaaaggaccaaaaggagaagccgttggaagcatcacacagccgttgccatctagttaccttatcataagagcaacctcggaaagtgatggcaggtgctggatggacgcgctggagttggcactcaagtgtagctccctgttgaaacggactatgatcagagaggggaaagaacacgacctgtctgtgtcgagcgactcaactcatgtcacgttttacggattactaagggcaaataatctgcactccggcgacaactttcaactgaacgattctgaaatcgaaagacagcacttcaaggaccaggatatgtattctgataaaagcgacaaagagaatgatcaggaacacgacgagtccgataacgaggttatggggaaatccgaggaatctgatacagacacctcggagcgccaggacgattcttacatcgagcccgagcctgtcgaaccgctcaaggagaccacatatacggaacagagtcacgaggagctcggcgaggcaggtgaagcctcccagaccgagacggtgtctgaagagaacaagtccctgatttggaccttgctgaagcaggtgagaccgggaatggacttgagcaaagtggtactcccaacattcatcctggaaccaagatcatttttagacaagttgtccgactactactaccacgcagatttcctctccgaggccgcactagaggagaatccctactttcggctgaagaaggttgtgaaatggtacctgtctggattttacaaaaagccaaaagggctgaaaaaaccttacaacccgattctcggggagactttcaggtgtttgtggatccaccctagaaccaattccaaaaccttctacatagccgagcaagtgagccaccatccaccaatctctgctttctacgtctccaatcgtaaagacggcttttgcctgtcaggcagtatactagccaagagcaaattttacggaaactcattatcagctatattggagggggaggccaggttgacattcctgaatagaggggaggattatgtgatgaccatgccctacgcacattgcaaaggaatcctgtacggaaccatgacattggaattaggcggaaccgttaatattacctgccagaagaccggttattccgcaattctcgaatttaagctcaagccatttctggggtcgtccgactgcgtgaaccagatcagtgggaagctgaagctggggaaggaagtgctggctaccttggaaggtcattgggattctgaggtatttattaccgacaagaaaacggacaactctgaagtattttggaatcccacgcctgatatcaagcaatggcgcctgatccgtcatactgtgaaatttgaggagcagggagactttgagtccgaaaaactgtggcagagggttacccgcgctatcaatgcaaaagaccagaccgaggcaacgcaggagaagtatgtcctggaggaggcccagaggcaagccgcaagggatcgtaagaccaagaacgagaagaagaaatag

SEQ ID NO: 206111 - DNA, 2625 bp, Artificial Sequence
  derived and/or modified sequence
atggaaggcggtttggcagacggtgagccagaccgtaccagcgctaacagtgatgagtcccagctactgaccccgggaaagatgagtcagcgtcagggcaaagaggcgtatcctactcctactaaggacctgcatcagccatcattatcaccggcttccccacactctcagggattcgaaagaggaaaagaagacatctcccagaataaagatgagtcaagtttgagcatgtctaagtctaaaagtgaaagcaagctgtataacggcagtgaaaaagactcctcgacaagctctaagcttacaaaaaaagagtcactcaaggtgcagaagaagaactatcgagaggaaaagaaacgggctaccaaggagttgctgagcaccatcacagatccatctgtgattgtgatggcagattggctaaagatccgcggaactctgaagtcctggactaagttgtggtgcgtgttaaagcccggagttctactgatctacaaaactcagaaaaacggtcagtgggtcgggaccgtactccttaacgcttgcgaaatcattgagagaccttccaaaaaagatgggttctgcttcaaactcttccatccactggaacagagcatttgggccgtgaaaggtcccaagggcgaagccgtaggaagcatcacgcagcccctcccttcaagttacctgattattcgggctacatcagaatccgatggacggtgctggatggatgccctcgaactcgctctgaaatgctcctccctgctaaagcgcactatgattcgtgagggaaaggagcacgatttgtcggtgtcttcagattctacccatgtcactttctacggacttctgcgcgcaaataacctgcacagcggcgataacttccagttgaatgactccgaaattgaaaggcagcattttaaagaccaggatatgtattccgacaaaagtgacaaagagaacgaccaggagcacgacgagtccgacaacgaagtgatgggcaagtcggaggaaagcgataccgatacaagcgaaaggcaggatgattcctacatcgagccggagcccgtggagcctctcaaagagacgacctacacagaacagagccacgaagagcttggggaagcgggtgaagccagccagaccgaaacagtttctgaagagaataaaagtctcatctggacgctgttaaaacaggtgaggcctggtatggacctgtcaaaggttgtactgcctacatttatcctggagccgcgaagcttcctcgataaattgagcgactactactatcatgctgacttcctctccgaggctgctctcgaggagaacccttattttaggcttaagaaggtggttaagtggtatctgtcagggttctacaagaagcccaaaggactgaagaagccatacaatcctatcctgggagagacattcagatgcttgtggatccatccgagaacgaactcaaaaaccttttacatcgctgaacaagtgtctcaccatcctcctattagtgccttttacgtatctaatagaaaggatggattctgtctgagcggctcgatcctcgcgaagtccaagttttacggcaatagcctgagcgcaatcctcgagggagaagccagactgacattcctcaatcgtggggaagactacgtcatgacaatgccttacgcccattgcaaaggcatattgtatggaaccatgacgctcgagctcgggggaaccgtgaacattacgtgtcagaaaactggttattccgcgatcctggagttcaagctcaagccgttcctcggcagctctgactgtgtgaatcagatttcagggaagctgaagctgggcaaggaagttcttgcgacactagaagggcattgggattctgaagtatttataaccgacaagaagaccgataacagtgaagtgttctggaatcccacgccagatatcaaacagtggagactaattagacataccgtgaaatttgaagagcagggggattttgaatccgaaaaactgtggcagcgggtgacgcgtgcgataaatgccaaggatcagactgaggcgacacaggaaaaatatgtactggaagaagcccaaagacaagcagcacgggaccgtaagacaaaaaacgaagaatggtcttgcaaactgtttgagctggatccactgactggggagtggcactataaatttgccgataccaggccttgggaccccctaaatgatatgatacagtttgaaaaagacggcgtgatccagaccaaagtaaaacatagaacacccatggtgtccgtgcctaagatgaaacataagccaaccaggcagcagaagaaagtggctaaaggatattcatccccggagcctgatatccaggattcttccggaagcgaggcacaatctgtgaaaccaagcacacggagaaagaagggcatcgaactgggcgacattcagtcatctattgagagcatcaagcagacacaggaagagattaagagaaatattatggctctacggaaccatctcgtgagcagtacccccgcaacagactactttctccagcagaaagactattttatcatctttctgctgatcctgctgcaagtgataattaacttcatgtttaagtag

SEQ ID NO: 206112 - DNA, 177 bp, Artificial Sequence
  derived and/or modified sequence
atggagggcggactcgcggacggggagccagaccggacatcgttgctcggtgactctaaagatgtcctcggtccatccactgtcgtagctaatagcgacgaatctcagctgctgacccctggcaaaatgagccagcggcagggaaaggaggcctatcctacaccaacgaaggattag

SEQ ID NO: 206113 - DNA, 2670 bp, Artificial Sequence
  derived and/or modified sequence
atggagggcggcctggccgacggcgagcccgacagaaccagcctgctgggcgacagcaaggacgtgctgggccccagcaccgtggtggccaacagcgacgagagccagctgctgacccccggcaagatgagccagagacagggcaaggaggcctaccccacccccaccaaggacctgcaccagcccagcctgagccccgccagcccccacagccagggcttcgagagaggcaaggaggacatcagccagaacaaggacgagagcagcctgagcatgagcaagagcaagagcgagagcaagctgtacaacggcagcgagaaggacagcagcaccagcagcaagctgaccaagaaggagagcctgaaggtgcagaagaagaactacagagaggagaagaagagagccaccaaggagctgctgagcaccatcaccgaccccagcgtgatcgtgatggccgactggctgaagatcagaggcaccctgaagagctggaccaagctgtggtgcgtgctgaagcccggcgtgctgctgatctacaagacccagaagaacggccagtgggtgggcaccgtgctgctgaacgcctgcgagatcatcgagagacccagcaagaaggacggcttctgcttcaagctgttccaccccctggagcagagcatctgggccgtgaagggccccaagggcgaggccgtgggcagcatcacccagcccctgcccagcagctacctgatcatcagagccaccagcgagagcgacggcagatgctggatggacgccctggagctggccctgaagtgcagcagcctgctgaagagaaccatgatcagagagggcaaggagcacgacctgagcgtgagcagcgacagcacccacgtgaccttctacggcctgctgagagccaacaacctgcacagcggcgacaacttccagctgaacgacagcgagatcgagagacagcacttcaaggaccaggacatgtacagcgacaagagcgacaaggagaacgaccaggagcacgacgagagcgacaacgaggtgatgggcaagagcgaggagagcgacaccgacaccagcgagagacaggacgacagctacatcgagcccgagcccgtggagcccctgaaggagaccacctacaccgagcagagccacgaggagctgggcgaggccggcgaggccagccagaccgagaccgtgagcgaggagaacaagagcctgatctggaccctgctgaagcaggtgagacccggcatggacctgagcaaggtggtgctgcccaccttcatcctggagcccagaagcttcctggacaagctgagcgactactactaccacgccgacttcctgagcgaggccgccctggaggagaacccctacttcagactgaagaaggtggtgaagtggtacctgagcggcttctacaagaagcccaagggcctgaagaagccctacaaccccatcctgggcgagaccttcagatgcctgtggatccaccccagaaccaacagcaagaccttctacatcgccgagcaggtgagccaccacccccccatcagcgccttctacgtgagcaacagaaaggacggcttctgcctgagcggcagcatcctggccaagagcaagttctacggcaacagcctgagcgccatcctggagggcgaggccagactgaccttcctgaacagaggcgaggactacgtgatgaccatgccctacgcccactgcaagggcatcctgtacggcaccatgaccctggagctgggcggcaccgtgaacatcacctgccagaagaccggctacagcgccatcctggagttcaagctgaagcccttcctgggcagcagcgactgcgtgaaccagatcagcggcaagctgaagctgggcaaggaggtgctggccaccctggagggccactgggacagcgaggtgttcatcaccgacaagaagaccgacaacagcgaggtgttctggaaccccacccccgacatcaagcagtggagactgatcagacacaccgtgaagttcgaggagcagggcgacttcgagagcgagaagctgtggcagagagtgaccagagccatcaacgccaaggaccagaccgaggccacccaggagaagtacgtgctggaggaggcccagagacaggccgccagagacagaaagaccaagaacgaggagtggagctgcaagctgttcgagctggaccccctgaccggcgagtggcactacaagttcgccgacaccagaccctgggaccccctgaacgacatgatccagttcgagaaggacggcgtgatccagaccaaggtgaagcacagaacccccatggtgagcgtgcccaagatgaagcacaagcccaccagacagcagaagaaggtggccaagggctacagcagccccgagcccgacatccaggacagcagcggcagcgaggcccagagcgtgaagcccagcaccagaagaaagaagggcatcgagctgggcgacatccagagcagcatcgagagcatcaagcagacccaggaggagatcaagagaaacatcatggccctgagaaaccacctggtgagcagcacccccgccaccgactacttcctgcagcagaaggactacttcatcatcttcctgctgatcctgctgcaggtgatcatcaacttcatgttcaagtag

SEQ ID NO: 206114 - DNA, 2187 bp, Artificial Sequence
  derived and/or modified sequence
atggagggcggcctggccgacggcgagcccgacagaaccagcctgctgggcgacagcaaggacgtgctgggccccagcaccgtggtggccaacagcgacgagagccagctgctgacccccggcaagatgagccagagacagggcaaggaggcctaccccacccccaccaaggacctgcaccagcccagcctgagccccgccagcccccacagccagggcttcgagagaggcaaggaggacatcagccagaacaaggacgagagcagcctgagcatgagcaagagcaagagcgagagcaagctgtacaacggcagcgagaaggacagcagcaccagcagcaagctgaccaagaaggagagcctgaaggtgcagaagaagaactacagagaggagaagaagagagccaccaaggagctgctgagcaccatcaccgaccccagcgtgatcgtgatggccgactggctgaagatcagaggcaccctgaagagctggaccaagctgtggtgcgtgctgaagcccggcgtgctgctgatctacaagacccagaagaacggccagtgggtgggcaccgtgctgctgaacgcctgcgagatcatcgagagacccagcaagaaggacggcttctgcttcaagctgttccaccccctggagcagagcatctgggccgtgaagggccccaagggcgaggccgtgggcagcatcacccagcccctgcccagcagctacctgatcatcagagccaccagcgagagcgacggcagatgctggatggacgccctggagctggccctgaagtgcagcagcctgctgaagagaaccatgatcagagagggcaaggagcacgacctgagcgtgagcagcgacagcacccacgtgaccttctacggcctgctgagagccaacaacctgcacagcggcgacaacttccagctgaacgacagcgagatcgagagacagcacttcaaggaccaggacatgtacagcgacaagagcgacaaggagaacgaccaggagcacgacgagagcgacaacgaggtgatgggcaagagcgaggagagcgacaccgacaccagcgagagacaggacgacagctacatcgagcccgagcccgtggagcccctgaaggagaccacctacaccgagcagagccacgaggagctgggcgaggccggcgaggccagccagaccgagaccgtgagcgaggagaacaagagcctgatctggaccctgctgaagcaggtgagacccggcatggacctgagcaaggtggtgctgcccaccttcatcctggagcccagaagcttcctggacaagctgagcgactactactaccacgccgacttcctgagcgaggccgccctggaggagaacccctacttcagactgaagaaggtggtgaagtggtacctgagcggcttctacaagaagcccaagggcctgaagaagccctacaaccccatcctgggcgagaccttcagatgcctgtggatccaccccagaaccaacagcaagaccttctacatcgccgagcaggtgagccaccacccccccatcagcgccttctacgtgagcaacagaaaggacggcttctgcctgagcggcagcatcctggccaagagcaagttctacggcaacagcctgagcgccatcctggagggcgaggccagactgaccttcctgaacagaggcgaggactacgtgatgaccatgccctacgcccactgcaagggcatcctgtacggcaccatgaccctggagctgggcggcaccgtgaacatcacctgccagaagaccggctacagcgccatcctggagttcaagctgaagcccttcctgggcagcagcgactgcgtgaaccagatcagcggcaagctgaagctgggcaaggaggtgctggccaccctggagggccactgggacagcgaggtgttcatcaccgacaagaagaccgacaacagcgaggtgttctggaaccccacccccgacatcaagcagtggagactgatcagacacaccgtgaagttcgaggagcagggcgacttcgagagcgagaagctgtggcagagagtgaccagagccatcaacgccaaggaccagaccgaggccacccaggagaagtacgtgctggaggaggcccagagacaggccgccagagacagaaagaccaagaacgagaagaagaagtag

SEQ ID NO: 206115 - DNA, 2625 bp, Artificial Sequence
  derived and/or modified sequence
atggagggcggcctggccgacggcgagcccgacagaaccagcgccaacagcgacgagagccagctgctgacccccggcaagatgagccagagacagggcaaggaggcctaccccacccccaccaaggacctgcaccagcccagcctgagccccgccagcccccacagccagggcttcgagagaggcaaggaggacatcagccagaacaaggacgagagcagcctgagcatgagcaagagcaagagcgagagcaagctgtacaacggcagcgagaaggacagcagcaccagcagcaagctgaccaagaaggagagcctgaaggtgcagaagaagaactacagagaggagaagaagagagccaccaaggagctgctgagcaccatcaccgaccccagcgtgatcgtgatggccgactggctgaagatcagaggcaccctgaagagctggaccaagctgtggtgcgtgctgaagcccggcgtgctgctgatctacaagacccagaagaacggccagtgggtgggcaccgtgctgctgaacgcctgcgagatcatcgagagacccagcaagaaggacggcttctgcttcaagctgttccaccccctggagcagagcatctgggccgtgaagggccccaagggcgaggccgtgggcagcatcacccagcccctgcccagcagctacctgatcatcagagccaccagcgagagcgacggcagatgctggatggacgccctggagctggccctgaagtgcagcagcctgctgaagagaaccatgatcagagagggcaaggagcacgacctgagcgtgagcagcgacagcacccacgtgaccttctacggcctgctgagagccaacaacctgcacagcggcgacaacttccagctgaacgacagcgagatcgagagacagcacttcaaggaccaggacatgtacagcgacaagagcgacaaggagaacgaccaggagcacgacgagagcgacaacgaggtgatgggcaagagcgaggagagcgacaccgacaccagcgagagacaggacgacagctacatcgagcccgagcccgtggagcccctgaaggagaccacctacaccgagcagagccacgaggagctgggcgaggccggcgaggccagccagaccgagaccgtgagcgaggagaacaagagcctgatctggaccctgctgaagcaggtgagacccggcatggacctgagcaaggtggtgctgcccaccttcatcctggagcccagaagcttcctggacaagctgagcgactactactaccacgccgacttcctgagcgaggccgccctggaggagaacccctacttcagactgaagaaggtggtgaagtggtacctgagcggcttctacaagaagcccaagggcctgaagaagccctacaaccccatcctgggcgagaccttcagatgcctgtggatccaccccagaaccaacagcaagaccttctacatcgccgagcaggtgagccaccacccccccatcagcgccttctacgtgagcaacagaaaggacggcttctgcctgagcggcagcatcctggccaagagcaagttctacggcaacagcctgagcgccatcctggagggcgaggccagactgaccttcctgaacagaggcgaggactacgtgatgaccatgccctacgcccactgcaagggcatcctgtacggcaccatgaccctggagctgggcggcaccgtgaacatcacctgccagaagaccggctacagcgccatcctggagttcaagctgaagcccttcctgggcagcagcgactgcgtgaaccagatcagcggcaagctgaagctgggcaaggaggtgctggccaccctggagggccactgggacagcgaggtgttcatcaccgacaagaagaccgacaacagcgaggtgttctggaaccccacccccgacatcaagcagtggagactgatcagacacaccgtgaagttcgaggagcagggcgacttcgagagcgagaagctgtggcagagagtgaccagagccatcaacgccaaggaccagaccgaggccacccaggagaagtacgtgctggaggaggcccagagacaggccgccagagacagaaagaccaagaacgaggagtggagctgcaagctgttcgagctggaccccctgaccggcgagtggcactacaagttcgccgacaccagaccctgggaccccctgaacgacatgatccagttcgagaaggacggcgtgatccagaccaaggtgaagcacagaacccccatggtgagcgtgcccaagatgaagcacaagcccaccagacagcagaagaaggtggccaagggctacagcagccccgagcccgacatccaggacagcagcggcagcgaggcccagagcgtgaagcccagcaccagaagaaagaagggcatcgagctgggcgacatccagagcagcatcgagagcatcaagcagacccaggaggagatcaagagaaacatcatggccctgagaaaccacctggtgagcagcacccccgccaccgactacttcctgcagcagaaggactacttcatcatcttcctgctgatcctgctgcaggtgatcatcaacttcatgttcaagtag

SEQ ID NO: 206116 - DNA, 177 bp, Artificial Sequence
  derived and/or modified sequence
atggagggcggcctggccgacggcgagcccgacagaaccagcctgctgggcgacagcaaggacgtgctgggccccagcaccgtggtggccaacagcgacgagagccagctgctgacccccggcaagatgagccagagacagggcaaggaggcctaccccacccccaccaaggactag

SEQ ID NO: 206117 - protein, 1400 aa, Artificial Sequence
  derived and/or modified sequence
MMASFQRSNSHDKVRRIVAEEGRTARNLIAWSVPLESKDDDGKPKCQTGGKSKRTIQGTHKTTKQSTAVDCKITSSTTGDKHFDKSPTKTRHPRKIDLRARYWAFLFDNLRRAVDEIYVTCESDQSVVECKEVLMMLDNYVRDFKALIDWIQLQEKLEKTDAQSRPTSLAWEVKKMSPGRHVIPSPSTDRINVTSNARRSLNFGGSTGTVPAPRLAPTGVSWADKVKAHHTGSTASSEITPAQSCPPMTVQKASRKNERKDAEGWETVQRGRPIRSRSTAVMPKVSLATEATRSKDDSDKENVCLLPDESIQKGQFVGDGTSNTIESHPKDSLHSCDHPLAEKTQFTVSTLDDVKNSGSIRDNYVRTSEISAVHIDTECVSVMLQAGTPPLQVNEEKFPAEKARIENEMDPSDISNSMAEVLAKKEELADRLEKANEEAIASAIAEEEQLTREIEAEENNDINIETDNDSDFSASMGSGSVSFCGMSMDWNDVLADYEARESWRQNTSWGDIVEEEPARPPGHGIHMHEKLSSPSRKRTIAESKKKHEEKQMKAQQLREKLREEKTLKLQKLLEREKDVRKWKEELLDQRRRMMEEKLLHAEFKREVQLQAIVKKAQEEEAKVNEIAFINTLEAQNKRHDVLSKLKEYEQRLNELQEERQRRQEEKQARDEAVQERKRALEAERQARVEELLMKRKEQEARIEQQRQEKEKAREDAARERARDREERLAALTAAQQEAMEELQKKIQLKHDESIRRHMEQIEQRKEKAAELSSGRHANTDYAPKLTPYERKKQCSLCNVLISSEVYLFSHVKGRKHQQAVRENTSIQGRELSDEEVEHLSLKKYIIDIVVESTAPAEALKDGEERQKNKKKAKKIKARMNFRAKEYESLMETKNSGSDSPYKAKLQRLAKDLLKQVQVQDSGSWANNKVSALDRTLGEITRILEKENVADQIAFQAAGGLTALEHILQAVVPATNVNTVLRIPPKSLCNAINVYNLTCNNCSENCSDVLFSNKITFLMDLLIHQLTVYVPDENNTILGRNTNKQVFEGLTTGLLKVSAVVLGCLIANRPDGNCQPATPKIPTQEMKNKPSQGDPFNNRVQDLISYVVNMGLIDKLCACFLSVQGPVDENPKMAIFLQHAAGLLHAMCTLCFAVTGRSYSIFDNNRQDPTGLTAALQATDLAGVLHMLYCVLFHGTILDPSTASPKENYTQNTIQVAIQSLRFFNSFAALHLPAFQSIVGAEGLSLAFRHMASSLLGHCSQVSCESLLHEVIVCVGYFTVNHPDNQVIVQSGRHPTVLQKLCQLPFQYFSDPRLIKVLFPSLIAACYNNHQNKIILEQEMSCVLLATFIQDLAQTPGQAENQPYQPKGKCLGSQDYLELANRFPQQAWEEARQFFLKKEKK

SEQ ID NO: 206118 - DNA, 4203 bp, Artificial Sequence
  derived and/or modified sequence
atgatggccagcttccagagaagcaacagccacgacaaggtgagaagaatcgtggccgaggagggcagaaccgccagaaacctgatcgcctggagcgtgcccctggagagcaaggacgacgacggcaagcccaagtgccagaccggcggcaagagcaagagaaccatccagggcacccacaagaccaccaagcagagcaccgccgtggactgcaagatcaccagcagcaccaccggcgacaagcacttcgacaagagccccaccaagaccagacaccccagaaagatcgacctgagagccagatactgggccttcctgttcgacaacctgagaagagccgtggacgagatctacgtgacctgcgagagcgaccagagcgtggtggagtgcaaggaggtgctgatgatgctggacaactacgtgagagacttcaaggccctgatcgactggatccagctgcaggagaagctggagaagaccgacgcccagagcagacccaccagcctggcctgggaggtgaagaagatgagccccggcagacacgtgatccccagccccagcaccgacagaatcaacgtgaccagcaacgccagaagaagcctgaacttcggcggcagcaccggcaccgtgcccgcccccagactggcccccaccggcgtgagctgggccgacaaggtgaaggcccaccacaccggcagcaccgccagcagcgagatcacccccgcccagagctgcccccccatgaccgtgcagaaggccagcagaaagaacgagagaaaggacgccgagggctgggagaccgtgcagagaggcagacccatcagaagcagaagcaccgccgtgatgcccaaggtgagcctggccaccgaggccaccagaagcaaggacgacagcgacaaggagaacgtgtgcctgctgcccgacgagagcatccagaagggccagttcgtgggcgacggcaccagcaacaccatcgagagccaccccaaggacagcctgcacagctgcgaccaccccctggccgagaagacccagttcaccgtgagcaccctggacgacgtgaagaacagcggcagcatcagagacaactacgtgagaaccagcgagatcagcgccgtgcacatcgacaccgagtgcgtgagcgtgatgctgcaggccggcaccccccccctgcaggtgaacgaggagaagttccccgccgagaaggccagaatcgagaacgagatggaccccagcgacatcagcaacagcatggccgaggtgctggccaagaaggaggagctggccgacagactggagaaggccaacgaggaggccatcgccagcgccatcgccgaggaggagcagctgaccagagagatcgaggccgaggagaacaacgacatcaacatcgagaccgacaacgacagcgacttcagcgccagcatgggcagcggcagcgtgagcttctgcggcatgagcatggactggaacgacgtgctggccgactacgaggccagagagagctggagacagaacaccagctggggcgacatcgtggaggaggagcccgccagaccccccggccacggcatccacatgcacgagaagctgagcagccccagcagaaagagaaccatcgccgagagcaagaagaagcacgaggagaagcagatgaaggcccagcagctgagagagaagctgagagaggagaagaccctgaagctgcagaagctgctggagagagagaaggacgtgagaaagtggaaggaggagctgctggaccagagaagaagaatgatggaggagaagctgctgcacgccgagttcaagagagaggtgcagctgcaggccatcgtgaagaaggcccaggaggaggaggccaaggtgaacgagatcgccttcatcaacaccctggaggcccagaacaagagacacgacgtgctgagcaagctgaaggagtacgagcagagactgaacgagctgcaggaggagagacagagaagacaggaggagaagcaggccagagacgaggccgtgcaggagagaaagagagccctggaggccgagagacaggccagagtggaggagctgctgatgaagagaaaggagcaggaggccagaatcgagcagcagagacaggagaaggagaaggccagagaggacgccgccagagagagagccagagacagagaggagagactggccgccctgaccgccgcccagcaggaggccatggaggagctgcagaagaagatccagctgaagcacgacgagagcatcagaagacacatggagcagatcgagcagagaaaggagaaggccgccgagctgagcagcggcagacacgccaacaccgactacgcccccaagctgaccccctacgagagaaagaagcagtgcagcctgtgcaacgtgctgatcagcagcgaggtgtacctgttcagccacgtgaagggcagaaagcaccagcaggccgtgagagagaacaccagcatccagggcagagagctgagcgacgaggaggtggagcacctgagcctgaagaagtacatcatcgacatcgtggtggagagcaccgcccccgccgaggccctgaaggacggcgaggagagacagaagaacaagaagaaggccaagaagatcaaggccagaatgaacttcagagccaaggagtacgagagcctgatggagaccaagaacagcggcagcgacagcccctacaaggccaagctgcagagactggccaaggacctgctgaagcaggtgcaggtgcaggacagcggcagctgggccaacaacaaggtgagcgccctggacagaaccctgggcgagatcaccagaatcctggagaaggagaacgtggccgaccagatcgccttccaggccgccggcggcctgaccgccctggagcacatcctgcaggccgtggtgcccgccaccaacgtgaacaccgtgctgagaatcccccccaagagcctgtgcaacgccatcaacgtgtacaacctgacctgcaacaactgcagcgagaactgcagcgacgtgctgttcagcaacaagatcaccttcctgatggacctgctgatccaccagctgaccgtgtacgtgcccgacgagaacaacaccatcctgggcagaaacaccaacaagcaggtgttcgagggcctgaccaccggcctgctgaaggtgagcgccgtggtgctgggctgcctgatcgccaacagacccgacggcaactgccagcccgccacccccaagatccccacccaggagatgaagaacaagcccagccagggcgaccccttcaacaacagagtgcaggacctgatcagctacgtggtgaacatgggcctgatcgacaagctgtgcgcctgcttcctgagcgtgcagggccccgtggacgagaaccccaagatggccatcttcctgcagcacgccgccggcctgctgcacgccatgtgcaccctgtgcttcgccgtgaccggcagaagctacagcatcttcgacaacaacagacaggaccccaccggcctgaccgccgccctgcaggccaccgacctggccggcgtgctgcacatgctgtactgcgtgctgttccacggcaccatcctggaccccagcaccgccagccccaaggagaactacacccagaacaccatccaggtggccatccagagcctgagattcttcaacagcttcgccgccctgcacctgcccgccttccagagcatcgtgggcgccgagggcctgagcctggccttcagacacatggccagcagcctgctgggccactgcagccaggtgagctgcgagagcctgctgcacgaggtgatcgtgtgcgtgggctacttcaccgtgaaccaccccgacaaccaggtgatcgtgcagagcggcagacaccccaccgtgctgcagaagctgtgccagctgcccttccagtacttcagcgaccccagactgatcaaggtgctgttccccagcctgatcgccgcctgctacaacaaccaccagaacaagatcatcctggagcaggagatgagctgcgtgctgctggccaccttcatccaggacctggcccagacccccggccaggccgagaaccagccctaccagcccaagggcaagtgcctgggcagccaggactacctggagctggccaacagattcccccagcaggcctgggaggaggccagacagttcttcctgaagaaggagaagaagtag

SEQ ID NO: 206119 - DNA, 4203 bp, Artificial Sequence
  derived and/or modified sequence
atgatggcatcatttcagagatcaaactctcacgataaggtccggaggatcgtcgccgaggaaggtagaacagcccgcaatttgatagcatggtccgtcccattagaatctaaagacgatgacggcaaacccaagtgccagacgggtggaaagtcaaagcgaaccatccagggaacacacaagacgaccaagcagtccacagctgttgattgcaagatcacctccagtaccactggggacaaacattttgacaaaagccccacaaagacccggcatccacggaaaatcgacctgagggccagatattgggcgttcctctttgacaatctacgaagggcagtggatgagatctatgtgacgtgcgagtcagaccagtccgtggtcgaatgtaaagaagtccttatgatgctcgataattacgtgcgggattttaaagccctgatagattggattcagctccaggaaaagttagaaaaaaccgatgctcagagccgcccaacaagccttgcctgggaggttaaaaaaatgtccccaggccggcacgttatcccatcaccctcaacagatagaattaacgtgacctccaacgctagacgttcactcaatttcggcgggtctacaggcacagtgcccgcacctcgactcgcgcccaccggtgtgtcgtgggctgacaaggtaaaagctcaccacaccggtagcactgcctcttctgagatcacccctgcgcagagctgtcccccaatgactgttcagaaggccagtcggaagaacgaaaggaaggatgcggaggggtgggagactgtgcaacgcgggcgccctattagatcccgttcaaccgctgtgatgcccaaggtctcactggcgacagaggctactcgcagtaaggatgatagtgataaggaaaacgtgtgcctgctgcccgacgaaagtatccagaaggggcagtttgtcggagacggcacgagcaataccattgaaagccatccaaaagattccctccatagctgtgaccacccgctggcggagaaaacgcaattcactgtctctaccctggacgacgtaaaaaattctggctctatccgcgacaattatgtccgcaccagtgaaatttccgccgtgcacattgacaccgaatgtgtgagcgtgatgctccaggctgggaccccacccctgcaggtgaacgaagagaagtttccagccgagaaagcccgcatcgagaacgagatggaccctagtgatatcagcaatagtatggctgaagtgctcgctaaaaaggaagaattagctgaccgattagagaaagccaatgaggaggcgatcgcttcggcaatagccgaggaggagcaactgacgagagaaatcgaagccgaagagaacaatgatatcaacatcgaaaccgacaacgattccgatttctctgccagtatggggtctggcagcgtgtccttctgcgggatgtctatggactggaacgacgtgctggctgactacgaggcccgagagtcctggcgacagaacacttcctggggtgacattgttgaagaggaacccgcgagacccccagggcacggcattcacatgcatgagaagctgtcatcaccatcccggaagcgaaccatagccgaaagtaagaaaaaacacgaggaaaaacagatgaaagctcagcagttaagggaaaagctgcgtgaggagaagaccctgaaactgcagaagctgctcgaaagagaaaaagatgtgcgaaaatggaaggaagagttactcgatcaacgaagaagaatgatggaggaaaagcttctgcatgcggagtttaaaagagaagtgcagttacaagctattgttaagaaggcccaagaagaggaagcaaaagtgaatgaaattgcctttatcaatacactcgaagcccagaacaaaaggcatgacgtgctaagtaagcttaaagaatacgaacagaggctcaatgagctacaggaagaaaggcaacgccgtcaagaagagaaacaggcccgcgacgaagccgtccaggagagaaaacgcgcactagaggctgagcgacaggcaagggttgaagagctgctgatgaagcggaaagaacaagaggctcgtatagaacagcaaaggcaggagaaggaaaaggctcgggaggacgctgccagggaaagggcccgggatagggaagagaggctagcggccctgaccgcagcccagcaggaagcgatggaagaactgcaaaaaaaaatccagctgaagcacgatgagagtattagacggcatatggagcagatcgagcaacggaaggagaaggcagccgagctcagtagcggaagacacgccaacactgactatgcccccaagttaacaccatacgagaggaaaaaacaatgttctttgtgtaatgtattaatttccagcgaggtctatcttttcagccacgtaaagggtcggaagcatcagcaggccgtgcgggaaaatacttcaattcaaggaagggagctctccgacgaagaagttgaacatctgtcactgaagaagtacattattgatattgtggtggaatccacagctccagcagaggccctgaaggatggggaagagcggcaaaaaaacaaaaagaaagctaagaagatcaaggcccggatgaacttccgggcgaaggagtatgaaagcctgatggagactaagaattctggctctgactccccctataaagccaagctgcaaagactggccaaagacctgctcaagcaagtgcaggtgcaggatagtggatcttgggctaataacaaagtctctgccctcgacagaaccctcggggagattacaagaatattagaaaaggaaaatgtcgcagatcagattgccttccaagcagccggggggcttacagcactcgagcacatcctccaggcggtagtgcctgccacgaacgtcaataccgtccttcggataccgcccaaatcactatgcaacgcaatcaacgtgtataatctgacatgcaataactgttcagaaaattgcagcgacgtgctcttttccaataaaatcacttttttgatggatctgttaattcaccagctcaccgtttacgtgcccgatgagaacaacacaatattgggcaggaacaccaataagcaggtgtttgaaggccttactaccggtctactgaaggtgtcggccgtggtgctgggctgtctgattgccaaccgccccgacggcaactgccagcctgctactcctaagatcccaacccaagaaatgaagaacaaaccttcccaaggggatccctttaacaaccgggtgcaagacctgattagttatgtggtcaacatggggttgattgacaagctgtgtgcctgttttcttagcgtgcaaggaccagtcgacgagaacccgaagatggccatctttcttcagcacgctgccggtctgttgcatgccatgtgcactctatgttttgcggtcacaggacgctcctattctatcttcgataacaacaggcaagacccaactggcctgacagccgctttacaagccactgacctggccggggtcttgcatatgctgtactgtgtgttattccacggcactattttggacccctcaacagccagtcccaaagagaactacacgcagaacacaatccaggtggcgatccaaagcctccgcttctttaactctttcgctgctttgcatctgccggcttttcagtcaatcgttggagccgaggggctgagcctggcgttccggcatatggcctcttctctgttaggccattgttcccaagtgtcctgcgagagtctcttgcacgaggtcatcgtctgtgtgggctacttcacagtgaaccaccctgataatcaggtgatcgtgcagtccggcaggcatcccacggtcctccagaaactttgccagttgccttttcaatacttctctgatccccggctgatcaaggtgctgtttccaagtctcattgccgcctgctacaacaaccatcagaataagattattctcgagcaggaaatgtcctgcgtcctgttggccaccttcattcaagatctggcccagacacccggacaggccgagaatcagccctatcaaccaaagggaaagtgtctgggcagccaggactatctggaacttgccaaccgctttccacagcaagcatgggaagaggccaggcaatttttcctgaagaaagaaaagaaatag

SEQ ID NO: 206120 - DNA, 4203 bp, Artificial Sequence
  derived and/or modified sequence
atgatggcctccttccagaggtcaaactcccatgacaaagtccgtcggattgtcgcagaggagggtcggacagcccggaacttaattgcttggtctgtcccacttgagagtaaagacgacgatgggaagcctaaatgccagacaggtggaaaatccaagagaactatccagggcactcataagaccaccaagcagtccacggccgtggactgtaagattacaagctcaactacaggggataaacattttgacaagagccctaccaagacccgacacccacggaaaattgatttgagagcgcgctactgggccttcctgttcgacaatctccgtcgcgctgttgacgagatatatgtgacatgtgagagcgaccagtccgttgtagaatgtaaggaagtgctcatgatgctcgacaattatgtgcgtgactttaaggctctaatcgactggatccagttgcaagaaaagctggagaagactgacgcacagtcaagacccacatctttggcatgggaggtcaagaaaatgagcccgggacgtcacgtgattccatctccctccaccgatcgcatcaacgtgacaagcaatgccagacggagcttgaatttcggcggttccaccggcactgtccccgccccacggttagctccaaccggagtcagttgggctgataaggtgaaagctcaccatacaggatcgactgccagctcggagattacaccagcgcaatcttgcccccctatgaccgtccaaaaagcttccagaaaaaatgaaaggaaagacgctgaggggtgggagacagttcagcgaggcaggcccatccgaagccggagtaccgccgtcatgcctaaggtgagccttgctacagaggccacgaggtctaaagacgactctgataaggaaaacgtgtgtttactgccggatgaaagtatacaaaaggggcagtttgtgggggacggaacatcaaataccatcgagtcccatcccaaagactccctccattcttgcgaccaccccctggccgaaaaaacccaattcactgtgtccaccctcgatgacgtcaagaattcggggagcatccgcgacaactacgttcggaccagcgaaatcagcgcagtccatatcgacacggagtgcgtcagtgtgatgctccaggccggtaccccaccgttgcaagtgaatgaagaaaaattccctgccgaaaaggccagaattgagaatgagatggatccgagtgatatctcgaattctatggccgaagtcttagcaaaaaaagaagaacttgctgacaggctggaaaaagccaacgaggaagctatcgccagtgcaatcgcagaagaagagcagctcacccgcgaaatcgaggccgaagaaaacaacgacatcaatatcgagacggacaatgattctgatttttctgcttcaatgggatcaggatcagtctctttttgtgggatgagcatggactggaatgacgtgctggccgactacgaggccagagaatcgtggcggcagaacacaagctggggcgacattgtggaggaagaacccgcgcgaccacccggccatggaatccatatgcacgaaaagctgtccagtccttcgcgtaaaaggacgatcgccgagtctaaaaagaagcatgaggaaaaacagatgaaggctcagcaacttcgtgaaaaactccgagaggagaagaccctgaaacttcagaagctcctggagcgagagaaggatgtgcgcaagtggaaagaagagttgctcgaccaaagacgtcggatgatggaagagaagctgctgcacgcggagtttaagagggaagtccagttgcaggccattgttaaaaaggcccaagaggaagaggcaaaagtaaatgaaatagcctttatcaacactcttgaagcccagaataaacggcacgacgtgctgtccaagctgaaagagtacgagcaaagattgaacgagctgcaggaggagcggcagcggcgccaggaagagaaacaagctcgggatgaagccgtgcaggaaaggaagcgtgctttagaagcagagcgacaagctcgggtcgaggaactccttatgaagaggaaagaacaagaggccagaatcgaacagcaaagacaggagaaggaaaaggccagagaggatgctgcacgggagagagctagagatcgggaagagaggctggccgctctgactgccgctcagcaagaggcgatggaggagctacaaaaaaagattcagctgaagcatgatgagagcattcggcggcacatggagcagattgagcagaggaaagaaaaagcagccgagctgtccagcgggcggcacgccaataccgattacgctccaaaactgactccctacgaaaggaagaagcagtgcagtctttgcaacgtgcttatctcttctgaggtgtatctattctctcatgttaaaggcagaaaacaccagcaagcggtacgggaaaacacatccatccagggccgggaactttcggacgaagaggttgaacacctgtcacttaagaagtatatcattgacattgtggtggagtccactgcccctgcggaagctctgaaggacggagaggagcgacagaaaaacaaaaaaaaggctaagaagatcaaagcccgaatgaatttcagggccaaggaatacgaaagcctgatggagacaaaaaattcaggaagcgattcgccatacaaagcaaaactgcagcgcctcgccaaagatctgctgaagcaagtccaggtccaggattctggatcatgggctaacaacaaggtgagcgccctggatagaacactgggagagattaccaggatacttgaaaaggagaacgtggcggatcagatcgcctttcaagctgctggtggcctgaccgccctagagcatatattacaagctgtagtgcctgcaacaaatgtaaataccgtattgcgcattccacccaaatccttatgtaatgcaattaatgtgtataacctgacctgcaataactgtagtgagaattgttccgacgtgttgttttccaataaaataacattcctgatggatctgttgattcatcaacttaccgtttacgtgccagacgaaaacaacacaatcttaggacggaacaccaataagcaggtctttgagggcctcactaccgggcttttgaaggtgtctgcagtagtgctcggctgcctgatcgcgaaccggcctgacggcaactgtcaaccagcaacgcccaagattcccacgcaggaaatgaagaacaagccatcccagggcgaccccttcaataaccgagtccaggacctcatctcatacgtggtgaatatgggattgatcgacaaactttgcgcatgcttcctgagcgtccagggccctgtggatgagaatccaaaaatggcaatcttcctccagcatgccgcgggattgcttcatgccatgtgcactttgtgtttcgctgtaacaggacggtcttatagtatattcgataacaaccgtcaggatcccacaggattgactgctgcattgcaggccacggacttagccggcgtactacacatgctgtactgcgtccttttccatgggaccattctagatcctagtaccgccagtcccaaagaaaactacacccaaaatacgatacaggtggctatccagagcctcagattttttaactcgtttgccgcattgcacctgccggcctttcagtcaattgtcggcgccgaggggctctcactcgcattccgacacatggcctcctctttactgggccattgctctcaggtctcctgcgagtccctgctgcacgaagtaatcgtctgcgtgggatattttactgtcaaccaccctgacaaccaagtcatcgtgcagtctggacggcaccccaccgtgttgcagaagttgtgtcaactgccattccagtatttctcagatccccgacttattaaggttttatttcctagcctcatagccgcatgctacaacaatcatcaaaacaagatcatcctggaacaggagatgagctgtgtgctactggcgacctttattcaagatctggctcagaccccagggcaggccgagaaccagccttaccaaccaaagggcaagtgcctcggctcccaggattatctggaactggcaaatagattccctcagcaagcctgggaggaagctagacagttcttcctcaaaaaagaaaaaaaatag

SEQ ID NO: 206121 - DNA, 4203 bp, Artificial Sequence
  derived and/or modified sequence
atgatggccagcttccagaggagcaacagccatgacaaggtgagaagaattgtggccgaggagggccgcacagccaggaacctgattgcctggagcgtgcccctggagagcaaggatgatgatggcaagcccaagtgccagacaggaggcaagagcaagaggaccatccagggcacccacaagaccaccaagcagagcacagctgtggactgcaagatcaccagcagcaccaccggggacaagcactttgacaagagccccaccaagaccaggcaccccaggaagattgacctgcgggcccgctactgggccttcctgtttgacaacctgcggcgggctgtggatgagatctacgtgacctgtgagagtgaccagagcgtggtggagtgcaaggaggtgctgatgatgctggacaactacgtgcgggacttcaaggccctgattgactggatccagctgcaggagaagctggagaagacagatgcccagagccggcccaccagcctggcctgggaggtgaagaagatgagccctggaagacatgtgatccccagccccagcacagaccgcatcaacgtgaccagcaatgcccggcgcagcctgaactttggaggcagcactggaacagtgcctgccccccggctggcccccaccggggtgtcctgggccgacaaggtgaaggcccaccacacaggcagcacagccagcagcgagatcaccccagcccagagctgcccccccatgacagtgcagaaggccagcaggaagaatgaaaggaaggatgctgagggctgggagaccgtgcagaggggccggcccatccgcagccgcagcacagctgtgatgcccaaggtgtccctggccacagaggccaccaggagcaaggatgacagcgacaaggaaaatgtgtgcctgctgcctgatgagagcatccagaagggccagtttgtgggagatggcaccagcaacaccatcgagagccaccccaaggacagcctgcacagctgtgaccaccccctggccgagaagacccagttcaccgtgtccaccctggatgatgtgaagaacagcggcagcatccgggacaactacgtgaggaccagcgagatctctgctgtgcacatcgacacagaatgtgtgtctgtgatgctgcaggccggcaccccacccctgcaggtgaatgaggagaagtttcctgctgagaaggccagaattgaaaatgagatggaccccagcgacatcagcaacagcatggccgaggtgctggccaagaaggaggagctggccgaccggctggagaaggccaatgaggaggccatcgccagcgccatcgccgaggaggagcagctgacccgggagattgaggccgaggagaacaatgacatcaacatcgagacagacaatgacagcgacttcagcgcctccatgggcagcggctctgtgtccttctgtggcatgtccatggactggaatgatgtgctggccgactatgaggcccgggagagctggaggcagaacacctcctggggagacatcgtggaggaggagcccgcccggcccccaggccacggcatccacatgcatgagaagctgagcagccccagcaggaagaggaccatcgccgagagcaagaagaagcatgaggagaagcagatgaaggcccagcagctgcgggagaagctgcgggaggagaagaccctgaagctgcagaagctgctggagcgggagaaggatgtgaggaagtggaaggaggagctgctggaccagaggaggaggatgatggaggagaagctgctgcatgctgagttcaagcgggaggtgcagctgcaggccatcgtgaagaaggcccaggaggaggaggccaaggtgaatgagatcgccttcatcaacaccctggaggcccagaacaagagacatgatgtgctgagcaagctgaaggagtatgagcagaggctgaatgagctgcaggaggagcggcagaggcggcaggaggagaagcaggccagagatgaggccgtgcaggagaggaagagggccctggaggccgagcggcaggcccgggtggaggagctgctgatgaagaggaaggagcaggaggcccgcatcgagcagcagaggcaggagaaggagaaggcccgggaggatgctgcccgggagcgggcccgggaccgggaggagcggctggccgccctgacagctgcccagcaggaggccatggaggagctgcagaagaagatccagctgaagcatgatgagagcatcagaagacacatggagcagatcgagcagaggaaggagaaggctgctgagctgagcagcggcagacatgccaacacagattatgcccccaagctgaccccctatgaaaggaagaagcagtgcagcctgtgcaatgtgctgatcagcagcgaggtgtacctgttcagccacgtgaagggcaggaagcaccagcaggccgtgcgggagaacaccagcatccagggccgggagctgagtgatgaggaggtggagcacctgagcctgaagaagtacatcatcgacatcgtggtggagagcacagccccagctgaggccctgaaggatggagaggagcggcagaagaacaagaagaaggccaagaagatcaaggccaggatgaacttccgggccaaggagtatgagagcctgatggagaccaagaacagcggcagtgacagcccctacaaggccaagctgcagaggctggccaaggacctgctgaagcaggtgcaggtgcaggacagcggctcctgggccaacaacaaggtgtctgccctggacaggaccctgggggagatcacccgcatcctggagaaggaaaatgtggccgaccagatcgccttccaggccgccggcggcctgacagccctggagcacatcctgcaggccgtggtgcctgccaccaacgtgaacacagtgctgcgcatcccccccaagagcctgtgcaatgccatcaacgtgtacaacctgacctgcaacaactgcagcgagaactgcagtgatgtgctcttcagcaacaagatcaccttcctgatggacctgctgatccaccagctgactgtgtatgtgcctgatgagaacaacaccatcctgggcaggaacaccaacaagcaggtgtttgagggcctgaccaccggcctgctgaaggtgtctgctgtggtgctgggctgcctgattgccaacagaccagatggcaactgccagcctgccacccccaagatccccacccaggagatgaagaacaagcccagccagggcgaccccttcaacaacagagtgcaggacctgatctcctatgtggtgaacatgggcctgattgacaagctgtgtgcctgcttcctgtctgtgcagggccctgtggatgagaaccccaagatggccatcttcctgcagcacgccgccggcctgctgcacgccatgtgcaccctgtgctttgctgtgacaggccgcagctacagcatctttgacaacaaccggcaggaccccaccggcctgacagctgccctgcaggccacagacctggccggcgtgctgcacatgctgtactgtgtgctcttccacggcaccatcctggaccccagcacagccagccccaaggagaactacacccagaacaccatccaggtggccatccagagcctgcgcttcttcaacagctttgctgccctgcacctgcctgccttccagagcatcgtgggcgctgagggcctgagcctggccttccgccacatggccagcagcctgctgggccactgcagccaggtgtcctgtgagagcctgctgcacgaggtgattgtgtgtgtgggctacttcaccgtgaaccacccagacaaccaggtgattgtgcagagcggccgccaccccaccgtgctgcagaagctgtgccagctgcccttccagtacttcagtgaccccaggctcatcaaggtgctcttccccagcctgattgctgcctgctacaacaaccaccagaacaagatcatcctggagcaggagatgagctgtgtgctgctggccaccttcatccaggacctggcccagaccccaggccaggccgagaaccagccctaccagcccaagggcaagtgcctgggcagccaggactacctggagctggccaaccgcttcccccagcaggcctgggaggaggcccggcagttcttcctgaagaaggagaagaagtag

SEQ ID NO: 206122 - DNA, 4203 bp, Artificial Sequence
  derived and/or modified sequence
atgatggccagcttccagcggagcaacagccacgacaaggtgcggcggatcgtcgccgaggagggccgcacagcccgaaatctcattgcttggagtgttcctctggagagtaaggacgacgacggaaagcccaaatgccagactggtggcaaatctaagcgcacgattcaaggcacacacaaaacaaccaaacagtccactgctgtagactgtaaaatcaccagcagtaccacgggggataagcactttgacaaatcgcccaccaagacccgacacccaagaaagatcgacctgagggccaggtactgggcgtttctgtttgacaacctgcggagggccgtggacgagatatacgtcacttgcgaatccgaccagagcgttgtggaatgcaaggaggtgttgatgatgctggataattatgtccgcgatttcaaagcactgatagactggatccagctgcaagagaagttggagaaaacagatgctcaaagcagacccacctcgctcgcctgggaggtgaagaagatgtctcccggccgccatgtcatcccttctcccagcactgatcgcattaacgtaacttctaatgctcgtagaagtctcaacttcggtggctcgaccggaacagtgcctgcaccacgccttgcacctaccggagtgtcttgggctgacaaagtgaaagcccaccacactggctcgacagcgagttccgaaatcacaccagcgcagagctgccctccaatgacggtccagaaggcctcacgcaaaaacgagagaaaggacgctgagggatgggaaaccgtacaacgggggaggcccatccggagtcgctcaacggcagtgatgcccaaagtgagcctcgctacagaggctaccagaagcaaagacgactcagataaagagaacgtgtgcctcctgccggacgaatccatccagaaaggtcagttcgtcggcgacggcacctcaaacactattgagtcacatcccaaggactccctccactcctgtgatcatcctttggcggagaaaactcagtttaccgtaagcaccttggatgatgtcaagaactcaggaagcattagagacaactatgttcgcactagcgaaatttccgccgtccatatcgatacagagtgcgtgagtgtgatgctccaggcagggaccccacccctgcaagtaaatgaggaaaaattccccgccgaaaaggcaagaatcgagaacgaaatggatccgtccgacatttctaacagcatggccgaagttctggcaaaaaaggaagagctggctgatcggctggaaaaagccaacgaagaggccattgcctctgccattgctgaagaagagcaacttacgagggagatagaggccgaagagaacaatgacataaatattgaaacggacaacgattcagacttcagtgcttcaatggggtcaggatctgtcagcttctgtggtatgagtatggactggaacgatgtgctggcagactatgaagctcgagaaagctggcggcagaacaccagttggggggacatagtagaggaggaaccagcacgacctccgggtcacggcatccacatgcacgagaagctgtcctccccctctaggaagcgcaccatcgccgagagtaaaaagaagcacgaagagaaacaaatgaaggcccaacaactccgagaaaagctacgcgaggagaagactcttaagttacaaaagctgctcgagcgcgagaaggacgtgagaaaatggaaggaggaactgctggatcagcggagacggatgatggaggagaagctcctccatgccgaatttaaaagggaggtccaactgcaagcgattgtgaaaaaggcacaggaggaagaagcaaaggtaaacgaaatcgcctttatcaatacactggaggcgcaaaataagaggcacgacgttctctctaagttgaaggaatatgagcagcggttgaatgaactccaggaggaacgccaaaggaggcaggaggaaaagcaggcacgagatgaagcagtgcaggaacggaagagggcactggaggccgagcggcaggccagggtggaggagctcctcatgaaacgaaaagagcaggaagcgcgcatcgaacagcaacgtcaggagaaggaaaaagccagagaggacgctgccagagagagagctcgtgatagggaagaacggttagccgctctgaccgcagctcagcaggaagctatggaggaacttcaaaaaaaaatccagttaaagcacgatgagagcatcaggaggcatatggaacaaatcgagcagaggaaagagaaggcagccgagttgagcagcgggagacacgccaacacggactatgcgcccaaactgacaccctatgagcggaagaagcaatgttccctgtgcaatgtattgatttcatcagaggtctatctcttttcccacgtcaagggcaggaagcatcagcaagctgttcgcgaaaacacttccatccagggtcgtgagctgagcgatgaggaggtcgaacacctatctttgaaaaagtatattattgacatcgtggtcgagtcaactgccccagctgaggctctgaaggacggagaggagcgccagaaaaataaaaaaaaggctaagaagatcaaagcgcggatgaacttccgtgcaaaagagtacgagtccctgatggaaaccaagaactcggggagcgattcgccttacaaggccaagttacagaggctggctaaagatttactaaaacaggtccaggtgcaggattctggatcctgggcaaataataaagtcagcgccttagatcggacgctgggtgaaataacaagaatcctggagaaggagaatgtggcagaccaaatcgccttccaagccgctggcggcctaactgccctggagcacattctgcaggccgttgtgcctgctacaaacgtcaacaccgtgctgcgcatccctccaaaaagtctgtgcaatgcgataaatgtctacaacttgacgtgtaataactgtagtgagaactgctccgacgtgttgttctcgaacaagatcacatttttgatggacctcctcattcaccaactgacagtgtacgtgcctgacgaaaacaacacgattctcggccggaacacaaacaagcaagtctttgaggggttgaccaccggcctactgaaggtaagcgctgtcgtcctgggctgcctgatcgccaatagacctgacggtaactgccaacccgcaacccctaaaatccccacccaggagatgaagaataaaccatcccagggcgatccctttaataaccgagtccaggatctcatctcatacgtggtgaacatgggcttgattgataaactctgtgcctgctttttatcagttcagggcccggtggacgagaacccgaaaatggctatctttttgcaacatgccgccggactgctgcatgcaatgtgcaccctctgtttcgcagttacaggaaggtcatactctatcttcgacaacaatcgtcaagatcctaccggcctgacagctgccttgcaggcgacagacctggcaggtgtgctgcacatgctctattgtgtactattccacggcacaatcctggacccttccaccgcctcaccaaaagaaaattatactcagaataccatccaggttgccattcaatccctccgcttttttaatagttttgccgctctgcacttaccagccttccagagtatcgtcggtgctgagggcctgtctttggcctttcggcacatggcctcctctctgctggggcactgctcacaggttagctgtgagtccctacttcatgaggtgattgtgtgcgtgggctatttcactgttaatcaccctgacaatcaagtgatcgtacagtctgggcgacaccccacagtgctgcagaaactctgccaacttccatttcagtatttctctgacccacgcttgatcaaagtactgtttcctagcctgattgcggcgtgctacaacaatcaccaaaacaagattatcctggaacaagaaatgagttgcgttttattggccacctttattcaggacctcgcccaaacaccaggccaggcagagaatcagccctatcagccaaagggcaaatgtctcggcagccaggactatctggaacttgccaacaggttccctcagcaggcctgggaggaggcaaggcagttctttctaaaaaaggagaagaagtag

SEQ ID NO: 206123 - DNA, 4203 bp, Artificial Sequence
  derived and/or modified sequence
atgatggccagcttccagcggagcaacagccacgacaaggtgcggcgcatcgtggctgaggaagggcgtactgccagaaatctgatcgcatggtccgtgcctttagagtctaaggatgacgatggaaagccaaaatgccagacagggggtaaaagcaagcgaacaattcagggaacacataaaaccaccaaacagtcaaccgctgtggattgtaagattacttcaagtaccaccggggacaagcattttgacaaaagcccaacgaaaacccgtcaccctcgaaaaattgacttgagggcaagatattgggctttcctgttcgacaatctgcgccgagctgtagacgaaatctacgtcacatgtgaatccgaccagtccgtcgttgaatgcaaggaggtgttgatgatgctggataattatgtgcgggacttcaaagccctgatcgactggatccaacttcaggaaaagctcgagaaaaccgatgcgcagtccaggcccactagcctggcgtgggaggttaaaaagatgagccctgggagacacgtcatcccttctccttccacggataggatcaacgtgacctcgaacgccaggagatcactaaatttcggtggttccacgggaaccgtgcccgcaccccgccttgccccaaccggcgtctcgtgggcggacaaagtcaaggctcatcataccgggtcgactgcgtcctccgaaatcactcccgcacagtcatgtccccccatgacagtgcagaaggcatcacgcaaaaacgagcgtaaggacgcggaaggttgggagaccgtgcagcgtgggcggcctataagaagccgctcgactgctgtgatgcccaaagtgtctcttgccacagaggctacaagatctaaagatgactccgataaggaaaatgtgtgccttttgcctgacgagtccatccagaaagggcagtttgtgggagacggcaccagcaatacaatcgagtcccatccaaaggactcactgcatagttgcgatcacccgctggccgagaaaacgcagttcacagtttctactctggatgacgtaaaaaatagcggaagtatcagggataattacgtcaggaccagtgagatttccgcagtgcatattgatacagaatgtgtgtcggttatgctccaagcaggcacacctcccctgcaggtcaacgaagagaaattccctgcggaaaaggcccggattgagaacgaaatggatccaagcgatatttccaatagtatggccgaagttttggcaaaaaaagaggagttggccgatcgtcttgaaaaagccaatgaggaagcaatcgcatcggccatcgccgaagaagagcagctcacaagagagatcgaagctgaagaaaacaatgacattaatatcgaaactgacaacgatagcgactttagcgcttcaatgggtagcggtagcgttagtttttgtggaatgtctatggattggaatgatgtgctcgcagactacgaggctcgcgagagctggaggcaaaacaccagttggggcgatatcgttgaggaagaacccgccaggccacctggacacggcattcacatgcatgagaaactttcctccccatcacgcaaacgcaccattgcggaatcaaagaaaaagcatgaggagaagcagatgaaggcacagcaactgcgcgaaaaactcagggaggagaaaacactgaagctgcagaaattgctcgagcgtgagaaggacgtcagaaagtggaaagaggaactattagaccagcggagacgcatgatggaggagaagctcctccacgcggagtttaagcgagaggtccagctccaggcaattgtgaaaaaggcccaagaggaagaagctaaagttaacgagatcgcattcattaacacacttgaagcacagaacaaaagacatgacgtcctgtctaagctcaaagaatatgaacagcgattgaacgaactacaggaggagaggcaacggcgacaggaggaaaagcaggcccgggatgaagctgtgcaggaacgcaagcgggcgctggaggccgaaaggcaggccagagtcgaggagctgctaatgaagaggaaagagcaagaagcacgcatcgagcagcagcggcaggaaaaggaaaaagcaagggaggatgctgccagagaaagagcccgagatcgagaagaacgactcgccgctctaacagccgcgcagcaagaggccatggaggaactgcagaagaaaatacagcttaagcacgatgaatctatacgccggcacatggagcagattgagcagcgcaaagagaaagcggctgaattgtccagcggccgtcatgccaataccgactatgcacccaagctgacaccctacgaaagaaaaaagcagtgcagtttgtgcaatgtgctcatatcttctgaggtctatctgttcagccacgtgaagggccgcaagcatcagcaagcggttagggaaaatacctcaatccaggggcgggagctttccgatgaggaggtggagcatctgtctcttaaaaagtacattattgacatcgttgttgagtcaacggcacctgcagaagccctgaaggacggcgaggagcgtcagaaaaacaagaagaaagccaaaaagatcaaagcccgcatgaatttccgcgctaaggagtacgaatctctaatggagacgaaaaattctgggtctgatagtccatataaagcaaagctgcagagactggccaaggatctgctgaaacaagtgcaggtccaggactcaggctcgtgggccaacaataaagtgtcagccctagaccggaccctgggtgagatcacccgcattctcgagaaagagaatgtcgccgatcagattgcttttcaggcggccggcggtcttacggctctggagcacattcttcaagctgtcgttccagcaacaaacgtgaatacagtcctgcggattccaccaaagtccctgtgtaacgccatcaatgtgtataatttaacctgcaataactgctcggaaaactgtagtgacgtgctcttttctaataaaatcacttttttaatggaccttctgatacatcagttaaccgtttacgtcccagacgagaataacaccatactcgggcgcaataccaacaagcaggttttcgagggccttaccactggcctgctgaaggtgagcgccgttgtgctgggttgcctcatagctaaccgaccggatgggaattgccagcctgctacaccaaaaatccccacacaggaaatgaaaaataagccatctcagggtgaccctttcaataatagggtccaggacctgatcagttatgtcgtgaacatgggcctaatcgacaaactgtgtgcctgtttcctgtccgtacagggacccgtggacgagaatcctaagatggcaatattcctacagcatgctgccggcctgttgcacgccatgtgtactctatgctttgctgtgacaggtcggtcctacagcatctttgacaacaatcggcaagatccaacaggactcaccgctgccctgcaagcaaccgatttggcgggagtcctgcacatgctgtactgtgttctctttcatggcactatcctcgaccctagtacagcctctcccaaggagaactatacacaaaatactattcaagtcgccatccagtcacttaggttcttcaatagtttcgctgccttgcacctgcctgcgttccagagtatcgttggcgcagagggtctcagcctcgcatttcggcacatggcgtcaagtctgctggggcactgcagccaggtgagctgcgaaagtcttctgcacgaagtgatcgtctgtgtggggtattttacagtgaatcatccagataatcaggtaatcgtccagtccggcaggcacccaacggtcttgcagaagctatgtcagctgcctttccagtatttctcagatcctaggttgattaaggtgttatttcccagcctgatcgccgcgtgctacaacaaccatcagaataagatcattctggaacaggagatgagctgcgttctactagctacctttatccaagatctggcccagacaccaggccaggctgagaatcaaccataccagcccaagggaaagtgtctgggctcacaagactatctggaactagcgaaccgattcccgcagcaagcctgggaggaagctaggcagtttttcttaaagaaggagaaaaaatag

SEQ ID NO: 206124 - DNA, 4203 bp, Artificial Sequence
  derived and/or modified sequence
atgatggccagctttcagcggtccaacagccatgacaaggtccgtaggattgttgccgaggagggacgcactgcgaggaacctaattgcatggtcagtacccctggagagtaaggatgatgacggaaaacctaagtgccagacaggtgggaagtcaaagaggaccattcaaggaacccacaagaccactaagcaatcaactgccgtggattgcaaaatcacctcctccaccaccggcgacaaacacttcgacaagagtccaacaaaaacccgccatcctagaaaaatcgatctccgcgctcggtactgggcgtttctttttgataacctgcgcagggcggttgatgagatctatgtgacgtgcgagtcagaccaatccgtcgtggagtgcaaggaagttctgatgatgctcgacaattatgttagggactttaaggctctgatcgactggatacagctgcaggagaaacttgagaagacagacgcccaatctcggccaacttcgcttgcctgggaggtgaagaagatgtctcctggacgccacgttatcccgtctccttcaacggatcgcatcaatgtaacctccaacgcacgcaggtccctgaatttcgggggtagcactggcaccgtgcccgctcccaggctcgccccaactggggtgagctgggctgacaaggtcaaggcacaccacacgggcagcacagcgtcctccgaaatcactccggcacagtcttgtccaccaatgactgttcaaaaggcctcccggaaaaacgagcggaaagacgccgaggggtgggagactgtgcaacggggaagacctatcaggtccagatctaccgcagtgatgcccaaagtgagcctggcaaccgaggcaacacgatctaaggacgattcagacaaggaaaacgtctgtctgctgcctgacgaatccatccagaaaggtcaatttgtaggggacggtacaagtaatactatcgagtcccacccaaaggactccctacacagctgcgaccaccccctcgctgagaaaactcagtttactgtgagcactctggatgacgtcaaaaatagcggttccattagagataattacgtgaggacaagcgagattagcgccgtccacatcgacaccgagtgtgtgtcagtcatgcttcaggcagggaccccccctctgcaggtgaatgaagaaaagttcccagcagagaaggcaaggatcgagaatgagatggacccttctgacatctcgaactcaatggcagaggtcctcgccaaaaaagaagaattggccgataggttagaaaaggcaaatgaagaggccatcgcttcggccatcgccgaggaagaacagcttacccgcgagattgaggcagaggagaacaacgacatcaatattgagactgacaacgattccgacttctctgctagcatgggttccggctccgtttccttttgtggcatgagtatggactggaatgatgtgcttgcagattacgaagcaagggagtcatggaggcagaatacttcctggggtgacatcgtcgaagaagagcccgcacggcctcccggacacggcatccacatgcatgagaagctgtcctcaccttctaggaagcgtactattgcagagtccaagaagaaacatgaagaaaagcagatgaaagcccaacagctacgcgagaaacttagagaagaaaaaacattaaaacttcagaagctacttgagcgggagaaggacgtgcgaaaatggaaggaagaactgctggatcagcgccgtcggatgatggaagagaaactgctacatgcggaatttaaaagagaagtacagttgcaggcaattgtcaagaaggcccaggaggaggaagccaaggtgaacgagatagcttttattaatacactcgaagctcagaataaaaggcacgacgtgctgtcaaagctaaaagaatatgaacagcgtctgaacgaattgcaggaagagcggcagaggcgacaggaagagaagcaggcccgtgacgaggccgtccaagagcgcaagagggctctggaggcagaaaggcaagcgagagtggaagagttgctgatgaagagaaaggagcaagaggcacggattgaacagcagcgccaggagaaggagaaggccagggaggacgctgccagagaacgggctcgcgacagggaagagaggctcgccgctctgacagcagcacagcaggaggccatggaggaactgcagaagaagatccagctgaaacacgacgaaagcatacggagacatatggagcagatagagcagaggaaggagaaggccgcagagctgagtagcggaagacacgcaaatacagattatgcgcctaaattgactccttacgagcgtaagaagcagtgttccctctgcaatgtattgatctcctccgaggtatatctgttctcccacgtgaagggaagaaaacaccagcaggcggttagagaaaacacgagcattcagggacgagagttgtcggacgaggaggtggagcacttgagcctgaagaagtacataatcgatatcgttgttgagtccaccgcacccgcagaggcgttaaaagatggggaggagcggcagaaaaataaaaaaaaggctaaaaagattaaggctcggatgaacttccgagctaaggagtacgaaagcctgatggaaaccaaaaatagcggctctgatagcccatataaggccaagcttcaaaggctggccaaggacttgcttaagcaggtgcaggtccaggatagcggcagttgggctaataacaaggtgtccgcattggatcgcaccctgggagagatcacacgcatcctggagaaggagaacgtggctgatcaaatcgcttttcaggcagctggcggtttgactgctctggagcacatccttcaagcagtggtccccgctaccaacgtcaatacagttcttagaattccacctaagagcttatgtaatgccatcaacgtgtacaatctgacatgtaacaattgctcagaaaactgctctgacgtgctgtttagcaacaagatcacttttcttatggacctgttgattcatcaactgactgtttacgtgccagatgaaaataatactattctggggagaaataccaataaacaggtgttcgagggtctgaccacagggctgctcaaagtctctgccgttgtgcttggctgcctgatcgctaaccggccagacggaaattgccagccagccacccccaagatcccaacccaagagatgaaaaacaagcccagtcagggtgaccctttcaataacagggtgcaggatcttattagctacgtggtgaatatgggactgattgacaaactgtgcgcctgcttcctgtcagtccagggaccggtggatgaaaaccccaagatggccatctttctccagcacgcagccggtctactgcatgccatgtgcaccctttgtttcgcagtgacgggaaggagttactctattttcgacaataaccggcaagatcctaccggtctcactgccgcactacaagccacagatctggcaggcgtcctgcatatgctgtattgcgtgctgttccacggaaccatcctggatcctagtaccgcctcccctaaggaaaactatacacagaatacaattcaggttgctatccagtctctgcggtttttcaactcgttcgctgccctccatctgccagctttccaaagcatcgtcggggctgagggactttccttggctttcagacacatggcgagctcattactgggacactgctcccaggtgagctgcgagtctctgttacatgaggtgattgtctgtgttggatacttcaccgttaatcacccagacaaccaggttatcgttcagtccggtaggcaccctactgtgctgcagaagctatgccagctgccatttcagtatttcagcgatcctcgtctcattaaggttctgttcccgtcacttatcgccgcttgctataacaatcatcaaaacaagattattctcgaacaggaaatgagctgtgtgctgttggcgaccttcatccaggacctagcacagacccctgggcaggctgaaaatcagccttaccagcctaagggtaagtgccttggtagccaggattacttggagctggcaaaccggtttccccaacaggcctgggaagaggcacggcagttcttccttaagaaggagaagaagtag

SEQ ID NO: 206125 - DNA, 4203 bp, Artificial Sequence
  derived and/or modified sequence
atgatggcaagtttccagcgaagcaattcccacgacaaagtgaggcggatagtggccgaggagggaaggaccgcacgtaatctgattgcatggtcagtgcctctagaatctaaagatgacgatgggaagcccaagtgtcagactggcggtaagtcgaagaggacaattcaaggcacacacaagacaaccaagcagagcactgcggttgattgcaagattacatcctcgacaaccggggataagcatttcgataaatccccaacaaaaacaaggcatccacggaaaatcgacctgcgagcgagatactgggcgttcctgtttgacaaccttagacgggctgtggatgagatatatgtgacttgtgagtccgatcagagtgtcgtagagtgcaaagaagtgttgatgatgctggataactatgtgagggatttcaaagcattaattgattggatccaattacaagaaaagctggagaagaccgacgcacagtccagacccacatctctggcatgggaggttaagaaaatgagccctgggagacatgtgatcccgtcacccagtaccgacaggattaatgtcacatcaaacgccagaaggagcctgaattttggaggaagtacgggcaccgtgccagcgccacggctcgcacctactggcgtcagttgggctgacaaagtaaaggctcaccatacgggcagtaccgccagctccgaaattactcctgcacagtcttgccccccaatgaccgtccaaaaggccagtcgcaagaacgagcgaaaagacgccgaggggtgggagaccgttcagcgtggacgcccaattcggagcaggtcaaccgcagtaatgcctaaggtgtcactggctacagaggcaacccggtccaaagatgattcagataaggagaacgtgtgtcttctccccgacgaaagcatacagaaggggcagttcgtaggagatggcacatccaataccatagagtctcacccaaaagactcactgcacagctgtgatcatcccctggccgaaaagactcagttcaccgttagcactctcgatgatgtgaaaaatagcgggtcaatacgggacaactatgtacggaccagcgaaattagcgcagttcatattgacacagaatgcgtgtccgttatgttgcaagcgggaacacctcccctgcaggtcaatgaggagaagttccctgccgagaaggccaggattgagaacgaaatggatcccagtgatatctccaactcaatggcagaggtcttggcgaaaaaggaggagcttgcagatagattggagaaggccaatgaggaggctatagcatccgctatcgccgaagaggagcagttgactcgcgagatcgaagcagaggagaataatgacattaatatcgaaacagataacgacagtgacttttccgcgagcatgggttctggctcagtgtccttttgcgggatgtcgatggactggaacgacgtcctggcagattacgaagctcgggaatcctggaggcagaacacatcttggggtgatattgtggaagaggaaccagccagaccccctggccatggaatccatatgcatgagaagctgtcctctccatcacggaagagaacaatcgcagaaagtaaaaaaaagcatgaggaaaagcagatgaaggctcagcaactgagagaaaagctcagggaagaaaagacactgaagttacagaaactgctcgagagagaaaaggacgtcagaaagtggaaggaggaacttctggaccagcgcagacgcatgatggaggagaaactcctgcacgctgagtttaagagagaggtccaactgcaggccatcgtgaagaaggcccaggaggaggaggccaaggttaatgaaattgctttcatcaacactttggaggcccagaacaagcgccatgatgtcttgtctaaattgaaggaatacgaacagaggctgaatgaacttcaggaagaacggcagcgaaggcaagaagagaaacaagccagagacgaagccgtccaggagcgtaagcgcgctctagaagccgaaaggcaggctcgcgtggaagaactactcatgaagcggaaggagcaggaagcccgtatcgagcagcagcggcaggagaaggagaaagcgcgagaggacgctgcaagagaacgggctagagatcgggaggagagactggcggctttgacggctgctcagcaggaggccatggaagagctacaaaagaaaatccagctgaagcatgatgaatcgatccggagacacatggaacagatcgagcaaaggaaggagaaagccgctgagctgtcctccggtcggcacgccaatacagattacgcccctaagctaactccatacgagcgaaaaaagcaatgttcactgtgcaatgtgctgatctcgagcgaggtgtacctgtttagtcacgtgaagggtcgcaaacaccagcaagctgttcgcgaaaataccagcatccaaggccgagaattgtctgatgaggaggttgagcatctcagtctcaaaaagtatatcattgatattgtggtggaatccacagccccagccgaagctctgaaggacggtgaagagagacagaaaaacaaaaaaaaagcaaaaaagattaaggcaagaatgaattttcgcgctaaggagtacgaatccctgatggaaacgaagaacagtggaagcgacagtccgtacaaagcaaagctccagaggctggctaaagacctgttgaagcaagttcaggttcaagactccgggtcctgggcgaataataaggtgtctgccctggaccgtactctgggggagattacaaggattctagagaaagagaacgtggccgaccagatagcgttccaagcagcaggcggtctcaccgctcttgagcatattcttcaggcagtagtaccagcgactaatgtgaacacagttctccgaatcccaccgaaatcactatgcaatgccatcaatgtgtacaaccttacctgcaacaattgttccgaaaattgctcggatgtgttgttttccaacaagatcacttttctgatggatctgttgatccaccagctaacagtgtacgtgccggacgagaacaataccatcttgggtcgaaatactaacaaacaggtgttcgagggattgaccacagggttactcaaagtctccgcagttgtcctcggatgcctcatcgcaaatcgtcctgatggcaattgccaaccggctacccccaaaatcccgacacaggagatgaaaaataagccctcccaaggggacccattcaacaatagagtccaggatttaatttcatatgtcgttaacatgggccttatcgacaagctatgtgcttgtttcctaagtgtgcagggaccagtggacgagaatcccaagatggctatcttcctgcagcacgccgcaggcctcctgcacgctatgtgtaccttgtgctttgccgtcacagggcgatcctactcaattttcgacaataatagacaggaccccacaggcctgaccgccgctctgcaggcgaccgatctcgccggtgtcttgcacatgttgtattgtgtgctcttccatggcaccatcctcgacccatcaactgcctcacccaaggaaaactatactcagaacaccatccaagtggcaatccaatcgctccgctttttcaactctttcgcagcgctgcacctgcccgcttttcagtcaatcgtgggcgcagagggtctgagtctggcattcagacacatggcaagctcccttctgggacactgttcccaggtgagttgtgagtctcttctgcatgaggtgattgtctgcgtaggatattttactgtgaaccacccagacaaccaggtcatcgtacagtcaggcaggcatcccactgtattgcagaagctgtgccagctccccttccagtactttagcgatcctcgcctgattaaagtcctgttcccctctctgattgctgcatgttacaacaaccatcaaaataagatcattctggagcaagagatgtcttgtgtccttttggccacgtttatccaagaccttgctcagacccccggtcaggccgaaaatcagccctatcagccaaagggtaagtgcttgggctcccaggactatctggaattagcgaacaggttcccccagcaggcatgggaagaagctaggcagtttttcttgaagaaggagaaaaagtag

SEQ ID NO: 206126 - DNA, 4707 bp, Artificial Sequence
  derived and/or modified sequence
gagtcatactccatgggtttatgtgataaatgatcttggcatagaagagaatttaaagaatgatggcttcattccagcgctccaatagtcatgacaaagtaaggagaatagttgcagaggagggtcgtacagcaagaaacctaatagcttggagtgttccactagaaagcaaagatgatgatggaaaacctaaatgtcaaactggtggaaaatctaagaggaccattcaaggcactcataaaactactaaacagagtactgcagtggactgtaaaataacatcgtctacgactggagataaacactttgataaaagtcccactaaaacaaggcaccctcggaaaattgatctaagagctcgatactgggcatttctttttgataatcttcgccgagcagtagatgaaatctatgtaacttgcgaatcagatcagagtgtggtcgaatgtaaggaggtgctaatgatgctggataactatgtaagagatttcaaagcattgattgactggattcagcttcaggaaaagctagagaagacagatgctcaaagcagaccaacatcattggcatgggaagtaaagaagatgtctccgggacgccatgtgattccaagtccatcaacagatagaataaatgtaacatcaaatgctcgacgaagcttaaattttggaggttcaactggcacagtgccagctcctcgtctggctcccacaggtgtcagttgggctgacaaggtaaaggctcatcatacaggctctactgcttcttcagaaataacacccgcccagtcttgcccaccaatgacagtgcagaaggcctcacgcaaaaatgaacggaaagatgctgaaggatgggagaccgttcagagaggaaggcctattcgttctcgatcaacagcagtgatgccaaaagtttcattggcaacagaagccacaagatcaaaggatgacagtgataaagaaaatgtatgtcttttacctgatgaaagcatacagaaaggtcaatttgttggagatggaacttctaatactatagaatctcatcccaaagactcattacactcttgtgaccatcctcttgccgaaaaaacccagttcacagtgagtacattggatgatgtgaagaattctggcagtattcgagacaattatgttcgaacttctgaaatatctgctgtccacattgatacagagtgtgtttcagttatgctgcaagctggtacacctcctttacaagtaaatgaagaaaaatttccagcagagaaagcaaggatagaaaatgaaatggacccttcagatatttcaaattccatggcagaagtccttgctaaaaaagaagagctagcagatcgtctagaaaaggccaatgaagaagccattgctagtgctattgctgaagaagaacagttaactagagaaattgaagctgaagaaaacaatgatattaacattgaaactgacaacgacagtgatttttctgccagcatgggcagtgggagtgtttctttctgtggtatgtccatggactggaacgatgtccttgcagattatgaagctcgtgagtcttggcgccaaaatacatcctggggggacattgtagaagaagaacctgctagacctccagggcatggaattcacatgcatgaaaaactttcttcaccctctcgtaaaagaacaattgcagaatctaagaagaaacatgaagaaaaacaaatgaaagcacagcagctaagggaaaagttacgcgaagagaaaacattgaagcttcagaaattgttagaaagggagaaggatgtccggaagtggaaggaagaattgctagatcaacgacgcaggatgatggaagaaaaattacttcatgctgagtttaagcgagaagtgcagttacaagcaattgtgaaaaaagcacaagaagaagaagctaaggtaaatgaaattgcctttataaatacccttgaagcccagaataaacgtcatgatgttttatcaaaattgaaggaatatgaacagaggcttaatgagctacaggaagagcgtcagagaagacaggaagaaaagcaagcacgtgatgaagctgtgcaggaacgcaagagagctctagaggcagagcggcaggcccgtgtagaagaattgttaatgaagaggaaagaacaagaagcccgaattgaacaacagaggcaagaaaaggaaaaagcccgtgaggatgcagcccgggaaagagctagagacagggaagaacgattggcagcactcacagctgctcaacaagaagctatggaagagttacagaaaaaaattcagctcaagcatgatgaaagtattcgaaggcacatggaacagattgaacaaagaaaagaaaaagctgctgagctaagcagtgggcgacatgcaaatactgattatgcccccaaactgaccccttatgaaagaaagaagcagtgttctctctgcaatgtcctgatctcttcagaggtatatctttttagccatgttaaagggagaaaacaccagcaagccgtgagagagaataccagcatccaggggcgtgaactgtcagatgaagaagtggagcatctttccttgaagaagtacattattgacattgtggttgaaagtacagctccagcagaagctttgaaagatggagaagagcggcaaaaaaataaaaaaaaagccaaaaagataaaagcccggatgaacttcagggctaaggaatatgagagtttaatggaaaccaaaaattctggctctgattcaccttataaagcaaagcttcagcgattagccaaagatcttctaaaacaagtacaagttcaagacagtggctcatgggcaaacaataaagtgtctgctttggatcggaccctaggagagatcactagaatactggaaaaagagaatgtggcagatcagattgcatttcaagctgctggtggattaacagcccttgaacacatccttcaagcagtagtcccagccacaaatgtgaacacagttttaagaattcctcctaagtctctctgcaatgcaatcaatgtttacaacctcacctgcaataactgttcagaaaactgcagtgatgttctgtttagtaacaagattaccttcttaatggacctcctgatacaccagttgacggtttatgttccagatgaaaataatactattttggggagaaatacaaataaacaagtttttgaaggcttgacaactggacttctcaaagtcagtgctgtggttttgggctgcctgattgccaatcgaccagatggaaactgccagccagctaccccaaaaataccaacacaggaaatgaaaaacaaaccctcacaaggtgatccttttaacaatcgagttcaggaccttatcagctacgtggtgaacatgggtctgattgacaaactgtgtgcctgcttcctctcggtgcaaggcccagtggatgagaatcccaagatggccatatttctgcagcatgccgcaggactcttacatgcaatgtgtacactgtgctttgctgtcactggaaggtcatacagcatatttgacaataatcgccaggatcccacagggctgacagctgctcttcaggcaaccgacctggctggagttcttcatatgctctactgtgtcctcttccatggcaccatcttggaccccagcactgccagtcccaaggagaattacactcaaaataccatccaagtggccattcagagtttacgtttcttcaacagctttgcagctcttcatctgcctgcttttcagtctattgtaggggcagagggcttgtcccttgcattccggcacatggccagctccctgctgggccactgcagccaagtctcctgtgaaagcctccttcatgaggtcatcgtctgtgtgggctacttcactgtcaaccacccagataaccaggtgatcgtgcagtccggccgccaccccacagtgctgcagaagctctgccagttgcccttccagtatttcagtgacccacggctgatcaaagtactgttcccttcacttatcgctgcttgttacaacaaccatcagaacaagatcattctggagcaagagatgagctgtgttttactggccactttcattcaggatttggcacagactccaggtcaagcggaaaaccagccttaccaacccaaagggaaatgccttggttcccaagactatcttgagctggctaacagatttcctcagcaggcctgggaagaagctcgacagtttttcttgaaaaaagagaaaaaataaatgttttggttgattctgtatttgagtacccttgttaatattttaaattgtccaaacaaacattctaattgttccttaagaactcattttcccatgtttatactcttcccacactgtagatatggcatgtactttacactatttataatgactgtagatacttgaatgttctacttgctaattttgcaagttgagtttatttcatttatgcagagtatcttggagtttggtaatttccatcttatgataatatatactttgcatttgtgatatgggtgaaaggagacataaaattagcaagtctgttttgttcttgtaataaagtaacttattctgttttcattgttgacttttcatgttaaggaaatacgaatctgaaagaaaaatgttaactccagctcttgaagtatcttaaataaagacttaattaaagtttacctgctct

SEQ ID NO: 206127 - DNA, 4850 bp, Artificial Sequence
  derived and/or modified sequence
acttctccttcctgctgccttgtaaagaaggcgccttgcttgcccttctccttccaccatgattgcaagtttcctgaggcctccccagccatgctgaactgaaaacctaaatgtcaaactggtggaaaatctaagaggaccattcaaggcactcataaaactactaaacagctctttgaggaatcgccatacttctttccataatggccgaactaatttacactcccagcaatagcgtagtactgcagtggactgtaaaataacatcgtctacgactggagataaacactttgataaaagtcccactaaaacaaggcaccctcggaaaattgatctaagagctcgatactgggcatttctttttgataatcttcgccgagcagtagatgaaatctatgtaacttgcgaatcagatcagagtgtggtcgaatgtaaggaggtgctaatgatgctggataactatgtaagagatttcaaagcattgattgactggattcagcttcaggaaaagctagagaagacagatgctcaaagcagaccaacatcattggcatgggaagtaaagaagatgtctccgggacgccatgtgattccaagtccatcaacagatagaataaatgtaacatcaaatgctcgacgaagcttaaattttggaggttcaactggcacagtgccagctcctcgtctggctcccacaggtgtcagttgggctgacaaggtaaaggctcatcatacaggctctactgcttcttcagaaataacacccgcccagtcttgcccaccaatgacagtgcagaaggcctcacgcaaaaatgtgaccagcttccatcctgaagccacctaggggctgccagccacttgtcaactcattagcatacaaaaagacacatcattttgggaattccaaagattttaggagttgcatgccaggagacttgagatgaagaccaaatatatattttgcaatatcacagaacggaaagatgctgaaggatgggagaccgttcagagaggaaggcctattcgttctcgatcaacagcagtgatgccaaaagtttcattggcaacagaagccacaagatcaaaggatgacagtgataaagaaaatgtatgtcttttacctgatgaaagcatacagaaaggtcaatttgttggagatggaacttctaatactatagaatctcatcccaaagactcattacactcttgtgaccatcctcttgccgaaaaaacccagttcacagtgagtacattggatgatgtgaagaattctggcagtattcgagacaattatgttcgaacttctgaaatatctgctgtccacattgatacagagtgtgtttcagttatgctgcaagctggtacacctcctttacaagtaaatgaagaaaaatttccagcagagaaagcaaggatagaaaatgaaatggacccttcagatatttcaaattccatggcagaagtccttgctaaaaaagaagagctagcagatcgtctagaaaaggccaatgaagaagccattgctagtgctattgctgaagaagaacagttaactagagaaattgaagctgaagaaaacaatgatattaacattgaaactgacaacgacagtgatttttctgccagcatgggcagtgggagtgtttctttctgtggtatgtccatggactggaacgatgtccttgcagattatgaagctcgtgagtcttggcgccaaaatacatcctggggggacattgtagaagaagaacctgctagacctccagggcatggaattcacatgcatgaaaaactttcttcaccctctcgtaaaagaacaattgcagaatctaagaagaaacatgaagaaaaacaaatgaaagcacagcagctaagggaaaagttacgcgaagagaaaacattgaagcttcagaaattgttagaaagggagaaggatgtccggaagtggaaggaagaattgctagatcaacgacgcaggatgatggaagaaaaattacttcatgctgagtttaagcgagaagtgcagttacaagcaattgtgaaaaaagcacaagaagaagaagctaaggtaaatgaaattgcctttataaatacccttgaagcccagaataaacgtcatgatgttttatcaaaattgaaggaatatgaacagaggcttaatgagctacaggaagagcgtcagagaagacaggaagaaaagcaagcacgtgatgaagctgtgcaggaacgcaagagagctctagaggcagagcggcaggcccgtgtagaagaattgttaatgaagaggaaagaacaagaagcccgaattgaacaacagaggcaagaaaaggaaaaagcccgtgaggatgcagcccgggaaagagctagagacagggaagaacgattggcagcactcacagctgctcaacaagaagctatggaagagttacagaaaaaaattcagctcaagcatgatgaaagtattcgaaggcacatggaacagattgaacaaagaaaagaaaaagctgctgagctaagcagtgggcgacatgcaaatactgattatgcccccaaactgaccccttatgaaagaaagaagcagtgttctctctgcaatgtcctgatctcttcagaggtatatctttttagccatgttaaagggagaaaacaccagcaagccgtgagagagaataccagcatccaggggcgtgaactgtcagatgaagaagtggagcatctttccttgaagaagtacattattgacattgtggttgaaagtacagctccagcagaagctttgaaagatggagaagagcggcaaaaaaataaaaaaaaagccaaaaagataaaagcccggatgaacttcagggctaaggaatatgagagtttaatggaaaccaaaaattctggctctgattcaccttataaagcaaagcttcagcgattagccaaagatcttctaaaacaagtacaagttcaagacagtggctcatgggcaaacaataaagtgtctgctttggatcggaccctaggagagatcactagaatactggaaaaagagaatgtggcagatcagattgcatttcaagctgctggtggattaacagcccttgaacacatccttcaagcagtagtcccagccacaaatgtgaacacagttttaagaattcctcctaagtctctctgcaatgcaatcaatgtttacaacctcacctgcaataactgttcagaaaactgcagtgatgttctgtttagtaacaagattaccttcttaatggacctcctgatacaccagttgacggtttatgttccagatgaaaataatactattttggggagaaatacaaataaacaagtttttgaaggcttgacaactggacttctcaaagtcagtgctgtggttttgggctgcctgattgccaatcgaccagatggaaactgccagccagctaccccaaaaataccaacacaggaaatgaaaaacaaaccctcacaaggtgatccttttaacaatcgagttcaggaccttatcagctacgtggtgaacatgggtctgattgacaaactgtgtgcctgcttcctctcggtgcaaggcccagtggatgagaatcccaagatggccatatttctgcagcatgccgcaggactcttacatgcaatgtgtacactgtgctttgctgtcactggaaggtcatacagcatatttgacaataatcgccaggatcccacagggctgacagctgctcttcaggcaaccgacctggctggagttcttcatatgctctactgtgtcctcttccatggcaccatcttggaccccagcactgccagtcccaaggagaattacactcaaaataccatccaagtggccattcagagtttacgtttcttcaacagctttgcagctcttcatctgcctgcttttcagtctattgtaggggcagagggcttgtcccttgcattccggcacatggccagctccctgctgggccactgcagccaagtctcctgtgaaagcctccttcatgaggtcatcgtctgtgtgggctacttcactgtcaaccacccagataaccaggtgatcgtgcagtccggccgccaccccacagtgctgcagaagctctgccagttgcccttccagtatttcagtgacccacggctgatcaaagtactgttcccttcacttatcgctgcttgttacaacaaccatcagaacaagatcattctggagcaagagatgagctgtgttttactggccactttcattcaggatttggcacagactccaggtcaagcggaaaaccagccttaccaacccaaagggaaatgccttggttcccaagactatcttgagctggctaacagatttcctcagcaggcctgggaagaagctcgacagtttttcttgaaaaaagagaaaaaataaatgttttggttgattctgtatttgagtacccttgttaatattttaaattgtccaaacaaacattctaattgttccttaagaactcattttcccatgtttatactcttcccacactgtagatatggcatgtactttacactatttataatgactgtagatacttgaatgttctacttgctaattttgcaagttgagtttatttcatttatgcagagtatcttggagtttggtaatttccatcttatgataatatatactttgcatttgtgatatgggtgaaaggagacataaaattagcaagtctgttttgttcttgtaataaagtaacttattctgttttcattgttgacttttcatgttaaggaaatacgaatctgaaagaaaaatgttaactccagctcttgaagtatcttaaataaagacttaattaaagtttacctgctct

SEQ ID NO: 206128 - DNA, 4747 bp, Artificial Sequence
  derived and/or modified sequence
gctttgagccgccccgaactaagcagggcggtcgggggagtcatactccatgggtttatgtgataaatgatcttggcatagaagagaatttaaagaatgatggcttcattccagcgctccaatagtcatgacaaagtaaggagaatagttgcagaggagggtcgtacagcaagaaacctaatagcttggagtgttccactagaaagcaaagatgatgatggaaaacctaaatgtcaaactggtggaaaatctaagaggaccattcaaggcactcataaaactactaaacagagtactgcagtggactgtaaaataacatcgtctacgactggagataaacactttgataaaagtcccactaaaacaaggcaccctcggaaaattgatctaagagctcgatactgggcatttctttttgataatcttcgccgagcagtagatgaaatctatgtaacttgcgaatcagatcagagtgtggtcgaatgtaaggaggtgctaatgatgctggataactatgtaagagatttcaaagcattgattgactggattcagcttcaggaaaagctagagaagacagatgctcaaagcagaccaacatcattggcatgggaagtaaagaagatgtctccgggacgccatgtgattccaagtccatcaacagatagaataaatgtaacatcaaatgctcgacgaagcttaaattttggaggttcaactggcacagtgccagctcctcgtctggctcccacaggtgtcagttgggctgacaaggtaaaggctcatcatacaggctctactgcttcttcagaaataacacccgcccagtcttgcccaccaatgacagtgcagaaggcctcacgcaaaaatgaacggaaagatgctgaaggatgggagaccgttcagagaggaaggcctattcgttctcgatcaacagcagtgatgccaaaagtttcattggcaacagaagccacaagatcaaaggatgacagtgataaagaaaatgtatgtcttttacctgatgaaagcatacagaaaggtcaatttgttggagatggaacttctaatactatagaatctcatcccaaagactcattacactcttgtgaccatcctcttgccgaaaaaacccagttcacagtgagtacattggatgatgtgaagaattctggcagtattcgagacaattatgttcgaacttctgaaatatctgctgtccacattgatacagagtgtgtttcagttatgctgcaagctggtacacctcctttacaagtaaatgaagaaaaatttccagcagagaaagcaaggatagaaaatgaaatggacccttcagatatttcaaattccatggcagaagtccttgctaaaaaagaagagctagcagatcgtctagaaaaggccaatgaagaagccattgctagtgctattgctgaagaagaacagttaactagagaaattgaagctgaagaaaacaatgatattaacattgaaactgacaacgacagtgatttttctgccagcatgggcagtgggagtgtttctttctgtggtatgtccatggactggaacgatgtccttgcagattatgaagctcgtgagtcttggcgccaaaatacatcctggggggacattgtagaagaagaacctgctagacctccagggcatggaattcacatgcatgaaaaactttcttcaccctctcgtaaaagaacaattgcagaatctaagaagaaacatgaagaaaaacaaatgaaagcacagcagctaagggaaaagttacgcgaagagaaaacattgaagcttcagaaattgttagaaagggagaaggatgtccggaagtggaaggaagaattgctagatcaacgacgcaggatgatggaagaaaaattacttcatgctgagtttaagcgagaagtgcagttacaagcaattgtgaaaaaagcacaagaagaagaagctaaggtaaatgaaattgcctttataaatacccttgaagcccagaataaacgtcatgatgttttatcaaaattgaaggaatatgaacagaggcttaatgagctacaggaagagcgtcagagaagacaggaagaaaagcaagcacgtgatgaagctgtgcaggaacgcaagagagctctagaggcagagcggcaggcccgtgtagaagaattgttaatgaagaggaaagaacaagaagcccgaattgaacaacagaggcaagaaaaggaaaaagcccgtgaggatgcagcccgggaaagagctagagacagggaagaacgattggcagcactcacagctgctcaacaagaagctatggaagagttacagaaaaaaattcagctcaagcatgatgaaagtattcgaaggcacatggaacagattgaacaaagaaaagaaaaagctgctgagctaagcagtgggcgacatgcaaatactgattatgcccccaaactgaccccttatgaaagaaagaagcagtgttctctctgcaatgtcctgatctcttcagaggtatatctttttagccatgttaaagggagaaaacaccagcaagccgtgagagagaataccagcatccaggggcgtgaactgtcagatgaagaagtggagcatctttccttgaagaagtacattattgacattgtggttgaaagtacagctccagcagaagctttgaaagatggagaagagcggcaaaaaaataaaaaaaaagccaaaaagataaaagcccggatgaacttcagggctaaggaatatgagagtttaatggaaaccaaaaattctggctctgattcaccttataaagcaaagcttcagcgattagccaaagatcttctaaaacaagtacaagttcaagacagtggctcatgggcaaacaataaagtgtctgctttggatcggaccctaggagagatcactagaatactggaaaaagagaatgtggcagatcagattgcatttcaagctgctggtggattaacagcccttgaacacatccttcaagcagtagtcccagccacaaatgtgaacacagttttaagaattcctcctaagtctctctgcaatgcaatcaatgtttacaacctcacctgcaataactgttcagaaaactgcagtgatgttctgtttagtaacaagattaccttcttaatggacctcctgatacaccagttgacggtttatgttccagatgaaaataatactattttggggagaaatacaaataaacaagtttttgaaggcttgacaactggacttctcaaagtcagtgctgtggttttgggctgcctgattgccaatcgaccagatggaaactgccagccagctaccccaaaaataccaacacaggaaatgaaaaacaaaccctcacaaggtgatccttttaacaatcgagttcaggaccttatcagctacgtggtgaacatgggtctgattgacaaactgtgtgcctgcttcctctcggtgcaaggcccagtggatgagaatcccaagatggccatatttctgcagcatgccgcaggactcttacatgcaatgtgtacactgtgctttgctgtcactggaaggtcatacagcatatttgacaataatcgccaggatcccacagggctgacagctgctcttcaggcaaccgacctggctggagttcttcatatgctctactgtgtcctcttccatggcaccatcttggaccccagcactgccagtcccaaggagaattacactcaaaataccatccaagtggccattcagagtttacgtttcttcaacagctttgcagctcttcatctgcctgcttttcagtctattgtaggggcagagggcttgtcccttgcattccggcacatggccagctccctgctgggccactgcagccaagtctcctgtgaaagcctccttcatgaggtcatcgtctgtgtgggctacttcactgtcaaccacccagataaccaggtgatcgtgcagtccggccgccaccccacagtgctgcagaagctctgccagttgcccttccagtatttcagtgacccacggctgatcaaagtactgttcccttcacttatcgctgcttgttacaacaaccatcagaacaagatcattctggagcaagagatgagctgtgttttactggccactttcattcaggatttggcacagactccaggtcaagcggaaaaccagccttaccaacccaaagggaaatgccttggttcccaagactatcttgagctggctaacagatttcctcagcaggcctgggaagaagctcgacagtttttcttgaaaaaagagaaaaaataaatgttttggttgattctgtatttgagtacccttgttaatattttaaattgtccaaacaaacattctaattgttccttaagaactcattttcccatgtttatactcttcccacactgtagatatggcatgtactttacactatttataatgactgtagatacttgaatgttctacttgctaattttgcaagttgagtttatttcatttatgcagagtatcttggagtttggtaatttccatcttatgataatatatactttgcatttgtgatatgggtgaaaggagacataaaattagcaagtctgttttgttcttgtaataaagtaacttattctgttttcattgttgacttttcatgttaaggaaatacgaatctgaaagaaaaatgttaactccagctcttgaagtatcttaaataaagacttaattaaagtttacctgctctaaa

SEQ ID NO: 206129 - protein, 581 aa, Artificial Sequence [sequence omitted]

SEQ ID NO: 206130 - DNA, 1746 bp, Artificial Sequence
  derived and/or modified sequence
atggaggatgttaactcaaatgtcaatgctgaccaggaagtgaggaaactgcaagaactcgtcaagaagcttgaaaaacagaacgaacagctacggtcaagatcaggggccgtccagggggccgggtctctgggccccggaagccccgtccgcgccggcgcctctattccatcttctggcgctgcttcaccaagaggatttccccttgggctgtccgccaagtcgggtggaggcccaggctccggcccaagaaggacatccagtgaggaactgcgtgacgcaacttctttgctggctgccggcgaggggggactactggacgaggtggagcccctgcgcccagatgaactcgagagactgagcggttgggaagaagaggaagagagctggttatatagcagtcccaaaaaaaagctgactcccatgcagaaatcagtttccccactggtgtggtgcagacaggtgctggactacccatcccctgacgtcgaatgcgccaaaaagtcactaatccataaattggaccagaccatgtcagcccttaagcgccagaacctgtataataatccgttcaatagcatgtcctatacgtccccttactcgccgaacgcatcctcaccttacagcagcgggttcaatagcccatcatctacccctgtgaggccacccatcgtcaagcagctgatactccccgggaactcagggaatttgaaatcatctgataggaatcctccactctcccctcagtcatcaatcgactctgaactgtccgcctccgagctggatgaggattctatagggtccaattataaactcaatgatgtcactgatgttcagattctcgccagaatgcaggaagagtcgttacgtcaagagtacgctgcgaccacaagcagaagatccagtgggtccagctgtaactcgacgcgccgcggcacctttagcgaccaggagttggatgcccagagcctggatgacgaagatgacaatatgcatcatgcagtttaccctgcagtgaaccggttctccccttccccaaggaatagccctcggccatccccgaagcaaagccccaggaactcaccacggagcagatccccagctcgtggtatcgagtattcccgcgtgagcccacagcccatgattagtagactgcagcaaccccggttgagtctccagggccaccctaccgatctgcagacatctaacgttaagaatgaagaaaaacttcgtcgatcattacccaatttatctagaacgtctaacacccaagtagattcagttaaaagttccaggtccgatagtaacttccaagtccccaatggcgggatacccagaatgcagccacaggcatcagcaattcctagccccggtaagtttcggtcccctgctgccccttcccctctggccttgcgccagcccgtgaaagcattctctaatcacggctccggctcgcccggctcccaagagatcactcaactgacccagacaacttccagccctgggccacccatggtgcagtcaaccgttagtgcaaaccctccatcgaacattaatagtgcgactcttacacgtccagccggtactaccgccatgcgatctgggctcccaagaccgagcgctcccagcgccggaggaatcccggtacctcggagtaagctggcgcagccggtgaggcgatctctgccagcaccaaaaacatacggttctatgaaggacgacagttggaaggatgggtgctactag

SEQ ID NO: 206131 - DNA, 1746 bp, Artificial Sequence
  derived and/or modified sequence
atggaggatgtgaacagcaatgtgaatgctgaccaggaggtgaggaagctgcaggagctggtgaagaagctggagaagcagaatgagcagctgcggagccgctctggagctgtgcagggcgccggcagcctgggccctggcagccctgtgcgggccggggccagcatccccagcagtggagctgccagcccccggggcttccccctgggcctgagcgccaagagcggcggcggccctggcagcggccccaggaggaccagcagcgaggagctgagagatgccaccagcctgctggccgccggggagggcggcctgctggatgaggtggagcccctgcggccagatgagctggagcggctgagcggctgggaggaggaggaggagagctggctgtacagcagccccaagaagaagctgacccccatgcagaagtctgtgagccccctggtgtggtgccggcaggtgctggactaccccagcccagatgtggagtgtgccaagaagagcctcatccacaagctggaccagaccatgtctgccctgaagaggcagaacctgtacaacaaccccttcaacagcatgagctacaccagcccctacagccccaatgccagcagcccctacagcagcggcttcaacagccccagcagcacccctgtgcggccccccatcgtgaagcagctgatcctgcccggcaacagcggcaacctgaagagcagtgacaggaacccccccctgagcccccagagcagcattgacagcgagctgagcgccagcgagctggatgaagattccatcggcagcaactacaagctgaatgatgtgacagatgtgcagatcctggccaggatgcaggaggagagcctgcggcaggagtatgctgccaccaccagcagaagaagcagcggcagcagctgcaacagcacccggcggggcaccttcagtgaccaggagctggatgcccagagcctggatgatgaagatgacaacatgcaccacgctgtgtacccagctgtgaaccgcttcagccccagccccaggaacagcccccggcccagccccaagcagagccccaggaacagccccaggagccgcagccctgcccggggcatcgagtacagccgggtgagcccccagcccatgatcagccggctgcagcagccccggctgagcctgcagggccaccccacagacctgcagaccagcaatgtgaagaatgaggagaagctgcggcgcagcctgcccaacctgagcaggaccagcaacacccaggtggacagcgtgaagagcagcagaagtgacagcaacttccaggtgcccaatggaggcatccccaggatgcagccccaggccagcgccatccccagccctgggaagttccgcagccctgctgcccccagccccctggccctgcggcagcctgtgaaggccttcagcaaccacggcagcggcagccctggcagccaggagatcacccagctgacccagaccaccagcagccctggcccccccatggtgcagagcacagtgtctgccaacccccccagcaacatcaacagcgccaccctgaccaggcctgctggcaccacagccatgaggagcggcctgccccggcccagcgcccccagcgctgggggcatccctgtgcccaggagcaagctggcccagcctgtgagaagaagcctgcctgcccccaagacctacggctccatgaaggatgacagctggaaggatggctgctactag

SEQ ID NO: 206132 - DNA, 1746 bp, Artificial Sequence
  derived and/or modified sequence
atggaggacgtgaacagcaacgtgaacgccgaccaggaggtgcggaagctgcaggagctcgtgaagaagttggaaaagcaaaacgagcagctgcgatcccggtcaggggctgtgcagggtgccggaagtcttggaccaggaagccccgtgagagccggcgccagcatcccaagctccggcgcggcatctcccagaggcttcccccttgggctaagcgccaagagcggcggaggacccggaagtgggccacggcgcactagctctgaagagttacgggacgcaacgagtctgctggccgctggagaaggcggactgctagacgaagtagagcctctccgccccgacgagctggaaagactttctggttgggaggaggaggaagaatcctggctgtacagctcgcctaaaaaaaaactcacccctatgcaaaagtctgtaagtccactggtttggtgccgacaggtgctggattaccctagccctgatgtggaatgtgcaaaaaagagtcttatccacaagctcgaccaaacaatgagtgcccttaaacgccagaatctctacaacaatccttttaacagcatgtcctacaccagcccctatagtcccaacgcctctagtccctacagcagcggctttaactctccctcgagcacccccgttagacctcccatcgtgaagcagctgattttacccgggaatagcggcaacttgaagagttcggatcggaatcctccactgtctccccaatcctctatagactcggaactgtctgccagcgagctggacgaggatagcatcgggtctaactacaagctcaacgacgtgaccgacgtgcagatcctcgcacgtatgcaagaagagtccctgcggcaggaatacgcggcaacgacctcacggaggtcttccggaagcagctgcaattcaacgagacgcggtacttttagcgaccaggagctggacgctcaatccctggatgatgaggatgataacatgcaccacgcagtgtatcctgccgtgaaccgtttttcgccaagcccacgcaattctccaaggccctcaccaaagcagtctccacgaaatagccccagatctcgctcgcccgcccgagggatcgaatactctcgagtcagcccccagcccatgatctctcggctgcaacaacctcggctatcgcttcagggacaccctaccgatctgcagacctccaatgtgaaaaatgaggagaagctcaggaggagcctgcctaacctgtcaagaacctcaaacacccaggtagattccgtcaagagtagtaggagcgatagcaactttcaggtccccaatggtggaattccccgtatgcagccccaagccagtgcaatccccagccctgggaagttccgcagtcctgctgcaccatcacccctggctctacgccaacccgtcaaggccttctctaatcacggaagtggaagccctggtagccaggagattacacaacttactcagacgaccagctcacctggccctccgatggtgcagtccacagtctctgccaacccaccttcaaacattaatagtgctacattaacaaggccagccgggaccactgcaatgcggtccgggctgccgaggcccagcgccccttctgctggcggtattccagtgcctagatcaaagctggcccagcccgtgcggcggtctctgcctgctcccaaaacctacggaagcatgaaagacgattcctggaaggatggctgctattag

SEQ ID NO: 206133 - DNA, 1746 bp, Artificial Sequence
  derived and/or modified sequence
atggaggatgtcaattcaaatgtgaatgcagatcaagaggtccgaaagctccaggaattagtgaaaaagctggagaagcagaatgagcagctccggtcccgaagcggtgccgttcagggagctgggagcctgggcccaggttcacccgtgcgcgctggggctagcataccgagctctggtgcggcttcaccgcgtgggtttcccctaggcttgtctgctaaatctggcggaggccctgggtctggaccaaggcgaacttcctctgaggagttgcgagacgcaaccagtctcctggctgccggagaggggggactgctggacgaagtggaaccgttgaggccagatgaactcgaacggctgtcaggttgggaggaggaggaggagtcctggctgtattccagtcccaagaaaaagctcactcccatgcagaagtcagtctccccactcgtgtggtgcaggcaggtactcgactaccctagtcccgatgttgagtgcgccaaaaagtctttgattcacaagctggatcagacgatgagcgctttaaaacgccagaacctctacaacaaccccttcaactctatgtcctatactagcccctactcaccaaacgcatcttccccctacagcagcgggttcaactccccctctagcaccccagtaagacccccaatagtgaagcagcttatcctgcctggcaactccggaaatctcaaatcctccgataggaaccccccactcagtcctcaaagctcgatagactccgagttgagcgccagtgagttagatgaagatagcatcgggtcaaactataagcttaatgatgttacggacgtgcagattctggcacgcatgcaagaggagagtctacgtcaagaatatgccgctaccacttccagacgcagcagtgggtcaagttgcaactccaccagacggggtacattctctgaccaagagctggacgcccagagcctcgatgacgaggacgataatatgcatcatgccgtctacccagctgttaaccgcttttctccatctccaagaaactctcccaggccgagtccaaagcaatcaccccgaaactcgcccagaagtcggagtcctgcacgtgggattgaatactcccgggtgtcacctcagcccatgatctctcggctgcagcagccgagactctccctgcagggacaccccaccgacctgcagacgagtaatgtgaaaaacgaggagaagctgagaaggagcctgcctaacttatcgcggacatcgaacacgcaggtcgactcagttaagtcctcacgctccgatagtaatttccaggtccctaacggcggtatacctagaatgcagccacaagcatctgcaatcccttctcccggtaaatttcggagcccggctgctccctcgccactggcgttgcgccagcccgtgaaagccttttctaaccacggcagtggttcccccggtagtcaggagattactcagttaacccagactacaagctctcctggtccccctatggtgcagtctacagtgtcagcgaatcctccctccaacatcaattctgctacgctgactagacctgctggtaccaccgccatgagatccggcttgccaagacccagcgccccttcggcagggggtatacccgtgcctcgctcaaaacttgcccaacccgtgcgcaggtccctgccagcaccgaagacctacggttcaatgaaagatgatagctggaaggacgggtgctactag

SEQ ID NO: 206134 - DNA, 6146 bp, Artificial Sequence
  derived and/or modified sequence
aatccccgcccctcaagcaccggccccgccccataggccccgtccgtggccccgccccgccgcgagctggcgccgggtcctctcagcgcccgccggcggccgcgtccacccccgacgctctgaggtcaccgactgggccggcccgcggggggcggagggacggagggaagatggcggcaggggccggatattggcgccgcctcccccaatcccggagccggcgcagatgaggcagttcggctggggccagcggcgctttggaacccgaggtggggggaccctggcggtggggcctggtcctgctatatgccggcgcctcggctagagtgagcggcggcgacgcctctttcctccgtctctttccctgtcgctgcgagagcgagcgggcggcggaggcggcggcggcggcggggccgggatggaggacgttaactccaacgtgaacgcggaccaggaggtgcggaagctgcaggagctggtgaagaagctggagaagcagaacgaacagctgaggagccgctcgggggccgtgcagggcgccggctcccttgggcccggcagcccggttcgggccggcgcgtccattccctcctccggcgcggcgtctcctcggggcttccccttgggcctcagcgccaagtcgggcggcgggcccgggtcgggcccgaggcggacgagtagcgaagagctgcgggacgccacctccttgctagcggcgggcgagggcggcttgctggacgaggtggagccgctgcggcccgacgagctggagcgcctgtcaggctgggaggaggaggaggagagctggctgtattcatcaccaaagaaaaaacttacaccaatgcagaaatcggttagtccattagtttggtgcaggcaagttttggattacccaagtcctgatgttgagtgtgctaaaaaatctcttatccacaaacttgatcaaactatgtcagctctcaagaggcagaatttatataataatcctttcaactctatgagttacaccagtccttacagtccaaatgccagtagcccatacagcagtggcttcaattctccatcctcaaccccagtgcgacctcctatagtcaaacagcttatacttcctggaaattcaggtaacttgaaaagctcagacagaaatcctccactcagtcctcagtcctctatagatagtgagttaagtgcttcagaattagatgaagattcaattggatccaattataagctaaatgatgtaactgatgtacagattctagcccggatgcaggaagaaagtctccggcaagaatatgcagccaccacgtctcggcgcagttctggttcatcttgcaattctacaagacggggtacttttagtgatcaggaacttgatgcacaaagtttagatgatgaagatgacaatatgcatcatgcagtataccctgctgttaacaggttttcaccatcaccacgcaattcacctcgaccgtcacctaagcagtcacccagaaattcacctcgttcacgatctcctgctcggggaatagaatatagtagagtgtccccacagcctatgattagccgcttacagcaacctcgcctttcacttcaaggccatcccacagatttacagacaagcaatgttaaaaatgaagaaaaactaagacgcagtcttccaaacctgtcccgaacatctaatacacaagttgactcagtgaaaagcagcagaagtgactcaaattttcaagtgccaaacggaggaatacctcgtatgcaacctcaggcttcagccataccttctccaggcaaattccgttcccctgcagcaccatctcctttggctcttcggcaaccagtgaaagcatttagtaaccatggctctggttctcctggtagccaagaaataacacagctcacacaaaccacctcctcacctgggcctcctatggttcagagcacagtctcagcaaatcctcccagcaatatcaacagcgctactctaaccagacctgcagggacaactgcaatgagaagtggcttgcccagacccagtgccccttctgctgggggcataccagtgcctcgcagcaaacttgcacagcctgttcgcagatccttgccagctcctaaaacctatggtagcatgaaagatgacagttggaaagatggctgttactgaccagcaaagacaagaatgcagaagtccacggcttcatggatacccttcaccaggctaaaaaacaacttttatatgcagactgttcagataagactcttgggatttataaaatcccagccctctctgtcttaattagcacaaaccgacagagatcatcaaacagcactttaatgacatttaacatcagatgtgtttggtaatcatacaatcactctccatagaatcacttttagttttgtttaatagaaactaggttgatttttaaaaaatatttgacagaggccaatatctgggcaaatacctaatggatgccaaagagaaatgcccatttgtaaatgagaaaaatgcccatttgtgcacaagaaaatggtgaattcaggctatccaaaacttcacattcaacctaatttactgtataaatagtatcaataaatatttgtgttaatgagaactaatattctgactaattatctaaagtgtttcactagtacaccaggaaactacagattgagattagggggtgggaggaaagaaacctgggctagagattaaaacattcctaaatttagcagaatttcagaaatgatttttgcagattcattagaaaagaaaaattgtcatttaatcttaagttttggatgtagctcacatgtcaccaccaccagatagtgttacagcatgtatccatcatgttgcattgacacatcaaacttgtgtgtgtttgttttgattgccaaaagggcttaatatcagttgtacaatctttctgaactttatagttcctggctcaggaaagatggcctttgctattgaagccaacttcttcacatgctgttatctttacagaactaagagatcttgtttctattagcaggttttcatgataggaaagaacaagtagtgtgtgtctttattcttgatacaacaccacctcggtgcttgcaacctggaacaaaaccataccatgagagagagggggaaaaaaatctatgcacttaacctacaaaatctctggtgatgacagttgtattgttgctattacatggcataacggtctattatgtggtaggaaaatatagcctgctaaatcctacttaagttgatccactttaaactgagtaactgtataaaacatctattgaaaattcttttccttttgacttagattctgccttacatcaatttttgcatttttggtaaaaaaaaaaccctactacgtatgactctaacctgatacttgctctctaatggctcttaatatatccttgaaatcggctatttcaattttatcagacttttaccagagtaaaacttgcttctgtagcaggcctctcattttttattatgaggtctgtttttaaatacttaatttgaacagctctaagatattgtcacttaggtcatctaaaagcttttagagatttgaacataagttcatttcctgttaatcaaagacattccgtaagttggcaaaagaaattgggagagagaaatagaaggcttgatattctggacagcattaaggttgataggttgatgataaaaacttaaaaccaggacctccattctgtcatgactgacaccatggtagtctgtcagcttgaccagtggagagtcattcatttagcacaagcagctggagatttaaactgccagtactatgtatttggtgtataatgcaaggaagaaactttatccttgaatttgagggtgatggggtgggtcaggaaaggatggcgccagaattctacatgataatgaactaaaaaatgttgcttttcagaggaagataaagcatcttcttttgggaggggggtatctcatgtctaagtaagtaaaagaaagaagtagctactgtctcttttaaaaaccacgtacaaaacagaacaagtctcagttttcagtgcaacatttcaaaaaatatatatgctgcaatctaataattaaaaggaattttacctattatgaaacatattacattttttaagttagataatcagtttcaaaaggagtattcaggttatttaactttgtttttaaatggctgcatcagaaaaaaatgtctatttttttttattaaaatatttcatcacttgttaaaacatatttttgatctgagtttggtaaagtattattttacctgctgttgtactaccacagactgttgacttttagtttcttaaagagaaaaattgcctttttactagaaagcctttgtatattgcaatttttctgtttgggaaaatctaaggatttactgtggttagtcttacagaagaaatgtggatttgataaactagtgcctatgattttaacttatgtttgatatatagtagtaagggttttatgaatgttgattattttgtgccaacagcccagaattgtcacttatatgtaagcagaaaacaatgagctctgcttccaaagttatttaattttctcagtgtttgaatgttattttttgtaagtgtgttaataaaagtgtaaagaattggaaaaaatataaatattcttaactcaagcatttgctggatcatttttctacaaaacttgtttgtacaatataaaacactctctgaagagttgactttttttcagtttcgtatcctggaaatcacattttgtaaaactggggaccattcataattgtcagatactttttaaaattatctcaatacatcacttttataaaaaaaaaaagtttttttgaaagaaaattagatacatatgtggccccagatgtttgtataactctagaatgatctagactatgtatgtttaaattaactttttattgaatgtacaggtgtccatttttgacgttaagcatggtcctttaaggtcacatgacgtttgatttgcaaacatttctatagccgaacttgtatatgtggttgcctccttaataaacagcctgaccataatgtttattattaaatttatattctttaagtgtttaattaatctctggatatggtaagattccttttttcctctcagttgcctacacttggttttaataaattactcagttgagtttttctttaaccacagaaacccaaatcatattgccctttcagatttagtcttcatggggttggattatgtcttatattttctctgtcagagttatttcatatatggattttacttgaaggaaatttacagtttactctaaattgatttgttcttggaacttttttacctgctgtgaattgatacctagttataaaaagctagcatttgcctagatcataactatgtatggtatctagttagaaaaaaacaagcaaaaagctattatgagtttccaagagggacaattaatgcattttcataccaaatgcgaatatttaggtgatcacgtgcatcttttcttgtatggatggaaaaatcaagaattgtacactgtttaatgagttctccatattcctttaggagatatttgctttgcaattacatgttacaattagaataattacaattaaaataatattacatgttacaattagattaatagtgatgagagggaaaaaagacacccttctgtttttttctctcaagccagtctaaaaacttgaagagccatttaaaattaaatgtcactatacttgtattataaatcaatacataagtttaaacctgttatatactcagtgcaacagaaaaacccatatggaggttcaaccactgatgtattttgaatgatcctaaatataagtcttgggtggctaaatggccctctgcttaccagtctgaaaatgaaaccgattatactcatcggccttatttactgtaatacaaactggttaaaactatgttaactgaatgctagtttgaaacaaattatctacattaagtcatcttaatgttttctctttaaaagaaataaaaaaatctgtttcttctgatttcgaaagtaatagaaactctgctgtagaacataaactaaaaatattaaaaagtataaaggtaaaaaatg

SEQ ID NO: 206135 - DNA, 1746 bp, Artificial Sequence
  derived and/or modified sequence
atggaggacgtgaacagcaacgtgaacgccgaccaggaggtgagaaagctgcaggagctggtgaagaagctggagaagcagaacgagcagctgagaagcagaagcggcgccgtgcagggcgccggcagcctgggccccggcagccccgtgagagccggcgccagcatccccagcagcggcgccgccagccccagaggcttccccctgggcctgagcgccaagagcggcggcggccccggcagcggccccagaagaaccagcagcgaggagctgagagacgccaccagcctgctggccgccggcgagggcggcctgctggacgaggtggagcccctgagacccgacgagctggagagactgagcggctgggaggaggaggaggagagctggctgtacagcagccccaagaagaagctgacccccatgcagaagagcgtgagccccctggtgtggtgcagacaggtgctggactaccccagccccgacgtggagtgcgccaagaagagcctgatccacaagctggaccagaccatgagcgccctgaagagacagaacctgtacaacaaccccttcaacagcatgagctacaccagcccctacagccccaacgccagcagcccctacagcagcggcttcaacagccccagcagcacccccgtgagaccccccatcgtgaagcagctgatcctgcccggcaacagcggcaacctgaagagcagcgacagaaacccccccctgagcccccagagcagcatcgacagcgagctgagcgccagcgagctggacgaggacagcatcggcagcaactacaagctgaacgacgtgaccgacgtgcagatcctggccagaatgcaggaggagagcctgagacaggagtacgccgccaccaccagcagaagaagcagcggcagcagctgcaacagcaccagaagaggcaccttcagcgaccaggagctggacgcccagagcctggacgacgaggacgacaacatgcaccacgccgtgtaccccgccgtgaacagattcagccccagccccagaaacagccccagacccagccccaagcagagccccagaaacagccccagaagcagaagccccgccagaggcatcgagtacagcagagtgagcccccagcccatgatcagcagactgcagcagcccagactgagcctgcagggccaccccaccgacctgcagaccagcaacgtgaagaacgaggagaagctgagaagaagcctgcccaacctgagcagaaccagcaacacccaggtggacagcgtgaagagcagcagaagcgacagcaacttccaggtgcccaacggcggcatccccagaatgcagccccaggccagcgccatccccagccccggcaagttcagaagccccgccgcccccagccccctggccctgagacagcccgtgaaggccttcagcaaccacggcagcggcagccccggcagccaggagatcacccagctgacccagaccaccagcagccccggcccccccatggtgcagagcaccgtgagcgccaacccccccagcaacatcaacagcgccaccctgaccagacccgccggcaccaccgccatgagaagcggcctgcccagacccagcgcccccagcgccggcggcatccccgtgcccagaagcaagctggcccagcccgtgagaagaagcctgcccgcccccaagacctacggcagcatgaaggacgacagctggaaggacggctgctactag

SEQ ID NO: 206136 - protein, 620 aa, Artificial Sequence
  derived and/or modified sequence
MAAATADPGAGNPQPGDSSGGGAGGGLPSPGEQELSRRLQRLYPAVNQQETPLPRSWSPKDKYNYIGLSQGNLRVHYKGHGKNHKDAASVRATHPIPAACGIYYFEVKIVSKGRDGYMGIGLSAQGVNMNRLPGWDKHSYGYHGDDGHSFCSSGTGQPYGPTFTTGDVIGCCVNLINGTCFYTKNGHSLGIAFTDLPANLYPTVGLQTPGEIVDANFGQQPFLFDIEDYMREWRAKVQGTVHCFPISARLGEWQAVLQNMVSSYLVHHGYCATATAFARMTETPIQEEQASIKNRQKIQKLVLEGRVGEAIETTQRFYPGLLEHNPNLLFMLKCRQFVEMVNGTDSEVRSLSSRSPKSQDSYPGSPSLSPRHGPSSSHMHNTGADSPSCSNGVASTKSKQNHSKYPAPSSSSSSSSSSSSSSPSSVNYSESNSTDSTKSQHHSSTSNQETSDSEMEMEAEHYPNGVLGSMSTRIVNGAYKHEDLQTDESSMDDRHPRRQLCGGNQAATERIILFGRELQALSEQLGREYGKNLAHTEMLQDAFSLLAYSDPWSCPVGQQLDPIQREPVCAALNSAILESQNLPKQPPLMLALGQASECLRLMARAGLGSCSFARVDDYLH

SEQ ID NO: 206137 - protein, 391 aa, Artificial Sequence
  derived and/or modified sequence
MREWRAKVQGTVHCFPISARLGEWQAVLQNMVSSYLVHHGYCATATAFARMTETPIQEEQASIKNRQKIQKLVLEGRVGEAIETTQRFYPGLLEHNPNLLFMLKCRQFVEMVNGTDSEVRSLSSRSPKSQDSYPGSPSLSPRHGPSSSHMHNTGADSPSCSNGVASTKSKQNHSKYPAPSSSSSSSSSSSSSSPSSVNYSESNSTDSTKSQHHSSTSNQETSDSEMEMEAEHYPNGVLGSMSTRIVNGAYKHEDLQTDESSMDDRHPRRQLCGGNQAATERIILFGRELQALSEQLGREYGKNLAHTEMLQDAFSLLAYSDPWSCPVGQQLDPIQREPVCAALNSAILESQNLPKQPPLMLALGQASECLRLMARAGLGSCSFARVDDYLH

SEQ ID NO: 206138 - DNA, 1863 bp, Artificial Sequence
  derived and/or modified sequence
atggcagctgctactgcggaccctggagccggaaatccccagccaggtgattccagtggcggtggcgctggcgggggtttgccctcccccggcgagcaggagttaagcaggaggcttcagcgtttgtacccagctgtaaaccagcaggagacccccctgcccaggagctggtcaccaaaagacaagtacaactatatagggttgagccagggcaacttacgcgtgcactataaggggcacgggaaaaatcacaaagacgctgccagcgtccgtgccactcatccaatccccgccgcatgcggtatctattatttcgaggtcaagattgtatccaaggggagggacggatatatggggatcggcctgagtgcccagggcgtcaacatgaatcggctgccgggctgggataaacattcatatggctaccacggagacgacggccattcattttgttctagcgggactggccagccctacggccccactttcacaactggtgacgtcattggctgttgcgtgaacctcataaacggcacatgtttctacactaagaatggccactccctgggcattgcatttaccgatttgccagccaatctttatccgaccgtgggcctccagactcctggcgaaatcgtggacgccaatttcgggcagcaacctttcctcttcgacatcgaggactacatgcgggaatggagagctaaagtccagggaactgtccactgttttcctatatctgcgcggctaggcgaatggcaggctgtgctccagaatatggtgtcctcctatctggtccatcacggatactgcgcaacagccactgcctttgcccggatgaccgaaacacctatacaggaagagcaggccagcatcaaaaatcgacagaaaatccagaaacttgtgttggagggacgagttggagaggccattgaaaccacccaacggttttaccctggcctgttagagcacaacccaaatctgctcttcatgctgaaatgcaggcagttcgtggagatggtgaacgggaccgatagcgaagtccggtctttatcttcaaggtctcctaaatcccaagattcctaccccggtagcccaagtctgtctccaaggcacggccctagctcatcccatatgcacaacaccggagcagattcacccagttgttccaatggggtcgcatctactaagagcaaacagaatcacagcaagtaccccgctccctccagcagctctagctccagcagctctagttcatcctccagcccgtcctcagtgaactacagcgagtccaattctacggactcgaccaagagtcagcaccacagctctacttctaaccaggagacatctgacagcgaaatggaaatggaggcggagcattaccctaatggagtcttgggctctatgagcacccgaatcgtgaatggagcatacaaacatgaagacctgcagactgacgagagtagcatggatgaccgccacccacgccggcagctttgtggcgggaaccaggcagccactgaaagaatcatcttgttcggacgggaactgcaggccctgagtgaacagcttgggcgtgaatatggaaagaatttagctcacacagagatgctgcaggatgcattctctctacttgcttatagtgatccctggtcttgcccagtggggcagcagttggatccaatccagagagagccagtatgtgctgccctgaacagtgctattctcgagtctcagaacctccctaagcagccccccctgatgctggccctggggcaggcctccgagtgcctcaggctgatggcaagagctgggttagggagctgttcatttgcgcgtgttgacgactacctacactag

SEQ ID NO: 206139 - DNA, 1176 bp, Artificial Sequence
  derived and/or modified sequence
atgcgcgaatggcgggctaaagtgcagggaacagtccattgcttccctatttctgcccgattaggggaatggcaggctgtgctgcagaacatggtttcctcttacctcgtccaccatggatactgtgctacggccactgccttcgctcgtatgactgaaacacctattcaggaggagcaggcctccatcaaaaaccgacagaagatccaaaagctcgtgttggagggacgcgtgggagaggccatcgaaacaacacagcgtttttatcccgggctgctggaacataaccctaatcttctgtttatgctgaaatgccggcaatttgttgagatggtgaatgggaccgattcggaagttcgcagcttatcaagccggtccccgaaaagccaggacagctatcctggatctccatccttgtccccccgtcacggcccctctagctcccacatgcataacactggcgcagacagtccttcatgttctaacggggtggcatccacaaaatccaaacagaaccatagcaaatatcctgcaccatctagctctagctcctcttcctccagctcctcttctagttccccctcgagtgtgaattattcagaatcaaactccaccgattccacaaagtcacagcaccactcatctacgtccaatcaagagactagcgacagcgagatggagatggaggcagagcactaccccaacggcgttttgggctccatgagcactcggattgtgaacggcgcctacaagcatgaggacctgcagaccgatgagtcaagtatggacgaccgccaccctcggcggcaactgtgtggggggaatcaagctgccacggagcgaattattctctttggaagggagttgcaggccctgagtgaacaactcggccgcgagtacggcaagaaccttgcacataccgagatgctgcaggacgcgttctctctactggcctatagcgatccatggagctgtcctgtggggcaacaattggacccaattcagcgagagcccgtgtgcgcagctctcaactccgccatattggagagccagaacttgccaaagcagcccccactcatgctcgctttgggtcaagcgagcgagtgcctgcgactcatggctcgggctgggctgggatcctgttcattcgccagggtagacgactacttacactag

SEQ ID NO: 206140 - DNA, 1863 bp, Artificial Sequence
  derived and/or modified sequence
atggctgctgccacagctgaccccggggccggcaacccccagcccggggacagcagcggcggcggggccggcggcggcctgcccagccctggagagcaggagctgagccggcggctgcagaggctgtacccagctgtgaaccagcaggagacccccctgcccaggtcctggagccccaaggacaagtacaactacatcggcctgagccagggcaacctgcgggtgcactacaagggccacggcaagaaccacaaggatgctgcctctgtgcgggccacccaccccatcccagctgcctgtggcatctactactttgaggtgaagatcgtgtccaagggcagagatggctacatgggcatcggcctgagcgcccagggcgtgaacatgaaccggctgcccggctgggacaagcacagctatggctaccatggagatgatggccacagcttctgcagcagcggcaccggccagccctacggccccaccttcaccactggagatgtgattggctgctgcgtgaacctgatcaatggcacctgcttctacaccaagaatggccacagcctgggcatcgccttcacagacctgcctgccaacctgtaccccaccgtgggcctgcagaccccaggagagatcgtggatgccaactttggccagcagcccttcctgtttgatattgaggactacatgagggagtggagggccaaggtgcagggcaccgtgcactgcttccccatcagcgcccggctgggggagtggcaggccgtgctgcagaacatggtgtcctcctacctggtgcaccacggctactgtgccacagccacagcctttgccaggatgacagagacccccatccaggaggagcaggccagcatcaagaaccggcagaagatccagaagctggtgctggagggccgggtgggggaggccatcgagaccacccagcgcttctacccaggcctgctggagcacaaccccaacctgctcttcatgctgaagtgccggcagtttgtggagatggtgaatggaacagacagcgaggtgcgcagcctgagcagccgcagccccaagagccaggacagctacccaggcagccccagcctgagccccaggcatggccccagcagcagccacatgcacaacacaggagctgacagccccagctgcagcaatggagtggccagcaccaagagcaagcagaaccacagcaagtacccagcccccagcagcagcagcagcagcagcagcagcagcagcagcagcagccccagctctgtgaactacagcgagagcaacagcacagacagcaccaagagccagcaccacagcagcaccagcaaccaggagaccagtgacagcgagatggagatggaggccgagcactaccccaacggggtgctgggctccatgagcacccgcatcgtgaatggagcctacaagcatgaggacctgcagacagatgagagctccatggatgacagacacccccggcggcagctgtgtggcggcaaccaggccgccacagagcgcatcatcctgtttggccgggagctgcaggccctgtctgagcagctgggccgggagtatggcaagaacctggcccacacagagatgctgcaggatgccttcagcctgctggcctacagcgacccctggagctgccctgtgggccagcagctggaccccatccagcgggagcctgtgtgtgccgccctgaacagcgccatcctggagagccagaacctgcccaagcagccccccctgatgctggccctgggccaggcctctgaatgtctgcggctgatggcccgggccggcctgggcagctgcagctttgcccgggtggatgactacctgcactag

SEQ ID NO: 206141 - DNA, 1176 bp, Artificial Sequence
  derived and/or modified sequence
atgagggagtggagggccaaggtgcagggcaccgtgcactgcttccccatcagcgcccggctgggggagtggcaggccgtgctgcagaacatggtgagcagctacctggtgcaccacggctactgtgccacagccacagcctttgccaggatgacagagacccccatccaggaggagcaggccagcatcaagaaccggcagaagatccagaagctggtgctggagggccgggtgggggaggccatcgagaccacccagcgcttctacccaggcctgctggagcacaaccccaacctgctcttcatgctgaagtgccggcagtttgtggagatggtgaatggaacagattctgaggtgcgcagcctgagcagccgcagccccaagagccaggacagctacccaggcagccccagcctgagccccaggcatggccccagcagcagccacatgcacaacacaggagctgacagccccagctgcagcaatggagtggccagcaccaagagcaagcagaaccacagcaagtacccagcccccagcagcagcagcagcagcagcagcagcagcagcagcagcagccccagctctgtgaactacagcgagagcaacagcacagacagcaccaagagccagcaccacagcagcaccagcaaccaggagaccagtgacagcgagatggagatggaggccgagcactacccaaatggagtgctgggctccatgagcaccagaattgtgaatggagcctacaagcatgaggacctgcagacagatgagagctccatggatgacagacacccccggcggcagctgtgtggcggcaaccaggccgccacagagcgcatcatcctgtttggccgggagctgcaggccctgtctgagcagctgggccgggagtatggcaagaacctggcccacacagagatgctgcaggatgccttcagcctgctggcctacagcgacccctggagctgccctgtgggccagcagctggaccccatccagcgggagcctgtgtgtgccgccctgaacagcgccatcctggagagccagaacctgcccaagcagccccccctgatgctggccctgggccaggccagcgagtgcctgcggctgatggcccgggccggcctgggcagctgcagctttgcccgggtggatgactacctgcactag

SEQ ID NO: 206142 - DNA, 1863 bp, Artificial Sequence
  derived and/or modified sequence
atggccgccgccaccgccgaccccggcgccggcaacccccagcccggcgactcctctggtgggggggcaggcggcggactgccatcgccaggagagcaggagctgtcccgcaggttgcagcgcctgtacccagccgttaatcagcaagagactccgttacccaggagttggtccccaaaggacaaatacaactacataggattgtctcaggggaacttgcgagtccattacaagggccatggtaagaaccacaaggatgcggcttctgtccgagcgacccatcctataccagcagcctgtggcatttactactttgaggtgaagattgtttctaagggaagagacgggtacatgggaatagggctgagtgcccagggcgtgaacatgaacaggctgccagggtgggataagcatagctacggttaccacggcgacgatggccactcattttgttctagcggaacaggccagccctatgggcctacgttcacaacaggggacgtgattggatgctgtgtgaatctaatcaacggtacctgcttctacacgaagaatggccactcgctgggcattgcctttaccgaccttccagccaatctgtacccaacagttggcctccagaccccaggcgagattgttgatgccaatttcggacagcagccctttctgttcgacatagaggattacatgcgcgaatggcgtgctaaggtgcaggggacagtacactgtttcccaatcagcgcaagactgggcgaatggcaggccgtgctgcagaacatggtttccagctatctggtgcatcacggctactgcgcaactgccacagcatttgccagaatgacggagacacctattcaggaagagcaggccagtattaagaacagacagaaaatccagaagctcgtcctcgagggacgggtgggcgaagctatcgaaacaacacagaggttctatcccgggttgctcgagcacaaccctaacctgcttttcatgttgaagtgccgccagtttgttgagatggtcaacgggaccgacagcgaagtgcgttcactcagtagccggagccctaagagccaggattcttatcccggctccccctccctttccccaaggcatggaccatcgtcctctcacatgcacaacacaggcgctgactcaccaagttgcagtaacggcgtcgcatcaactaagtccaagcagaaccactccaagtacccagccccctcatcatcatcatcatcatcctcctcctctagctcgtcaagcccaagctctgtcaactactctgagtctaactcgaccgactccactaaatctcagcatcattcttctactagcaatcaagagacatcagatagcgaaatggaaatggaagccgagcactatccaaacggagtgttgggtagtatgtcgacccggatagtgaatggcgcctacaaacacgaagatctccagaccgatgagtctagcatggatgaccggcacccacgccgccagctatgcgggggtaaccaggctgctacggagaggatcatcctgttcggaagagaattacaggctttgagcgagcaactaggcagggaatatggaaaaaatctggctcacaccgaaatgctccaggacgcctttagtctgttagcatattctgacccttggtcttgccccgtgggccagcaactggacccaattcaacgggagcctgtttgcgcggctctgaacagcgcaatcttggagtcacagaacttacctaagcagccacccctgatgctggcactcggccaggcctcagagtgccttcgccttatggctagagcaggactgggcagctgctcttttgcaagagtggacgactaccttcattag

SEQ ID NO: 206143 - DNA, 1176 bp, Artificial Sequence
  derived and/or modified sequence
atgcgggagtggcgggccaaggtgcagggcaccgtgcactgcttccctattagcgccaggctgggtgaatggcaggctgttctgcagaacatggtctcgtcttatttggtgcaccatggatactgtgccacagcgacggccttcgccagaatgaccgagacacccatccaggaggagcaggcttccattaagaaccgccagaagatccagaaactggtcctagaaggtagggtgggcgaggctattgagactacacagcgcttctatcccggcctgttggaacataacccaaacctcttgttcatgttaaaatgccgacagtttgtcgagatggtcaatggcactgatagtgaagtgaggagtttatcatcacgctcgccgaagtctcaggacagttatcctggatctccctccttgtcacctaggcacggtccctcatctagccacatgcataacaccggagccgattctccgtcgtgctctaatggcgtggcttccactaaatcgaagcagaatcacagtaagtatcccgctccctcatctagcagttcctccagcagctcctcatcctcatcaagtcccagctcagtgaattattctgagtccaatagcaccgatagcactaagagccagcaccactcatctactagtaaccaggaaacctcagattccgagatggagatggaggccgaacactatccgaacggcgtcctggggagcatgtccaccaggatcgtaaatggcgcatacaaacacgaagacttgcagacagacgagtcttctatggacgatcggcacccaagacggcagttatgcggaggcaatcaagcggctacggagcgaatcatcttattcgggagggagttacaggccttgagcgaacaactcggccgtgagtatggcaagaatcttgctcacactgaaatgctccaagacgcattttccctgctcgcctacagcgatccatggtcctgtccagtgggacagcagctggaccctatccaacgcgaacccgtatgcgcagccctaaactcagccatcctggagtctcagaacctccccaaacagccacccttgatgctcgcactggggcaggcatcagaatgtctgagactgatggctcgagctggattggggtcctgctcatttgctcgtgtggatgattacctgcactag

SEQ ID NO: 206144 - DNA, 1863 bp, Artificial Sequence
  derived and/or modified sequence
atggcagccgctacagcagatccaggcgctggtaatccacaacccggagattcatctggcggaggcgctgggggagggctcccatcacccggagaacaggagctatctcgtaggctgcaaagattgtatcccgcagtaaaccaacaagagaccccgcttccgaggtcatggagccctaaggacaaatacaactatataggcctttctcagggcaatttaagagtgcattataaaggccacggtaaaaaccataaggatgccgctagcgtgagggccacacaccctattccagcagcttgtggaatctactacttcgaggtcaaaatcgtgtctaaagggagggacggatacatgggaatcggtctgtccgctcaaggagttaacatgaaccggctgcccggatgggacaaacatagttacgggtatcatggggatgacggccattcattctgctccagcggcacaggccagccttatggtcccaccttcaccacgggtgacgtgataggatgctgtgtcaacctgattaatggtacatgcttctacaccaagaacggtcattctctcggaatcgcctttaccgaccttcccgcaaacctgtatcctaccgtgggactacagactcctggggaaatcgtggatgcgaacttcggccagcagccatttctgtttgacattgaggactatatgagagagtggcgcgctaaggttcaggggacagtacattgtttcccgatcagtgccaggctcggggaatggcaagccgtgctgcagaacatggtgtcttcatatcttgtgcatcatggttactgtgctactgctacagcctttgcacgcatgactgagacccctattcaggaagagcaggcctctataaaaaacaggcagaaaatccagaaactcgtcctcgagggccgtgtgggcgaggccattgaaacaacgcagagattctatcctggattgttagagcacaacccgaacttgctgttcatgctcaaatgtcgtcagttcgtcgagatggtgaacggaaccgacagcgaggtccgatccctgtcttcgcggtcacctaagtcgcaggacagctatccagggagtccttctctgtctcccagacacggcccatcctcgtcacatatgcataacacaggtgcagatagcccaagctgttctaacggcgtggcctcgaccaagagtaaacaaaatcattctaagtaccccgctccaagctctagttcttctagcagctccagctctagctcatcctctccgagttcagtaaactactccgaatcgaatagcaccgatagtaccaaaagccaacatcactcatcgacttccaaccaagagactagcgacagcgaaatggaaatggaagccgagcactaccctaatggcgtgctgggtagtatgtcgactcgaatcgtcaacggcgcatacaaacacgaggatttgcaaactgacgaatctagcatggatgatcggcatccgaggcggcagctttgcggcggaaaccaagctgcgactgagagaataatcctgttcggcagggaattacaggccttgtctgagcagttaggccgagagtatggaaagaacctcgctcacacagagatgctgcaagatgccttcagcttgctggcttatagcgatccatggagctgtccagtaggacagcagctggatcccatacagcgagagccagtgtgcgccgctttgaactcagccatactggaatctcagaatttgccaaaacagccacccttgatgcttgcgcttggtcaggcatcagaatgcctgaggctcatggctcgcgcagggttgggctcatgttctttcgcccgtgtagatgactatcttcactag

SEQ ID NO: 206145 - DNA, 1176 bp, Artificial Sequence
  derived and/or modified sequence
atgagagagtggcgtgccaaggtacagggtacagtccattgcttccccatctccgctcgtttgggcgaatggcaggctgtcctgcagaatatggtgagtagctacttggttcaccacggctactgtgccactgctacagcatttgccagaatgaccgagaccccaattcaagaagagcaggcttctatcaaaaaccgccagaagatccagaagctagttttagagggtcgcgtgggcgaagcgattgagaccactcagaggttttatcccggattgttagagcataaccctaacctgcttttcatgctaaaatgtaggcagttcgtcgaaatggtgaatgggaccgattccgaagtgcgatcactttccagccggtctccgaaaagtcaggattcatatcctggttctccatcccttagtcctaggcacgggccaagttccagccacatgcacaatacaggggcagattccccctcatgctctaatggtgtcgcctccaccaaaagcaaacaaaaccacagcaaatatcccgctccgtcctcatcaagctcgtcctcctctagcagttcgagctcctccccttcctcagttaactactccgaatcaaattcaaccgattccaccaagtcccagcatcactcctccacctcaaatcaggagacaagcgattcggaaatggaaatggaagccgaacattatccaaatggagtgttagggtccatgtccactaggatcgtgaatggtgcatataagcacgaggatttgcagactgacgagtcttctatggatgataggcatcctcgcaggcagctgtgtgggggtaatcaagcggcaactgaacgaattatattgtttggcagggaattgcaggctctctctgaacaattaggccgagagtatggcaagaacctcgctcatacggagatgctgcaggacgcctttagtcttctcgcctattccgacccctggagctgtcccgtcggccagcagctggatcccattcagcgtgagccggtgtgtgctgcactgaactccgctatcctggagagccagaatctgccgaagcaacccccactgatgttagccctcggtcaggcctctgagtgtttgcgactcatggcacgcgcaggcttaggttcatgctcctttgccagggtggacgattatctacactag

SEQ ID NO: 206146 - DNA, 5305 bp, Artificial Sequence
  derived and/or modified sequence
ggactcggactcggtttccctgcggcccagggaggctcacgggccattggctgagcggggcggatctggtcccgctcctccccgcccccagtgacacaatagtagctccctccaagatggcggcagcgacggcagacccgggagctgggaacccgcagcctggggactcctccggcgggggcgctgggggcgggctgccgtcccctggggagcaggagctgagccggcgcttgcagcgcctgtatcccgcggtcaaccagcaagagactccgctgccgcgctcctggagccccaaggacaaatacaactacattggtctctcccagggcaacctccgcgtccactacaaaggtcatggcaaaaatcacaaagatgcggcctcagtgcgtgccacccaccccatacctgctgcctgtggcatttattactttgaagtgaagattgtcagcaaaggaagagatggttacatgggaataggactctcggctcaaggcgtcaacatgaacagacttcctggttgggacaaacattcctatggttaccatggtgatgatgggcattcgttctgctcctcggggactggccagccctatggtcccacattcaccacaggagacgtgatcggctgctgtgtcaacctcatcaatggcacctgcttctacaccaagaatggccacagccttggtatagccttcacagacctcccggccaacctctaccccaccgtaggcctgcagacacctggggagattgtggacgccaactttgggcagcagcccttcctgtttgacattgaggactacatgcgggagtggcgtgccaaggtccagggcacggtccactgcttccccatcagtgcccggcttggcgagtggcaggcagtgctgcagaacatggtttcatcttacctcgtgcatcatgggtattgtgccacagccacggcttttgctcgaatgactgaaaccccgattcaggaagaacaggcgtccataaagaacagacaaaagatccagaagctggtgctggagggccgtgtgggcgaggccatcgagaccacccagcgcttctacccagggctgctggagcacaaccccaacctcctcttcatgctcaagtgccggcagtttgtggagatggtgaatgggacggacagtgaggtccgaagtttgagctcccgaagccccaagtcccaggacagctaccctggctcccccagcctcagtccccgacatggccccagtagttcccacatgcacaacacaggagcagacagtcccagctgtagcaatggcgtcgcgtccaccaagagcaaacagaaccacagtaaataccctgcacccagctcctcatcctcgtcctcctcctcctcctcgtcctcttccccatcctccgtcaattactccgagtccaactcaacagactccaccaagtcccagcaccacagcagtaccagtaaccaggagaccagcgacagtgagatggagatggaggcagagcactaccccaacggtgtgctaggaagcatgtccacacgcattgttaatggtgcctacaagcatgaggacctgcagacggatgagtccagcatggatgacaggcatcctcggcggcagctctgcgggggcaaccaggctgccacagaaaggatcattctgtttggccgcgagttgcaggcattgagtgagcagttgggccgggagtacggcaagaatttggcccacacagagatgctgcaggatgccttcagcctgctggcatactcagacccctggagctgcccagttggccagcagcttgaccccatccagagggaacctgtgtgtgctgccctcaacagcgccattttagagtcccagaacctgccaaagcagccccctctgatgctcgccctgggccaggcatctgagtgtctccggctcatggcccgagcaggcctgggttcttgctcctttgccagagttgatgactacttgcactagctgactgtgctggctggctctggctggccctccactggccccagggctggagctgccctgccctccataggcaactggtgcagggactgggaaaccatagacagagtccactcctcctgcctggcctttccccctctccctttccttccttccttcctttctctgcccaccaccccgctcagtctctctctctctccccttcacgtgcagcggcctgtaacacagtattggctggttactctcatgtagcgccttctattttgaaaggggggttttgttttgaggaggggttggggtttttaaatttttttctcctgactgagccaccagtatttatctctggagagtttgtgctgagctggtttctgctaatttagtgatgaagcctatccaagttggtgatagcttattattttcataagtaaaaaacaaatgagattatatatatatatataaaaatatatatattaaaaaaaaagacagtatttatcgtagcattagtggtccagcacctcttgggtgaggctgtccaggcaccatgttttctttgagtccaactcattaaaaaagaagaatctctgtcacctcagccaagtgatttattttttgctcccccttttttgagtcacaggccgagctgcagcctaggaaacccaaatagggtttggtgggccacttagtgggcatggttacattggtttatagcatcccaagaactgtagatccctaggcccctgagagctggacagagcagagaactacagggccaagggtccagagaagtgataacttggcccagggccacacagcagaggtagagggtccttggccagcacactatctaccactctaccccacctcccactgcctgccttgctcccctttcctcccttttcaataccctatcttcccttgttgttaagatggccaaataatacatttactctaaattgattgcctggaaactacctgccttcgtcctgagagcttctgtgtgtcaggctgctggaaagaagactccattcccaggacagaggcccttgagtacaggggctgctttcttcctgcctagatcttcaccatctctgcacagctctgagagaatggatgctttctgttgagaaaccagtaccttgtggaggcaggttcttgggctgctactccagggagtggatggaatccttggtcccctaggccagacttcactgccactgtgccagacagctccctgcagctgggccctagccactcttaggaaagactattgggagtatttgctggccagagaatgggactctatcagctttacacatgtcccaccagctgtttcagatagatccttacagctggcagagtaaaagtggtcccgctaccattggggaatcaggaaaggaaagactgagatggttgccaggacttggggtggcccacctgtggagaggactggctgccctggaggaggaaagggaggaagtctacacagaggagcaccaggacggctggaatttccatatgtgcttcacattgtgaggggagtgcacaagccgcccatgcaaagagtagggtcagccatggcaaggccggaagttgaactttcagtccctgcctgaatctgggctttgcaagctcctgctccatattggtggacatgggaatggttggtgtggcctgagatacccattgctcaccaggcctcactgggcccacagctgggcaacaagaaaaatgtttgaattggaccaactgctggtgatggggccagggccctgggccctgtgctgtcagaattctgccttgggaaatgatcctatagctgctgctttttcttggtccttggggctggcagacccatagaccatggcctgttaggaggcgtcctgtctgtaaaggaaattcatctcttgtgacagcctggggctacctagctcccaaacccagaagttggagacatcaggctgtttaaatgatcatagcctagcaggattggattaaaaccacaggcttttgcagctggaatggggttcagtgaacatctcccccattcctctcttgctacaaataaggaaacaggcccaggagattaagtgacttggctaaagtcacatagcaaattagtagcagagccgggactatcccttatccctgtgggttgggcaacactatttagtcctgaaaccgaatggcagataaaccccatgaggggtcaggctgatgtgccctccagcagtatctgagaagctgctaccttcaggggtgtgtcagggatgaggacgggtgcctgagcttaggttgtggagtggctgagagggcccaggagggctcgggacagctgtgtgctgcatggggttgggtgtctgcctggctcgcacttggtacccatggccacctccccattttctgtgccttatctcactgtttcagctgagtccaagttgtttactctgttcctctccagaggggctctctgtcccagttgggcagctcacctttgggacataagcctttgccccacaagctgtggagagggccaaaaccaagctgcttgagcccactctcttgctgagagtccaggcctgcctgcctgccagccagaggtgccccttatgcacatccagtcctaccagcctgcttccaggagcctagagtgggaaaggcacctgggggagccctggtgaagggctggacctgacccatggaggcaggaggaagacctggctttcttggtttgtccggccctggggagcagccttccctactcactttccccttgcggcaccaaatggtcactccttccagagcaaaaactggcactcatagcaagccagaacccccatccccatcctcatgggtctgtggctgggtgcaggccatcaaaatggacaccacgagacagaagtggggactgcctggccacctagcgccttcccactccttaagcaagcacaaagaagatgaggcagagaattgtcagagctgaaagttcctttggttgctcacaactcaggtatgcacccatgtggcagccaggcagcggagccctactagactgccagtctcatgcacccagacctgtggccagattgtggcctctggctgcctcaggcattttcctctttgcattgggttttcctgcattagtaactacagctgcaacagacatcctccacattgtgcacactggttttgcctttgtcctcaagagttgatacttggcattagcatgaaacttgtgggtgtgggaggatggagagagaactctaacacaaaacatcttattaaaattgtacttgagagacaaaaaaaaaactctgttgtattttgacaga

SEQ ID NO: 206147 - DNA, 2756 bp, Artificial Sequence
  derived and/or modified sequence
acaatagtagctccctccaagatggcggcagcgacggcagacccgggagctgggaacccgcagcctggggactcctccggcgggggcgctgggggcgggctgccgtcccctggggagcaggagctgagccggcgcttgcagcgcctgtatcccgcggtcaaccagcaagagactccgctgccgcgctcctggagccccaaggacaaatacaactacattggtctctcccagggcaacctccgcgtccactacaaaggtcatggcaaaaatcacaaagatgcggcctcagtgcgtgccacccaccccatacctgctgcctgtggcatttattactttgaagtgaagattgtcagcaaaggaagagatggttacatgggaataggactctcggctcaaggcgtcaacatgaacagacttcctgatcccacttccagaaacctgagttctttgctccaggtccaacagaggtgaacccacttgccccagactggggttattttcctgcaaaaaccggatcctcgtgtgttccccatctctgctgacagccactgtccaccttggcccccaggactaagtgtcattgaatccactcctgactcacatttggtcatatggggaaatagacatcaagggctgtggtcagctggtggagcagagcatggattctggagctataccacctgcatttgcatcctggcggctgtgttacctggacctgggacccatgttacagctgacagtccctgcagtgtccaccattaacaccacctctctctggagcatctttcaccttgggatctacagtacttcacaggggtctgctgtggggcagccaggtccctctgtgagggaagccatgcttcttccgagctgggttgggacaaacattcctatggttaccatggtgatgatgggcattcgttctgctcctcggggactggccagccctatggtcccacattcaccacaggagacgtgatcggctgctgtgtcaacctcatcaatggcacctgcttctacaccaagaatggccacagccttggtatagccttcacagacctcccggccaacctctaccccaccgtaggcctgcagacacctggggagattgtggacgccaactttgggcagcagcccttcctgtttgacattgaggactacatgcgggagtggcgtgccaaggtccagggcacggtccactgcttccccatcagtgcccggcttggcgagtggcaggcagtgctgcagaacatggtttcatcttacctcgtgcatcatgggtattgtgccacagccacggcttttgctcgaatgactgaaaccccgattcaggaagaacaggcgtccataaagaacagacaaaagatccagaagctggtgctggagggccgtgtgggcgaggccatcgagaccacccagcgcttctacccagggctgctggagcacaaccccaacctcctcttcatgctcaagtgccggcagtttgtggagatggtgaatgggacggacagtgaggtccgaagtttgagctcccgaagccccaagtcccaggacagctaccctggctcccccagcctcagtccccgacatggccccagtagttcccacatgcacaacacaggagcagacagtcccagctgtagcaatggcgtcgcgtccaccaagagcaaacagaaccacagtaaataccctgcacccagctcctcatcctcgtcctcctcctcctcctcgtcctcttccccatcctccgtcaattactccgagtccaactcaacagactccaccaagtcccagcaccacagcagtaccagtaaccaggagaccagcgacagtgagatggagatggaggcagagcactaccccaacggtgtgctaggaagcatgtccacacgcattgttaatggtgcctacaagcatgaggacctgcagacggatgagtccagcatggatgacaggcatcctcggcggcagctctgcgggggcaaccaggctgccacagaaaggatcattctgtttggccgcgagttgcaggcattgagtgagcagttgggccgggagtacggcaagaatttggcccacacagagatgctgcaggatgccttcagcctgctggcatactcagacccctggagctgcccagttggccagcagcttgaccccatccagagggaacctgtgtgtgctgccctcaacagcgccattttagagtcccagaacctgccaaagcagccccctctgatgctcgccctgggccaggcatctgagtgtctccggctcatggcccgagcaggcctgggttcttgctcctttgccagagttgatgactacttgcactagctgactgtgctggctggctctggctggccctccactggccccagggctggagctgccctgccctccataggcaactggtgcagggactgggaaaccatagacagagtccactcctcctgcctggcctttccccctctccctttccttccttccttcctttctctgcccaccaccccgctcagtctctctctctctccccttcacgtgcagcggcctgtaacacagtattggctggttactctcatgtagcgccttctattttgaaaggggggttttgttttgaggaggggttggggtttttaaatttttttctcctgactgagccaccagtatttatctctggagagtttgtgctgagctggtttctgctaatttagtgatgaagcctatccaagttggtgatagcttattattttcat

SEQ ID NO: 206148 - DNA, 1863 bp, Artificial Sequence
  derived and/or modified sequence
atggccgccgccaccgccgaccccggcgccggcaacccccagcccggcgacagcagcggcggcggcgccggcggcggcctgcccagccccggcgagcaggagctgagcagaagactgcagagactgtaccccgccgtgaaccagcaggagacccccctgcccagaagctggagccccaaggacaagtacaactacatcggcctgagccagggcaacctgagagtgcactacaagggccacggcaagaaccacaaggacgccgccagcgtgagagccacccaccccatccccgccgcctgcggcatctactacttcgaggtgaagatcgtgagcaagggcagagacggctacatgggcatcggcctgagcgcccagggcgtgaacatgaacagactgcccggctgggacaagcacagctacggctaccacggcgacgacggccacagcttctgcagcagcggcaccggccagccctacggccccaccttcaccaccggcgacgtgatcggctgctgcgtgaacctgatcaacggcacctgcttctacaccaagaacggccacagcctgggcatcgccttcaccgacctgcccgccaacctgtaccccaccgtgggcctgcagacccccggcgagatcgtggacgccaacttcggccagcagcccttcctgttcgacatcgaggactacatgagagagtggagagccaaggtgcagggcaccgtgcactgcttccccatcagcgccagactgggcgagtggcaggccgtgctgcagaacatggtgagcagctacctggtgcaccacggctactgcgccaccgccaccgccttcgccagaatgaccgagacccccatccaggaggagcaggccagcatcaagaacagacagaagatccagaagctggtgctggagggcagagtgggcgaggccatcgagaccacccagagattctaccccggcctgctggagcacaaccccaacctgctgttcatgctgaagtgcagacagttcgtggagatggtgaacggcaccgacagcgaggtgagaagcctgagcagcagaagccccaagagccaggacagctaccccggcagccccagcctgagccccagacacggccccagcagcagccacatgcacaacaccggcgccgacagccccagctgcagcaacggcgtggccagcaccaagagcaagcagaaccacagcaagtaccccgcccccagcagcagcagcagcagcagcagcagcagcagcagcagcagccccagcagcgtgaactacagcgagagcaacagcaccgacagcaccaagagccagcaccacagcagcaccagcaaccaggagaccagcgacagcgagatggagatggaggccgagcactaccccaacggcgtgctgggcagcatgagcaccagaatcgtgaacggcgcctacaagcacgaggacctgcagaccgacgagagcagcatggacgacagacaccccagaagacagctgtgcggcggcaaccaggccgccaccgagagaatcatcctgttcggcagagagctgcaggccctgagcgagcagctgggcagagagtacggcaagaacctggcccacaccgagatgctgcaggacgccttcagcctgctggcctacagcgacccctggagctgccccgtgggccagcagctggaccccatccagagagagcccgtgtgcgccgccctgaacagcgccatcctggagagccagaacctgcccaagcagccccccctgatgctggccctgggccaggccagcgagtgcctgagactgatggccagagccggcctgggcagctgcagcttcgccagagtggacgactacctgcactag

SEQ ID NO: 206149 - DNA, 1176 bp, Artificial Sequence
  derived and/or modified sequence
atgagagagtggagagccaaggtgcagggcaccgtgcactgcttccccatcagcgccagactgggcgagtggcaggccgtgctgcagaacatggtgagcagctacctggtgcaccacggctactgcgccaccgccaccgccttcgccagaatgaccgagacccccatccaggaggagcaggccagcatcaagaacagacagaagatccagaagctggtgctggagggcagagtgggcgaggccatcgagaccacccagagattctaccccggcctgctggagcacaaccccaacctgctgttcatgctgaagtgcagacagttcgtggagatggtgaacggcaccgacagcgaggtgagaagcctgagcagcagaagccccaagagccaggacagctaccccggcagccccagcctgagccccagacacggccccagcagcagccacatgcacaacaccggcgccgacagccccagctgcagcaacggcgtggccagcaccaagagcaagcagaaccacagcaagtaccccgcccccagcagcagcagcagcagcagcagcagcagcagcagcagcagccccagcagcgtgaactacagcgagagcaacagcaccgacagcaccaagagccagcaccacagcagcaccagcaaccaggagaccagcgacagcgagatggagatggaggccgagcactaccccaacggcgtgctgggcagcatgagcaccagaatcgtgaacggcgcctacaagcacgaggacctgcagaccgacgagagcagcatggacgacagacaccccagaagacagctgtgcggcggcaaccaggccgccaccgagagaatcatcctgttcggcagagagctgcaggccctgagcgagcagctgggcagagagtacggcaagaacctggcccacaccgagatgctgcaggacgccttcagcctgctggcctacagcgacccctggagctgccccgtgggccagcagctggaccccatccagagagagcccgtgtgcgccgccctgaacagcgccatcctggagagccagaacctgcccaagcagccccccctgatgctggccctgggccaggccagcgagtgcctgagactgatggccagagccggcctgggcagctgcagcttcgccagagtggacgactacctgcactag

SEQ ID NO: 206150 - protein, 1216 aa, Artificial Sequence
  derived and/or modified sequence
MAAMAPGGSGSGGGVNPFLSDSDEDDDEVAATEERRAVLRLGAGSGLDPGSAGSLSPQDPVALGSSARPGLPGEASAAAVALGGTGETPARLSIDAIAAQLLRDQYLLTALELHTELLESGRELPRLRDYFSNPGNFERQSGTPPGMGAPGVPGAAGVGGAGGREPSTASGGGQLNRAGSISTLDSLDFARYSDDGNRETDEKVAVLEFELRKAKETIQALRANLTKAAEHEVPLQERKNYKSSPEIQEPIKPLEKRALNFLVNEFLLKNNYKLTSITFSDENDDQDFELWDDVGLNIPKPPDLLQLYRDFGNHQVTGKDLVDVASGVEEDELEALTPIISNLPPTLETPQPAENSMLVQKLEDKISLLNSEKWSLMEQIRRLKSEMDFLKNEHFAIPAVCDSVQPPLDQLPHKDSEDSGQHPDVNSSDKGKNTDIHLSISDEADSTIPKENSPNSFPRREREGMPPSSLSSKKTVHFDKPNRKLSPAFHQALLSFCRMSADSRLGYEVSRIADSEKSVMLMLGRCLPHIVPNVLLAKREELIPLILCTACLHPEPKERDQLLHILFNLIKRPDDEQRQMILTGCVAFARHVGPTRVEAELLPQCWEQINHKYPERRLLVAESCGALAPYLPKEIRSSLVLSMLQQMLMEDKADLVREAVIKSLGIIMGYIDDPDKYHQGFELLLSALGDPSERVVSATHQVFLPAYAAWTTELGNLQSHLILTLLNKIEKLLREGEHGLDEHKLHMYLSALQSLIPSLFALVLQNAPFSSKAKLHGEVPQIEVTRFPRPMSPLQDVSTIIGSREQLAVLLQLYDYQLEQEGTTGWESLLWVVNQLLPQLIEIVGKINVTSTACVHEFSRFFWRLCRTFGKIFTNTKVKPQFQEILRLSEENIDSSAGNGVLTKATVPIYATGVLTCYIQEEDRKLLVGFLEDVMTLLSLSHAPLDSLKASFVELGANPAYHELLLTVLWYGVVHTSALVRCTAARMFELTLRGMSEALVDKRVAPALVTLSSDPEFSVRIATIPAFGTIMETVIQRELLERVKMQLASFLEDPQYQDQHSLHTEIIKTFGRVGPNAEPRFRDEFVIPHLHKLALVNNLQIVDSKRLDIATHLFEAYSALSCCFISEDLMVNHFLPGLRCLRTDMEHLSPEHEVILSSMIKECEQKVENKTVQEPQGSMSIAASLVSEDTKTKFLNKMGQLTTSGAMLANVFQRKK

SEQ ID NO: 206151 - DNA, 3651 bp, Artificial Sequence
  derived and/or modified sequence
atggccgccatggcccccggcggcagcggcagcggcggcggcgtgaaccccttcctgagcgacagcgacgaggacgacgacgaggtggccgccaccgaggagagaagagccgtgctgagactgggcgccggcagcggcctggaccccggcagcgccggcagcctgagcccccaggaccccgtggccctgggcagcagcgccagacccggcctgcccggcgaggccagcgccgccgccgtggccctgggcggcaccggcgagacccccgccagactgagcatcgacgccatcgccgcccagctgctgagagaccagtacctgctgaccgccctggagctgcacaccgagctgctggagagcggcagagagctgcccagactgagagactacttcagcaaccccggcaacttcgagagacagagcggcaccccccccggcatgggcgcccccggcgtgcccggcgccgccggcgtgggcggcgccggcggcagagagcccagcaccgccagcggcggcggccagctgaacagagccggcagcatcagcaccctggacagcctggacttcgccagatacagcgacgacggcaacagagagaccgacgagaaggtggccgtgctggagttcgagctgagaaaggccaaggagaccatccaggccctgagagccaacctgaccaaggccgccgagcacgaggtgcccctgcaggagagaaagaactacaagagcagccccgagatccaggagcccatcaagcccctggagaagagagccctgaacttcctggtgaacgagttcctgctgaagaacaactacaagctgaccagcatcaccttcagcgacgagaacgacgaccaggacttcgagctgtgggacgacgtgggcctgaacatccccaagccccccgacctgctgcagctgtacagagacttcggcaaccaccaggtgaccggcaaggacctggtggacgtggccagcggcgtggaggaggacgagctggaggccctgacccccatcatcagcaacctgccccccaccctggagaccccccagcccgccgagaacagcatgctggtgcagaagctggaggacaagatcagcctgctgaacagcgagaagtggagcctgatggagcagatcagaagactgaagagcgagatggacttcctgaagaacgagcacttcgccatccccgccgtgtgcgacagcgtgcagccccccctggaccagctgccccacaaggacagcgaggacagcggccagcaccccgacgtgaacagcagcgacaagggcaagaacaccgacatccacctgagcatcagcgacgaggccgacagcaccatccccaaggagaacagccccaacagcttccccagaagagagagagagggcatgccccccagcagcctgagcagcaagaagaccgtgcacttcgacaagcccaacagaaagctgagccccgccttccaccaggccctgctgagcttctgcagaatgagcgccgacagcagactgggctacgaggtgagcagaatcgccgacagcgagaagagcgtgatgctgatgctgggcagatgcctgccccacatcgtgcccaacgtgctgctggccaagagagaggagctgatccccctgatcctgtgcaccgcctgcctgcaccccgagcccaaggagagagaccagctgctgcacatcctgttcaacctgatcaagagacccgacgacgagcagagacagatgatcctgaccggctgcgtggccttcgccagacacgtgggccccaccagagtggaggccgagctgctgccccagtgctgggagcagatcaaccacaagtaccccgagagaagactgctggtggccgagagctgcggcgccctggccccctacctgcccaaggagatcagaagcagcctggtgctgagcatgctgcagcagatgctgatggaggacaaggccgacctggtgagagaggccgtgatcaagagcctgggcatcatcatgggctacatcgacgaccccgacaagtaccaccagggcttcgagctgctgctgagcgccctgggcgaccccagcgagagagtggtgagcgccacccaccaggtgttcctgcccgcctacgccgcctggaccaccgagctgggcaacctgcagagccacctgatcctgaccctgctgaacaagatcgagaagctgctgagagagggcgagcacggcctggacgagcacaagctgcacatgtacctgagcgccctgcagagcctgatccccagcctgttcgccctggtgctgcagaacgcccccttcagcagcaaggccaagctgcacggcgaggtgccccagatcgaggtgaccagattccccagacccatgagccccctgcaggacgtgagcaccatcatcggcagcagagagcagctggccgtgctgctgcagctgtacgactaccagctggagcaggagggcaccaccggctgggagagcctgctgtgggtggtgaaccagctgctgccccagctgatcgagatcgtgggcaagatcaacgtgaccagcaccgcctgcgtgcacgagttcagcagattcttctggagactgtgcagaaccttcggcaagatcttcaccaacaccaaggtgaagccccagttccaggagatcctgagactgagcgaggagaacatcgacagcagcgccggcaacggcgtgctgaccaaggccaccgtgcccatctacgccaccggcgtgctgacctgctacatccaggaggaggacagaaagctgctggtgggcttcctggaggacgtgatgaccctgctgagcctgagccacgcccccctggacagcctgaaggccagcttcgtggagctgggcgccaaccccgcctaccacgagctgctgctgaccgtgctgtggtacggcgtggtgcacaccagcgccctggtgagatgcaccgccgccagaatgttcgagctgaccctgagaggcatgagcgaggccctggtggacaagagagtggcccccgccctggtgaccctgagcagcgaccccgagttcagcgtgagaatcgccaccatccccgccttcggcaccatcatggagaccgtgatccagagagagctgctggagagagtgaagatgcagctggccagcttcctggaggacccccagtaccaggaccagcacagcctgcacaccgagatcatcaagaccttcggcagagtgggccccaacgccgagcccagattcagagacgagttcgtgatcccccacctgcacaagctggccctggtgaacaacctgcagatcgtggacagcaagagactggacatcgccacccacctgttcgaggcctacagcgccctgagctgctgcttcatcagcgaggacctgatggtgaaccacttcctgcccggcctgagatgcctgagaaccgacatggagcacctgagccccgagcacgaggtgatcctgagcagcatgatcaaggagtgcgagcagaaggtggagaacaagaccgtgcaggagccccagggcagcatgagcatcgccgccagcctggtgagcgaggacaccaagaccaagttcctgaacaagatgggccagctgaccaccagcggcgccatgctggccaacgtgttccagagaaagaagtag

SEQ ID NO: 206152 - DNA, 3651 bp, Artificial Sequence
  derived and/or modified sequence
atggccgccatggccccaggaggctccggctccgggggtggagtgaatcctttcctaagcgacagtgacgaggatgatgatgaggttgccgctaccgaggagagaagagcggtcctccgcctaggagccgggtctgggctcgaccccggttcagccgggtcactatccccccaagacccagtggcgctgggaagttctgctcgacccggactgcccggcgaggcaagcgctgccgcagttgctctggggggcactggagagactcctgccagactaagcattgacgccattgcagcccaactcctgcgggatcagtacctgttgaccgctctggagctgcacacggaactcttggaatccggtagagagttgcctagacttagagattactttagcaaccctggcaatttcgaacgccagtccggcaccccgcccggtatgggtgctccaggggtacccggagcagctggtgtcggtggagctggaggcagggaaccttctacagcatccggcggcggccagctgaaccgcgccggctccatttccaccttggactcgctggactttgcccggtacagcgatgacggtaacagggagaccgacgagaaggtcgctgttttggagtttgagcttagaaaagctaaagagaccatacaggccttacgggcaaatctgactaaagcagccgagcacgaggtcccattgcaggaaagaaagaactacaagtctagccctgagatccaagaacccatcaaaccattagaaaaacgggccctaaactttcttgtaaacgaatttctgcttaaaaataattacaagcttacttcaataacgttttctgatgagaatgacgaccaggactttgagctatgggatgacgtaggactcaatatccctaaacctcccgacctgttacaactttatcgcgatttcggaaatcaccaggtgacaggtaaggatttggtagacgttgcctccggagtcgaggaagacgaactcgaggccctaactcctattatatccaacctgccccccactctcgagacccctcagccagccgagaattccatgttagtccagaagctcgaagataagatatcgctccttaactctgaaaaatggagccttatggagcagatcaggagattgaaatctgaaatggactttcttaagaacgagcatttcgcaatacccgctgtttgtgactccgtgcagccacccctggatcagctgccccacaaggactcagaagacagcggccagcacccggatgtcaacagctcagataagggaaagaacactgatattcatctcagcataagtgatgaggcagatagcacaattccaaaagagaactcgcccaatagctttcccagacgcgagcgcgaaggcatgccgcctagtagtctgtcatcaaagaagaccgtccatttcgacaaaccaaataggaaactgtcaccagccttccaccaggcccttttgtcattctgtagaatgagcgctgatagtcggcttgggtatgaggtgtctcgcatagccgatagcgagaagtctgtgatgctgatgttggggaggtgtctgccacacattgtcccaaatgtgctgctcgcgaagcgcgaagagttgatcccattgattctgtgtaccgcctgtttgcaccccgaacctaaagaacgggatcagctgcttcatatactgttcaaccttatcaaacggccggacgatgagcagcggcagatgatacttacagggtgtgtcgcatttgctcgccacgtgggaccaacgcgggtggaggcagagttgttgccccagtgttgggagcagataaaccataagtaccctgagcgaaggctgctggtcgcagagagctgcggagccctcgccccgtacctgcccaaggaaatccggtcttccctggtgttgtcaatgcttcagcagatgcttatggaagacaaagcagacttagtgcgggaagctgtcatcaagtccttggggataatcatgggatatatagacgaccccgataaatatcaccaggggtttgagttacttctctccgcgcttggggacccaagtgagcgtgtcgtgagtgctactcaccaagtgttcctgccagcctatgctgcatggacaactgagctaggcaacctgcagtcacatctgatcttgacactgctgaacaagatagagaagctgctgagggaaggcgagcatggactggacgagcataaactccatatgtacctgtccgccctccaaagtttgatcccatcgttgtttgcgctcgtcctgcagaatgccccattctcatccaaggcaaagcttcatggcgaggtaccgcagatcgaggtgacacggttcccacgacccatgagcccactccaggatgtatccacgatcatcgggagcagggaacagcttgcggttctgctgcagctctacgattaccagctggaacaggagggaaccacagggtgggagagtttgttatgggttgtgaaccaactcctccctcagctgatcgagattgtagggaagattaatgtcactagcactgcctgcgtccacgaattttcccgatttttctggcggttgtgtcgtacatttggaaaaattttcacgaataccaaggtcaaacctcaatttcaggaaatcttgagactatccgaggaaaacatcgatagctccgcagggaatggagtgctcacaaaggcaaccgtcccaatttacgcaaccggtgtgctgacctgttacattcaagaagaggatcggaaactgctggtgggttttttggaagatgtgatgaccctgctcagcctcagccacgcgcccctcgatagcctgaaggcaagttttgtcgagttaggtgctaatccagcatatcacgagctgctcctaacagttctctggtacggcgtggtacatactagcgcattggtcaggtgtacagccgcccggatgttcgagttaacgctgagaggtatgtcagaggcactcgtggataagcgggtggcgcctgctctggttactctttcttccgatccagagttcagcgtcaggattgcaacaatcccagcgttcggcacgattatggagacggtgatccagcgcgaattgcttgaaagagtgaaaatgcagctggcttcatttcttgaggatcctcaatatcaagaccagcattccctgcacactgagataatcaaaacgtttgggcgggttgggcctaacgctgaaccccgctttcgtgacgaatttgtcatccctcacctccacaaactcgccctcgtcaataacctgcagatcgttgactccaaacggctagacatcgccactcacctctttgaagcctacagcgccctatcttgttgcttcatttccgaggacctcatggttaatcactttctgcctggtctcagatgcctgcgtaccgacatggaacatctgtcccctgaacacgaggtcatcttgtcgtccatgatcaaagaatgcgagcaaaaagtggagaataagactgtacaggaaccacagggctctatgtccatcgctgcttctctggtgtctgaggacactaagacaaaattcctgaacaaaatggggcagctgaccacatctggggccatgttagcaaacgtgttccagaggaagaaatag

SEQ ID NO: 206153 - DNA, 3651 bp, Artificial Sequence
  derived and/or modified sequence
atggccgccatggcccctgggggcagcggcagcggcggcggcgtgaaccccttcctgagtgacagtgatgaagatgatgatgaggtggccgccacagaggagaggagagctgtgctgcggctgggcgccggcagcggcctggaccccggcagcgctggcagcctgagcccccaggaccctgtggccctgggcagcagcgcccggcccggcctgcccggggaggccagcgctgctgctgtggccctgggcggcactggagagaccccagcccggctgagcattgatgccatcgccgcccagctgctgcgggaccagtacctgctgacagccctggagctgcacacagagctgctggagagcggccgggagctgccccggctgcgggactacttcagcaaccctggcaactttgagcggcagagcggcaccccacctggcatgggcgcccctggggtgcctggagctgctggggtgggcggggccggcggccgggagcccagcacagccagcggcggcggccagctgaacagagctggcagcatcagcaccctggacagcctggactttgcccgctacagtgatgatggcaaccgggagacagatgagaaggtggccgtgctggagtttgagctgaggaaggccaaggagaccatccaggccctgcgggccaacctgaccaaggctgctgagcacgaggtgcccctgcaggagaggaagaactacaagagcagccctgagatccaggagcccatcaagcccctggagaagagggccctgaacttcctggtgaatgagttcctgctgaagaacaactacaagctgaccagcatcaccttcagtgatgaaaatgatgaccaggactttgagctgtgggatgatgtgggcctgaacatccccaagcccccagacctgctgcagctgtacagagactttggaaaccaccaggtgacaggcaaggacctggtggatgtggccagcggcgtggaggaggatgagctggaggccctgacccccatcatcagcaacctgccccccaccctggagaccccccagcctgctgagaacagcatgctggtgcagaagctggaggacaagatcagcctgctgaacagcgagaagtggagcctgatggagcagatccggcggctgaagtctgagatggacttcctgaagaatgagcactttgccatcccagctgtgtgtgacagcgtgcagccccccctggaccagctgccccacaaggacagtgaagattctggccagcacccagatgtgaacagcagtgacaagggcaagaacacagacatccacctgagcatcagtgatgaggccgacagcaccatccccaaggagaacagccccaacagcttcccccggcgggagcgggagggcatgccacccagcagcctgagcagcaagaagacagtgcactttgacaagcccaacaggaagctgagccctgccttccaccaggccctgctgtccttctgcaggatgtctgctgacagccggctgggctatgaggtgtccagaattgctgacagcgagaagtctgtgatgctgatgctgggccgctgcctgccccacatcgtgcccaacgtgctgctggccaagcgggaggagctgatccccctcatcctgtgcacagcctgcctgcaccctgagcccaaggagcgggaccagctgctgcacatcctcttcaacctgatcaagaggccagatgatgagcagaggcagatgatcctgaccggctgtgtggcctttgcccggcacgtgggccccaccagggtggaggccgagctgctgccccagtgctgggagcagatcaaccacaagtacccagagcggcggctgctggtggccgagagctgtggggccctggccccctacctgcccaaggagatccgcagcagcctggtgctgtccatgctgcagcagatgctgatggaggacaaggctgacctggtgcgggaggccgtcatcaagagcctgggcatcatcatgggctacattgatgatcctgacaagtaccaccagggctttgagctgctgctgagcgccctgggggaccccagcgagcgggtggtgtctgccacccaccaggtgttcctgcctgcctatgctgcctggaccacagagctgggcaacctgcagagccacctgatcctgaccctgctgaacaagattgagaagctgctgcgggagggggagcacggcctggatgagcacaagctgcacatgtacctgagcgccctgcagagcctcatccccagcctgtttgccctggtgctgcagaatgcccccttcagcagcaaggccaagctgcacggggaggtgccccagatcgaggtgacccgcttcccccggcccatgagccccctgcaggatgtgtccaccatcatcggcagccgggagcagctggccgtgctgctgcagctgtatgactaccagctggagcaggagggcaccaccggctgggagagcctgctgtgggtggtgaaccagctgctgccccagctgattgaaattgtgggcaagatcaacgtgaccagcacagcctgtgtgcatgagttcagccgcttcttctggaggctgtgcaggaccttcggcaagatcttcaccaacaccaaggtgaagccccagttccaggagatcctgcggctgtctgaagaaaatattgacagcagcgctggaaatggagtgctgaccaaggccaccgtgcccatctatgccaccggggtgctgacctgctacatccaggaggaggacaggaagctgctggtgggcttcctggaggatgtgatgaccctgctgagcctgagccacgcccccctggacagcctgaaggccagctttgtggagctgggcgccaacccagcctaccacgagctgctgctgactgtgctgtggtatggagtggtgcacaccagcgccctggtgcgctgcacagctgccaggatgtttgagctgaccctgcggggcatgtctgaggccctggtggacaagagggtggccccagccctggtgaccctgagcagtgaccctgagttctctgtgagaattgccaccatcccagccttcggcaccatcatggagaccgtcatccagcgggagctgctggagcgggtgaagatgcagctggccagcttcctggaggacccccagtaccaggaccagcacagcctgcacacagagatcatcaagaccttcggccgggtgggccccaatgctgagccccgcttcagagatgaatttgtgatcccccacctgcacaagctggccctggtgaacaacctgcagatcgtggacagcaagaggctggacatcgccacccacctgtttgaggcctacagcgccctgagctgctgcttcatcagcgaggacctgatggtgaaccacttcctgcccggcctgcgctgcctgaggacagacatggagcacctgagccctgagcacgaggtgatcctgagctccatgatcaaggaatgtgagcagaaggtggagaacaagacagtgcaggagccccagggctccatgagcattgctgccagcctggtgtctgaggacaccaagaccaagttcctgaacaagatgggccagctgaccaccagcggggccatgctggccaacgtgttccagaggaagaagtag

SEQ ID NO: 206154 - DNA, 3651 bp, Artificial Sequence
  derived and/or modified sequence
atggccgccatggcccccggcggcagcggcagcggcggcggcgtgaatcctttcctgtctgactctgacgaagatgacgatgaggtggcagctaccgaagagcgccgcgctgttctgcggctgggggctggcagcgggctagatcccggcagcgccggcagcctttcaccccaggatccggtggctctcggcagtagcgcacgaccaggcctgcctggggaggcaagcgccgccgccgtcgcattaggcggtacgggagagacccccgccagactgtctatcgatgccattgccgcacagctgttgagggatcaatatctactcacagcgctggaactccacaccgaactactggagtcaggtagagaactgcctcgcttgcgggattattttagcaatcctggaaactttgagcgacagtcaggcactcctcccggtatgggggccccaggagtgccaggggctgcaggggtggggggagctggcggacgagaaccatccacagctagcggcgggggccagctgaatagggctgggtcaatctctaccctggatagcctggactttgccagatacagcgacgacggtaaccgggaaacagatgagaaggtggctgtgctggaattcgaactgcggaaggcaaaagagacgatccaggctttacgtgcaaatctgaccaaagccgcagaacatgaagtcccccttcaggaacgcaagaactataagtcttcccccgaaattcaggagcccatcaagcccctggaaaagcgtgcattgaacttcctggtgaacgaatttctacttaaaaataactataaactcaccagtattactttttcagatgaaaatgatgatcaggattttgagctgtgggatgatgtcggactgaatatccccaagcctcccgatcttctacagctgtatcgagacttcggaaaccaccaggtcactggcaaagatctggtcgatgtcgcttctggagtggaagaagacgagttggaggcccttacacccatcatcagcaacttacccccaacactggaaacacctcagccagctgaaaattctatgctcgtacagaagctcgaagacaaaatctcactcctgaattcggagaagtggtctctcatggaacagatccgacgacttaaaagtgaaatggacttccttaagaatgagcactttgctatcccggccgtttgtgactcggtccagcctcctctcgatcagctgcctcacaaggacagcgaggacagcggacagcaccctgacgtgaacagtagcgacaagggcaaaaacactgacatccacctgtcaatctcagacgaagccgactccacgatccccaaagagaatagcccaaattcctttcctaggcgcgagcgcgaagggatgcctccctctagcctctccagtaagaaaaccgtacattttgataaacccaacaggaaacttagcccggcctttcaccaggctctcctgagcttctgtaggatgtctgctgactcaagactcggttacgaggtcagtaggatcgcggattctgagaaaagcgtcatgttgatgctcgggaggtgcctcccacatatagtacccaacgtgctgcttgctaaaagggaggagctaatccctcttatcttgtgcacagcgtgtcttcatccagagccaaaggagagagaccagcttctccatatactgtttaatctgatcaagagacctgacgatgagcaaaggcagatgatcctgaccggttgcgtggcgttcgcaaggcacgtagggccaacacgagttgaggccgagctgctcccccaatgttgggagcaaattaatcataagtaccctgaaagacgactcctggtggccgagtcatgcggtgccctcgccccttatctgcctaaggagatacggagttctttggtgttatccatgttacagcagatgcttatggaggacaaagctgatcttgtgcgcgaagcagtcatcaaatcactgggaatcataatggggtatatcgacgatccagacaagtaccaccaagggttcgagctcctcctgtccgctttgggcgatcccagtgagagggtggtcagcgccacccaccaagtgtttctgccagcatacgccgcatggactaccgaactaggtaacttgcagtcccatctcattttaacattgctgaacaaaatcgagaagctgctgcgcgagggggaacatgggctcgatgagcataagttgcatatgtacctgtccgctctgcagtccctgattcctagtctgtttgccctggtgttgcagaacgcccccttcagcagcaaggccaagttgcacggggaagtgccacagatcgaagtgacccgatttccgagaccgatgtcgcccctgcaggacgtgagtacgattatcgggtcccgcgagcaactagctgttttgctccaactttacgactaccaactcgaacaggaaggcaccactggatgggagtctttgctttgggtggtgaaccagctcctgccacagttaatcgaaattgtcggaaaaatcaacgtgacctctacagcttgcgtgcatgaattctcccggttcttctggcggctgtgtcgaacgttcggaaaaatattcactaacaccaaggttaagccccaatttcaggagatattgcggttgtccgaggaaaatatagacagtagtgccgggaacggggttctcaccaaggcaactgtccccatttatgccaccggagtcctgacctgctacatacaggaagaagatcgcaaactgctggtcgggttcctagaagacgtaatgacattactgagtctttctcacgccccacttgacagtctgaaagcttcctttgtcgagctgggagccaatccagcataccacgaattgcttttaacagttctgtggtatggcgtagttcatacttccgcgctggtgcggtgcactgcagccagaatgtttgagctgacactgcggggcatgagtgaggccctggtggacaagcgggtggcgccggctctggtcacgttgagcagcgatcctgagttctccgtcagaattgctacaatacccgccttcgggaccattatggagaccgttatccagagagagcttttagaacgtgtgaagatgcagctagcttcattcctggaggacccccagtatcaagaccagcacagcctgcacacagagatcattaaaacctttggacgcgttggccccaatgcggaacctcgttttagagatgaattcgtcatcccacaccttcacaaacttgccctagtcaacaatcttcagatcgtggattcgaagagattggacatagctactcacctttttgaggcctacagtgccctatcctgttgctttatcagcgaagatctcatggtgaaccactttttgcctgggctccgctgccttagaacagatatggaacaccttagtcctgagcatgaggtgatactctccagtatgataaaagaatgcgagcagaaggtggaaaataaaactgtgcaggaaccacagggctctatgtcgattgcagcttctctggtgtccgaagatactaagacaaagttcctgaacaagatgggacagttgacgaccagtggagctatgctggccaatgtgtttcagcgcaagaaatag

SEQ ID NO: 206155 - DNA, 3651 bp, Artificial Sequence
  derived and/or modified sequence
atggccgcaatggcacccggaggcagtggcagcggcggtggcgtcaatccttttttgtctgattccgatgaggacgatgatgaagtggcggcaacagaggagaggcgggcagtgcttcgcttgggggctggttctgggctggatcccggttcagctggatcattaagcccacaagatccagtcgctctggggtcaagcgctcggccagggcttcccggtgaggcctccgcagcggcagttgcactgggcggaaccggggagacccccgcacggcttagcatcgatgctattgcggctcagctgcttcgggatcagtatctgctcacggcactggaactccacacagagctgttggagtccggcagggaactgccccgacttcgcgactacttctctaacccagggaatttcgagcggcagtccggtactccacctggcatgggcgctccaggcgtgcccggagcagcaggggtgggaggggctggtgggcgtgaaccgtccacagcctcgggcggagggcaactcaaccgcgcaggttctattagtacgctcgatagccttgattttgcaaggtactcagatgatgggaaccgcgagacagacgagaaggtcgccgtgctcgaattcgagttacggaaggctaaggagacaattcaagccctgcgggctaatctcaccaaagcggctgagcacgaggtccctctgcaggagcggaagaattataagagctcgcctgagatccaggaacctattaaacccctggagaagagagcccttaattttctggtgaacgaattcttgctcaagaataactataagttaacgtctatcacgttttcagatgagaacgacgaccaggattttgagctatgggacgatgttggcctgaatattcccaaaccccctgatctgctccaactctatcgcgactttgggaaccaccaggtcacgggcaaggacctggtcgacgtggctagtggcgtggaggaggatgagctggaggccttgacccccataatctccaacctgccgcctactctcgagactccccagccagccgagaattccatgctggtccagaagctcgaggacaagattagcctcctcaactccgagaagtggtcgcttatggagcagattagacgactgaagagcgaaatggacttcctgaagaatgaacactttgcgatcccagccgtctgtgattccgtgcagccgcctctggatcaactgcctcataaagattccgaggattctggacaacatcctgacgtcaacagtagcgacaaaggcaaaaacacagatatccacctcagtatctcagacgaagctgactctaccatccctaaggagaattctccaaatagtttccccagaagagagcgcgaagggatgcccccatctagcctttctagcaagaagaccgtccattttgacaaaccaaatcgcaagctcagcccggcattccaccaagcactcctgtctttttgcagaatgagcgcagactcccgtctcggatacgaggtctctcgcatagcagatagcgaaaagtcggtgatgttaatgctgggacggtgtttgcctcatattgtccctaacgtcttgctcgctaaacgcgaggaactgataccattgatactctgcaccgcctgtctccatccagagccgaaggagcgcgaccaattactccacatactcttcaatcttataaagcgcccagacgatgagcagcggcaaatgatcctaaccggatgtgtggcctttgctagacacgtgggccctacaagagtggaggcagaactgcttccacagtgttgggaacagattaaccataaatacccagaacgtaggctgctcgtggccgagtcctgtggggcactcgccccatatttaccaaaggagatacgaagttctctcgtgctatccatgttacagcagatgttaatggaagataaagccgacctagttcgggaggctgtcatcaagtccttgggcattatcatgggctatatcgatgaccctgacaaataccaccaaggatttgagctcctgctctcggctctcggggaccctagtgaaagggtagtcagtgcgacccaccaagtcttcctgccagcttatgccgcatggacaaccgagctgggaaatctgcagtctcacctgatcctaaccctgttaaataagatcgagaagctgttgcgtgaaggcgaacacggcttggacgagcacaaattgcatatgtatttgtcagcactgcagtctctaataccctccctgttcgcactggtcttacagaatgcacctttttcaagcaaggcgaagttgcatggcgaagttccacaaattgaagtcacccgctttcccaggccaatgagtccactgcaagacgtatccacaatcattggaagcagagagcaactggcagtgctgttgcagctgtacgattaccagcttgagcaggagggaaccaccgggtgggagtcactgctgtgggttgttaatcaactcttgccgcaacttatagagattgtcggaaagattaacgtaaccagtacggcatgcgttcatgagttttctagatttttttggcgtctgtgtcggaccttcggcaaaatatttacaaacaccaaggtgaaaccacagtttcaggagatcttgcggttgagcgaagaaaacatcgactctagcgcaggaaacggcgtattgaccaaggctacggtaccaatctacgcaactggtgtcctgacttgttacattcaggaagaggacaggaagttactagtgggattcttagaggacgtcatgactttacttagcttgtcacacgctccgctggatagcttaaaagcgtctttcgtggagctgggcgctaaccctgcatatcacgagctgctactcacagtattgtggtatggtgtggtccatacctcagctctggtgcgctgtactgcagcccgtatgttcgagcttaccttgaggggaatgagcgaagcgcttgtggacaagcgggtggctcctgccctcgtgacgctatcaagcgaccctgagttcagtgttaggatcgcgactattccagccttcggaactattatggaaaccgtcatacagcgtgaactccttgaaagagtcaagatgcagctcgcctcattccttgaagatcctcagtatcaagatcagcatagcttacatacagagataatcaagactttcggcagagtcgggcctaatgccgagcctcgtttccgggacgagtttgttatcccacatttgcataaacttgccttggtcaataatctgcaaatagtcgattccaagaggttagatatcgcaacccatctcttcgaggcatactctgcactcagttgctgctttatttcagaggatctgatggttaaccattttctgcccggtctgcgctgtcttagaaccgacatggagcatctgagcccagagcatgaggtaatcctgtcctcaatgatcaaggaatgcgagcagaaggtcgaaaacaaaacagtgcaggagccgcagggctcgatgtcaatcgccgcatccctagtcagtgaggacaccaagaccaaatttctgaataagatgggccagctgaccacctctggcgctatgctggcaaacgtgttccaaaggaaaaagtag

SEQ ID NO: 206156 - DNA, 5471 bp, Artificial Sequence
  derived and/or modified sequence
accaggaagacgcctgcagagccgggctgctggtgcagcagaggctgaggcatcaggtgcagctgcatccggatctcctgccttggagcgtactccttgtctctaagtcgggaggcaggacgtggtcaggccggggctgtggaggtgcgctgtgtcccctgaggcctagaggattcgggctgcggcccgtcggaaccagtcagggaggcgcccacactcctgacaggataagatggcggcgatggcgcctggaggtagtggcagtggtggcggcgtgaatccatttctcagtgattcggatgaggacgatgacgaggtagctgcaacagaggaacggcgggcagtacttcggctgggcgccggaagtggcctagatcctggctctgcgggctcgctgtcgccacaggatcccgtggccttaggaagcagtgcgcggccagggctccctggggaggcgtcggcggctgcagtggccctggggggcaccggggagaccccggcccgattatcaattgatgcgatcgctgctcagctgttgcgcgatcaatacttgctgaccgccctggagctgcataccgagctgttagagagtggccgggagctgcctcggctgcgcgactacttctccaatccaggcaacttcgagaggcaaagtggaaccccgccggggatgggggcgccaggggtccctggagcagccggcgttgggggcgctggaggtcgggaaccgagtacagcgtcgggcgggggacagctcaatcgagctgggagcattagtacccttgattctttagactttgcaagatattcagatgatggtaacagggaaacagatgaaaaagtggcagtcctggagtttgaactacggaaagccaaggagaccattcaggccctccgagccaacctgacaaaggccgcagaacatgaagttcctttacaggaacgaaaaaattacaaatcaagtcctgaaattcaggagccaatcaaacctcttgaaaagagagctctaaacttcttagtcaatgaatttttattgaagaataactataagcttacatcaataaccttttcagatgaaaacgatgatcaggattttgaattatgggatgatgtaggattaaacattccaaaacctccagacttattgcaactctaccgggattttggaaatcatcaagtaactggaaaagatcttgtagatgtggccagtggagtagaagaagatgaattagaggcccttacaccaattataagcaaccttcctccaactcttgaaactccccagcctgcagagaactccatgttagtacagaaattagaagataaaattagtttgttaaatagtgagaaatggtcattgatggagcaaatcagaagacttaaaagtgaaatggacttcctcaaaaatgaacactttgccatcccagcagtttgtgactctgttcagcctcctttggatcagttgccccacaaagactctgaggacagtggacagcatccagatgtaaatagttcagacaagggaaaaaacacagacatccatctttcaatatcagatgaagctgattccactattcctaaagagaattccccaaattcattccccaggagagaaagagaaggaatgccaccttcttctctatcaagtaaaaagacagttcattttgataaacctaataggaaattgtctcctgcattccatcaagcactactctctttttgtcgaatgtcagcagatagtcgtttaggatacgaggtgtctcgtattgcagacagtgaaaaaagcgttatgttaatgctgggacgctgcctgccacacattgttcccaatgtgctattggcaaagagagaggagttgatccccctcatattgtgtacagcatgtctacatcctgagcctaaagagcgagatcagcttctccacatacttttcaatttgatcaagaggccagatgatgagcaaaggcaaatgatactgacaggttgtgtggcatttgcgcgtcatgttggaccaacacgtgtagaagctgaacttttaccacagtgttgggaacagattaatcacaaatacccagaaagacgactgcttgtggcagaatcctgtggagcactggcaccttaccttcctaaagaaatccgtagctccttggttctttcaatgttgcaacaaatgttaatggaagataaggcagatttggtaagagaagctgttatcaaaagccttggtatcattatgggatacattgatgatccagacaaatatcatcagggttttgaattgttgctgtcagccttgggtgatccctcagaaagagtagttagtgctacacatcaagtatttttaccagcttacgctgcgtggactacagaacttggaaatttacagtctcatcttatacttacactactgaacaagattgaaaaacttctcagggaaggagaacatggactggatgaacacaaactccacatgtatctttctgccttgcagtccttgatcccatctctctttgcattagtgctacagaatgcacctttctccagcaaagccaagcttcatggtgaagtgccacagatagaagtgactaggtttcctcggcctatgtcgcctcttcaagatgtgtccactattatcggaagtcgtgagcaattggcagtgctgctgcaactttatgactaccagctagaacaagagggtacaacaggctgggagagtttactgtgggttgtcaatcaattgttgccacaacttatagaaatagttggcaaaattaatgttacttcaactgcctgtgtccatgaattctccagatttttctggcgcctttgccggacatttggcaaaatttttacaaacactaaggtaaaacctcagttccaggagattttaagactatctgaagaaaacattgattcctcagcaggaaatggggtcctcactaaagctacagtccccatttatgcaacaggagtccttacgtgttatattcaggaagaagaccgaaaactgttagttggattcttagaagatgtaatgacgctgctttcattatctcatgctcctcttgatagcctgaaggcttcttttgtggaattgggtgcaaacccagcctaccatgagttactattaactgttttgtggtatggtgttgtccatacttcagcactcgtgaggtgtactgctgctagaatgtttgagctgactcttcgaggcatgagtgaagcgttagttgacaagcgggttgctccggcccttgttaccttgtccagtgatcctgaattctctgtcaggattgccacaattccagcctttggcactattatggaaacagtaattcaaagagagttgctggaaagagtgaaaatgcagttggcttctttcctggaagatcctcagtatcaagaccaacattctttgcatacagagatcataaaaacatttggtagagttggccctaacgcagaacccaggttccgagatgagtttgttataccacatttgcataagttagccttggtgaacaacttacagattgtggattctaaaagactggacattgctacgcatctttttgaagcctacagtgcactttcctgttgtttcatttcagaggatttaatggttaatcactttttacctggtctcagatgtttacggactgacatggaacatctctctccagagcatgaggttattttaagttccatgataaaagaatgtgaacaaaaagttgaaaacaagaccgtccaagagcctcaaggctcaatgtcaattgctgcaagcttagtgagtgaagatacaaagaccaagtttttgaacaaaatgggccagttgacaacatcaggtgccatgttggccaatgtatttcagagaaagaagtagaagcaggaaagaagcccccagtaaacactaagatggacctcaagccgactggttccttgtacttgaagtacttgccttttttgtttcctcagttttatgttcttgcattataattttatcctaacctccaaagatatttgcactgcttttaattactgctgtatatttgttgattttggagttacaactgtggtgatagaaaattgagttgatggtctgtaccaagtcccttgtctatgttcttgtctttcagaataatttttatataaatatatatatagtgaagaagttttttttaatttttggatgggatattcgcaaatatctgtattatacactaagctattacaatggtacttaaaataatgtaaatttgaagtcattgttataaaataataaagtggagattacttaagtatttaaattatgaaagaataatgcagactttttattgtttcttaactgactagaaagagccaccagcattactctgtgccttttggacatcagtttgtgtgttctgtaggaattgtgtgcattccattcacacagtatttctttaggatgctgtgatgatttgaattacaaatcctacagtcaatagctaaagacgaaaccttcatttcagaactctcatgaatattctttaagtgctatttaaacctccccagcacttagatgcatataatggacttacctgaggaaagacagcacataggcatggggagaggtaaccaaggtgaattttacaaactggtgtatagtagatttaaatgctcaaaaataaatgtaactgagaagagttaataattgtgagatttttcccaaattgagatacagaagaaaatatagtttgaatctgaaatttaacacttatttatgtaaaacactttatttaagatattttctaatgattttaattttagagagtaccttttcattctgtgtgttacagagaagtactgaaaagttaaggacacttgggggctacttttttccctctaaactaaaaaagacattggctgaattataactagttagttatcacctcgtcccttaaagtcagtgacctcctgtgtttgatgtatattacatagagtcttaagtcagtgtacagttccactggaatttgacagttgtctctacagtcatgcaactcgaagtagaaaagagtgctggacataggaagggggtgcttggtttgaggggttaatgtgaggcctttttgaaaaatgaatattttgataaaaagaattcttgttttagcacagttgatgcacataagtgattctcatatttgttgtataaactggtttaatacatttggaacatagttggattacattcatttcctgggaaagctagcttaccatacattcaagtttataaaacaatttgccataggcaaagccatttaaaaagttcattctgaaattatttcatttacctacagtgaaataattgtgaactaagtagtctttctgaaaactgttgggttctaggcattcctgagaaattgaaagtggctacctttcatgtcaaaaatgttgatctattataaataaaatgtttttgcatatgtttttga

SEQ ID NO: 206157 - protein, 531 aa, Artificial Sequence
  derived and/or modified sequence
MLENYRNLVFVGIAASKPDLITCLEQGKEPWNVKRHEMVAEPPVVCSYFARDLWPKQGKKNYFQKVILRRYKKCGCENLQLRKYCKSMDECKVHKECYNGLNQCLTTTQNKIFQCDKYVKVFHKFSNSNRHTIRHTGKKSFKCKECEKSFCMLSHLAQHKRIHSGEKPYKCKECGKAYNETSNLSTHKRIHTGKKPYKCEECGKAFNRLSHLTTHKIIHTGKKPYKCEECGKAFNQSANLTTHKRIHTGEKPYKCEECGRAFSQSSTLTAHKIIHAGEKPYKCEECGKAFSQSSTLTTHKIIHTGEKFYKCEECGKAFSQLSHLTTHKRIHSGEKPYKCEECGKAFKQSSTLTTHKRIHAGEKFYKCEVCSKAFSRFSHLTTHKRIHTGEKPYKCEECGKAFNLSSQLTTHKIIHTGEKPYKCEECGKAFNQSSTLSKHKVIHTGEKPYKYEECGKAFNQSSHLTTHKMIHTGEKPYKCEECGKAFNNSSILNRHKMIHTGEKLYKPESCNNACDNIAKISKYKRNCAGEK

SEQ ID NO: 206158 - DNA, 1596 bp, Artificial Sequence
  derived and/or modified sequence
atgctggagaactacagaaacctggtgttcgtgggcatcgccgccagcaagcccgacctgatcacctgcctggagcagggcaaggagccctggaacgtgaagagacacgagatggtggccgagccccccgtggtgtgcagctacttcgccagagacctgtggcccaagcagggcaagaagaactacttccagaaggtgatcctgagaagatacaagaagtgcggctgcgagaacctgcagctgagaaagtactgcaagagcatggacgagtgcaaggtgcacaaggagtgctacaacggcctgaaccagtgcctgaccaccacccagaacaagatcttccagtgcgacaagtacgtgaaggtgttccacaagttcagcaacagcaacagacacaccatcagacacaccggcaagaagagcttcaagtgcaaggagtgcgagaagagcttctgcatgctgagccacctggcccagcacaagagaatccacagcggcgagaagccctacaagtgcaaggagtgcggcaaggcctacaacgagaccagcaacctgagcacccacaagagaatccacaccggcaagaagccctacaagtgcgaggagtgcggcaaggccttcaacagactgagccacctgaccacccacaagatcatccacaccggcaagaagccctacaagtgcgaggagtgcggcaaggccttcaaccagagcgccaacctgaccacccacaagagaatccacaccggcgagaagccctacaagtgcgaggagtgcggcagagccttcagccagagcagcaccctgaccgcccacaagatcatccacgccggcgagaagccctacaagtgcgaggagtgcggcaaggccttcagccagagcagcaccctgaccacccacaagatcatccacaccggcgagaagttctacaagtgcgaggagtgcggcaaggccttcagccagctgagccacctgaccacccacaagagaatccacagcggcgagaagccctacaagtgcgaggagtgcggcaaggccttcaagcagagcagcaccctgaccacccacaagagaatccacgccggcgagaagttctacaagtgcgaggtgtgcagcaaggccttcagcagattcagccacctgaccacccacaagagaatccacaccggcgagaagccctacaagtgcgaggagtgcggcaaggccttcaacctgagcagccagctgaccacccacaagatcatccacaccggcgagaagccctacaagtgcgaggagtgcggcaaggccttcaaccagagcagcaccctgagcaagcacaaggtgatccacaccggcgagaagccctacaagtacgaggagtgcggcaaggccttcaaccagagcagccacctgaccacccacaagatgatccacaccggcgagaagccctacaagtgcgaggagtgcggcaaggccttcaacaacagcagcatcctgaacagacacaagatgatccacaccggcgagaagctgtacaagcccgagagctgcaacaacgcctgcgacaacatcgccaagatcagcaagtacaagagaaactgcgccggcgagaagtag

SEQ ID NO: 206159 - DNA, 1596 bp, Artificial Sequence
  derived and/or modified sequence
atgctcgaaaactatagaaatctggtgttcgtcgggattgcagccagcaaaccagacctgatcacatgtcttgaacaggggaaggaaccctggaatgtgaagagacatgaaatggtcgccgaacctcccgtagtgtgcagttattttgcgagggacctgtggccaaagcaaggcaagaagaactacttccagaaagtcattctcaggcggtataagaagtgcgggtgtgaaaacctgcagctgcgaaaatactgtaagtcaatggacgagtgcaaagtgcacaaggagtgttataatggcctgaatcaatgtctcacgaccactcagaacaaaatctttcagtgtgacaagtatgtgaaggtatttcacaaattttcaaattctaacagacacaccattagacatactgggaagaaatcatttaagtgcaaagagtgcgagaaatcattttgtatgctcagccacctggcccagcataagcgaatccactcaggtgagaaaccatataagtgtaaagaatgtgggaaggcctacaacgagacaagtaacctgagcacccataaacgcatccatacaggaaagaagccctacaaatgcgaggagtgtggcaaagcttttaataggttatcacacctcacaactcacaagataatccatacagggaaaaagccctacaagtgtgaggagtgtggtaaagcctttaaccagtcggcaaatctcactacacataaaaggattcacaccggtgagaagccttataaatgtgaggagtgcggcagagccttcagccagagtagtacccttaccgctcacaagatcatccatgctggagagaagccttataaatgcgaggagtgtgggaaggctttctcccaatctagtacattgaccacccataagattatacacacaggggaaaaattctacaaatgcgaagagtgtggaaaagctttttcacaactgtcccatctaaccacacataaaaggattcacagtggggagaaaccatacaagtgtgaggagtgtggcaaggctttcaaacagagttcaaccttgaccactcataagaggatccatgccggcgagaaattttacaaatgcgaggtgtgctccaaagcctttagccgattcagtcatctgacaacacacaagcggattcacacaggggagaagccgtacaagtgcgaagagtgcggcaaagcttttaacctctcctcccagctgaccacccacaaaattattcacaccggtgagaagccttataaatgcgaagagtgcggaaaagcctttaatcagtcctcgaccttgtctaaacataaggtcattcacacaggggagaaaccttacaagtatgaagaatgtgggaaagcctttaatcaatcaagccacctcacaacacataagatgatccacactggggaaaagccgtataaatgtgaggagtgcggcaaagcttttaacaattcctctatactgaaccgccacaagatgatccataccggggaaaaactctataaacctgagtcctgcaataacgcctgcgacaatatagctaagatttccaaatataagaggaactgtgcgggtgaaaagtag

SEQ ID NO: 206160 - DNA, 1596 bp, Artificial Sequence
  derived and/or modified sequence
atgctggagaactacagaaacctggtgtttgtgggcattgctgccagcaagccagacctgatcacctgcctggagcagggcaaggagccctggaatgtgaagagacatgagatggtggccgagccccctgtggtgtgcagctactttgcccgggacctgtggcccaagcagggcaagaagaactacttccagaaggtgatcctgcggcgctacaagaagtgtggctgtgagaacctgcagctgaggaagtactgcaagtccatggatgagtgcaaggtgcacaaggagtgctacaacggcctgaaccagtgcctgaccaccacccagaacaagatcttccagtgtgacaagtatgtgaaggtgttccacaagttcagcaacagcaacagacacaccatccgccacacaggcaagaagagcttcaagtgcaaggaatgtgagaagagcttctgcatgctgagccacctggcccagcacaagaggatccacagcggggagaagccctacaagtgcaaggaatgtgggaaggcctacaatgagaccagcaacctgagcacccacaagaggatccacacaggcaagaagccctacaagtgtgaagaatgtgggaaggccttcaaccggctgagccacctgaccacccacaagatcatccacacaggcaagaagccctacaagtgtgaagaatgtgggaaggccttcaaccagagcgccaacctgaccacccacaagaggatccacactggagagaagccctacaagtgtgaagaatgtggccgggccttcagccagagcagcaccctgacagcccacaagatcatccacgccggggagaagccctacaagtgtgaagaatgtgggaaggccttcagccagagcagcaccctgaccacccacaagatcatccacactggagagaagttctacaagtgtgaagaatgtgggaaggccttcagccagctgagccacctgaccacccacaagaggatccacagcggggagaagccctacaagtgtgaagaatgtgggaaggccttcaagcagagcagcaccctgaccacccacaagagaattcatgctggggagaagttctacaagtgtgaggtgtgcagcaaggccttcagccgcttcagccacctgaccacccacaagaggatccacactggagagaagccctacaagtgtgaagaatgtgggaaggccttcaacctgagcagccagctgaccacccacaagatcatccacactggagagaagccctacaagtgtgaagaatgtgggaaggccttcaaccagagcagcaccctgagcaagcacaaggtgatccacactggagagaagccctacaagtatgaagaatgtgggaaggccttcaaccagagcagccacctgaccacccacaagatgatccacactggagagaagccctacaagtgtgaagaatgtgggaaggccttcaacaacagcagcatcctgaacagacacaagatgatccacactggagagaagctgtacaagccagagagctgcaacaatgcctgtgacaacatcgccaagatcagcaagtacaagaggaactgtgccggggagaagtag

SEQ ID NO: 206161 - DNA, 1596 bp, Artificial Sequence
  derived and/or modified sequence
atgctggagaactaccggaacctggtgttcgtgggcatcgccgccagtaaacctgatttaattacgtgcctggagcagggaaaagagccatggaacgtgaagagacatgagatggtggctgaacctcccgtcgtgtgctcttacttcgctagagatctgtggcctaagcaagggaagaaaaactatttccagaaggtgatcctcagaaggtataaaaaatgtggatgtgagaacctacagctgaggaaatactgcaaatcaatggacgagtgcaaggttcacaaggagtgctataatggtctgaaccagtgcctgacaaccacccagaataagatctttcagtgcgacaagtacgtgaaggtgtttcataagttctctaattctaatcgtcatacaatcaggcacactggcaagaaaagttttaagtgcaaagagtgcgagaaatcgttctgcatgctgagccatttggcacagcacaaaaggattcattcaggagaaaagccatataaatgcaaggaatgtgggaaagcatataatgaaacctcgaaccttagtacccacaaaaggattcacactggcaagaaaccctacaagtgcgaagagtgtggaaaggccttcaatcgtctctctcacctaacaacgcacaaaatcattcacactggcaaaaaaccctacaaatgcgaggagtgcgggaaagccttcaaccagagcgctaacctcactactcacaagaggattcacaccggggaaaagccgtacaaatgcgaagaatgtggccgcgcattctcccaatcaagtacactaaccgcccataagatcatccacgcaggtgaaaaaccctataaatgtgaggaatgcgggaaagcattcagccaatcttccacccttacaactcataagatcattcatactggagagaagttttacaagtgcgaagagtgcggtaaggccttcagccaactgtctcatctgaccacccataaacgtatacactccggggagaaaccatacaagtgcgaggagtgtggcaaggcctttaagcagagtagcaccctgaccacccacaaacggattcatgctggcgaaaagttctacaaatgcgaggtgtgttccaaagcattttcccgctttagtcacctgactacccataagcggatacacacgggggagaagccctacaagtgcgaggaatgtggcaaggcctttaacctgtcatcccagctgaccacacataaaattatacatacaggagaaaagccttataagtgcgaagaatgcggaaaggccttcaaccaatcatctaccttgagtaagcataaggtgattcataccggcgaaaagccctacaagtacgaagagtgcggtaaagccttcaaccagagctcccatctgactacacataaaatgattcataccggggagaagccttacaaatgtgaagagtgtggaaaagcattcaataattctagcattctaaatcgtcacaagatgatccacactggcgaaaaactgtacaagcccgaaagctgcaacaatgcttgcgacaacattgctaaaataagtaagtacaaacggaattgcgccggcgaaaaatag

SEQ ID NO: 206162 - DNA, 1596 bp, Artificial Sequence
  derived and/or modified sequence
atgctggagaattaccgcaatctggtgttcgttgggattgccgcttcaaaacctgacctgataacatgtttagagcagggcaaagagccatggaacgtgaagaggcatgaaatggtggctgagcccccagtagtgtgctcttacttcgcccgagacctgtggccgaagcaaggtaaaaagaattactttcaaaaagtgatactacgaagatataagaagtgcggttgcgaaaatctgcaactccgcaagtattgtaaatcaatggacgagtgcaaggtgcacaaggaatgctacaacggattaaatcaatgccttacaacaacacagaataaaattttccagtgcgacaagtacgtcaaggtgttccacaagttttccaacagcaaccggcacaccattcgccatactgggaagaagtctttcaaatgtaaggagtgtgagaagagtttctgtatgttgtcccatctggcccagcacaaacgcatccatagcggtgagaaaccatacaagtgcaaggaatgtggcaaggcatataatgagacctctaacctaagtacccataagcggatacatacgggcaaaaagccgtataaatgcgaggaatgcggtaaagccttcaatcgcttgtcccacctaactacgcacaaaattatccacacagggaagaaaccatataagtgcgaggaatgtgggaaggcttttaaccagtctgccaacttgaccacccacaagcgaattcacaccggagagaaaccctataagtgtgaggaatgtggtcgtgcatttagtcagagctcaacactgaccgcccacaagatcatccatgccggagagaaaccatacaaatgtgaagaatgcggcaaggcattctctcagagttcgactctgaccacgcacaagatcattcataccggagagaaattctataagtgcgaagagtgtggaaaggccttttcccagctgagccatctgacaacccataaacgcattcactctggcgagaaaccttacaagtgtgaggaatgcggaaaggccttcaagcagagttccaccctcaccacgcacaaaaggattcacgcaggggaaaagttttataaatgcgaagtgtgttctaaggcattctcccgcttcagtcacttaacaacccacaaaaggatacatacaggggagaaaccctataagtgcgaggagtgtggcaaggcgtttaacctgtccagccagcttacaacccacaagatcatccacaccggcgagaagccatacaaatgtgaagaatgcgggaaagccttcaaccagagcagtactctgtcgaagcacaaggtcattcacaccggcgagaaaccatacaagtacgaggaatgtggaaaagcctttaaccagagctctcaccttaccactcacaaaatgattcataccggcgaaaagccctataagtgcgaggaatgcggaaaggccttcaataattcttcaatcctgaataggcataagatgattcacacgggtgagaaactgtacaagccagagagctgcaacaacgcgtgtgacaacattgccaaaatttcaaaatataagcggaactgcgccggtgaaaaatag

SEQ ID NO: 206163 - DNA, 1503 bp, Artificial Sequence
  derived and/or modified sequence
ctgttcctgttcctggccgtggtgtgcagctacttcgcccaggacttctggcccaagcagggcatcaagaactgcttccagaaggtgatcctgaagagatacaagaagtgcggccacgagaacctgcagctgggcaagtactgcaagagcatggacgagtgcaaggtgcacgaggagtgctacaacggcctgaaccagtgcctgagaaccacccagagcaagatcctgcagtgcgacaagtacgtgaaggtgttccacaagttcagcaacagcaacagatacaagatcagacacaccggcaagaagcccttcaagtgcaaggagtgcgagaagagcttctgcatgctgagccacctggcccagcacaagagaatccacaccagagagaagccctacaagtgcaaggagtgcggcaaggcctacaacgaggccagcaacctgagcacccacaagagaatccacaccggcaagaagccctacaagtgcgagcagtgcggcaaggccttcaacagactgagccacctgaccacccacaagatcatccacaccggcaagaagccctacatctgcgaggactgcggcaaggccttcaaccagagcgccaacctgaccacccacaagagaatccacaccggcgagaagccctacaagtgcgaggagagcggcaaggccttcagccagagcagcaccctgaccacccacaagatcatccacgccggcgagaagccctacaagtacgaggagtgcggcaagagcttcaaccagagcagcaccctgaccaccagaaagatcatccacaccggcgagaagttctgcaagtgcgaggagtggggcaaggccttcagcagactgagccacctgaccacccacaagagaatccacagcggcgagaagccctacaagtgcgaggagtgcggcaaggccttcaagcagagcagcaccctgaccacccacaagagaatccacagcggcgagaagttctacaagtgcgaggtgtgcagcaaggccttcagcagattcagccacctgaccacccacaagagaatccacagcggcgagaagccctacaagtgcgaggagtgcggcaaggccttcaacctgagcagccacctgaccacccacaagatcatccacaccggcgagaagccctacaagtgcgaggagtgcggcaaggccttcaacctgagcagccacctgaccacccacaagatcatccacaccggcgagaagccctacaagtgcgaggagtgcggcaaggccttcaaccagagcagcaccctgagcaagcacaaggtgatccacaccggcgagaagccctacaagtgcggcgagtgcggcaaggccttcaaccagagcagccacctgaccacccacaagatcatccacaccggcgagaagccctacaagtgcgaggagtgcggcaaggccttcaacaacagcagcatcctgaacagacacaagatgatccacaccggcgagaagttctacaagcccgagagctag

SEQ ID NO: 206164 - DNA, 1503 bp, Artificial Sequence
  derived and/or modified sequence
ttgttcttgtttttggccgtagtatgttcctactttgcgcaggatttctggcctaagcagggcatcaaaaactgtttccagaaggtcatcctgaaacgatataagaagtgcgggcacgaaaaccttcagctgggcaagtactgtaaatccatggacgagtgtaaggtgcacgaggaatgttacaacgggctgaatcaatgccttaggaccacacagtctaaaattctgcagtgcgataaatacgtcaaagtgttccataaattctcgaacagtaaccggtataagatccgacatactggaaagaagccttttaagtgcaaggaatgcgaaaaaagtttttgcatgctttctcatctggcacagcataagagaattcataccagagaaaaaccttataaatgtaaggagtgcgggaaggcttacaacgaggccagtaatctctcgacccataaacggatacacacaggtaagaaaccatacaagtgcgaacagtgtgggaaagcattcaacagattaagccacctcaccacccacaagatcattcataccggcaagaagccttacatctgcgaggactgcgggaaagccttcaatcaaagtgctaatctcacaactcacaagcggatacacacgggcgagaaaccatacaaatgtgaggagagcggaaaagccttttctcagagctctacactcacaacgcataagatcatccatgctggagagaagccatataagtatgaggagtgtggaaagtcttttaaccaatctagcacgctaaccaccagaaagatcatccataccggtgaaaaattctgtaagtgcgaggagtggggaaaggccttctctagattatctcatctgacaacacacaaaagaatccattccggcgagaaaccctacaaatgtgaagaatgcggaaaggccttcaagcagtcaagcacactgaccactcataagcgcatccatagcggcgaaaagttttacaaatgtgaggtgtgcagcaaggcctttagccggttttcccatttgaccacccacaagcgcatccatagcggagaaaagccctataagtgtgaagagtgcgggaaggccttcaatctgagcagccatctgacaactcacaagataattcataccggagaaaagccctacaagtgtgaggaatgtgggaaagccttcaacctgtctagtcacctcaccactcataaaatcattcacacgggcgaaaaaccttacaaatgtgaggaatgtggaaaggcatttaatcagtcctctaccctgtcaaaacacaaggtgatccatactggcgagaagccctataaatgcggcgaatgcggaaaagccttcaaccagtcatcccatctgactacacataagatcattcacacaggcgagaagccctacaaatgtgaggagtgtggcaaagccttcaataatagctctattcttaaccggcataaaatgatacacaccggcgaaaagttttacaaacccgaaagctag

SEQ ID NO: 206165 - DNA, 1503 bp, Artificial Sequence
  derived and/or modified sequence
ctcttcctgttcctggccgtggtgtgcagctactttgcccaggacttctggcccaagcagggcatcaagaactgcttccagaaggtgatcctgaagcgctacaagaagtgtggccacgagaacctgcagctgggcaagtactgcaagtccatggatgagtgcaaggtgcatgaggagtgctacaacggcctgaaccagtgcctgcggaccacccagagcaagatcctgcagtgtgacaagtatgtgaaggtgttccacaagttcagcaacagcaaccgctacaagatccgccacacaggcaagaagcccttcaagtgcaaggaatgtgagaagagcttctgcatgctgagccacctggcccagcacaagaggatccacacccgggagaagccctacaagtgcaaggaatgtgggaaggcctacaatgaggccagcaacctgagcacccacaagaggatccacacaggcaagaagccctacaagtgtgagcagtgtgggaaggccttcaaccggctgagccacctgaccacccacaagatcatccacacaggcaagaagccctacatctgtgaggactgtgggaaggccttcaaccagagcgccaacctgaccacccacaagaggatccacactggagagaagccctacaagtgtgaggagagcggcaaggccttcagccagagcagcaccctgaccacccacaagatcatccatgctggggagaagccctacaagtatgaggagtgtgggaagagcttcaaccagagcagcaccctgaccaccaggaagatcatccacactggagagaagttctgcaagtgtgaggagtggggcaaggccttcagccggctgagccacctgaccacccacaagaggatccacagcggggagaagccctacaagtgtgaggagtgtgggaaggccttcaagcagagcagcaccctgaccacccacaagaggatccacagcggggagaagttctacaagtgtgaggtgtgcagcaaggccttcagccgcttcagccacctgaccacccacaagaggatccacagcggggagaagccctacaagtgtgaggagtgtgggaaggccttcaacctgagcagccacctgaccacccacaagatcatccacactggagagaagccctacaagtgtgaggagtgtgggaaggccttcaacctgagcagccacctgaccacccacaagatcatccacactggagagaagccctacaagtgtgaggagtgtgggaaggccttcaaccagagcagcaccctgagcaagcacaaggtgatccacactggagagaagccctacaagtgtggggagtgtgggaaggccttcaaccagagcagccacctgaccacccacaagatcatccacactggagagaagccctacaagtgtgaggagtgtgggaaggccttcaacaacagcagcatcctgaacagacacaagatgatccacactggagagaagttctacaagccagagagctag

SEQ ID NO: 206166 - DNA, 1503 bp, Artificial Sequence
  derived and/or modified sequence
ctgttcctgttcctggccgtggtgtgcagctacttcgcccaggacttttggcctaagcaggggatcaaaaactgttttcagaaggtgatcttgaaaaggtataaaaagtgtggacatgagaatttacagctgggcaagtactgtaagagtatggacgagtgtaaagtgcatgaagagtgttataacggcctcaaccagtgtctaagaacgacacagtcaaagatcctgcagtgtgacaaatatgttaaggtattccataaattcagcaattccaaccgatacaaaatcagacacaccggaaagaagcctttcaagtgtaaggaatgcgagaaaagcttttgtatgctgtcccacctcgcccaacacaagcgcattcacacccgagagaaaccctacaaatgtaaggagtgcgggaaagcctacaatgaggcatcaaatctgagtacacacaaacgaattcatacaggtaagaagccatataaatgtgagcagtgtggaaaggctttcaatagactttctcacctgaccacccacaaaatcatacacacggggaagaaaccgtatatctgcgaggactgcggcaaagcgtttaaccaatccgctaacctcaccacacataagcgcatccacaccggcgaaaagccatataaatgcgaggagagcggcaaagccttttctcagagcagcacactgacgacgcacaaaatcatccatgcaggcgagaagccttataaatatgaggagtgcggaaagagcttcaaccagagcagcactctcaccactaggaagattattcacacaggagagaagttctgcaaatgcgaggagtgggggaaggctttcagcagattatcccaccttacaacccacaagcgcatacacagcggcgagaagccctataaatgcgaggagtgtggaaaggcgttcaagcaatcttccacattaacaacgcataagcgcattcattctggtgaaaaattctacaaatgcgaagtgtgttccaaggctttctccaggttctctcatctcaccacacacaagagaatccatagcggtgaaaaaccttataaatgcgaagaatgcggcaaagcctttaatctctcttcacatctgaccacgcataagatcatacatactggcgaaaagccttataagtgcgaggagtgcggtaaggcctttaacctttcttctcacctgactacccacaagatcatacacacgggggaaaaaccctataagtgtgaggaatgcgggaaagcttttaaccaatcctccaccctttcaaaacacaaggtgatccacaccggagaaaaaccctacaaatgtggggaatgtggcaaagcgtttaatcagagcagccatctgacaactcataaaattattcataccggtgagaagccttataaatgtgaagagtgcgggaaggccttcaacaattcttccattctcaatcgtcataagatgatacacaccggagaaaagttttataagcccgagagttag

SEQ ID NO: 206167 - DNA, 1503 bp, Artificial Sequence
  derived and/or modified sequence
ctattcctattcctcgctgtggtgtgctcgtactttgctcaagatttctggcccaagcagggaatcaaaaactgcttccagaaggtgatcctcaaacgctataaaaaatgcgggcatgaaaatctgcagctcgggaaatactgtaagtcaatggacgagtgtaaagtacatgaagagtgctataatgggctgaaccaatgcctcagaacaactcaaagtaagatactccaatgtgacaaatatgtaaaggttttccacaaattctccaactcgaatagatacaaaattcgacataccgggaaaaaacctttcaagtgcaaagagtgcgagaaatcattttgtatgctgagtcatcttgcccaacataagaggatccacacacgcgagaaaccatataagtgcaaagagtgcggcaaggcctacaacgaagccagcaatctctcgactcataagagaatccacacgggtaagaaaccctacaagtgcgagcaatgtggtaaagccttcaacagactgtcgcacctgaccactcacaagatcatccataccgggaaaaagccctacatctgtgaagactgcggcaaagccttcaaccagagcgccaacctgacaacccataagcgtatacatactggggaaaagccctataagtgcgaggagtcgggcaaggctttcagccaatcatcaacattaaccactcacaagatcatccacgccggtgaaaagccatacaagtatgaggaatgtggcaagtccttcaaccagtcaagtactctgactacaaggaagataatacacactggcgagaaattctgtaaatgcgaagagtgggggaaagcctttagccgcttgagccacctgaccacacataagagaatccatagtggtgagaaaccctataagtgtgaggaatgtgggaaggctttcaagcagagcagcaccctgacaacgcacaagagaattcactccggtgagaaattttataaatgcgaggtctgtagtaaggctttcagccggttctcacatttgaccacccacaagcgtattcacagcggagaaaaaccttataagtgtgaggagtgcggtaaagcctttaatctgtcgagccacctaactacgcataagatcatacacaccggtgagaaaccctacaaatgcgaggagtgtggcaaagcctttaatttgtcctctcatttgactacacacaaaatcattcacacaggagagaagccttataagtgcgaagaatgtggcaaagcattcaatcagagcagtacattaagtaagcacaaggtgatccataccggcgagaagccatacaaatgcggcgagtgcggcaaggccttcaaccagtcgtctcatttgaccacccataaaatcatccacaccggcgaaaagccctataaatgtgaggagtgcgggaaggcctttaataattccagtattctgaacagacacaagatgatacacacaggggaaaagttctataagccggaaagttag

SEQ ID NO: 206168 - DNA, 1500 bp, Artificial Sequence
  derived and/or modified sequence
ttatttttatttcttgcagttgtatgttcttattttgcccaagacttttggccaaagcagggcataaaaaattgtttccaaaaagtgatactgaaaagatataaaaaatgtggacatgaaaatttacagttaggaaaatactgtaaaagcatggatgagtgtaaggtgcacgaagaatgttacaatggacttaaccagtgtttgagaactacccagagcaaaatattacaatgtgataaatatgtgaaagtctttcataaattttcaaattcaaacagatataagataagacatactggaaagaaacctttcaaatgtaaagaatgtgaaaagtcattttgcatgctttcacacttagctcaacataaaagaattcatactagagagaaaccctacaaatgtaaagaatgtgggaaagcctataatgaggcctcaaacctttctacacataagagaattcatactggaaagaaaccctacaaatgcgaacagtgtggaaaagcctttaaccggctctcacaccttactacacataagataattcatactggaaagaaaccctacatatgtgaggactgtggcaaagcttttaaccaatctgcaaaccttactacacataagagaattcatactggagagaaaccctacaaatgtgaagaaagtggcaaagcttttagccagtcctcaacccttactacacataagataattcatgctggagagaaaccctacaaatatgaagaatgtggcaaatcttttaaccaatcctcaacccttactacacgtaagataattcatactggagagaaattctgcaaatgtgaagaatggggcaaggcctttagccggttatcccaccttactacacataagagaattcattctggagagaaaccctacaaatgtgaagaatgtggcaaagcttttaaacaatcctcaacccttactacacataagaggattcattctggagagaaattctacaaatgtgaagtatgtagcaaagcctttagccggttctcacaccttactacacataagagaattcattctggagagaagccctacaaatgtgaagaatgtggcaaagcttttaacctatcttcacaccttactacacataagataattcatactggagagaaaccctacaaatgtgaagaatgtggcaaagcttttaacctatcttcacaccttactacacataagataattcatactggagagaaaccctacaaatgtgaagaatgtggcaaagcttttaaccagtcctcaactctttctaaacataaggtaattcatactggagagaaaccctacaaatgtggagaatgtggcaaagcctttaaccagtcctcacaccttactacacataagataattcatactggagagaaaccctacaagtgtgaagaatgtggcaaagcctttaacaactcctctattcttaacagacataagatgattcatactggagagaaattctacaaacctgaaagt

SEQ ID NO: 206169 - protein, 1081 aa, Artificial Sequence
  derived and/or modified sequence
MPRRKQQAPRRAAAYVSEELKAAALVDEGLDPEEHTADGEPSAKYMCPEKELARACPSYQNSPAAEFSCHEMDSESHISETSDRMADFESGSIKNEEETKEVTVPLEDTTVSDSLEQMKAVYNNFLSNSYWSNLNLNLHQPSSEKNNGSSSSSSSSSSSCGSGSFDWHQSAMAKTLQQVSQSRMLPEPSLFSTVQLYRQSSKLYGSIFTGASKFRCKDCSAAYDTLVELTVHMNETGHYRDDNHETDNNNPKRWSKPRKRSLLEMEGKEDAQKVLKCMYCGHSFESLQDLSVHMIKTKHYQKVPLKEPVTPVAAKIIPATRKKASLELELPSSPDSTGGTPKATISDTNDALQKNSNPYITPNNRYGHQNGASYAWHFEARKSQILKCMECGSSHDTLQELTAHMMVTGHFIKVTNSAMKKGKPIVETPVTPTITTLLDEKVQSVPLAATTFTSPSNTPASISPKLNVEVKKEVDKEKAVTDEKPKQKDKPGEEEEKCDISSKYHYLTENDLEESPKGGLDILKSLENTVTSAINKAQNGTPSWGGYPSIHAAYQLPNMMKLSLGSSGKSTPLKPMFGNSEIVSPTKNQTLVSPPSSQTSPMPKTNFHAMEELVKKVTEKVAKVEEKMKEPDGKLSPPKRATPSPCSSEVGEPIKMEASSDGGFRSQENSPSPPRDGCKDGSPLAEPVENGKELVKPLASSLSGSTAIITDHPPEQPFVNPLSALQSVMNIHLGKAAKPSLPALDPMSMLFKMSNSLAEKAAVATPPPLQSKKADHLDRYFYHVNNDQPIDLTKGKSDKGCSLGSVLLSPTSTAPATSSSTVTTAKTSAVVSFMSNSPLRENALSDISDMLKNLTESHTSKSSTPSSISEKSDIDGATLEEAEESTPAQKRKGRQSNWNPQHLLILQAQFAASLRQTSEGKYIMSDLSPQERMHISRFTGLSMTTISHWLANVKYQLRRTGGTKFLKNLDTGHPVFFCNDCASQIRTPSTYISHLESHLGFRLRDLSKLSTEQINSQIAQTKSPSEKMVTSSPEEDLGTSYQCKLCNRTFASKHAVKLHLSKTHGKSPEDHLLYVSELEKQ

SEQ ID NO: 206170 - DNA, 3246 bp, Artificial Sequence
  derived and/or modified sequence
atgcccagaagaaagcagcaggcccccagaagagccgccgcctacgtgagcgaggagctgaaggccgccgccctggtggacgagggcctggaccccgaggagcacaccgccgacggcgagcccagcgccaagtacatgtgccccgagaaggagctggccagagcctgccccagctaccagaacagccccgccgccgagttcagctgccacgagatggacagcgagagccacatcagcgagaccagcgacagaatggccgacttcgagagcggcagcatcaagaacgaggaggagaccaaggaggtgaccgtgcccctggaggacaccaccgtgagcgacagcctggagcagatgaaggccgtgtacaacaacttcctgagcaacagctactggagcaacctgaacctgaacctgcaccagcccagcagcgagaagaacaacggcagcagcagcagcagcagcagcagcagcagcagctgcggcagcggcagcttcgactggcaccagagcgccatggccaagaccctgcagcaggtgagccagagcagaatgctgcccgagcccagcctgttcagcaccgtgcagctgtacagacagagcagcaagctgtacggcagcatcttcaccggcgccagcaagttcagatgcaaggactgcagcgccgcctacgacaccctggtggagctgaccgtgcacatgaacgagaccggccactacagagacgacaaccacgagaccgacaacaacaaccccaagagatggagcaagcccagaaagagaagcctgctggagatggagggcaaggaggacgcccagaaggtgctgaagtgcatgtactgcggccacagcttcgagagcctgcaggacctgagcgtgcacatgatcaagaccaagcactaccagaaggtgcccctgaaggagcccgtgacccccgtggccgccaagatcatccccgccaccagaaagaaggccagcctggagctggagctgcccagcagccccgacagcaccggcggcacccccaaggccaccatcagcgacaccaacgacgccctgcagaagaacagcaacccctacatcacccccaacaacagatacggccaccagaacggcgccagctacgcctggcacttcgaggccagaaagagccagatcctgaagtgcatggagtgcggcagcagccacgacaccctgcaggagctgaccgcccacatgatggtgaccggccacttcatcaaggtgaccaacagcgccatgaagaagggcaagcccatcgtggagacccccgtgacccccaccatcaccaccctgctggacgagaaggtgcagagcgtgcccctggccgccaccaccttcaccagccccagcaacacccccgccagcatcagccccaagctgaacgtggaggtgaagaaggaggtggacaaggagaaggccgtgaccgacgagaagcccaagcagaaggacaagcccggcgaggaggaggagaagtgcgacatcagcagcaagtaccactacctgaccgagaacgacctggaggagagccccaagggcggcctggacatcctgaagagcctggagaacaccgtgaccagcgccatcaacaaggcccagaacggcacccccagctggggcggctaccccagcatccacgccgcctaccagctgcccaacatgatgaagctgagcctgggcagcagcggcaagagcacccccctgaagcccatgttcggcaacagcgagatcgtgagccccaccaagaaccagaccctggtgagcccccccagcagccagaccagccccatgcccaagaccaacttccacgccatggaggagctggtgaagaaggtgaccgagaaggtggccaaggtggaggagaagatgaaggagcccgacggcaagctgagcccccccaagagagccacccccagcccctgcagcagcgaggtgggcgagcccatcaagatggaggccagcagcgacggcggcttcagaagccaggagaacagccccagcccccccagagacggctgcaaggacggcagccccctggccgagcccgtggagaacggcaaggagctggtgaagcccctggccagcagcctgagcggcagcaccgccatcatcaccgaccacccccccgagcagcccttcgtgaaccccctgagcgccctgcagagcgtgatgaacatccacctgggcaaggccgccaagcccagcctgcccgccctggaccccatgagcatgctgttcaagatgagcaacagcctggccgagaaggccgccgtggccacccccccccccctgcagagcaagaaggccgaccacctggacagatacttctaccacgtgaacaacgaccagcccatcgacctgaccaagggcaagagcgacaagggctgcagcctgggcagcgtgctgctgagccccaccagcaccgcccccgccaccagcagcagcaccgtgaccaccgccaagaccagcgccgtggtgagcttcatgagcaacagccccctgagagagaacgccctgagcgacatcagcgacatgctgaagaacctgaccgagagccacaccagcaagagcagcacccccagcagcatcagcgagaagagcgacatcgacggcgccaccctggaggaggccgaggagagcacccccgcccagaagagaaagggcagacagagcaactggaacccccagcacctgctgatcctgcaggcccagttcgccgccagcctgagacagaccagcgagggcaagtacatcatgagcgacctgagcccccaggagagaatgcacatcagcagattcaccggcctgagcatgaccaccatcagccactggctggccaacgtgaagtaccagctgagaagaaccggcggcaccaagttcctgaagaacctggacaccggccaccccgtgttcttctgcaacgactgcgccagccagatcagaacccccagcacctacatcagccacctggagagccacctgggcttcagactgagagacctgagcaagctgagcaccgagcagatcaacagccagatcgcccagaccaagagccccagcgagaagatggtgaccagcagccccgaggaggacctgggcaccagctaccagtgcaagctgtgcaacagaaccttcgccagcaagcacgccgtgaagctgcacctgagcaagacccacggcaagagccccgaggaccacctgctgtacgtgagcgagctggagaagcagtag

SEQ ID NO: 206171 - DNA, 3246 bp, Artificial Sequence
  derived and/or modified sequence
atgccccgcagaaaacaacaggcaccacggcgtgcagccgcctacgtcagcgaggagctgaaagccgcggctctggtcgacgagggactggacccagaagaacacaccgcagacggcgagccgtccgcgaagtatatgtgtccagagaaggagctggccagagcatgtccaagttaccagaacagccctgcagcagagtttagctgccatgagatggattccgaaagccacataagcgagacgtcagaccggatggcagacttcgaatcaggatcgattaaaaacgaggaggaaactaaggaggtgactgtccccctggaagataccacagtttccgatagcctcgagcaaatgaaagcagtttacaacaattttctgagtaattcctactggtcgaatttaaatttgaacctgcatcaaccatctagcgaaaaaaataatggcagctccagcagcagctcatcctcatcaagttcctgcggtagcggcagcttcgactggcatcaaagcgccatggctaaaacactgcagcaagtgagccagtcccgaatgctgccagaaccatctctgttctctactgtccagctttacaggcagagttccaaactgtacgggtctattttcacaggtgcaagcaaatttagatgcaaagactgctcagccgcctacgataccctggtggagctgaccgtgcatatgaacgagactggacactacagggacgacaatcatgagaccgataataataatcctaagagatggagcaaacctagaaaaaggagtctgctcgagatggagggcaaggaggatgcacaaaaggtgttaaaatgcatgtactgtggacatagcttcgagagtttacaggatttgtctgttcacatgatcaaaactaagcactatcagaaggtccccctgaaagagcccgttacacccgtggccgccaagattatacctgcaacacgcaaaaaagctagccttgaactggaactgcctagcagccctgactcaaccggagggaccccgaaggcaaccatatctgacactaacgacgccctgcaaaagaattcaaacccctatattacccctaataaccgatacggccatcagaatggggccagttatgcttggcatttcgaagcccgtaagtctcagatccttaaatgcatggaatgcgggtctagccacgacacattgcaagagctaacagcccacatgatggtaacgggccactttatcaaggtcaccaacagcgcaatgaagaagggcaagcccatcgtcgagactcctgtgacacctactatcaccacattgctggatgagaaagtccagtcagttccccttgcagctaccacattcacatccccatcaaacacaccggccagcatttcgcctaagctgaatgttgaggtgaagaaagaggtcgataaggagaaagcagttactgatgaaaaacccaaacaaaaggacaagccgggagaggaagaggagaagtgtgatatttccagtaaatatcactacctgacagaaaatgatttggaagagtctccgaagggcggtctcgatattctgaagtcgctggaaaataccgtcacatccgcaatcaataaggcccaaaacggaacaccttcttggggaggctacccatccatacatgccgcctaccaacttcctaatatgatgaagttgtcccttggtagttccggaaaatccactccactgaagccaatgttcggaaattcagaaatagtgtctccaaccaagaaccagaccctcgtgagtcctccatcctctcagactagtcctatgccaaaaacaaacttccacgcaatggaggagctggtcaaaaaggtgacggagaaggttgcgaaagttgaagagaaaatgaaggaacctgatggaaagttgagcccccccaagcgggccacaccaagtccctgttcttcagaagtgggagaacccatcaagatggaagcctcatctgatgggggatttagaagccaagagaacagcccgtctccacccagagacggctgtaaagatggtagccccctggccgagcccgtggagaacgggaaagaactggtaaaacctctggcgagtagcttgtctgggagcactgccattattacggaccatcccccagaacagccctttgttaatcctctctccgcacttcagtccgttatgaacattcacctgggaaaggccgccaaaccatctctgcccgccttggatcccatgtccatgctgtttaagatgtcgaactcactggccgagaaggccgctgttgccacgccaccaccactgcagtctaaaaaggccgatcatctcgacagatatttttaccacgtcaataatgatcagcctattgatcttaccaagggtaaatctgataagggctgtagcctcggtagcgtgctactttccccaacctctacggcccccgctacttcctcatctaccgttacaactgccaagactagtgccgtcgtgtcatttatgtccaactctcctctcagagagaacgccctttcagacatatctgacatgctgaagaacctgaccgaaagccataccagcaaaagcagcacaccaagtagcatcagtgagaaaagtgacatcgacggcgcaacattagaggaggccgaggagagtactccagcgcagaaaaggaagggcagacagagcaactggaatccgcagcatttgctcatccttcaagcacagtttgctgcctccctccgccagaccagcgaaggcaagtatatcatgtctgacctgagcccacaagaaagaatgcacatcagtaggttcacaggcctgtctatgaccacaatttctcattggctcgcaaatgtgaaataccagctcagaagaactggcggcaccaagtttttgaaaaatcttgatactggacaccccgtgtttttttgtaacgattgcgcttcccaaatccgcacccctagcacatacatttctcacctggaaagccacctgggtttcagattgcgagacctgtcaaaactgagcactgagcagatcaatagccagatcgctcagactaaatcgccaagtgaaaagatggtcacatcctctccagaggaggacctcggtacatcctaccagtgtaagctctgtaacagaaccttcgcttccaagcatgctgtgaagttacacctgtccaagacgcatggtaagagccctgaggaccacctgctgtatgtgtctgaacttgaaaagcagtag

SEQ ID NO: 206172 - DNA, 3246 bp, Artificial Sequence
  derived and/or modified sequence
atgcccaggaggaagcagcaggccccccggcgggctgctgcctacgtgtctgaggagctgaaggctgctgccctggtggatgagggcctggaccctgaggagcacacagcagatggagagcccagcgccaagtacatgtgcccagagaaggagctggcccgggcctgccccagctaccagaacagccctgctgctgagttcagctgccacgagatggacagcgagagccacatcagcgagaccagtgacaggatggctgactttgagagcggcagcatcaagaatgaggaggagaccaaggaggtgacagtgcccctggaggacaccaccgtgtctgacagcctggagcagatgaaggctgtgtacaacaacttcctgagcaacagctactggagcaacctgaacctgaacctgcaccagcccagcagcgagaagaacaacggcagcagcagcagcagcagcagcagcagcagcagctgtggcagcggcagctttgactggcaccagagcgccatggccaagaccctgcagcaggtgtcccagagcaggatgctgcctgagcccagcctcttcagcacagtgcagctgtaccggcagagcagcaagctgtatggcagcatcttcaccggggccagcaagttccgctgcaaggactgcagcgctgcctatgacaccctggtggagctgactgtgcacatgaatgagaccggccactacagagatgacaaccacgagacagacaacaacaaccccaagcgctggagcaagcccaggaagaggagcctgctggagatggagggcaaggaggatgcccagaaggtgctgaagtgcatgtactgcggccacagctttgagagcctgcaggacctgtctgtgcacatgatcaagaccaagcactaccagaaggtgcccctgaaggagcctgtgacccctgtggccgccaagatcatcccagccaccaggaagaaggccagcctggagctggagctgcccagcagcccagacagcactggaggcacccccaaggccaccatcagtgacaccaatgatgccctgcagaagaacagcaacccctacatcacccccaacaacagatatggccaccagaatggagccagctatgcctggcactttgaggccaggaagagccagatcctgaagtgcatggagtgtggcagcagccatgacaccctgcaggagctgacagcccacatgatggtgacaggccacttcatcaaggtgaccaacagcgccatgaagaagggcaagcccatcgtggagacccctgtgacccccaccatcaccaccctgctggatgagaaggtgcagagcgtgcccctggccgccaccaccttcaccagccccagcaacaccccagccagcatcagccccaagctgaatgtggaggtgaagaaggaggtggacaaggagaaggctgtgacagatgagaagcccaagcagaaggacaagccaggagaggaggaggagaagtgtgacatcagcagcaagtaccactacctgacagaaaatgacctggaggagagccccaagggcggcctggacatcctgaagagcctggagaacacagtgaccagcgccatcaacaaggcccagaatggcacccccagctggggcggctaccccagcatccacgccgcctaccagctgcccaacatgatgaagctgagcctgggcagcagcggcaagagcacccccctgaagcccatgtttggaaacagcgagatcgtgagccccaccaagaaccagaccctggtgagcccccccagcagccagaccagccccatgcccaagaccaacttccacgccatggaggagctggtgaagaaggtgacagagaaggtggccaaggtggaggagaagatgaaggagccagatggcaagctgagcccccccaagagggccacccccagcccctgcagcagcgaggtgggggagcccatcaagatggaggccagcagtgatggcggcttccgcagccaggagaacagccccagccccccaagagatggctgcaaggatggcagccccctggccgagcctgtggagaatggcaaggagctggtgaagcccctggccagcagcctgagcggcagcacagccatcatcacagaccaccccccagagcagccctttgtgaaccccctgagcgccctgcagagcgtgatgaacatccacctgggcaaggccgccaagcccagcctgcctgccctggaccccatgtccatgctgttcaagatgagcaacagcctggccgagaaggctgctgtggccaccccaccacccctgcagagcaagaaggctgaccacctggaccgctacttctaccacgtgaacaatgaccagcccatcgacctgaccaagggcaagagtgacaagggctgcagcctgggctctgtgctgctgagccccaccagcacagccccagccaccagcagcagcacagtgaccacagccaagaccagcgctgtggtgtccttcatgagcaacagccccctgagagaaaatgccctgagtgacatcagtgacatgctgaagaacctgacagagagccacaccagcaagagcagcacccccagcagcatcagcgagaagagtgacattgatggagccaccctggaggaggccgaggagagcaccccagcccagaagaggaagggccggcagagcaactggaacccccagcacctgctgatcctgcaggcccagtttgctgccagcctgcggcagaccagcgagggcaagtacatcatgtctgacctgagcccccaggagaggatgcacatcagccgcttcaccggcctgtccatgaccaccatcagccactggctggccaacgtgaagtaccagctgcggaggactggaggcaccaagttcctgaagaacctggacaccggccaccctgtgttcttctgcaatgactgtgccagccagatccgcacccccagcacctacatcagccacctggagagccacctgggcttccggctgcgggacctgagcaagctgagcacagagcagatcaacagccagatcgcccagaccaagagccccagcgagaagatggtgaccagcagccctgaggaggacctgggcaccagctaccagtgcaagctgtgcaacagaacatttgccagcaagcatgctgtgaagctgcacctgagcaagacccacggcaagagccctgaggaccacctgctgtatgtgtctgagctggagaagcagtag

SEQ ID NO: 206173 - DNA, 3246 bp, Artificial Sequence
  derived and/or modified sequence
atgccccggcggaagcagcaggccccccggcgggccgccgcctacgtatctgaggaacttaaagccgctgccctggtggatgaaggtctagacccagaggagcacacggcagacggagagcctagtgctaaatacatgtgtcctgagaaggaactcgcccgggcctgtccatcataccaaaactctccagccgcagaattctcctgtcacgagatggattcagagtcacacatcagtgagactagcgataggatggcggattttgagtctggctcaattaaaaacgaggaggaaaccaaagaagtaaccgttcctctcgaggacaccaccgtctcagatagcctggaacagatgaaggcggtatataataacttcctatcaaattcatactggtccaaccttaatctgaacttgcaccagccctccagtgaaaaaaataatggaagctcctcttcttcatcaagctcaagcagcagttgcggctccgggagcttcgactggcaccagtcagccatggcaaagaccctgcagcaagttagccaatccaggatgttgcccgagccctcactgtttagcaccgtgcagctttaccggcagtcaagcaagctgtatgggtcgatatttactggtgccagtaaattcaggtgtaaagactgctctgcagcttacgataccctggtcgaattgactgtgcatatgaatgaaactgggcattatagggatgataaccacgagaccgataataataaccctaagcgctggagcaagccgaggaagaggtcactccttgagatggagggcaaggaggatgcccaaaaagttctaaagtgcatgtactgcggtcactcctttgaatccttgcaagacttgagtgttcacatgattaagaccaagcactaccagaaagtccccttgaaagaaccggtcacacctgtcgctgctaagatcatccctgccacacggaagaaggcctcactggaactggagctcccatcatctccagactcaacaggcggaacacctaaagctacgataagcgatactaacgatgccctgcagaagaactccaacccttacatcactcccaataaccggtatggccaccagaatggggcctcttatgcatggcactttgaggcccggaaatcacaaatcctgaagtgtatggagtgtggctctagccacgacaccctgcaagaattgacagcccacatgatggtcacaggccactttattaaagtcactaattcggctatgaagaaagggaaaccaatcgtcgaaactcccgtgacacccacaattaccaccttacttgatgaaaaagtgcagtcagtgccactggcagccacaacatttacttcccccagcaacaccccagccagtatcagtccaaagttgaacgtcgaagtgaagaaggaagtcgacaaggaaaaagcagtcacagacgaaaaacctaaacagaaggacaagcccggcgaggaagaagaaaagtgcgatatcagtagtaagtatcattacctgactgagaatgacctggaggaatctcccaaaggaggattagatatcctgaaatctctggaaaatacagtcacatctgccatcaataaagcccaaaacggcacaccctcatggggtggctatccctcgatccatgccgcgtatcagctgcctaatatgatgaaactgagcctgggctccagtggcaagtcaacaccgctgaagcctatgtttggcaactcggagattgttagccccaccaagaaccagactctggtctcacccccgagtagtcagacttcccccatgccaaagacaaattttcatgccatggaggagctcgtcaagaaagttactgaaaaagtggccaaggtggaagaaaaaatgaaagagccagacggtaagttgtcgccaccgaaaagagccacacccagtccatgttctagcgaggtgggagagccaatcaagatggaagctagttccgacggaggcttcaggagtcaggaaaactcccctagtccccctcgcgacggctgcaaggacgggtcccctctggcagaacctgtggagaacggcaaggaactggttaagcccctggcttcttctctctccggatcgacagcaatcatcaccgaccatcccccagagcagcctttcgtcaaccctctcagcgccctccagagtgtaatgaatattcatctgggaaaagcggcaaagccttctctacctgcactggatcccatgtccatgctgtttaagatgagcaattctctcgccgaaaaagcagcagttgctacaccccctcccctccagtcaaagaaagcggatcatctcgatagatacttttaccatgtcaataatgatcaacccattgacttaaccaaaggcaagtccgacaagggatgcagtctcgggagcgtactgctatctccaacaagcacagctccagcaaccagctccagtaccgttactactgcaaagacaagtgctgtggtgtcatttatgtcaaatagcccgttgcgggagaatgccttgtccgacatctctgacatgctgaagaatctaaccgagtctcacacatccaaaagctctaccccgagcagcattagcgagaaatcggatatagacggggccaccttagaggaggccgaggaatctacaccagctcagaaacggaagggacgccagtcaaactggaaccctcagcatttgctcatccttcaggcacagtttgcagcctctttgcggcagacatcagaggggaagtacattatgtcagatctgagcccccaggaacgcatgcacatcagtaggttcacagggttgtcaatgactactataagtcactggctggctaacgtgaagtatcagcttcgtcgaaccgggggcacaaaattcctgaagaaccttgacaccgggcaccctgtattcttttgcaacgactgtgcttcccagattaggacaccttcaacatacatttcccacttagagtcccatttaggcttccgtctgcgggacctgtcaaagttatccacggagcagattaattcccaaatcgcccagacaaagtccccttctgagaagatggtgactagctccccggaagaggatctgggtactagctatcagtgcaaattgtgcaaccgcaccttcgcttcgaaacatgctgtcaagcttcatctatcaaaaacgcatggaaagagtcccgaagaccacctactatacgtctctgagctagagaagcagtag

SEQ ID NO: 206174 - DNA, 3246 bp, Artificial Sequence
  derived and/or modified sequence
atgccacggaggaagcagcaggcccctcgccgagcggctgcctacgtgagtgaagaactcaaggctgccgcactggtggacgaggggcttgaccctgaagaacacacagccgacggtgaaccatccgcgaaatacatgtgtcccgagaaagagctggcgagagcctgcccctcataccagaattctcccgctgcagagttctcttgccacgaaatggacagcgaatcccacataagtgaaacctccgataggatggcggatttcgagtccgggtctatcaagaatgaggaggaaactaaggaggtgacggttccccttgaggatacaacagtgtcagattccctggaacagatgaaggctgtttataacaactttctgagcaactcatactggagcaacctcaatctaaaccttcaccagccgagtagcgagaaaaacaatggaagctcttcaagttcatcgtcctcttccagctcctgtggatcaggaagcttcgactggcaccaatccgcaatggcaaagactctccagcaagtttcccaatcccgcatgctccctgaacccagtctcttctccaccgttcagctgtaccggcagagctctaagctgtacggctcgatttttactggtgcatccaaatttagatgtaaagactgctcagcggcttacgacacgctggtggaactgaccgtgcacatgaatgaaacaggccactaccgcgacgacaatcacgagacagataacaataacccgaaacggtggtcaaagcccaggaagcgaagcctgttggagatggaggggaaggaggatgcgcagaaggtgttaaagtgtatgtattgcgggcacagtttcgagtccctgcaggatctgagcgtgcacatgattaaaacaaaacattaccagaaggtgccccttaaggaacctgttacacctgtggcagcaaaaatcatccccgcaacaaggaagaaagcatctctggagttagagctcccatcatcaccagattcaactgggggaacccccaaagccaccatttctgacaccaatgatgcattgcagaaaaacagcaatccctatattaccccgaataaccgatatggacaccagaatggtgcctcatatgcatggcattttgaggctaggaaatcccagatcctgaaatgcatggagtgcggctcgtcccatgacacgttacaggagcttaccgcgcatatgatggtgactggccactttatcaaagttacaaacagcgcgatgaagaagggcaaacctatcgtcgagacaccggtcacgccaactattactacactcctcgacgagaaggtgcagtccgtcccactcgccgcaaccacatttacttcaccctctaatactcctgccagtatttctccgaagctaaacgtcgaagtgaaaaaagaagtagataaagaaaaggcagttacggacgagaagccgaagcaaaaggataaacctggggaggaggaggagaaatgcgatatctcatccaagtaccactacctcacagagaacgacctggaggagagccctaaaggagggctggacattcttaaatccctcgagaacaccgtgacgtccgctatcaacaaagctcaaaatgggaccccttcttggggaggctatccttccatacatgctgcttaccagctacccaacatgatgaaattgtcattggggagttctggaaagtccactcctctgaagcccatgttcggtaattccgagatcgtgagccccacgaagaaccagaccctggtgtctccaccctctagccagacttcacctatgcccaagacgaattttcacgcgatggaagaactggtcaagaaagtgacagaaaaggttgccaaggtcgaagaaaagatgaaggaaccggatgggaaattatccccccctaaaagggccacacccagtccctgttccagcgaggttggcgagccaatcaagatggaggcgagttcagacggcggtttccggagtcaggaaaatagtccgagtcccccacgagacgggtgtaaagatggcagccctctcgcagaacccgtggagaatggcaaagagctggtcaaaccccttgcctcttctctcagcggaagtacggcgattattactgaccatccacccgagcagccgttcgtgaatcctcttagtgccctccagtctgttatgaacatccaccttggaaaggcagctaaaccatccctcccagcattggacccaatgtccatgttattcaagatgagcaacagcctggctgagaaggctgctgttgcgaccccccctccattgcagagcaagaaagcagatcacttggacagatacttttatcacgtgaacaacgaccagccaattgacctcactaagggcaagtccgataagggctgttctttgggatctgtcctcctctcgccaacttcgaccgctcccgctaccagctccagcaccgttactactgcaaagaccagcgcagttgtcagcttcatgagtaattctcctcttcgtgagaacgctctcagtgacattagcgacatgctgaagaatctaaccgagtcccatacgtctaagtctagcacaccatcttccatatccgaaaaatctgatatcgacggagctactctagaggaagctgaagaatctacacctgcccagaaaagaaaaggcagacaatctaactggaatccacaacacctgctgattctgcaagcccagttcgccgcaagccttcgccagacatcggaggggaaatacatcatgtcggacttgtctccccaagagaggatgcacattagtagattcaccggactgtccatgaccaccatctcccactggcttgcaaacgtcaaatatcagctgagacgcaccgggggaaccaaattccttaaaaatttggacacaggccaccccgttttcttttgtaacgactgtgcaagccagatcaggaccccctccacatacatttcacacttagagtctcacttgggtttccgcctccgcgatctcagcaagcttagtacggagcagatcaacagtcagatcgcacagacgaagagcccgtctgaaaaaatggttacttcatcacccgaggaggacctggggacttcatatcagtgtaagttgtgtaaccggacctttgcctccaagcatgccgtaaagcttcatttatcgaagacccatggtaaatcgccggaggaccacttgttgtacgttagtgagctggaaaagcagtag

SEQ ID NO: 206175 - DNA, 5176 bp, Artificial Sequence
  derived and/or modified sequence
cttcccattccgccggcagcgcggtcctcctcctcctcctccacctcctcctcctctgcctcctcctcccccccgtgctcctccctccccgagcctccctcgcccgccctccttcttccctccgcacgttcggggttcgcggcggagcgcggcgcgggggggacgcggagagcctgggcgcagcagcatcctgcgggcggccgctctccgggggggaggctgagagcaggcccgcctcgcccccccgcgggcccgccgccccctccctccctgtcctcagcccggcagcggcggcggcggcggcagtggcagtcgccggagaagcatcatgccgaggaggaagcagcaggcgccccggcgcgcagcagcctatgtttccgaagagttaaaggctgctgccctggtggacgaaggtttagacccagaggagcatacggcagatggagagccctcggccaagtacatgtgcccggagaaggagctcgccagggcctgccccagctaccagaactccccggccgccgagttttcctgccatgaaatggacagcgagtcacacatcagtgagaccagtgaccgaatggctgactttgaaagcggctccatcaagaacgaagaggagaccaaggaggtcacggtcccactggaagacacgactgtgtcggatagcctggagcagatgaaggccgtgtacaacaacttcctctccaactcctactggtccaacctcaacctcaacctgcaccagccctcctcggagaagaacaacggcagcagcagcagcagcagtagcagcagcagcagctgtggcagcgggagcttcgactggcaccagagcgccatggctaagacgctgcagcaggtgtcacagagccgcatgctcccggagcccagcctcttcagcaccgtgcagctgtaccggcagagcagcaagctctatggctccatcttcacgggggccagcaagttccgctgtaaggactgcagcgctgcctacgacaccctggtggagttgacggtgcacatgaacgagacggggcattaccgcgacgacaaccatgagaccgataacaacaaccccaagcgctggtccaagcctcgcaaacgctccttgctggaaatggaagggaaggaagacgcccagaaggtgctgaagtgcatgtactgtggccactcctttgagtccctgcaggatttgagtgtccatatgatcaaaacaaaacactaccaaaaagtgcctctgaaggaacccgtcactcctgtcgccgccaaaatcatccctgccactcggaagaaagcttccctggagctggagctccccagctccccagattccacaggtggaacccccaaagccaccatctcagacaccaacgatgcacttcagaagaactccaacccttacatcacgccaaataatcggtacggccaccagaatggggccagctatgcatggcactttgaggcccggaagtcgcagatcctgaagtgcatggagtgtgggagctcgcatgacaccctgcaggagctcactgcccacatgatggtcactggccacttcatcaaggtcaccaactctgctatgaaaaaggggaagcccattgtggagacgcctgtcacacctaccatcacaaccctgctggatgagaaggtccagtccgtgcccctggcagccaccaccttcacgtccccctccaatacacctgccagcatctccccaaaactgaatgtggaggtcaagaaggaagtcgacaaggagaaagcggtcactgacgagaaacctaagcaaaaagacaagcctggcgaagaagaggagaagtgtgacatctcttccaaataccattacttgactgaaaatgacttagaagagagtcccaagggggggcttgatatcctcaaatccttggaaaacacagtgacatccgcaatcaacaaggcccagaacggcactcctagctgggggggctatcccagcatccatgccgcctaccaacttcccaacatgatgaagttgtccctgggctcgtcggggaagagcacgcccctgaaacccatgtttggcaacagtgagattgtctccccgacgaaaaaccagaccctggtctctccacccagcagccagacgtcccccatgcccaagacaaactttcatgccatggaggagctggtgaaaaaggtcactgagaaagttgccaaagtggaggagaagatgaaggagccggatgggaagctttccccgcccaagcgggccactccctccccatgtagcagcgaagtcggggaacccatcaagatggaggcatccagcgatgggggcttccgcagccaggagaacagccccagccccccgcgggatgggtgcaaggatgggagccccctcgctgagccggtggagaatggcaaggagctggtgaagcccctagccagcagtttgagtggcagcacggccatcatcaccgaccacccgcctgaacagccttttgttaaccctttgagcgccctgcagtcagtcatgaacattcacctgggcaaggccgccaagccctccctgcctgccctggaccccatgagcatgcttttcaagatgagcaacagcctggcggagaaggctgctgtggccaccccgccgcccctgcagtccaagaaggcagaccacctcgaccgctatttctaccacgtcaacaacgaccagcccatagacttgacaaaagggaagagtgacaaaggctgctccttgggttcagtgcttctgtcacccacgtccacagccccggcaacctcctcatccacggtgacaacggcaaagacatctgccgtcgtatcattcatgtcaaactcgccgctacgcgagaatgccttgtcagatatatccgatatgctgaagaacttgacagagagccacacgtcaaaatcctccactccttccagcatctccgagaagtctgacattgacggggccactctggaggaggctgaggagtcgacgcccgcccagaagaggaagggccgccagtcaaactggaacccccagcacctcctgatcctccaggcccagtttgccgccagcctccggcagacctcagaagggaagtacatcatgtcagacctgagcccccaggagcggatgcatatctccaggttcaccgggctgtccatgaccaccatcagccactggctggccaacgtgaaataccagcttcgaaggacaggtggaacaaagttcctcaaaaacttggacactggccaccccgtcttcttttgtaacgattgtgcgtcccaaatcaggactccttccacgtacatcagtcacctagagtcacacttaggcttccggctacgggacttatccaaactgtccaccgaacagattaacagtcagatagcacaaaccaagtcaccgtcagaaaaaatggtgacgtcctcccccgaggaagacctggggacttcctatcagtgcaaactttgcaatcggacctttgccagcaagcacgctgttaaacttcaccttagcaaaacacacgggaaatctccggaagaccaccttctgtatgtctctgagttagagaagcagtagcatttgcttttgatagaaaggactgcagtttgctttgagggaaactgtggaaggcaccttcaggccccctctgacttgttgttcttggcacatgttcttattttaactgcagagaatcactctgggctggactgttttgtataactgtacagtgtttaatagaggtgcataatcagctgttgttactggtaaaatatgaaggttaaaatgcagtggtaagtgtttggaactttgtgtaaacgggatttagttgtgagcatcctcccgatgcttcaagctgcatgcattaacagacagtttaattaagcatttataacggaatcaggcacaccttttccacgagactcgagtgtgctggcatttctcaccctttcatctttagccctctgagtactttgaagcacttttgcattaatttggttaaaaaataaaataaaataataataatgtatgaagctctgttttttaaactccttaccagcttagttataatgaataatatgaacctccatttatgcaggtctgcaggggtataacacgccttgaaatttaaaagaatattattttcacattgaaacatagatgtatatattgtatagatttcagactctcttatgaaaaaaaatgtgattgtggttaaatgacctttttcttgcatttatagcaacagtgttttatgcacctgctatgctctgggcataagctgtgcctatgtatagtgtatatttctttttttcttttttttaaggtctatgggttttgttttttacatgcaaacattgtaaattatacagaagataccacagatagcatttataaagtatacagaaacattatctgaaagcaaagtatgatagtttgttttgctatacagtacatctatattgatagaggttcatgtttaaattatacatatttattagcatcatattgtcatttgttttgagcagtctgaataaacgagaccgggaaagacatccctggcaggcatcagaactattttgcacatgatttttaaaggtatttattagaaatcaaagaacactcaaaataaactcagtgctcaaagggttaagtctatttgaaaaggttaaaaaaaagaacaaaaaaaaaaaaagaacttgtactgtatttcctaaacattgataaagcctttaaaatgtttgtactgtaatactttgcttaaaagtcatgaggcattctgtgatccaacctctttcacttatttataagccctcttggttgctattccatattgtaggatgcctttctatttcaattggtaactttctgttttgttcttcctaattattctcccaagatcccacactgcagctttatctttaggcttatgaaaggtaacccgtggttaccggctctccaagtgattctgttcttctccatttttggcagttaatttgcagaagtaactgacagctgacaccatatgagaacctttgtataaaatattggcatgtaaacagcacagacaccgtaacacactctgtgccctgtttggttgttgacaatgaagcaccattatgtgactcttcatataacccttttttctacggcagcattaaaattgtctttttgctataa

SEQ ID NO: 206176 - protein, 1996 aa, Artificial Sequence
  derived and/or modified sequence
MMRTTEDFHKPSATLNSNTATKGRYIYLEAFLEGGAPWGFTLKGGLEHGEPLIISKVEEGGKADTLSSKLQAGDEVVHINEVTLSSSRKEAVSLVKGSYKTLRLVVRRDVCTDPGHADTGASNFVSPEHLTSGPQHRKAAWSGGVKLRLKHRRSEPAGRPHSWHTTKSGEKQPDASMMQISQGMIGPPWHQSYHSSSSTSDLSNYDHAYLRRSPDQCSSQGSMESLEPSGAYPPCHLSPAKSTGSIDQLSHFHNKRDSAYSSFSTSSSILEYPHPGISGRERSGSMDNTSARGGLLEGMRQADIRYVKTVYDTRRGVSAEYEVNSSALLLQGREARASANGQGYDKWSNIPRGKGVPPPSWSQQCPSSLETATDNLPPKVGAPLPPARSDSYAAFRHRERPSSWSSLDQKRLCRPQANSLGSLKSPFIEEQLHTVLEKSPENSPPVKPKHNYTQKAQPGQPLLPTSIYPVPSLEPHFAQVPQPSVSSNGMLYPALAKESGYIAPQGACNKMATIDENGNQNGSGRPGFAFCQPLEHDLLSPVEKKPEATAKYVPSKVHFCSVPENEEDASLKRHLTPPQGNSPHSNERKSTHSNKPSSHPHSLKCPQAQAWQAGEDKRSSRLSEPWEGDFQEDHNANLWRRLEREGLGQSLSGNFGKTKSAFSSLQNIPESLRRHSSLELGRGTQEGYPGGRPTCAVNTKAEDPGRKAAPDLGSHLDRQVSYPRPEGRTGASASFNSTDPSPEEPPAPSHPHTSSLGRRGPGPGSASALQGFQYGKPHCSVLEKVSKFEQREQGSQRPSVGGSGFGHNYRPHRTVSTSSTSGNDFEETKAHIRFSESAEPLGNGEQHFKNGELKLEEASRQPCGQQLSGGASDSGRGPQRPDARLLRSQSTFQLSSEPEREPEWRDRPGSPESPLLDAPFSRAYRNSIKDAQSRVLGATSFRRRDLELGAPVASRSWRPRPSSAHVGLRSPEASASASPHTPRERHSVTPAEGDLARPVPPAARRGARRRLTPEQKKRSYSEPEKMNEVGIVEEAEPAPLGPQRNGMRFPESSVADRRRLFERDGKACSTLSLSGPELKQFQQSALADYIQRKTGKRPTSAAGCSLQEPGPLRERAQSAYLQPGPAALEGSGLASASSLSSLREPSLQPRREATLLPATVAETQQAPRDRSSSFAGGRRLGERRRGDLLSGANGGTRGTQRGDETPREPSSWGARAGKSMSAEDLLERSDVLAGPVHVRSRSSPATADKRQDVLLGQDSGFGLVKDPCYLAGPGSRSLSCSERGQEEMLPLFHHLTPRWGGSGCKAIGDSSVPSECPGTLDHQRQASRTPCPRPPLAGTQGLVTDTRAAPLTPIGTPLPSAIPSGYCSQDGQTGRQPLPPYTPAMMHRSNGHTLTQPPGPRGCEGDGPEHGVEEGTRKRVSLPQWPPPSRAKWAHAAREDSLPEESSAPDFANLKHYQKQQSLPSLCSTSDPDTPLGAPSTPGRISLRISESVLRDSPPPHEDYEDEVFVRDPHPKATSSPTFEPLPPPPPPPPSQETPVYSMDDFPPPPPHTVCEAQLDSEDPEGPRPSFNKLSKVTIARERHMPGAAHVVGSQTLASRLQTSIKGSEAESTPPSFMSVHAQLAGSLGGQPAPIQTQSLSHDPVSGTQGLEKKVSPDPQKSSEDIRTEALAKEIVHQDKSLADILDPDSRLKTTMDLMEGLFPRDVNLLKENSVKRKAIQRTVSSSGCEGKRNEDKEAVSMLVNCPAYYSVSAPKAELLNKIKEMPAEVNEEEEQADVNEKKAELIGSLTHKLETLQEAKGSLLTDIKLNNALGEEVEALISELCKPNEFDKYRMFIGDLDKVVNLLLSLSGRLARVENVLSGLGEDASNEERSSLYEKRKILAGQHEDARELKENLDRRERVVLGILANYLSEEQLQDYQHFVKMKSTLLIEQRKLDDKIKLGQEQVKCLLESLPSDFIPKAGALALPPNLTSEPIPAGGCTFSGIFPTLTSPL

SEQ ID NO: 206177 - DNA, 5991 bp, Artificial Sequence
  derived and/or modified sequence
atgatgcggaccacggaggattttcacaagccttctgccacgctgaacagcaacacagccaccaaaggccgctacatctatctggaagcctttctggagggaggggccccatggggcttcaccctgaaaggggggcttgagcacggggaacccctgatcatcagcaaggtggaggagggggggaaagccgacactctttctagtaaactgcaggccggggacgaagtcgtccacatcaacgaggtgaccctgtcatctagtcgaaaggaggctgttagcttggtcaaaggatcatataaaactctgcgactggtggttcgccgggacgtttgtaccgatcccggccacgccgataccggcgcttccaactttgtctctcccgagcacttaacttcaggcccccagcatagaaaggcggcgtggtctggaggtgtcaagctccgcctgaaacatcgcaggtcagagccagcaggccgcccccatagctggcacaccactaaaagtggagagaaacagcccgacgccagtatgatgcaaatatcccagggaatgataggacccccttggcaccagagttaccacagtagctccagcaccagcgatttgtccaattacgaccacgcgtatctccgcagatcacccgaccagtgctcttcgcagggctcaatggagtctttggagccctcaggggcctaccctccatgtcacctgtctccggcaaagagtactggatccatcgatcagttatcccattttcataacaaaagagacagcgcatactcatctttcagtacaagctcctcaattctggaataccctcacccagggatctccggaagggagcggtcaggaagcatggataatactagtgcccgaggtggactgcttgagggcatgaggcaggccgatattagatacgtcaaaacagtgtacgacaccagaaggggcgttagtgccgaatacgaagtgaactcatctgctctgcttttacaaggacgtgaggccagagcttctgcgaatggacaaggatacgataaatggtcgaacatcccacgcggcaagggagtccctcccccctcttggagtcagcaatgtccttcgtcgctggaaacggcaacagacaatctgccacctaaggtgggcgcacctcttccgcctgcgcggtcagacagttacgccgcctttaggcacagggaaagacccagtagctggtcatcactggaccagaagcggctgtgcaggccccaggcaaactcactgggatctcttaaaagcccctttatagaggaacagctgcataccgtgctagagaaatcgcccgaaaatagtcctccagtgaaaccgaagcataattatactcagaaggctcagcccggccaacccctactgcccacctcaatctaccccgttccttcccttgaacctcactttgcacaagtaccgcagccaagtgtcagctccaacggaatgttataccccgccctggctaaggagagtggatatatcgcaccacagggagcatgcaacaagatggccacaattgatgagaatggcaaccaaaacgggagcgggcgccccggatttgcattctgccagcccctagaacacgatttgctgagtcccgtggaaaagaagcccgaggctactgcgaagtatgtccccagtaaggtacacttctgttcagtacccgaaaacgaggaggacgcttcactgaagcgccatctcacaccgccacagggtaatagccctcactccaacgaacgtaagagcacccatagcaacaagccttctagccacccacacagcctgaaatgtcctcaggctcaagcctggcaggccggggaggacaaacgatcttccaggcttagtgagccgtgggagggggactttcaagaagaccataacgcaaatttgtggaggcgcctggaacgggaaggcctgggccagtccctttctggaaacttcggcaaaaccaagagcgccttcagctcacttcagaacatcccagagtccctcagaaggcattcatcccttgagctgggcagaggaactcaagaggggtacccaggtggcagaccaacttgcgctgtaaacacaaaggccgaagaccctggcagaaaagctgccccagatctggggtcacacttggatcggcaggtgagctaccctcggcccgaaggacgtactggggccagcgcttcatttaactcaaccgacccgtctccagaagagcctcctgccccttcacacccccacacttcaagtttgggtaggcgtggaccaggtccaggtagcgcttccgcattgcagggtttccagtacggcaagcctcattgtagtgttttagagaaggtgagtaaattcgagcagagggagcagggctcccagcgacctagcgtgggaggatccggcttcggtcacaattacaggcctcaccggacagtatctacgtccagcacttccggcaatgatttcgaggaaactaaggcccacatccgtttctccgagagtgcagagccactgggcaatggcgagcagcatttcaagaatggggagctgaaactggaggaagcgagtcgccagccatgtgggcagcagttaagcggaggcgcctctgactctggccggggcccccagcggccggacgcgcgcctgctccggtcccaaagcaccttccagttgtcttcagagcctgagcgcgagccagagtggcgggatcgccccggatccccagagagtccattactagatgcacccttttccagagcctacagaaacagcatcaaagacgcccaatcaagagtgctgggggcaaccagctttcgccgacgtgaccttgaacttggagcacccgtagccagtaggtcgtggagaccacggcctagctctgctcatgtgggcttacgaagccctgaggccagcgcgtctgcttccccacacacgccccgggagaggcatagtgtaacccctgccgaaggagatctagctaggccagttccacctgctgccagacgaggcgccagaaggcgtctcacacctgagcagaagaaaagaagctacagcgagcctgagaaaatgaacgaggtcggtatcgttgaagaagccgaacctgctccgctgggtcctcagcggaacggaatgcgcttcccagagtcgtccgtggcagacagacgtcgtctgttcgaacgcgacggcaaggcttgcagcaccctcagtttatcgggacccgaactcaaacagtttcaacagagtgccctcgccgattatattcagaggaagacaggaaagcgccccacttccgccgctggctgctctctacaggaacctggtcccttgcgagagcgggcccagtctgcatatcttcagcccggacccgccgctctggaggggagcggtttagcttccgcctcatcactgtcctcactgagagaacccagtctgcaaccgcgccgtgaagccaccttactgcccgcaacagttgccgaaacacagcaggcaccgcgggaccgctcctctagttttgccggaggaaggcggctcggagagcggagaagaggcgacctactctccggagccaacggtggaactagggggacacagaggggagacgagaccccaagggaacccagtagttggggcgctcgcgctgggaagagcatgtcagctgaggatctcctagaacgcagtgacgtgcttgctggtcctgttcacgtgcgtagcagaagttctcctgctactgctgataaacgtcaggacgtgttgctgggacaggacagtggcttcggattagtgaaggatccctgctatcttgcaggtccaggttcccgtagcctgagttgcagcgagagaggacaggaggagatgcttcctctctttcaccacctcacaccgcggtggggtgggtcagggtgcaaggcgattggggactcgagcgtaccatcagaatgtccgggtactctcgatcaccagcgacaggctagtaggaccccctgcccaaggccccccctggctggcactcagggactggtgaccgacacacgcgccgcaccgctcaccccaatcgggaccccccttccgagcgcaatcccttccgggtactgcagtcaggatggacaaactggccgccagcctctacctccttatacaccagcgatgatgcatcggagcaatggccataccctgacccaacctcctggccctcgaggatgtgaaggggatggccctgagcacggcgttgaggagggaacgcgtaaaagggttagtctgccacaatggcctcccccatctcgagctaagtgggcccatgctgcaagggaggattccctgcccgaagagtccagcgccccggacttcgccaatcttaaacattatcagaaacagcagagcctgccgagcctgtgttctacaagcgaccctgatacacccctgggtgctccctccactccaggaagaatctccttgcgcatatcagaatccgtgcttagagactcaccacctcctcatgaggattacgaggatgaagtgtttgtgcgcgaccctcacccaaaggcgaccagctcgcctactttcgagcctttacccccccccccaccgcctccaccctcacaggagacgcctgtctactccatggatgactttcctcccccccctccccacacagtctgtgaggcccaattggattctgaagacccagaaggacctagaccttcctttaacaaattgagcaaagttactatagcaagggaacgccacatgccaggagctgcacacgtagtcggctcccagaccctggcctccagattgcagacctctattaagggctcagaggcagaatcaactccaccctcctttatgtcagtgcacgctcaactcgccggctctctgggaggacagcccgcaccaattcaaacccagtcattgagccatgaccctgtctccggaacccaagggttggaaaaaaaggtaagtcctgatccccaaaaatcaagtgaggacattcgtaccgaagcccttgccaaggaaattgtgcaccaggacaagtcattagccgacattttggaccctgattccaggcttaagactacaatggatttgatggagggactgttcccacgcgatgtcaacctgctgaaggagaactccgtgaaaaggaaggctatccagaggactgtaagctccagtggatgcgagggcaagcgcaacgaggacaaagaagctgtttccatgctcgtcaactgtccagcttactatagcgtgtccgcgcccaaggctgagttgctcaacaaaatcaaagagatgcccgccgaagtgaatgaggaggaagagcaggctgacgtcaatgaaaagaaagccgagcttattggtagtctgactcacaagcttgaaacactccaggaggccaagggatcattgcttacagacatcaaactcaacaacgctctcggggaagaagtcgaggcattgatctcggagctgtgtaagcccaacgaatttgataagtaccgtatgtttatcggcgacctggacaaggtggtgaacctgctgcttagcctgtccggccgtctagcccgagtcgaaaatgtgctttctggactcggtgaggatgcatccaacgaggaaagaagctccctgtatgagaaaagaaagattctggccggccagcatgaagacgctcgcgagctgaaagaaaatttagaccgccgcgaacgggtggtcctggggatcctggccaattatctgtccgaggagcagttacaggactaccagcatttcgtgaagatgaagagcacactcctaatcgagcagagaaagttagatgataaaatcaagttaggtcaggagcaagtaaaatgcttgttagagtctctgccctccgatttcatccccaaggccggtgccctggccttgcccccaaacctcacttccgagccaattcctgcggggggatgcactttcagcgggatttttcctacactaacctcacctttatag

SEQ ID NO: 206178 - DNA, 5991 bp, Artificial Sequence
  derived and/or modified sequence
atgatgaggaccacagaggacttccacaagcccagcgccaccctgaacagcaacacagccaccaagggccgctacatctacctggaggccttcctggagggcggggccccctggggcttcaccctgaagggcggcctggagcacggggagcccctcatcatcagcaaggtggaggagggcggcaaggctgacaccctgagcagcaagctgcaggccggagatgaggtggtgcacatcaatgaggtgaccctgagcagcagcaggaaggaggccgtgtccctggtgaagggcagctacaagaccctgcggctggtggtgagaagagatgtgtgcacagaccccggccatgctgacacaggagccagcaactttgtgtccccagagcacctgaccagcggcccccagcacaggaaggccgcctggagcggcggcgtgaagctgcggctgaagcaccggcgctctgagcctgctggccggccccacagctggcacaccaccaagagcggggagaagcagccagatgcctccatgatgcagatcagccagggcatgattggccccccctggcaccagagctaccacagcagcagcagcaccagtgacctgagcaactatgaccacgcctacctgcggcgcagcccagaccagtgcagcagccagggctccatggagagcctggagcccagcggggcctacccaccctgccacctgagccctgccaagagcacaggcagcattgaccagctgagccacttccacaacaagagggacagcgcctacagcagcttcagcaccagcagcagcatcctggagtacccccaccctggcatcagcggccgggagaggagcggctccatggacaacaccagcgcccggggcggcctgctggagggcatgaggcaggccgacatccgctacgtgaagacagtgtatgacacccggcggggcgtgtctgcagaatatgaggtgaacagcagcgccctgctgctgcagggccgggaggcccgggccagcgccaacggccagggctatgacaagtggagcaacatcccccggggcaagggcgtgcccccacccagctggagccagcagtgccccagcagcctggagacagccacagacaacctgccccccaaggtgggcgcccccctgcccccagcccggagtgacagctatgctgccttccgccaccgggagcggcccagctcctggagcagcctggaccagaagaggctgtgccggccccaggccaacagcctgggcagcctgaagagccccttcatcgaggagcagctgcacacagtgctggagaagagccctgagaacagcccccctgtgaagcccaagcacaactacacccagaaggcccagcccggccagcccctgctgcccaccagcatctaccctgtgcccagcctggagccccactttgcccaggtgccccagcccagcgtgagcagcaatggcatgctgtacccagccctggccaaggagagcggctacatcgccccccagggcgcctgcaacaagatggccaccattgatgaaaatggaaaccagaatggaagtggccggcccggctttgccttctgccagcccctggagcatgacctgctgagccctgtggagaagaagccagaggccacagccaagtatgtgcccagcaaggtgcacttctgcagcgtgcctgaaaatgaagaagatgccagcctgaagaggcacctgaccccaccccagggcaacagcccccacagcaatgaaaggaagagcacccacagcaacaagcccagcagccacccccacagcctgaagtgcccccaggcccaggcctggcaggccggggaggacaagaggagcagccggctgtctgagccctgggagggggacttccaggaggaccacaatgccaacctgtggaggcggctggagcgggagggcctgggccagagcctgagcggcaactttgggaagaccaagagcgccttcagcagcctgcagaacatccctgagagcctgcggcggcacagcagcctggagctgggccggggcacccaggagggctacccaggcggccggcccacctgtgctgtgaacaccaaggccgaggaccccggcaggaaggccgccccagacctgggcagccacctggaccggcaggtgtcctaccccaggcctgagggccgcactggagccagcgccagcttcaacagcacagaccccagccctgaggagcccccagcccccagccacccccacaccagcagcctgggccggcggggccctggccctggcagcgccagcgccctgcagggcttccagtatggcaagccccactgcagcgtgctggagaaggtgtccaagtttgagcagcgggagcagggcagccagaggccttctgtgggcggcagcggcttcggccacaactaccggccccacaggacagtgtccaccagcagcaccagcggaaatgactttgaggagaccaaggcccacatccgcttcagcgagagcgctgagcccctgggcaatggagagcagcacttcaagaatggagagctgaagctggaggaggccagccggcagccctgtggccagcagctgagcggcggggccagtgacagcggccggggcccccagaggccagatgcccggctgctgcggagccagagcaccttccagctgagcagcgagcctgagcgggagcctgagtggagggaccggcccggcagccctgagagccccctgctggatgcccccttcagccgggcctacagaaattccatcaaggatgcccagagccgggtgctgggcgccaccagcttcagaagaagagacctggagctgggcgcccctgtggccagccgctcctggaggccccggcccagcagcgcccacgtgggcctgcggagccctgaggccagcgccagcgccagcccccacaccccccgggagcggcacagcgtgaccccagctgagggggacctggcccggcctgtgcccccagctgcccggcggggggcccggcggcggctgaccccagagcagaagaagaggagctacagcgagcctgagaagatgaatgaggtgggcatcgtggaggaggccgagcccgcccccctgggcccccagagaaatggcatgagatttcctgagagctctgtggccgacagaagaaggctgtttgaaagagatggcaaggcctgcagcaccctgagcctgagcggccctgagctgaagcagttccagcagagcgccctggccgactacatccagaggaagacaggcaagaggcccaccagcgctgctggctgcagcctgcaggagcccggccccctgcgggagcgggcccagagcgcctacctgcagcccggccctgctgccctggagggcagcggcctggccagcgccagcagcctgagcagcctgcgggagcccagcctgcagccccggcgggaggccaccctgctgcctgccaccgtggccgagacccagcaggccccccgggacaggagcagcagctttgctgggggccggcggctgggggagcggcggcggggggacctgctgagcggggccaatggaggcacccggggcacccagagaggagatgagaccccccgggagcccagctcctggggcgcccgggccggcaagtccatgtctgctgaggacctgctggagaggagtgatgtgctggccggccctgtgcacgtgcgcagccgcagcagccctgccacagctgacaagaggcaggatgtgctgctgggccaggacagcggcttcggcctggtgaaggacccctgctacctggccggccctggcagccgcagcctgagctgcagcgagcggggccaggaggagatgctgcccctcttccaccacctgaccccccgctggggcggcagcggctgcaaggccatcggggacagctctgtgcccagtgaatgtcctggcaccctggaccaccagaggcaggccagcaggaccccctgcccccggccccccctggccggcacccagggcctggtgacagacacccgggccgcccccctgacccccatcggcacccccctgcccagcgccatccccagcggctactgcagccaggacggccagacaggccggcagcccctgcccccctacaccccagccatgatgcacaggagcaatggccacaccctgacccagcccccaggcccccggggctgtgaaggagatggccctgagcacggcgtggaggagggcaccaggaagagggtgtccctgccccagtggcccccacccagccgggccaagtgggcccacgccgcccgggaggacagcctgcctgaggagagcagcgccccagactttgccaacctgaagcactaccagaagcagcagagcctgcccagcctgtgcagcaccagtgaccctgacacccccctgggcgcccccagcaccccaggccgcatcagcctgcgcatcagcgagagcgtgctgcgggacagccccccacctcatgaggactatgaagatgaggtgtttgtgcgggacccccaccccaaggccaccagcagccccacctttgagcccctgcccccacctcctcctcctccacccagccaggagacccctgtgtacagcatggatgacttccccccacctccaccccacacagtgtgtgaggcccagctggacagcgaggaccctgagggcccccggcccagcttcaacaagctgagcaaggtgaccatcgcccgggagcggcacatgcctggggccgcccacgtggtgggcagccagaccctggccagccggctgcagaccagcatcaagggcagcgaggccgagagcaccccacccagcttcatgtctgtgcacgcccagctggccggcagcctgggcggccagcctgcccccatccagacccagagcctgagccatgaccctgtgtctggcacccagggcctggagaagaaggtgtccccagacccccagaagagcagcgaggacatcagaacagaggccctggccaaggagatcgtgcaccaggacaagagcctggccgacatcctggaccctgacagccggctgaagaccaccatggacctgatggagggcctcttccccagagatgtgaacctgctgaaggagaacagcgtgaagaggaaggccatccagaggacagtgagcagcagcggctgtgagggcaagagaaatgaagacaaggaggccgtgtccatgctggtgaactgcccagcctactacagcgtgtctgcccccaaggccgagctgctgaacaagatcaaggagatgcctgctgaggtgaatgaggaggaggagcaggctgatgtgaatgagaagaaggccgagctgattggcagcctgacccacaagctggagaccctgcaggaggccaagggcagcctgctgacagacatcaagctgaacaatgccctgggggaggaggtggaggccctgatcagcgagctgtgcaagcccaatgaatttgacaagtacaggatgttcatcggggacctggacaaggtggtgaacctgctgctgagcctgagcggccgcctggcccgggtggagaatgtgctgagcggcctgggagaagatgccagcaatgaggagaggagcagcctgtatgagaagaggaagatcctggccggccagcatgaagatgcccgggagctgaaggagaacctggaccggcgggagcgggtggtgctgggcatcctggccaactacctgtctgaggagcagctgcaggactaccagcactttgtgaagatgaagagcaccctgctgattgagcagaggaagctggatgacaagatcaagctgggccaggagcaggtgaagtgcctgctggagagcctgcccagcgacttcatccccaaggccggggccctggccctgccccccaacctgaccagcgagcccatcccagctgggggctgcaccttcagcggcatcttccccaccctgaccagccccctgtag

SEQ ID NO: 206179 - DNA, 5991 bp, Artificial Sequence
  derived and/or modified sequence
atgatgcggaccaccgaggacttccacaagcccagcgccaccctgaacagtaatacagccacgaaggggcgttacatctacctcgaggctttccttgagggcggcgcgccgtgggggttcacactcaagggcggtctggaacatggcgagccattgatcatctcaaaagtagaggagggcggcaaagccgacactctgtcttccaaactgcaggcaggcgatgaagttgtgcacattaacgaagtaactctctcaagctcccgaaaggaggctgtcagcctcgtgaagggttcctataaaacacttagactggtggttaggagggacgtgtgtacagaccccgggcacgctgacacgggcgcttcaaacttcgtttcgccggagcaccttacatccgggccacagcacaggaaagctgcatggagcggaggggtgaagctgcggctgaaacaccgaagatctgagcctgccgggcggcctcactcctggcacaccacaaaatccggagagaagcagccagatgctagcatgatgcagatctctcagggcatgataggtccaccctggcatcagagttatcacagcagttcctccacctcagacctgtctaactacgaccatgcatatctccgtcgctctccagatcaatgtagctcccagggctctatggaatctttggagccatctggcgcttacccaccctgccatctctcccctgccaaatccaccggcagtattgatcagctgtcccatttccacaacaagagggactcggcttattcatcattttccactagcagcagtatcttggaatatccccacccaggtatttcaggacgcgaacgctccggctctatggataacacatccgccagaggaggtctcctggaaggaatgagacaggctgacataagatacgtcaaaaccgtgtacgacacacgccgaggggtatccgccgaatatgaagtaaactcctcagcccttttattgcagggcagggaggctcgagcaagcgcaaacggccagggctatgacaagtggagtaatattcctcgaggcaaaggggttccgcctcccagctggagtcagcagtgcccaagctctttagaaactgccaccgataacctgcctcctaaagtcggtgctcctttgccgccagcgaggtccgatagttacgctgcatttcggcatcgggagcgccccagcagctggagtagcctggaccagaaacgcctctgccggccccaggccaattctttgggtagcctgaagtctccctttattgaggaacaattgcataccgtgctcgaaaagagtcctgagaactctccccccgtgaaacccaagcataattatacacagaaagcccaacccggccagccgctactgcctacctctatctaccccgtgccgtctctcgagccacattttgcacaggttccgcagccctccgtgtccagcaacggtatgctttaccccgccctggccaaagagtccggctacatcgccccccaaggcgcctgcaacaagatggccaccatcgatgaaaatggcaaccaaaatggatcagggcgtccaggcttcgccttttgtcaacctctggagcacgacctgttatccccagtggagaaaaaacccgaggcaaccgccaagtacgtgcccagtaaggtgcatttctgttcagtgcccgaaaatgaagaagacgccagcctgaaaaggcatctaacccctcctcagggcaatagcccacatagcaacgagcgcaaatcaacgcattcaaataagcccagcagtcacccccactcactgaagtgccctcaagcccaggcttggcaggcaggagaagacaagcgaagctcacgattgtctgagccttgggaaggggactttcaggaggaccacaatgccaatctttggcgcagattggagcgggaggggcttggacagtccctgtctggtaatttcgggaagaccaaaagtgccttcagctcccttcagaacatccccgaatcacttcgtcgacactcaagtctggaactgggccgcggcactcaggaaggctatcctggcggaaggccaacatgtgcagtcaacaccaaggctgaagatcccggccggaaggctgcgccagacttggggtcgcacctggaccgccaggtgtcgtatcctagaccagaggggcgcacaggcgccagtgcatccttcaattctacggaccctagcccggaggagccacccgccccctctcacccccacacgtcaagtttgggacggagaggccccgggcccggctccgcctcagcgttacagggatttcagtatggtaagccacattgctcagtactggagaaagtgtcaaaattcgaacagcgggagcaaggctcacagaggccgtctgtaggcggctccggattcggccacaattaccgcccccaccgaacagtcagcacttccagcacctccgggaacgactttgaagaaacaaaagcccacatcaggttttctgagtcagcagaacccttaggaaatggcgagcagcactttaaaaacggcgaacttaagctggaggaggccagccgacagccttgcggacaacaactctcagggggagcgagtgatagtggcaggggcccacagagacccgacgcgcggctgttgcgctcccaatcaaccttccagttgagttcagaaccagaaagggagcctgagtggcgggaccgcccaggttcacccgaaagtcccctgctcgatgctcccttttctcgtgcttataggaattctatcaaggacgcccaaagtcgggtgctgggcgcgacaagctttcggcgcagggacttggagctgggcgcaccagtggcctccaggtcgtggcggcctaggccctccagtgctcacgtgggcctgagatcccccgaggctagcgcctcggcttccccacatacacccagggaacggcacagtgtgacacccgctgagggcgatttggctcgtcccgtcccacctgccgctcgccgaggtgcccggcgccgcctcacacccgaacagaaaaagagatcatattcagagccagagaaaatgaacgaggtaggcatcgttgaggaagccgaacctgctcccctcgggccccagagaaatgggatgcgctttcccgaaagtagtgtagcagaccgccgccgcctgtttgaacgtgacgggaaagcctgctctactttgagtttgtcgggccccgaattgaagcagttccagcagagtgccctcgctgattatattcagagaaagaccgggaaacgtcctaccagtgcagcaggctgcagtctacaggagcccggacccctaagggagagagcccagtctgcctatctgcagcccggccccgcggctctcgaaggctcaggactagcatctgcttccagcctgtcatcactccgtgaaccatcccttcagcccaggcgcgaggccaccctcctgccagccaccgtagctgaaacacagcaggcaccacgagatcgcagttcctcatttgccggagggcgccgcctaggggagaggcgacgcggggacctcctgtcaggcgcaaacggagggacaagaggcactcagcggggggatgaaactccccgggagccaagcagttggggtgcccgcgctggaaagagcatgtctgctgaagatttgcttgaacggtcagatgtgcttgcaggcccagtacacgtgagaagtcgatcatccccggctaccgccgataagcgccaggacgtgctgctcgggcaggatagtggctttggcctggtcaaggacccatgttatctcgcagggcccggcagcaggtccctctcatgttccgagcgtggccaggaagaaatgttgccgctgttccaccatctgacccccagatgggggggctcggggtgcaaggctattggggactcttcagtgccctccgaatgccccgggactctggatcaccagagacaggctagtcgtactccctgtccccggccgccacttgcaggcacacagggtcttgtcactgatacgagagcagctccgctaacacctatcggcacccccctgccaagtgcaattcccagcggatactgctcccaagatgggcaaaccggccgtcagccccttcccccatacaccccagctatgatgcatcgctccaatggccatacactgacacagcccccgggtccacggggctgcgaaggagatggcccagaacacggggtcgaagagggtacccgcaaaagagtgagtctgccccagtggccccccccgagtagagctaaatgggctcatgctgccagagaggacagcctgcccgaagagtccagcgcaccagacttcgccaatctgaagcattatcagaaacagcagtccctgccatcattgtgttcaacctctgatccagatacccccctcggtgcgcccagcacaccaggccgaatctcactacggatcagtgagtccgtcctcagggactcaccaccgccacacgaagactacgaggatgaagttttcgtccgggatccacaccccaaggctacatcttcacctacatttgagcctctcccccctcctccacccccacccccttcacaggaaacccctgtatactcaatggacgatttccccccacctccccctcacacagtgtgtgaagcccagctggatagcgaggatcctgaaggcccccgcccaagttttaacaagttatccaaggtcaccatcgctcgggaacgacacatgcctggtgccgcccacgtggtgggttctcagactctggcctctaggctccagacaagcatcaaaggaagtgaagctgagtctacaccccccagttttatgtccgttcacgcgcagcttgccgggtcgctaggggggcagcccgcgcccatccaaacacaatctttgagccatgatccagtttcaggcacccaagggctcgagaaaaaggttagtcctgacccacagaaatcttccgaggatatacgcacggaggcactggctaaagagatcgtgcatcaggataagtcgttggctgatatcctggatcccgattcccgcctcaaaaccacaatggacctgatggaagggctgtttccacgcgatgttaacctgttgaaggagaacagcgtgaagcgcaaagccatccaacgaaccgtctcatcttctggatgcgaggggaaaagaaatgaggacaaagaggctgtgtccatgctggtgaattgccctgcgtattactccgtctcagctcccaaagcggagcttttaaataagataaaggagatgcccgctgaggtcaatgaggaggaggagcaggctgatgtgaacgagaagaaggctgagttgatcgggtcactgacacacaaactggagacactgcaggaggccaaaggctctcttctgaccgatattaaacttaataacgctctgggcgaggaggttgaggcacttatcagtgagttgtgtaaacccaacgaattcgacaagtacagaatgtttataggggacctcgataaggtggtcaatttgctgttgtcccttagcggcagattggcacgcgttgaaaatgtactgagcggcttgggggaggacgccagtaatgaggagcggagtagtctgtatgagaaaagaaaaatcctggcagggcaacacgaagatgctcgcgagttgaaggagaatttagatcgccgggaacgagtcgtgctaggcatattggccaattatttaagcgaagagcaacttcaggattaccaacattttgtcaaaatgaagtccactctcttaattgagcagcgcaagttggacgacaagattaagctcggccaggaacaggtcaaatgcctcctggagtctctgccttccgacttcatcccaaaagctggggccctggcactgcctccaaacctgacctctgaacccatcccggcaggaggatgcacttttagcggaatttttcctacacttacatctccgctgtag

SEQ ID NO: 206180 - DNA, 5990 bp, Artificial Sequence
  derived and/or modified sequence
atgatgagaacaaccgaagacttccataaaccttcggcgacacttaacagtaacacggccacaaagggacggtacatttatctggaggccttccttgaggggggagctccctgggggttcacactaaaaggtggacttgaacacggcgagcctctcatcatcagtaaagtcgaagagggcggaaaagccgatactttgtcttccaagcttcaggccggagatgaggttgtgcacatcaatgaagtcaccctatcttcatctaggaaggaggctgtctctctggtgaagggaagctacaagaccttgaggctggtggtgaggcgcgacgtttgcacagatcccggtcacgcagacacaggggcatcaaacttcgtgtcaccagagcacctgacttccggaccgcagcatcgtaaagcagcctggtcaggtggcgtgaagttgagactcaaacataggagaagcgagccagccggaaggccccactcttggcacaccactaaatccggcgagaaacaacctgacgcatcgatgatgcagatctcacagggaatgataggacccccttggcatcagagttaccactcctcaagcagtacctccgacctcagtaactatgaccacgcatacctgcggagatcacctgaccagtgcagcagtcaaggttccatggaaagcctcgaaccttctggagcctaccccccttgccacctcagtccagccaagtcgacgggcagcattgaccagctttctcattttcataacaaacgggattcagcatactcctccttttcgacttcctcctccattcttgaataccctcatcctggcattagcggcagggaacggtccgggtcgatggacaatacttccgctcgaggcggactgttggaaggaatgcgccaggctgatataaggtacgtgaaaacagtttacgatactcggagaggagtctcagctgaatacgaggtgaattcatctgcgttgttgctgcagggcagagaggccagggcttctgcgaacggtcaaggatacgacaagtggtcaaatatccccagagggaaaggtgtgccaccaccttcatggagccagcaatgcccctcaagcctggaaacagccaccgataatctgccacctaaggtcggagctcccctgcccccagcgagaagcgattcttacgccgcttttcgtcacagagagcgcccatcatcatggtcctctttggaccagaagcgtctgtgccgacctcaagcaaacagtttgggctctctgaagtcaccctttatcgaggaacagctgcacacggtcttggaaaaatcacccgagaacagtcctcctgtcaagcccaagcacaactatacccagaaggcccaacccggacagccactgcttccaacatccatatatcctgtgccatctctcgaaccccactttgcccaggtgcctcaaccctctgtgagcagcaacggcatgttataccccgctttggctaaggagtctggctacatagcaccccagggcgcatgcaataaaatggcgactatcgacgaaaatggcaatcagaatggcagcggtagaccaggatttgctttctgtcagcccctggaacacgaccttctatctccggtggagaaaaagcctgaagcaaccgccaaatatgtgccatcgaaagtccatttttgtagcgtgcctgagaacgaggaagatgcaagtctgaagcgacaccttactcctcctcagggtaactccccccactctaatgagcggaaaagcacccactctaataaacctagctctcaccctcatagcttgaaatgcccccaagcccaggcctggcaggctggagaagacaagcgaagttcccgtttgtccgaaccctgggaaggcgattttcaagaagaccataatgccaacctctggaggcggctagaaagagagggactgggccaatcattgtccggaaacttcgggaagaccaagagcgcattttcttctctccagaatatcccagaaagcctccgccgacactcctctctggagttagggagaggtactcaggagggataccccggaggtaggcctacatgtgctgtaaacaccaaggccgaagatccaggtcgtaaggcggctccggatctcgggtctcatttggatcggcaggtgagttaccctagacccgaggggaggactggtgcgtctgcttcattcaatagcactgacccctccccagaggaaccccctgcgccatctcatccccacacatcctcactcggacggagaggacctggtcccggtagtgcttccgcactacagggattccaatatggcaaaccacactgtagcgtgcttgagaaagtgtccaagttcgagcaacgcgaacaagggagtcaaagaccttcggtcggcggttctggctttggacacaattaccggccacatcgcactgtgtcaaccagcagcacttcaggtaatgacttcgaggagacaaaggcccatatcagattctcagaaagtgccgagccgctggggaatggcgaacagcactttaagaatggcgagctgaaactggaggaggcatcgagacagccatgcggacagcagctgtccgggggtgcttcggacagcgggcgtggccctcaaaggcccgatgcgaggctgctgcgatcccaatctactttccaactgtctagcgagcctgagcgcgagccagaatggcgcgataggcctggctccccagagtctcccctgcttgacgccccattctctagggcctataggaattctattaaagatgctcagagcagggtcctcggagctacgtcttttcgcagaagggacctcgaactcggagcacccgttgcttctcgaagctggagacctaggcccagcagtgcacatgtgggcctgaggtctcccgaagcttcagcctctgcctccccccacacaccgcgagaaagacattctgtcacacccgctgagggcgatcttgcaaggcccgttcccccagcagctagacgcggagccagaagaagactcacccccgagcagaaaaaaaggagctactcagagcccgagaagatgaacgaagttggcatcgtcgaagaggccgaaccagccccacttggccctcagcgcaacggcatgcgttttcccgaaagctccgttgctgatcggcgtcgactgttcgagagggacgggaaggcctgctctactctttccctcagcggcccagaactgaagcagttccaacaatccgctctggccgattacatccagcggaaaaccgggaaacgacccacctctgccgctggctgttctcttcaggagccaggccctcttagggagcgcgctcaaagtgcctatctgcagccagggcctgcagctctggaaggcagcggcttagccagcgcctccagtctgagcagtttaagagagccctctttgcagcctcgcagagaagcaactctgttaccggcaaccgtggccgaaacacagcaggcaccacgggataggagctctagctttgcaggagggcgacgactcggcgaaaggcgacgcggtgacctcctgagtggggcaaatgggggtactcgcggtacccagcggggtgacgagacccccagagaacccagcagctggggcgctagagccggtaagtcgatgtccgccgaagatctacttgaaaggtctgatgtgctggccggacccgttcacgtccgctctaggagctcccccgcaactgcagacaagaggcaggacgtcctgttgggtcaagactctggcttcgggctcgtaaaagacccctgctacctggccggacccggatcacgcagccttagctgctcggagcggggacaagaggagatgctgccattgtttcatcatctgacccccaggtggggcggtagcggctgtaaagctatcggagattcctctgtcccttccgaatgtcctggaacgctggaccatcagcgccaggcctcccgaacaccttgccctcgccctcccctcgccggaactcaggggcttgtcactgatactcgcgctgcgccactgaccccgatcggtactcctctgccctctgcaattccgtcaggctactgcagccaggatggtcagaccggcaggcaacccctacccccttatactccagcaatgatgcaccgatctaacggacacaccctcacccagccccctggccctagaggctgtgagggcgatggacctgaacatggcgtggaggagggaactcggaaacgggtgagcttgccacagtggcctcctccttcacgcgcaaaatgggcccacgcagccagggaggatagcctgcccgaggaatcctcggccccagatttcgcaaatctaaagcactatcagaagcagcagagcctaccttctttgtgctccacttcagacccagatactcccctgggggcacccagtacaccgggaaggatatcgctaagaatttccgaaagtgtgctgagggatagtcctccaccccacgaggactatgaagacgaagtcttcgtgcgcgacccccatccaaaagcaacttcctctcctactttcgagccccttcccccaccacctcccccaccgccatcccaggaaacccccgtgtattccatggacgattttcccccaccccctccacacacagtatgcgaggcccagctggactcggaagaccccgagggccctagaccgagcttcaacaagctctctaaagtcacaattgctagagagaggcacatgcccggtgccgctcacgtggtgggtagtcagactctggcgagtagactccagaccagtatcaaaggctctgaggccgagtcaactcctccctctttcatgtccgtccacgcacaactagcgggaagcctgggcggacagcccgctccaattcagacacagagcctgtctcacgaccccgtatcaggcacgcaaggattggaaaaaaaggtgtccccggaccctcagaaaagcagtgaggatatccgcacagaggccctcgctaaggaaatcgtccaccaggataagtctcttgctgacatcctggaccctgactcccggttgaaaacaactatggacctgatggaagggctgttccctagagacgtgaacctgttgaaagaaaactccgtgaaaagaaaggccatccagagaaccgtttcctcgagcgggtgcgagggcaagagaaatgaggataaggaagccgttagtatgctggtcaattgtcctgcatattacagcgtttccgccccaaaagcagaactgctgaacaagataaaagagatgccagcggaggtgaatgaagaagaagaacaggctgatgtgaacgaaaaaaaggctgaactgataggaagcctgactcacaagttagaaacccttcaggaagctaaaggttctctgttgacagatatcaagcttaacaatgctttgggagaggaggtggaggctctcatctcagagttgtgtaaacctaacgagttcgataagtacagaatgtttatcggagacctggataaagtagtcaatctcctgctctccctcagcggcaggttggccagggtggagaacgtgctgtccgggcttggcgaagacgctagcaacgaggaacgctcctcactgtacgagaaacggaaaattctagccggacaacatgaagatgccagagaactgaaagaaaacctcgatagacgggaacgcgttgtgctgggaatccttgcaaattacctgtccgaggaacagctccaggattatcagcactttgtgaagatgaagtcaaccctgctgatcgagcagcggaagctcgatgataaaatcaagctgggccaggaacaggtcaagtgtcttttggagtcactgccaagcgactttattcctaaagctggagctctcgccctgccgcctaatttaaccagtgaacctatccccgcaggaggatgtaccttttcaggaatctttcctactctgacttcaccgctgta

SEQ ID NO: 206181 - DNA, 11020 bp, Artificial Sequence
  derived and/or modified sequence
gttattaactgtaagactgtttgaattgtcaggtctttgtggtgagctgaattctgcatggcagtgcttactgtgcagaaaggttgcaatgcctcactttgccttaatccatgttcctctaacttccttactctttctctcaagaggaggcaagtggctgtggcggccgcagcagtggctgatcatcactgaaaataccaaagaaaagaactgagctgcctccttcatattttttccattgaggattaatttaccgtgctttttcattttctctacatcctgcaaaagtttttttctctcctaagaaacaaactatgaactgattgttgaaaaaaagaagtaaaaagttttagcacagcttctctgtctcttcgggacaagttagaaaattctgaagtgagccgaagcatagtaagtgctttctttctttttaagctacttctggggagggaggaggctattgtaatggtaaatttcactccgagaggaagaaagggttgataatcaatcaaaaatgaggtattcctttgagtatttgtgattttcttactatattgtaagatgcttttaattttctctgtaaaataggcagaaatggttttagtgtgtgtatgtgtgaaataaaagctcagaaaagcaatcttcagagcgccactgaaggaagttttgacgaacggagtagagatgtataccacttgggggcttcagtgagaacccagaattcctggaggaggatttacattcagaaatgttgaagtgaaaattccttctggttcagcatcttggagttcagcttggaagaacattttacgtatggaagaatttgcttctccaaacctctcttttggccattgtgtgtcctgaaggatgggacaacttgtgctgtagaagcactgcttgcctgagtttgcttcaggcattttaaatttaacttgagggatcatgtgtttggcatgatgaggaccactgaagacttccacaagcctagtgccacattaaactctaacacggccaccaagggaaggtacatttatctggaggcattcctggagggaggagctccctggggttttactctaaagggtggcctggagcacggagaaccattaatcatctctaaggtcgaagaagggggcaaagcagacaccctgagctccaaactgcaggctggggatgaggttgtgcacatcaatgaggtgactctgagcagctccagaaaggaggcagtttccctggtgaaaggatcctacaagaccctcaggctggtagtgcgcagagatgtgtgcacagacccaggccatgcagatactggtgcctctaacttcgtcagcccagaacacctcacctctggcccccagcacaggaaagcagcgtggtcaggaggggttaaacttcggctgaagcacaggcgcagtgagcctgcaggccgacctcactcgtggcacacaactaaatctggggagaagcaacccgatgccagcatgatgcagatatctcagggtatgatcggccctccttggcaccaaagctaccattccagctcctctactagtgacctctccaactatgaccatgcttatctaaggcggagccctgaccagtgcagctcccaggggagcatggagagcctggagcccagtggggcatacccaccctgtcatctttcccctgccaagtccaccggcagcattgaccagctcagccacttccataacaagagagactcggcttacagctctttctccaccagttctagcatcctagagtatccacaccctggcatctctggccgggagcgttcaggctccatggacaatacttctgctcgaggtggcctcctcgaagggatgaggcaggcagatattcgctatgtcaagacagtctatgacacccggaggggagtctcagcagagtatgaggtgaactcttcagccctgctgcttcaaggtagggaggcccgagcctcagcaaatggtcagggctatgataaatggtctaatattcctcggggcaagggagtgccacccccatcctggagccagcagtgccccagttccttggagactgccacggacaaccttcctcctaaggtgggtgcacccctgcctccagctcggagtgacagttacgcagcatttcggcaccgtgagcggcccagctcctggtctagccttgatcagaaacggctctgccggcctcaggcaaactctttaggctccctgaagtctccattcatagaggagcagctgcatactgtgctggagaagagtccagagaacagccccccagtgaagcccaagcataactatacccagaaggcccaacctggccaacctctgctgccgaccagcatctacccggtaccttccctggagccacactttgcccaggtgcctcagccttctgtgagtagcaacggtatgctctaccctgcactggccaaggagagtggatacatagcccctcagggagcatgcaacaagatggctaccattgatgagaatgggaaccagaatggatctggcaggcctgggtttgccttctgccagcccttagaacatgacttgctgtccccagtggagaagaaaccagaagctacagccaagtatgtcccctccaaagtccatttctgttcagtgcctgaaaatgaggaggatgcctccctgaagagacatctcacacctccccaaggcaacagcccacattccaatgagagaaagagcacccacagtaacaaaccatcttctcatccccacagcctcaaatgccctcaggctcaggcctggcaagcgggtgaagacaagagatcttccaggctctcagagccctgggagggcgatttccaggaagaccacaatgccaacctctggaggaggctggagagagaaggcctaggccagagcctgtcaggcaactttggcaagaccaagtcagccttctcatctctccagaacattcctgagagtctgagaagacacagcagcctggagctaggccggggaacccaggagggttaccccgggggcaggcccacctgtgcagtcaacaccaaggcagaagaccctgggaggaaagccgctcctgacctcgggagccatctggaccggcaggtttcctacccgcggcccgaggggaggaccggtgcctcggcttctttcaacagcacagacccaagtcccgaagagccgcctgccccctcgcacccgcacacatccagtctgggccggagggggcccggcccaggcagcgcctcggctcttcagggctttcagtacgggaagccccactgctcggtgctggagaaggtctccaaattcgagcagcgagagcaagggagccagagaccgagtgtgggcggctctggttttggccataactataggccccacaggaccgtctcaacttccagtacttctgggaatgacttcgaggagacaaaagcacacattcgtttctctgagtcagctgaacccctaggcaacggggagcagcacttcaaaaacggggagctgaagttggaagaggcttcccggcagccctgcggtcagcagctgagcggaggagcgtcggacagcggccgtggcccccagaggccggacgctcggctcctccgtagccagagcaccttccagctctccagcgagccagagagggagcccgagtggcgggacaggcccggctcgcccgaatcgcccctgctggatgcccccttcagccgcgcctaccggaacagcatcaaggacgcacagtcccgtgtcttgggggccacctcctttcgacgtcgagacctggagctgggggcgcccgtggcgtcgaggtcctggcggccacggccttcctcggcccacgtggggctgcggagccccgaggcgtcggcctccgcctccccgcacacgccccgggagcggcacagcgtgacccctgctgagggcgacctggccaggcccgtgccccctgccgcccggagaggtgctcgccggcgcctgactcccgagcagaagaagcgctcctactcggagcccgagaagatgaacgaggtggggatcgtggaggaggccgaaccggcacccctgggcccgcagagaaatgggatgcgtttcccggagagcagcgtggccgaccggcgccgtctcttcgagcgcgatggcaaggcctgctccacgctcagcctgtcggggcccgagctgaagcagttccagcagagcgccctggcggactacatccagcgcaagaccggcaagcggcctacctccgccgccggctgcagcctccaggagcccgggccactgcgtgagcgcgcccagagtgcctacctccagcccggccccgcggcgctcgaaggctccggcctcgcctcggcctccagcttgagctcactgcgggagcccagcctgcagccccgcagggaggccacgctcctgccggccacagttgcagaaacccagcaggctccccgagatcgcagcagctccttcgccggtggccgccgcctcggggaacggcgacgcggggacctgcttagcggagcaaacggtggaacaaggggcacccagagaggggatgagacccccagggagccatcctcctggggggccagggccgggaagtccatgtcggccgaggacctgctggaacgctcggacgtccttgcgggccctgtccatgtgaggtccaggtcatctcccgccaccgcagacaagcgccaggatgtgcttttggggcaagacagtggctttggtcttgtgaaggatccatgttatttggctggtcctggatctaggtcactcagttgttcagaaagaggccaagaagagatgctgccgctcttccaccatctcacccctcgttggggtggttcaggctgcaaagccattggtgattcctccgttcctagtgaatgtcctggaaccctggaccatcagaggcaagccagtaggacaccctgccccaggccaccactggcaggaacgcaagggctggtcacagacaccagggctgcacccctgaccccaattggcacccctctgccttcagccattccctctggctactgctcacaggacggtcagacagggcgacagcctctcccgccctacacccctgccatgatgcacagaagcaatggtcacaccctgacccagcctcccggtccaagaggctgtgagggcgatggcccagagcatggggtagaagagggaacgaggaagagggtctcgctgcctcagtggccacctccttctcgagcaaagtgggcccacgcagccagagaggacagccttcctgaggaatcctcagcccctgattttgcaaacctgaagcactatcaaaaacagcagagtcttccaagtttatgcagcacttctgacccagacacacctcttggggccccgagcactccagggaggatctccctccgaatatctgagtctgtcctgcgggactccccgccacctcatgaggattatgaagacgaagtgtttgtgagggatccgcaccccaaggccacgtccagccccacatttgaacctcttcccccacccccacctcctccaccgagtcaggaaaccccggtgtatagcatggatgacttccctccacctcctccccacactgtatgtgaggcgcagctggacagtgaggatcccgaggggccacgccccagcttcaacaaactttctaaagtgacaattgcaagggaaaggcacatgcctggtgcagcccatgtggtaggtagtcagacactggcttccagactccaaacttctatcaagggttcagaggctgagtccacaccaccctccttcatgagcgttcacgcccaacttgctgggtctcttggtgggcagccagcacccatccagactcaaagcctcagccatgatccagtcagtggaactcagggtttagaaaagaaagtcagtcctgatcctcagaagagttcagaagacatcagaacagaggctttggccaaggaaattgtccaccaagacaaatctctagcagacattttggatccagactccaggctgaagacaacaatggacctgatggaaggtttgtttccccgagatgtgaacttgctgaaggaaaacagtgtaaagaggaaggccatacagagaactgtcagctcttcaggatgtgaaggcaagaggaatgaagacaaggaagcagtgagcatgttggttaactgccctgcctactacagtgtgtctgctcccaaggctgagctactgaacaaaatcaaagagatgccagcagaagtgaatgaggaagaggaacaggcagatgtcaatgaaaagaaggctgagctcattggaagtctcacccacaagctggagaccctccaggaggcgaaggggagcctgctcacggacatcaagctcaacaacgccctgggagaagaggtggaggctctgatcagcgagctctgcaagcccaatgagtttgacaagtataggatgttcataggggatttggacaaggtggtcaacctgctgctctccctctcggggcgtctagcccgtgttgagaatgtccttagcggccttggtgaagatgccagtaatgaagaaaggagctctctttacgagaaaaggaagatcctggctggtcagcatgaggatgcccgggagctgaaggagaacctggatcgcagggagcgagtagtgctgggcatcttggccaattacctttcagaggagcagctccaggactaccagcacttcgtgaaaatgaagtccacgctcctcattgagcaacggaagctggatgacaagatcaagctgggccaggagcaggtcaagtgtctgctggagagcctgccctcagatttcattcccaaggctggggccctggctctgcccccaaacctcacgagtgagcccattcctgctgggggctgtactttcagtggtattttcccaacattaacctctccactttaacctcttctaaaatacccaaccaaaagatcactgtttctctcaacactatttaatctgaaaaatgtttcagtacaaaccactgtttgaactatctgggttattggtgtttgttcctgatgaaaggaaaaaaattctctccaggaggaagcctttttccttcttgcccttcctgattgatcttctgagagctcgaatgctgctggacacgtacccctttctattattactttgtagtagaaagaaagttaatgaaactgagaactgattggagggtgtttgatcatttagtttttaacaggctgaggcaacatggatcagtgtgtgtccccctcaggaatgtatccacagtggccttccttgctggtgggcagtgtatcctgatggcagggtacaagtaccattaatgaagggtctgcaacataaagccttaaaaagacacacactaagaaaactgtaaaaccttgaacattgttatttatattttttaaaatggaaaagatcactatgtttgttgtgctaaccacttatttgattctgttttgtggtggacatagatgattacgtttgagctttgtattttgtgaaaaccttaatgaaatgaattccaaagatagtcacgttgagcgtgaagactttttttcttacattcctgtcttatttttaccaacacgagcaggcattctgcgcttccactggactgagtatgggggagtcctgctcccctcctgtctcacaccttccccaggaggaaggcctcatgcactgcggttattgcatcatttcctagtgcttcatgtcattatcactggtggggaaacaaagctaaattttattaacaaagacaactctcagacctatataataggaggaggacgtccagaatccaacaaaattcaaacggagcccatgctgttctcctgaacaagatttgggctaaatacggcctgtttattgaggctgttttaatgatgctttaaaaaaaaaaaatgttttctaaaatgtcaaacctgttgaccacactttgattaaaaactgcctccttaacctctgaagactgattttgctttatcatgtttcaataataacatttcagaggttactctgtagccccagttgtaagcttataaaaacaaactggaaggctgaggaggttatgggctggcagccaggctatgtttacagctgctggagatggcagtagccttatactttgagcaggtagtacatcccaggctgtgctagaggtagatttgttttttcacgtttgatctgtggctggtggccacctttgttgatttgggcttacgagtttcatagtagccagtcttagaaaattgggggagtaaaattttgaagtaaaaaaaaaaaaaaaatgacaagggaaccaaatgctccttctccccttagtacattttcattacttaatgaagttttatctcctatgtaagaatatcaaaattgtagtttgggtctccagtagagatgtcttttgattaacttataaacaactggccacccagaagtttcctttgcatagtcaaccaaagctatggctttgttctttggagcttatatactgcatgactccattgatacaaataagacagcaccttggtttcccagggatgttttcattcagaggtcctgtctcccaggaaagcagtagaaccagtgacagcattcaacagccacactgcatggtcatcagtcttaggccaacatgggagcctgaaattaactccatcagtaactacctgtgtgtcttgctgatactgaatgagccctcacaagccaagccaggtggaagacagccagcaaacgtctacagttattcttagtgaaattcctcagaggaatccagggggctcccagttcccaacactcttcgagatgaccatttttcgggatttgactggggaacattttacatattcagtctttctcaaaaatttttatttattttcttgagaaagggtcttactatgttgcccaggctggagtgcagagtggtgcgataacagctcattgcagtctgaacctctgaggctcaagccatcctcccatctcagcctcccaagtagctgggaccacaggtgtgcaccactatgcttggctaattttttgattttttatagagacgggggtctcgctatgttgcccaggctggtttcaaactcctgggctcaagggatccttccgctttggtcccagaagtgctgggattacaggcatgagccacttcacccagccacttttctaatttatagacataaaagtaattgactcccacagcacagtaacaggcaatgctgcttggcatgccacaaacatctgaaagcttgtgacactcctaggattgtgtccattctttcattatgtggaaactttgttctgttatgtgaaatgggtaaggcaccaagtgagactttgaaatctaatttttaggtggatgtgatatttattgtaataggacttgacctctgtactttaaagaaatcactaaccaaattttcaaagtttccttttaaatgcgtttagctagaaatctatgtatttatccctttcctattttgcattcttctcccactatttttaaaaactcatttacagtagaaaccattcttctttctcccaacagtatcctttgccaagaccatgagaacagtaaggagcatgttgttggtcagggtttcagaatacgcgtgatgtcactgagaatgtttgctcacagtcaataattgtctttgtggatgtgataattttggagatacacttctggtcagaactcaggtgagataatcttgcaatactccaaatgcagatactccagccacccgcaaggttccaggaaaggacaatgtcctgcgagaaaatcaggaggcctccacttcctgggccacttgagaagttcctgggcatgtcactacatgttggttgactcagccatttctcatgctgttttgtttcttgcggtggccacttaaccccaaagaatgaagggaggatccacagtgaaagtgcctgagtttctctatgagaccagatgctgtcgaaaccaaacatcttttcctttgctctatgggaacattttagggtttgttttgcacagctggtttccagactagaagattaacaagtttgggtccacccctaagaatcagtggctgtcttttaaggtgaggagtgtgggcttaactgaggtcctttgagggagctataaaggagaaacaacctgggacatcccagttttcctattcctccactgttaatatctcatctaaaataattcatgagtttaaatggtaaatatatgctttaagctctacctttaaacttgtatgttattcaggcatctcttattaagatactgggtctctggatacccaaggaaatgttggctttttattcttatgtggttccaaatttacttctcttcagtttaattgtccatggtagtgctggcttcattgttaggttggagttattattttccttttagaacaacatgaattttattcaccttactattagaaaaaggaataactacagccagaaataacttcatttcctacaaggtataaaaagtggtcaagtgaatgtgaaggggcttttctacacaggaatatattatcgggaacaaagtatttcctgctgccttaactctttgggatgcataggataaaatgataaagaccattttaatatcagaaagggttgtcttattaatttttaaataaaacttcacatttcttaatggggagctcattcagaaactaaataatggtttctcaaagtgtggtcaggatacgatctgcatcagaatccttggaatgcttgttaaaaataccaattgctatgacaaaaccaagtctgctggaaactgcatttcagcaggtttcccatgttattctgatgtattttaacatttgagagccactaccaatcatctgtacagttcctactgttatgatcacaataagactaacatgaatttaataatctgaataatttttaaaatttaaataaacagaaattgaagttaaatttaaaaataaaaataacctcagaagttgaaa

SEQ ID NO: 206182 - DNA, 5991 bp, Artificial Sequence
  derived and/or modified sequence
atgatgagaaccaccgaggacttccacaagcccagcgccaccctgaacagcaacaccgccaccaagggcagatacatctacctggaggccttcctggagggcggcgccccctggggcttcaccctgaagggcggcctggagcacggcgagcccctgatcatcagcaaggtggaggagggcggcaaggccgacaccctgagcagcaagctgcaggccggcgacgaggtggtgcacatcaacgaggtgaccctgagcagcagcagaaaggaggccgtgagcctggtgaagggcagctacaagaccctgagactggtggtgagaagagacgtgtgcaccgaccccggccacgccgacaccggcgccagcaacttcgtgagccccgagcacctgaccagcggcccccagcacagaaaggccgcctggagcggcggcgtgaagctgagactgaagcacagaagaagcgagcccgccggcagaccccacagctggcacaccaccaagagcggcgagaagcagcccgacgccagcatgatgcagatcagccagggcatgatcggccccccctggcaccagagctaccacagcagcagcagcaccagcgacctgagcaactacgaccacgcctacctgagaagaagccccgaccagtgcagcagccagggcagcatggagagcctggagcccagcggcgcctaccccccctgccacctgagccccgccaagagcaccggcagcatcgaccagctgagccacttccacaacaagagagacagcgcctacagcagcttcagcaccagcagcagcatcctggagtacccccaccccggcatcagcggcagagagagaagcggcagcatggacaacaccagcgccagaggcggcctgctggagggcatgagacaggccgacatcagatacgtgaagaccgtgtacgacaccagaagaggcgtgagcgccgagtacgaggtgaacagcagcgccctgctgctgcagggcagagaggccagagccagcgccaacggccagggctacgacaagtggagcaacatccccagaggcaagggcgtgcccccccccagctggagccagcagtgccccagcagcctggagaccgccaccgacaacctgccccccaaggtgggcgcccccctgccccccgccagaagcgacagctacgccgccttcagacacagagagagacccagcagctggagcagcctggaccagaagagactgtgcagaccccaggccaacagcctgggcagcctgaagagccccttcatcgaggagcagctgcacaccgtgctggagaagagccccgagaacagcccccccgtgaagcccaagcacaactacacccagaaggcccagcccggccagcccctgctgcccaccagcatctaccccgtgcccagcctggagccccacttcgcccaggtgccccagcccagcgtgagcagcaacggcatgctgtaccccgccctggccaaggagagcggctacatcgccccccagggcgcctgcaacaagatggccaccatcgacgagaacggcaaccagaacggcagcggcagacccggcttcgccttctgccagcccctggagcacgacctgctgagccccgtggagaagaagcccgaggccaccgccaagtacgtgcccagcaaggtgcacttctgcagcgtgcccgagaacgaggaggacgccagcctgaagagacacctgacccccccccagggcaacagcccccacagcaacgagagaaagagcacccacagcaacaagcccagcagccacccccacagcctgaagtgcccccaggcccaggcctggcaggccggcgaggacaagagaagcagcagactgagcgagccctgggagggcgacttccaggaggaccacaacgccaacctgtggagaagactggagagagagggcctgggccagagcctgagcggcaacttcggcaagaccaagagcgccttcagcagcctgcagaacatccccgagagcctgagaagacacagcagcctggagctgggcagaggcacccaggagggctaccccggcggcagacccacctgcgccgtgaacaccaaggccgaggaccccggcagaaaggccgcccccgacctgggcagccacctggacagacaggtgagctaccccagacccgagggcagaaccggcgccagcgccagcttcaacagcaccgaccccagccccgaggagccccccgcccccagccacccccacaccagcagcctgggcagaagaggccccggccccggcagcgccagcgccctgcagggcttccagtacggcaagccccactgcagcgtgctggagaaggtgagcaagttcgagcagagagagcagggcagccagagacccagcgtgggcggcagcggcttcggccacaactacagaccccacagaaccgtgagcaccagcagcaccagcggcaacgacttcgaggagaccaaggcccacatcagattcagcgagagcgccgagcccctgggcaacggcgagcagcacttcaagaacggcgagctgaagctggaggaggccagcagacagccctgcggccagcagctgagcggcggcgccagcgacagcggcagaggcccccagagacccgacgccagactgctgagaagccagagcaccttccagctgagcagcgagcccgagagagagcccgagtggagagacagacccggcagccccgagagccccctgctggacgcccccttcagcagagcctacagaaacagcatcaaggacgcccagagcagagtgctgggcgccaccagcttcagaagaagagacctggagctgggcgcccccgtggccagcagaagctggagacccagacccagcagcgcccacgtgggcctgagaagccccgaggccagcgccagcgccagcccccacacccccagagagagacacagcgtgacccccgccgagggcgacctggccagacccgtgccccccgccgccagaagaggcgccagaagaagactgacccccgagcagaagaagagaagctacagcgagcccgagaagatgaacgaggtgggcatcgtggaggaggccgagcccgcccccctgggcccccagagaaacggcatgagattccccgagagcagcgtggccgacagaagaagactgttcgagagagacggcaaggcctgcagcaccctgagcctgagcggccccgagctgaagcagttccagcagagcgccctggccgactacatccagagaaagaccggcaagagacccaccagcgccgccggctgcagcctgcaggagcccggccccctgagagagagagcccagagcgcctacctgcagcccggccccgccgccctggagggcagcggcctggccagcgccagcagcctgagcagcctgagagagcccagcctgcagcccagaagagaggccaccctgctgcccgccaccgtggccgagacccagcaggcccccagagacagaagcagcagcttcgccggcggcagaagactgggcgagagaagaagaggcgacctgctgagcggcgccaacggcggcaccagaggcacccagagaggcgacgagacccccagagagcccagcagctggggcgccagagccggcaagagcatgagcgccgaggacctgctggagagaagcgacgtgctggccggccccgtgcacgtgagaagcagaagcagccccgccaccgccgacaagagacaggacgtgctgctgggccaggacagcggcttcggcctggtgaaggacccctgctacctggccggccccggcagcagaagcctgagctgcagcgagagaggccaggaggagatgctgcccctgttccaccacctgacccccagatggggcggcagcggctgcaaggccatcggcgacagcagcgtgcccagcgagtgccccggcaccctggaccaccagagacaggccagcagaaccccctgccccagaccccccctggccggcacccagggcctggtgaccgacaccagagccgcccccctgacccccatcggcacccccctgcccagcgccatccccagcggctactgcagccaggacggccagaccggcagacagcccctgcccccctacacccccgccatgatgcacagaagcaacggccacaccctgacccagccccccggccccagaggctgcgagggcgacggccccgagcacggcgtggaggagggcaccagaaagagagtgagcctgccccagtggcccccccccagcagagccaagtgggcccacgccgccagagaggacagcctgcccgaggagagcagcgcccccgacttcgccaacctgaagcactaccagaagcagcagagcctgcccagcctgtgcagcaccagcgaccccgacacccccctgggcgcccccagcacccccggcagaatcagcctgagaatcagcgagagcgtgctgagagacagcccccccccccacgaggactacgaggacgaggtgttcgtgagagacccccaccccaaggccaccagcagccccaccttcgagcccctgccccccccccccccccccccccccagccaggagacccccgtgtacagcatggacgacttcccccccccccccccccacaccgtgtgcgaggcccagctggacagcgaggaccccgagggccccagacccagcttcaacaagctgagcaaggtgaccatcgccagagagagacacatgcccggcgccgcccacgtggtgggcagccagaccctggccagcagactgcagaccagcatcaagggcagcgaggccgagagcaccccccccagcttcatgagcgtgcacgcccagctggccggcagcctgggcggccagcccgcccccatccagacccagagcctgagccacgaccccgtgagcggcacccagggcctggagaagaaggtgagccccgacccccagaagagcagcgaggacatcagaaccgaggccctggccaaggagatcgtgcaccaggacaagagcctggccgacatcctggaccccgacagcagactgaagaccaccatggacctgatggagggcctgttccccagagacgtgaacctgctgaaggagaacagcgtgaagagaaaggccatccagagaaccgtgagcagcagcggctgcgagggcaagagaaacgaggacaaggaggccgtgagcatgctggtgaactgccccgcctactacagcgtgagcgcccccaaggccgagctgctgaacaagatcaaggagatgcccgccgaggtgaacgaggaggaggagcaggccgacgtgaacgagaagaaggccgagctgatcggcagcctgacccacaagctggagaccctgcaggaggccaagggcagcctgctgaccgacatcaagctgaacaacgccctgggcgaggaggtggaggccctgatcagcgagctgtgcaagcccaacgagttcgacaagtacagaatgttcatcggcgacctggacaaggtggtgaacctgctgctgagcctgagcggcagactggccagagtggagaacgtgctgagcggcctgggcgaggacgccagcaacgaggagagaagcagcctgtacgagaagagaaagatcctggccggccagcacgaggacgccagagagctgaaggagaacctggacagaagagagagagtggtgctgggcatcctggccaactacctgagcgaggagcagctgcaggactaccagcacttcgtgaagatgaagagcaccctgctgatcgagcagagaaagctggacgacaagatcaagctgggccaggagcaggtgaagtgcctgctggagagcctgcccagcgacttcatccccaaggccggcgccctggccctgccccccaacctgaccagcgagcccatccccgccggcggctgcaccttcagcggcatcttccccaccctgaccagccccctgtag

SEQ ID NO: 206183 - protein, 833 aa, Artificial Sequence
  derived and/or modified sequence
MNAAGIRAPEAAGADGTRLAPGGSPCLRRRGRPEESPAAVVAPRGAGELQAAGAPLRFHPASPRRLHPASTPGPAWGWLLRRRRWAALLVLGLLVAGAADGCELVPRHLRGRRATGSAATAASSPAAAAGDSPALMTDPCMSLSPPCFTEEDRFSLEALQTIHKQMDDDKDGGIEVEESDEFIREDMKYKDATNKHSHLHREDKHITIEDLWKRWKTSEVHNWTLEDTLQWLIEFVELPQYEKNFRDNNVKGTTLPRIAVHEPSFMISQLKISDRSHRQKLQLKALDVVLFGPLTRPPHNWMKDFILTVSIVIGVGGCWFAYTQNKTSKEHVAKMMKDLESLQTAEQSLMDLQERLEKAQEENRNVAVEKQNLERKMMDEINYAKEEACRLRELREGAECELSRRQYAEQELEQVRMALKKAEKEFELRSSWSVPDALQKWLQLTHEVEVQYYNIKRQNAEMQLAIAKDEAEKIKKKRSTVFGTLHVAHSSSLDEVDHKILEAKKALSELTTCLRERLFRWQQIEKICGFQIAHNSGLPSLTSSLYSDHSWVVMPRVSIPPYPIAGGVDDLDEDTPPIVSQFPGTMAKPPGSLARSSSLCRSRRSIVPSSPQPQRAQLAPHAPHPSHPRHPHHPQHTPHSLPSPDPDILSVSSCPALYRNEEEEEAIYFSAEKQWEVPDTASECDSLNSSIGRKQSPPLSLEIYQTLSPRKISRDEVSLEDSSRGDSPVTVDVSWGSPDCVGLTETKSMIFSPASKVYNGILEKSCSMNQLSSGIPVPKPRHTSCSSAGNDSKPVQEAPSVARISSIPHDLCHNGEKSKKPSKIKSLFKKKSK

SEQ ID NO: 206184 - protein, 746 aa, Artificial Sequence
  derived and/or modified sequence
LLVLGLLVAGAADGCELVPRHLRGRRATGSAATAASSPAAAAGDSPALMTDPCMSLSPPCFTEEDRFSLEALQTIHKQMDDDKDGGIEVEESDEFIREDMKYKDATNKHSHLHREDKHITIEDLWKRWKTSEVHNWTLEDTLQWLIEFVELPQYEKNFRDNNVKGTTLPRIAVHEPSFMISQLKISDRSHRQKLQLKALDVVLFGPLTRPPHNWMKDFILTVSIVIGVGGCWFAYTQNKTSKEHVAKMMKDLESLQTAEQSLMDLQERLEKAQEENRNVAVEKQNLERKMMDEINYAKEEACRLRELREGAECELSRRQYAEQELEQVRMALKKAEKEFELRSSWSVPDALQKWLQLTHEVEVQYYNIKRQNAEMQLAIAKDEAEKIKKKRSTVFGTLHVAHSSSLDEVDHKILEAKKALSELTTCLRERLFRWQQIEKICGFQIAHNSGLPSLTSSLYSDHSWVVMPRVSIPPYPIAGGVDDLDEDTPPIVSQFPGTMAKPPGSLARSSSLCRSRRSIVPSSPQPQRAQLAPHAPHPSHPRHPHHPQHTPHSLPSPDPDILSVSSCPALYRNEEEEEAIYFSAEKQWEVPDTASECDSLNSSIGRKQSPPLSLEIYQTLSPRKISRDEVSLEDSSRGDSPVTVDVSWGSPDCVGLTETKSMIFSPASKVYNGILEKSCSMNQLSSGIPVPKPRHTSCSSAGNDSKPVQEAPSVARISSIPHDLCHNGEKSKKPSKIKSLFKKKSK

SEQ ID NO: 206185 - DNA, 2502 bp, Artificial Sequence
  derived and/or modified sequence
atgaacgccgccggcatcagagcccccgaggccgccggcgccgacggcaccagactggcccccggcggcagcccctgcctgagaagaagaggcagacccgaggagagccccgccgccgtggtggcccccagaggcgccggcgagctgcaggccgccggcgcccccctgagattccaccccgccagccccagaagactgcaccccgccagcacccccggccccgcctggggctggctgctgagaagaagaagatgggccgccctgctggtgctgggcctgctggtggccggcgccgccgacggctgcgagctggtgcccagacacctgagaggcagaagagccaccggcagcgccgccaccgccgccagcagccccgccgccgccgccggcgacagccccgccctgatgaccgacccctgcatgagcctgagccccccctgcttcaccgaggaggacagattcagcctggaggccctgcagaccatccacaagcagatggacgacgacaaggacggcggcatcgaggtggaggagagcgacgagttcatcagagaggacatgaagtacaaggacgccaccaacaagcacagccacctgcacagagaggacaagcacatcaccatcgaggacctgtggaagagatggaagaccagcgaggtgcacaactggaccctggaggacaccctgcagtggctgatcgagttcgtggagctgccccagtacgagaagaacttcagagacaacaacgtgaagggcaccaccctgcccagaatcgccgtgcacgagcccagcttcatgatcagccagctgaagatcagcgacagaagccacagacagaagctgcagctgaaggccctggacgtggtgctgttcggccccctgaccagacccccccacaactggatgaaggacttcatcctgaccgtgagcatcgtgatcggcgtgggcggctgctggttcgcctacacccagaacaagaccagcaaggagcacgtggccaagatgatgaaggacctggagagcctgcagaccgccgagcagagcctgatggacctgcaggagagactggagaaggcccaggaggagaacagaaacgtggccgtggagaagcagaacctggagagaaagatgatggacgagatcaactacgccaaggaggaggcctgcagactgagagagctgagagagggcgccgagtgcgagctgagcagaagacagtacgccgagcaggagctggagcaggtgagaatggccctgaagaaggccgagaaggagttcgagctgagaagcagctggagcgtgcccgacgccctgcagaagtggctgcagctgacccacgaggtggaggtgcagtactacaacatcaagagacagaacgccgagatgcagctggccatcgccaaggacgaggccgagaagatcaagaagaagagaagcaccgtgttcggcaccctgcacgtggcccacagcagcagcctggacgaggtggaccacaagatcctggaggccaagaaggccctgagcgagctgaccacctgcctgagagagagactgttcagatggcagcagatcgagaagatctgcggcttccagatcgcccacaacagcggcctgcccagcctgaccagcagcctgtacagcgaccacagctgggtggtgatgcccagagtgagcatccccccctaccccatcgccggcggcgtggacgacctggacgaggacaccccccccatcgtgagccagttccccggcaccatggccaagccccccggcagcctggccagaagcagcagcctgtgcagaagcagaagaagcatcgtgcccagcagcccccagccccagagagcccagctggccccccacgccccccaccccagccaccccagacacccccaccacccccagcacaccccccacagcctgcccagccccgaccccgacatcctgagcgtgagcagctgccccgccctgtacagaaacgaggaggaggaggaggccatctacttcagcgccgagaagcagtgggaggtgcccgacaccgccagcgagtgcgacagcctgaacagcagcatcggcagaaagcagagcccccccctgagcctggagatctaccagaccctgagccccagaaagatcagcagagacgaggtgagcctggaggacagcagcagaggcgacagccccgtgaccgtggacgtgagctggggcagccccgactgcgtgggcctgaccgagaccaagagcatgatcttcagccccgccagcaaggtgtacaacggcatcctggagaagagctgcagcatgaaccagctgagcagcggcatccccgtgcccaagcccagacacaccagctgcagcagcgccggcaacgacagcaagcccgtgcaggaggcccccagcgtggccagaatcagcagcatcccccacgacctgtgccacaacggcgagaagagcaagaagcccagcaagatcaagagcctgttcaagaagaagagcaagtag

SEQ ID NO: 206186 - DNA, 2241 bp, Artificial Sequence
  derived and/or modified sequence
ctgctggtgctgggcctgctggtggccggcgccgccgacggctgcgagctggtgcccagacacctgagaggcagaagagccaccggcagcgccgccaccgccgccagcagccccgccgccgccgccggcgacagccccgccctgatgaccgacccctgcatgagcctgagccccccctgcttcaccgaggaggacagattcagcctggaggccctgcagaccatccacaagcagatggacgacgacaaggacggcggcatcgaggtggaggagagcgacgagttcatcagagaggacatgaagtacaaggacgccaccaacaagcacagccacctgcacagagaggacaagcacatcaccatcgaggacctgtggaagagatggaagaccagcgaggtgcacaactggaccctggaggacaccctgcagtggctgatcgagttcgtggagctgccccagtacgagaagaacttcagagacaacaacgtgaagggcaccaccctgcccagaatcgccgtgcacgagcccagcttcatgatcagccagctgaagatcagcgacagaagccacagacagaagctgcagctgaaggccctggacgtggtgctgttcggccccctgaccagacccccccacaactggatgaaggacttcatcctgaccgtgagcatcgtgatcggcgtgggcggctgctggttcgcctacacccagaacaagaccagcaaggagcacgtggccaagatgatgaaggacctggagagcctgcagaccgccgagcagagcctgatggacctgcaggagagactggagaaggcccaggaggagaacagaaacgtggccgtggagaagcagaacctggagagaaagatgatggacgagatcaactacgccaaggaggaggcctgcagactgagagagctgagagagggcgccgagtgcgagctgagcagaagacagtacgccgagcaggagctggagcaggtgagaatggccctgaagaaggccgagaaggagttcgagctgagaagcagctggagcgtgcccgacgccctgcagaagtggctgcagctgacccacgaggtggaggtgcagtactacaacatcaagagacagaacgccgagatgcagctggccatcgccaaggacgaggccgagaagatcaagaagaagagaagcaccgtgttcggcaccctgcacgtggcccacagcagcagcctggacgaggtggaccacaagatcctggaggccaagaaggccctgagcgagctgaccacctgcctgagagagagactgttcagatggcagcagatcgagaagatctgcggcttccagatcgcccacaacagcggcctgcccagcctgaccagcagcctgtacagcgaccacagctgggtggtgatgcccagagtgagcatccccccctaccccatcgccggcggcgtggacgacctggacgaggacaccccccccatcgtgagccagttccccggcaccatggccaagccccccggcagcctggccagaagcagcagcctgtgcagaagcagaagaagcatcgtgcccagcagcccccagccccagagagcccagctggccccccacgccccccaccccagccaccccagacacccccaccacccccagcacaccccccacagcctgcccagccccgaccccgacatcctgagcgtgagcagctgccccgccctgtacagaaacgaggaggaggaggaggccatctacttcagcgccgagaagcagtgggaggtgcccgacaccgccagcgagtgcgacagcctgaacagcagcatcggcagaaagcagagcccccccctgagcctggagatctaccagaccctgagccccagaaagatcagcagagacgaggtgagcctggaggacagcagcagaggcgacagccccgtgaccgtggacgtgagctggggcagccccgactgcgtgggcctgaccgagaccaagagcatgatcttcagccccgccagcaaggtgtacaacggcatcctggagaagagctgcagcatgaaccagctgagcagcggcatccccgtgcccaagcccagacacaccagctgcagcagcgccggcaacgacagcaagcccgtgcaggaggcccccagcgtggccagaatcagcagcatcccccacgacctgtgccacaacggcgagaagagcaagaagcccagcaagatcaagagcctgttcaagaagaagagcaagtag

SEQ ID NO: 206187 - DNA, 2502 bp, Artificial Sequence
  derived and/or modified sequence
atgaatgccgccggaattagagcccctgaggcggctggcgcggatggcactcgactggctccaggagggtctccatgtctgcgccggcgcggccgccctgaggagagtcctgcagcggttgtcgctcctaggggcgccggtgaactgcaggctgcgggcgcaccactcaggttccaccccgcatcaccacgcaggctccacccagcctccacccctgggccagcctggggttggctgctccgacgcaggcggtgggcagcacttctggtgctgggcctcctcgtggccggagccgctgatggatgtgagctagtgccacgacatctcagaggtagaagagcgacagggtccgctgccaccgccgcctcctcacctgcagcagcagccggcgacagcccagcgctcatgactgacccctgtatgtctctaagccctccgtgttttacagaggaggatagattcagccttgaagccctgcaaactatacacaagcagatggatgatgataaagacggtggtatagaagtggaggagtcagatgagtttattagggaagacatgaaatataaggacgctacgaacaaacacagtcatctgcatcgtgaagacaagcacatcacgatcgaggatttatggaagcggtggaagacaagcgaagttcacaactggaccctagaagacacacttcaatggctgattgaattcgtcgagttgccacagtacgaaaaaaacttccgcgataacaacgtgaaaggtaccacccttccaagaattgctgtgcacgaaccctcctttatgatctcccagttaaaaatctcagaccgctctcatcgccagaaactccaactgaaggctttggatgtcgtgctatttggccctctgacaaggccaccccacaactggatgaaagacttcatactcacagtgagcatcgttatcggagtcggcggctgttggttcgcctatacccagaacaagacatctaaggagcacgtggctaaaatgatgaaagacctcgaaagcctccagacagctgagcagtctctgatggacctgcaggagcgattggaaaaagcgcaggaggagaatcgaaacgtcgcggtcgaaaagcagaatctggagagaaaaatgatggatgaaattaactacgctaaggaggaagcctgcaggctcagagaactgcgagagggagccgagtgcgaactctccaggcggcagtacgccgaacaggagctggagcaggtgagaatggcacttaaaaaggcagagaaagaattcgaactgagaagcagctggtcggtgcccgatgcactccagaagtggctccagctgacccatgaggtcgaagtgcagtactacaacatcaaacgtcagaacgcagagatgcagctggctattgcgaaagacgaggcagagaagatcaagaagaaaaggagcaccgtctttggtacactccatgtggctcactccagctccctcgatgaagtggatcacaagatccttgaagccaagaaggccttatcggagttaaccacatgcctcagggagaggctgtttagatggcaacagatcgagaagatttgcggcttccagattgcccataattcaggcctcccttcccttacatcctctttgtacagcgaccattcttgggtggtgatgcccagagtcagcattcctccctaccctatcgctggaggtgtcgacgacctggacgaggacacccctcccatcgtgtcacagtttcctggtaccatggctaaaccccccggttctctggctagaagctcatccttgtgccgaagccgtagatccattgtaccctcatccccacagccgcaaagggctcagctcgcgcctcatgcaccccacccgtcacatccccgccatcctcaccatccgcagcataccccacattctctgccctccccagacccagatatcctgagcgtttcctcctgtcctgcactgtatagaaacgaggaggaggaggaggccatatacttcagtgccgagaaacaatgggaagttccggatactgcaagcgagtgcgacagtctgaattcatctattggacgcaagcaatcccccccattaagcttagaaatttaccaaacactctcgcctcgaaagatctcaagggatgaagttagccttgaggattcgagccgcggcgatagcccagtgacagtggacgtgagttgggggtcaccagattgcgtgggattaacagagactaaatcaatgatctttagccccgccagcaaagtatacaacggcatcctcgagaagtcttgttccatgaaccagctgtcctcgggtattccagtgcccaagcctcgccatacttcatgtagcagcgctggcaacgattcaaaacccgttcaggaagcaccctcagttgcccggatatctagcatcccacatgacttgtgccacaatggggagaaaagcaaaaaaccctctaagattaagagccttttcaaaaagaagtcaaaatag

SEQ ID NO: 206188 - DNA, 2241 bp, Artificial Sequence
  derived and/or modified sequence
cttctggtcttaggactgctggtggccggggcagcggatggctgcgaactcgttccccggcatttaagggggcggagagccactgggagcgccgctaccgcagccagctcacccgcagcagccgccggagatagccctgccctgatgacagatccatgcatgtctctgtctcctccatgttttaccgaggaggatagatttagcctagaggcactgcagacaatccacaagcagatggacgatgataaggacggtggcatagaggttgaggaatccgatgagtttatccgtgaagacatgaagtacaaagatgccaccaacaagcatagccacttacaccgtgaggataagcacattaccattgaagacctgtggaagcggtggaaaacatctgaggtacacaattggacccttgaggacaccctccagtggttgatagagttcgtcgaactgcctcaatacgaaaaaaattttagggacaacaatgtcaagggaaccacccttcccagaattgcggtgcacgagccttcatttatgatttcccagttaaagatttcggacaggtctcatagacaaaaactgcaactgaaagcgctggatgtagtgctctttggacccttgactagaccaccacataactggatgaaagatttcatcctgacggtgagtattgtgattggtgtcggggggtgttggtttgcatatacgcagaataagacttccaaagaacacgtcgctaaaatgatgaaggatcttgagtctctacagaccgcggagcaatccctcatggacttgcaggaaagactggagaaagcacaggaggaaaacaggaatgtagcagtggaaaaacagaatttggaaaggaaaatgatggacgagatcaattatgccaaggaggaagcatgcagattaagagaacttagagaaggagctgagtgcgagctgagtagaagacaatatgccgagcaggagctggagcaggttaggatggcactgaagaaggcagaaaaagagtttgaactcagatcttcttggtccgttcccgatgcactgcagaaatggctccagttgactcacgaggtggaggtacagtattacaatatcaagcgccaaaatgcagaaatgcagctcgccattgcgaaggacgaagccgagaaaatcaaaaaaaaacgaagcacagtgttcgggacgttgcacgttgcccactcctcctctctggacgaagtggaccataagatcctggaggctaagaaggctctcagtgaactgacaacgtgcttgcgggaacgcctcttcaggtggcagcagatcgagaagatctgcggatttcagattgcccacaactccgggcttcctagtctgacctcatccctgtatagtgatcatagctgggtcgtaatgccaagagtgagcatcccaccctatccgatcgccgggggagtagatgacttagatgaggatactccccctattgtatcgcagttcccagggaccatggccaagcctcccgggtctctcgcgcgttctagttccctgtgccgcagtcggagatctatcgtgccttcttccccacagccgcagagagcacagttagcacctcatgcaccgcacccatcccatcctcgccatccccaccaccctcagcataccccacattccctacctagtcctgatcctgatatcctctccgtgtcatcatgtccagcactgtaccgcaacgaggaggaggaagaagccatctatttctctgctgagaaacagtgggaggttcccgacactgccagcgaatgtgactcactcaattccagcatcggcagaaagcagtcgccccctctgagtctagagatataccagaccttaagccctcgaaaaataagcagggacgaagtgtcactggaggattcttctaggggggattctcccgttaccgttgacgtctcctggggtagtccagattgtgtcgggctgacggagactaagagcatgatcttcagccctgcctctaaggtttacaatgggatcttggaaaaaagctgcagtatgaaccaactgtcctcaggcatccccgtccccaaacctaggcatacgagttgtagctccgccggcaatgacagcaagcccgtgcaggaagccccatcagtggctagaatttcctctattcctcatgatctctgccacaatggcgaaaagtcgaaaaagccctctaaaattaagagcctcttcaagaagaagtccaaatag

SEQ ID NO: 206189 - DNA, 2502 bp, Artificial Sequence
  derived and/or modified sequence
atgaatgctgctggcatccgggcccctgaggccgccggggctgatggcacccggctggcccctgggggcagcccctgcctgcggcggcggggccggcctgaggagagccctgctgctgtggtggcccccaggggggccggggagctgcaggccgccggggcccccctgcgcttccacccagccagcccccggcggctgcacccagccagcaccccaggccctgcctggggctggctgctgcggcggcggcgctgggccgccctgctggtgctgggcctgctggtggccggggctgctgatggctgtgagctggtgcccaggcacctgcggggccggcgggccactggatctgctgccacagctgccagcagccctgctgctgctgctggggacagccctgccctgatgacagacccctgcatgagcctgagccccccctgcttcacagaagaagatcgcttcagcctggaggccctgcagaccatccacaagcagatggatgatgacaaggatggcggcatcgaggtggaggagagtgatgagttcatccgggaggacatgaagtacaaggatgccaccaacaagcacagccacctgcaccgggaggacaagcacatcaccatcgaggacctgtggaagcgctggaagaccagcgaggtgcacaactggaccctggaggacaccctgcagtggctgattgaatttgtggagctgccccagtatgagaagaacttccgggacaacaacgtgaagggcaccaccctgcccagaattgctgtgcatgagcccagcttcatgatcagccagctgaagatcagtgacaggagccaccggcagaagctgcagctgaaggccctggatgtggtgctgtttggccccctgaccaggcctccccacaactggatgaaggacttcatcctgactgtgtccatcgtgattggagtgggcggctgctggtttgcctacacccagaacaagaccagcaaggagcacgtggccaagatgatgaaggacctggagagcctgcagacagctgagcagagcctgatggacctgcaggagcggctggagaaggcccaggaggagaacagaaatgtggccgtggagaagcagaacctggagaggaagatgatggatgagatcaactatgccaaggaggaggcctgccgcctgcgggagctgcgggagggcgcagaatgtgagctgagccggcggcagtatgcagagcaggagctggagcaggtgaggatggccctgaagaaggccgagaaggagtttgagctgcggagctcctggagcgtgcctgatgccctgcagaagtggctgcagctgacccatgaggtggaggtgcagtactacaacatcaagaggcagaatgctgagatgcagctggccatcgccaaggatgaagctgagaagatcaagaagaagaggagcacagtgtttggcaccctgcacgtggcccacagcagcagcctggatgaggtggaccacaagatcctggaggccaagaaggccctgtctgagctgaccacctgcctgcgggagcggctcttccgctggcagcagatcgagaagatctgtggcttccagatcgcccacaacagcggcctgcccagcctgaccagcagcctgtacagcgaccacagctgggtggtgatgccccgggtgtccatccccccctaccccatcgccggcggcgtggatgacctggatgaggacaccccacccatcgtgtcccagtttcctggcaccatggccaagcccccaggcagcctggcccggagcagcagcctgtgccgcagcagaagaagcatcgtgcccagcagcccccagccccagagggcccagctggcccctcatgccccccaccccagccaccccaggcacccccaccacccccagcacaccccccacagcctgcccagcccagaccctgacatcctgtctgtgagcagctgcccagccctgtacagaaatgaggaggaggaggaggccatctacttctctgctgagaagcagtgggaggtgcctgacacagcctctgaatgtgacagcctgaacagcagcattggaaggaagcagagcccccccctgagcctggagatctaccagaccctgagccccaggaagatcagcagagatgaggtgtccctggaggacagcagcagaggagacagccctgtgacagtggatgtgtcctggggcagcccagactgtgtgggcctgacagagaccaagtccatgatcttctccccagccagcaaggtgtacaacggcatcctggagaagagctgcagcatgaaccagctgagcagcggcatccctgtgcccaagcccaggcacaccagctgcagcagcgctggaaatgacagcaagcctgtgcaggaggcccccagcgtggcccgcatcagcagcatcccccatgacctgtgccacaacggggagaagagcaagaagcccagcaagatcaagagcctcttcaagaagaagagcaagtag

SEQ ID NO: 206190 - DNA, 2241 bp, Artificial Sequence
  derived and/or modified sequence
ctgctggtgctgggcctgctggtggccggggctgctgatggctgtgagctggtgcccaggcacctgcggggcagaagagccaccggcagcgctgccacagctgccagcagccctgctgctgctgctggggacagccctgccctgatgacagacccctgcatgagcctgagccccccctgcttcacagaggaggaccgcttcagcctggaggccctgcagaccatccacaagcagatggatgatgacaaggatggcggcatcgaggtggaggagagtgatgagttcatccgggaggacatgaagtacaaggatgccaccaacaagcacagccacctgcaccgggaggacaagcacatcaccatcgaggacctgtggaagcgctggaagaccagcgaggtgcacaactggaccctggaggacaccctgcagtggctgattgaatttgtggagctgccccagtatgagaagaacttccgggacaacaacgtgaagggcaccaccctgcccagaattgctgtgcatgagcccagcttcatgatcagccagctgaagatcagtgacaggagccaccggcagaagctgcagctgaaggccctggatgtggtgctgtttggccccctgacccggcccccccacaactggatgaaggacttcatcctgactgtgtccatcgtcatcggcgtgggcggctgctggtttgcctacacccagaacaagaccagcaaggagcacgtggccaagatgatgaaggacctggagagcctgcagacagctgagcagagcctgatggacctgcaggagcggctggagaaggcccaggaggagaacagaaatgtggccgtggagaagcagaacctggagaggaagatgatggatgagatcaactatgccaaggaggaggcctgccgcctgcgggagctgcgggagggcgcagaatgtgagctgagccggcggcagtatgcagagcaggagctggagcaggtgaggatggccctgaagaaggccgagaaggagtttgagctgcggagctcctggagcgtgcctgatgccctgcagaagtggctgcagctgacccatgaggtggaggtgcagtactacaacatcaagaggcagaatgctgagatgcagctggccatcgccaaggatgaggccgagaagatcaagaagaagaggagcacagtgtttggcaccctgcacgtggcccacagcagcagcctggatgaggtggaccacaagatcctggaggccaagaaggccctgtctgagctgaccacctgcctgcgggagcggctcttccgctggcagcagatcgagaagatctgtggcttccagatcgcccacaacagcggcctgcccagcctgaccagcagcctgtacagcgaccacagctgggtggtgatgccccgggtgtccatccccccctaccccatcgccggcggcgtggatgacctggatgaggacaccccacccatcgtgtcccagtttcctggcaccatggccaagcccccaggcagcctggcccggagcagcagcctgtgccgcagccgccgcagcatcgtgcccagcagcccccagccccagagggcccagctggccccccacgccccccaccccagccaccccaggcacccccaccacccccagcacaccccccacagcctgcccagcccagaccctgacatcctgtctgtgagcagctgcccagccctgtacagaaatgaggaggaggaggaggccatctacttctctgctgagaagcagtgggaggtgcctgacacagcctctgaatgtgacagcctgaacagcagcatcggcaggaagcagagcccccccctgagcctggagatctaccagaccctgagccccaggaagatcagcagagatgaggtgtccctggaggacagcagcagaggagacagccctgtgacagtggatgtgtcctggggcagcccagactgtgtgggcctgacagagaccaagtccatgatcttcagccctgccagcaaggtgtacaacggcatcctggagaagagctgcagcatgaaccagctgagcagcggcatccctgtgcccaagcccaggcacaccagctgcagcagcgctggaaatgacagcaagcctgtgcaggaggcccccagcgtggcccgcatcagcagcatcccccatgacctgtgccacaatggagagaagagcaagaagcccagcaagatcaagagcctcttcaagaagaagagcaagtag

SEQ ID NO: 206191 - DNA, 2502 bp, Artificial Sequence
  derived and/or modified sequence
atgaacgccgccggcatccgggcccccgaggccgccggcgccgacggcaccaggctggcccccggcggcagcccatgtctacggaggcgggggcggccagaggagagccccgctgcggtggttgccccacggggcgctggagagttacaggccgcgggcgcccccttgagattccaccctgcatctccgcggagattgcacccagcatcgacacctggccccgcctggggttggctcctgcgccggcgacgatgggccgccttgctcgtgctgggactccttgttgccggcgccgctgatggatgcgaattggtcccccgccacctcagggggcgacgtgccacaggatccgccgctaccgctgcatcttcccctgctgcagctgctggggacagcccagcccttatgacagatccctgcatgagcctgtcccccccatgcttcactgaggaagatcgcttttcactggaagccctgcagacaattcacaagcagatggacgacgataaagatggcggtatcgaagtcgaagagtccgacgagtttatcagggaagacatgaaatacaaagacgccaccaataaacattcgcacctgcacagggaggataagcacattacaatcgaagatctttggaagcgatggaagacgtctgaagtgcataattggacccttgaggacacactccagtggctgatcgagtttgtcgagctgccacagtacgaaaaaaatttccgcgacaataatgtgaaaggcactactctccccaggatagccgtgcacgaacccagttttatgattagccagttgaagatatcagatagatcccatagacagaagctccagctcaaggcccttgacgttgtactctttggacctctgactcggccaccccataattggatgaaagactttattctgaccgtatccatcgtcattggagtcggaggatgttggtttgcttacactcaaaataaaacctcaaaagagcatgtggctaagatgatgaaagacctggaaagtctgcagaccgccgagcaaagtttgatggatctgcaggaacggcttgagaaagcccaggaggagaataggaacgtagccgttgagaaacagaaccttgaacggaagatgatggatgagattaactacgccaaggaggaggcttgtagactgcgcgagctacgcgagggagctgaatgtgaactcagccgccgtcagtatgccgaacaagaactggagcaagtacgaatggcccttaaaaaggcagaaaaagagtttgagctgagatcaagctggagcgtgcctgacgctctccagaagtggttacagctgacgcatgaggttgaggtacagtattacaacatcaaacggcagaatgcggaaatgcagttagcgattgcaaaagatgaagcggagaaaataaagaaaaaacggtctaccgtgttcggtaccctgcacgttgcgcactcatcctcactcgatgaagtggaccacaagattctggaggctaaaaaagccctctccgaacttacaacctgcttgcgggaacggttatttcgctggcagcaaatcgaaaaaatttgcggatttcagatagcgcacaattcgggccttcctagcctgacttcttcgctctactctgatcattcctgggtggttatgccacgagtctctatcccgccgtatccaatcgccggtggggttgacgacttggatgaggatacaccccctattgtgtcacaatttcctggtaccatggctaaacctccgggctccctggcaaggagttcttcactctgccgctccaggagatccattgtcccctcgagtcctcagcctcagagagcccagctcgctcctcacgccccacatcctagtcatccgcggcacccccatcatccacagcataccccccactctctgccaagccccgacccggacatcttgtcggtcagctcctgcccggccctttacaggaatgaggaggaagaggaggctatctatttttctgccgaaaagcagtgggaggtgccagatactgcaagtgaatgcgactcattgaacagcagcatcggaaggaaacagagtccgcccctgtccctcgagatatatcagacactgagtccacggaaaatcagcagagacgaagtctccctcgaggacagcagccggggagactctcccgtgacggtggatgtgtcttggggcagtccagattgcgtgggactgacagaaacgaaaagtatgatcttctccccagccagtaaggtctacaacggtatcctggaaaaaagctgcagtatgaatcaactcagttcagggattcctgtacccaaacctcgccacacatcctgttcaagtgccgggaatgattccaaacctgtgcaggaggcgcctagcgtcgcgagaataagttcaatccctcacgacttgtgccacaacggcgagaagtccaagaaaccgagtaaaattaaaagcctcttcaagaagaagtcaaagtag

SEQ ID NO: 206192 - DNA, 2241 bp, Artificial Sequence
  derived and/or modified sequence
ctgctggtgctgggcctgctggtggccggcgccgccgacggctgcgaacttgttcctcgccacttgagagggcgacgggctaccggaagtgccgctaccgccgcgagctcacctgctgcagcggccggagatagcccagccttgatgaccgacccatgcatgtctctctccccaccatgcttcactgaagaagataggttctccctggaggctctgcaaactatacataagcagatggacgatgacaaggatggcgggattgaggttgaggagagcgatgaattcattcgtgaagatatgaaatataaggatgccacaaataagcactcacatcttcacagggaggacaagcacataacaattgaggacctgtggaagaggtggaagaccagtgaagtccataactggaccctcgaagacacgctgcaatggttgatcgaattcgtggaactgccgcagtatgaaaagaacttccgagacaacaatgtcaaaggaacaacgctcccaagaatagcggtccacgagccatcttttatgatcagccagctcaagatcagtgataggagccaccggcagaagttgcagctgaaggctctggatgtcgttcttttcggcccactgacaaggcctccacacaactggatgaaagacttcatcttgaccgttagtatagtgataggtgttgggggttgctggttcgcatacacccagaacaaaacctcaaaggagcacgtggcaaaaatgatgaaagacttggagagcctgcagaccgctgagcaatccctgatggacctgcaagaaaggctggagaaggcccaggaagagaatcggaatgtggctgtggaaaagcaaaacctagaacgcaaaatgatggatgagatcaactatgcaaaggaagaagcgtgcagattgcgggaacttcgagaaggggctgagtgcgagctgtcccggaggcagtacgcagagcaggaactggagcaggtacggatggcactgaaaaaagcagagaaggagtttgaacttaggtcttcttggtccgttccagacgcactccaaaagtggctgcagctcactcatgaagtggaagttcaatattacaacatcaaacgccagaatgctgaaatgcagttagctatcgctaaggatgaggccgagaaaattaagaagaagagatctacagtctttggtaccctgcacgtcgcccattcttcgtctctggacgaagtagaccataaaatccttgaagccaagaaggccttgtccgaacttaccacctgcctcagagagcggttattccgttggcagcagatagaaaaaatttgcgggttccagatcgcccataattccggtctgccaagcctgacatcctccctttacagcgaccattcatgggtggtgatgccccgcgtaagcatcccaccatacccaattgccggtggcgtggatgacttggacgaagacaccccaccaatcgtgagtcagtttcctggtaccatggcaaaaccaccgggtagtcttgctaggtcttcctcgttgtgccgctcgcgccggagtatagtcccttcgtccccccagccacagagggctcagttagccccacacgctcctcacccttcccacccgcgccatccccaccacccccaacacactccacattccttaccctcacccgatccggatatcctcagcgtgtcgagctgtcctgcgctgtaccggaacgaggaggaggaggaggctatttatttttcagctgagaagcagtgggaggtgcccgacaccgcatccgaatgcgactctctaaactcaagcattggaaggaagcagtcccctcctttaagcctcgaaatttaccagacactttccccacggaaaatctctcgcgacgaggtatctcttgaagatagttcccgtggcgacagccccgtcactgttgatgtcagttggggcagcccggattgcgtcggcctaacagagaccaaaagcatgatcttctcccctgccagcaaagtctacaatggcatcctggagaagtcctgttcaatgaaccagctctcgtcggggatacccgtccctaaacctaggcacacctcttgtagctccgccggtaacgactctaaaccagttcaggaagcgccgtccgtggcccgaatttcttctattcctcacgacctgtgccataacggcgaaaaaagcaagaagccaagtaagatcaaaagtcttttcaaaaagaaaagtaagtag

SEQ ID NO: 206193 - DNA, 2502 bp, Artificial Sequence
  derived and/or modified sequence
atgaacgcagctggaattcgggctcctgaagccgctggagcagacggaacaaggttggcacctgggggaagcccctgcttacggagacgaggaagaccagaggagtcgccagcggctgtcgtggcccctaggggagccggagaattacaggcagccggtgcacccttgcggttccaccccgcttcaccgaggaggctccaccctgcgagcacgcccggacccgcatggggatggttgctgcgcaggcgcaggtgggcagctctgctcgtcctgggccttttggttgcaggcgcagccgacggttgcgagctggtgcccagacatttgcggggtcgtcgcgctacagggagcgctgcgactgctgcgagcagtcccgcagctgccgctggagattctcccgcacttatgacggacccatgcatgtcactgtctcctccatgttttacagaggaagatcgttttagtctagaggccctgcagacaatacacaaacaaatggacgatgataaagatgggggtatagaagttgaagagtctgacgagttcatccgcgaagacatgaagtacaaggacgcgactaataagcattcgcatctgcacagggaagacaaacatattacaatcgaagacctctggaagagatggaaaacttcggaagtgcataactggaccctggaagatactctgcaatggttaattgagtttgtcgaattgccacagtacgagaagaacttcagagataataatgtcaagggaaccactcttcctcggatcgctgtccatgaaccatccttcatgattagtcagcttaaaatcagtgatagaagtcaccggcagaaattacagttgaaggccctggacgtagtactgttcggccctctcacacgccctccgcacaactggatgaaggacttcatcctgacggtgagcatagtcatcggagttggcggttgctggttcgcctacacgcagaataaaacatctaaggagcacgtcgctaagatgatgaaggacctggaatctttgcagaccgccgaacagtctttgatggatcttcaggagaggctggagaaggcacaggaggagaatagaaacgttgcagtggaaaaacagaatcttgagcgcaaaatgatggatgaaatcaattacgccaaagaggaagcatgtagactcagagaactgcgggagggggcagagtgtgagctttctcgacgccaatacgctgagcaagagctcgaacaggttcgcatggcgctaaaaaaagcagaaaaagaatttgagctgagatctagttggtccgttcctgacgccctgcaaaagtggttacaactaacccatgaggtggaggtgcagtactacaacattaaacggcagaacgccgagatgcagctggcgatcgccaaggatgaagcggagaaaatcaagaagaaaaggagtaccgtgttcgggactctgcatgtggcccacagcagtagtttagacgaggtagatcacaagatcctggaggccaaaaaagccctttccgagctgacaacttgcctccgcgagcggcttttccggtggcaacaaatcgagaagatttgcgggttccagattgcccacaacagcggcctgccctccctgacctccagcctatactctgaccacagctgggtcgtgatgccaagggtgtctattccaccttatccaatagcaggtggcgtagacgatctagatgaggacacgccccctatagtgagccaatttcccggtacaatggctaaaccccctggctcacttgcgaggtcctcttccctgtgccggtccaggcggtccatcgtgcctagctcaccacagccccaacgggcacaactggcccctcacgccccacaccccagccaccccaggcaccctcaccaccctcagcacacaccacacagcctgccgtcacctgaccccgacatcctgtctgtctcatcatgcccagccctctatcgcaatgaggaggaggaggaagcaatttactttagtgcggaaaagcagtgggaggtccccgataccgcatcagagtgtgattcgctcaatagctccatcggtagaaaacagtcacctcctctcagcctggaaatttatcagaccctctcgcccagaaagatatcgcgagatgaggtgagcttggaggacagcagccggggagactctcctgttacggtcgatgtttcatggggaagccctgattgtgtgggactcaccgagactaaatccatgattttttcgccggctagcaaggtttataacggaattctggagaaatcatgctctatgaatcagctgagttccggaattccggtgcctaaacccaggcacaccagttgctcttcagccggtaatgatagtaaacccgtacaggaagcaccgtctgtggcgagaatctcctccattccccatgatctgtgccacaatggcgagaaaagcaaaaagccgtcaaaaattaaaagtctgttcaagaagaaaagtaagtag

SEQ ID NO: 206194 - DNA, 2241 bp, Artificial Sequence
  derived and/or modified sequence
ctgcttgtcctcggacttctcgtggcaggcgcagcagatgggtgtgagctggttcctaggcatctgcggggacggcgagccactgggtccgcagctactgctgctagttcccccgctgccgctgcgggagattctcccgctcttatgacagacccttgcatgtctttgtctcctccttgtttcacggaagaggaccggttctcactggaagccctccagactattcacaagcagatggacgacgataaagacggtgggattgaggtcgaagagagcgatgagttcattagggaggacatgaaatacaaagatgccaccaataagcattcccacctgcacagagaggacaaacacattaccatagaagacttgtggaagaggtggaagacaagcgaggtccacaattggactttagaagacacactgcagtggttaattgaattcgtggaattgccacagtacgaaaagaattttcgggacaataacgtgaaaggcacgaccctgcctcggatcgctgtccacgaaccatccttcatgatctctcagcttaaaatttcagaccggagccatagacagaaactgcagctgaaagccctggatgtcgtgctgttcggtccgctgacccgacctccccacaactggatgaaggattttattttgaccgtctctattgtaatcggcgtcggcggttgctggtttgcctacactcaaaacaaaacaagtaaagaacacgtggccaagatgatgaaggacttggaatctcttcagactgcagagcaaagcctgatggatctgcaagaaagactggagaaagcacaagaagagaatcgcaacgttgctgtggagaagcagaatctggagcggaaaatgatggacgaaatcaactacgctaaggaggaggcttgtagactccgggagcttcgggagggggctgaatgtgagctcagcaggagacagtacgctgagcaggagctggagcaggtccgcatggcgctgaagaaagcggaaaaggaattcgagctgagatcctcctggagtgttccagacgcactgcaaaaatggttgcaacttactcatgaggtcgaggtgcagtattataatataaagaggcagaatgctgaaatgcagttggccatagctaaggacgaagccgagaaaattaagaaaaagcgaagcacagttttcgggaccctgcatgtagcacacagcagtagcttagatgaggtcgaccacaaaatcctagaggccaaaaaagctctcagcgagctgacaacctgcctaagggagcggctatttcgctggcagcagattgagaaaatatgtggattccaaatcgctcataactcgggactaccttcactcacctcctccctctacagcgatcattcatgggtggtgatgcctagagtcagcatccctccctacccaatcgccggaggggtcgacgatctggatgaggacacccccccaattgtgtcccagtttcccggtacaatggctaagcctcctggatcattggctcgcagctcctccctgtgccggagtcggagatctatcgtgcccagctctcctcaaccccagcgtgcacagcttgccccacacgctccccacccaagtcatccaaggcacccccaccacccccagcacacaccacactccttaccaagtcctgaccctgatatactgtcggtttcctcatgccccgcattatatcgcaacgaagaggaggaggaagcaatctactttagtgcagagaaacagtgggaggtaccagacacagcctctgagtgtgatagtctcaatagtagtattgggagaaaacagagccccccactcagcctcgagatctaccagaccctgtccccccgtaagatatcgcgagacgaggtgagcctggaggattccagccgtggcgattcccccgtgactgtggacgtgtcttggggatcacccgactgtgtcggccttaccgagaccaaatcaatgatattcagcccagcctcaaaggtttacaatggcatcttggagaaatcctgctcaatgaaccagctgtcttccgggatccccgtaccaaagccacggcacacatcttgttcaagcgctggcaatgactctaagcccgtacaggaagccccatctgtggcccgtatttcatctatccctcatgatctgtgccacaatggggaaaagagtaaaaaaccgagcaagatcaagtcgctgttcaagaagaaaagcaagtag

SEQ ID NO: 206195 - DNA, 5154 bp, Artificial Sequence
  derived and/or modified sequence
gaggcgggggattggtatgcgagcgaatgtgcgaggggagggaggcgtcccggcggagcgtggtactacgaccagcgcgggccggagggggcggggggatgcgccgcggcggcggcggcgcgggagctggggttggtgtttggcggcgccagagcagcggatcccggtctcgccgcagcagcagcgcgggtgtcgtgcaccgcctgaagacgccgtacctttctaccccccaccttttttttttttttttttaaataaccggaaccaatgaacgcagccgggatcagagctccggaggccgccggtgccgatgggaccaggctggcgcccggcgggagcccgtgtctgaggcggcgggggcggccggaggagtcgccggcggcggtggtggcgcctcgcggagccggcgagctgcaggcggccggggcgccgctgcgctttcacccggcttctcctcggcgccttcatcccgcctcgactcctggcccagcgtggggctggctgctgcggcggcggcgctgggctgcgttgctggtgctcgggctgctggtagccggagcggcggacggatgcgagcttgtgccccggcacctccgcgggcggcgggcgactggctctgccgcaactgccgcctcctctcccgccgcggcggccggcgatagcccggcgctcatgacagatccctgcatgtcactgagtccaccatgctttacagaagaagacagatttagtctggaagctcttcaaacaatacataaacaaatggatgatgacaaagatggtggaattgaagtagaggaaagtgatgaattcatcagagaagatatgaaatataaagatgctactaataaacacagccatctgcacagagaagataaacatataacgattgaggatttatggaaacgatggaaaacatcagaagttcataattggacccttgaagacactcttcagtggttgatagagtttgttgaactaccccaatatgagaagaattttagagacaacaatgtcaaaggaacgacacttcccaggatagcagtgcacgaaccttcatttatgatctcccagttgaaaatcagtgaccggagtcacagacaaaaacttcagctcaaggcattggatgtggttttgtttggacctctaacacgcccacctcataactggatgaaagattttatcctcacagtttctatagtaattggtgttggaggctgctggtttgcttatacgcagaataagacatcaaaagaacatgttgcaaaaatgatgaaagatttagagagcttacaaactgcagagcaaagtctaatggacttacaggagaggcttgaaaaggcacaggaagaaaacagaaatgttgctgtagaaaagcaaaatttagagcgcaaaatgatggatgaaatcaattatgcaaaggaggaggcttgtcggctgagagagctaagggagggagctgaatgtgaattgagtagacgtcagtatgcagaacaggaattggaacaggttcgcatggctctgaaaaaggccgaaaaagaatttgaactgagaagcagttggtctgttccagatgcacttcagaaatggcttcagttaacacatgaagtagaagtgcaatactacaatattaaaagacaaaacgctgaaatgcagctagctattgctaaagatgaggcagaaaaaattaaaaagaagagaagcacagtctttgggactctgcacgttgcacacagctcctccctagatgaggtagaccacaaaattctggaagcaaagaaagctctctctgagttgacaacttgtttacgagaacgactttttcgctggcaacaaattgagaagatctgtggctttcagatagcccataactcaggactccccagcctgacctcttccctttattctgatcacagctgggtggtgatgcccagagtctccattccaccctatccaattgctggaggagttgatgacttagatgaagacacacccccaatagtgtcacaatttcccgggaccatggctaaacctcctggatcattagccagaagcagcagcctgtgccgttcacgccgcagcattgtgccgtcctcgcctcagcctcagcgagctcagcttgctccacacgccccccacccgtcacaccctcggcaccctcaccacccgcaacacacaccacactccttgccttcccctgatccagatatcctctcagtgtcaagttgccctgcgctttatcgaaatgaagaggaggaagaggccatttacttctctgctgaaaagcaatgggaagtgccagacacagcttcagaatgtgactccttaaattcttccattggaaggaaacagtctcctcctttaagcctcgagatataccaaacattatctccgcgaaagatatcaagagatgaggtgtccctagaggattcctcccgaggggattcgcctgtaactgtggatgtgtcttggggttctcccgactgtgtaggtctgacagaaactaagagtatgatcttcagtcctgcaagcaaagtgtacaatggcattttggagaaatcctgtagcatgaaccagctttccagtggcatcccggtgcctaaacctcgccacacatcatgttcctcagctggcaacgacagtaaaccagttcaggaagccccaagtgttgccagaataagcagcatcccacatgacctttgtcataatggagagaaaagcaaaaagccatcaaaaatcaaaagcctttttaagaagaaatctaagtgaactggctgacttgatggaatcatgttcaagtggcatctgtaaactattatcccccaccctccactccccaccttttttttggtttaattttaggaatgtaactccattggggctttccaggccggatgccatagtggaacatccagaagggcaactgtctactgtctgcttatttaagtgactatatataatcaattcatcaagccagttattactgaaaaatcattgaaatgagacagtttacagtcatttctgcctatttatttctgctttgttctcagtgatgtatatgcaacattttgttgaaagccacgatggacttacaagctttaatggactcgtaagccagcatgggcttgcaaaaatttcttgtttaccagagcatcttcttatctttccacagagctatttacatcctggactatataacttaaaagaagtaaaacgtaattgcactactgttttccagactggaaaaaaaaaaaatctctgcaagtgaaactgtatagagtttataaaatgactatggataggggactgttttcacttttagatcaaaatgggtttttaagtagaacctagggtttctaattgacttgatttctggaaatgaaaacccgcgcttttattatgggaagcttcttgaactgcatttactattgtgaagtttcaagtcccgctgtaaagatcatgttgttttgttttccccagggctttcactgtgatttactgcattgcaggctgtatgataaaacacacataatttaaagagagaaggctcttgattccttatgcaagtggaagagttgaaacttgattgaaggacttaaaacattcacaaccttaagccgaggtggggggatatggggattcaggcaattgtttacacactttgaataactgcaaaggatttacggtttgtgaaaaatgtgtactgtggaaaagataataaattgaagacattattgtgtgggattgtgctgatttttgttgataacacaaaaaacactatgttttctggagagctgtgtaagctgtcttgttgcttagttgcaatataagaaatagtgatgttttggacgtaagttgtcaacaaatttctattttatattgttatatttttatgtagtttgaaatgtaaaaatgttctaatatcaagattaacaaatataaatttatggtgcatttagattgcgttgtattaatttataaagtatggtgttcattaaattggtgggttgtataagggtagcttttgttgttaaaaaaacagtagagagttaagttccatatagcaacaaagtatgttaacatctagggagtttctgcttataccactttaaaaatatgcaatcataagtgatttggttactgcaatgcagatggatgtttggatgaacaactgatacattttagttagaatgctttttcagcattatggctaaaatatatgtctaacccagtgctatttaggtgaaaatgctaattgataaaccagaagtttcttttgagatttgctttaaagaaatgctttagtaagaatatgaacaatttcctgatgtctcctataaattgtgattgtttattctattactattgttaaaaacttgaatggtatttatattggctgatatttatatacttaatagattgagttctgtaagggcaaaaacggattgaaatgaacatagcgttttgcactaatgataagataacctgagaggtagggttgaggaacacagggttgaaagctgttggagaggggaaaagttgtgcataaagaactgaaaagggttctggagtgttcattcagagtgaagggaaaactttatccttctatttcttataaccagacaggaggagttcttccctttgaaaattgcaaaaggaatgagaactttgcagttggatgaatagagaagggaaaagttgctggagcacggagtgaagatgggaggagctgttagcaaggcccactgctgctcctgggtgagaagggagctctggagcaggaccagctgggggccggcactgctgcttagagtggaggaggctggccaaagagactgtgggctgttttcagtcagggagcatgtgcattgtttgtgctcaatttcagacactcatttataaacaaattcaaccaagggatatttactgctttatgttgcttatgataattattttgcattaatacagtatacacatttgtaaattcaacaggaaattattgagttttggaaagctacagtaatttctgtattacatcatttatatgtgaaaagttggacatttctgtaagtttttaaaattatccatttgttactttaacattttaaaattatggtgttttcctgattttaaaagcaatattttccttactgt

SEQ ID NO: 206196 - protein, 514 aa, Artificial Sequence
  derived and/or modified sequence
MDLANHGLILLQQLNAQREFGFLCDCTVAIGDVYFKAHKSVLASFSNYFKMLFVHQTSECVRLKPTDIQPDIFSYLLHLMYTGKMAPQLIDPVRLEQGIKFLHAYPLIQEASLASQGAFSHPDQVFPLASSLYGIQIADHQLRQATKIASAPEKLGRDPRPQTSRISQEQVPEASQLSQLTSNLAQVNRTNMTPSDPLQTSLSPELVSTPVPPPPPGEETNLEASSSDEQPASLTIAHVKPSIMKRNGSFPKYYACHLCGRRFTLRSSLREHLQIHTGVPFTSSQQGESRVPLTLCSNAADLGKDAMEVPEAGMISDSELQHISDSPIIDGQQQSETPPPSDIADIDNLEQADQEREVKRRKYECTICGRKFIQKSHWREHMYIHTGKPFKCSTCDKSFCRANQAARHVCLNQSIDTYTMVDKQTLELCTFEEGSQMDNMLVQTNKPYKCNLCDKTFSTPNEVVKHSCQNQNSDVFALDEGRSILLGSGDSEVTEPDHPVLASIKKEQETVLLD

SEQ ID NO: 206197 - DNA, 3105 bp, Artificial Sequence
  derived and/or modified sequence
cgcggcggcagcagcagcagcagcagcgagaggcagaggcggcggcggcggggaggacagcacggccgaggctgcccagcggcgcctcctccacaccccccgccgcagcagcaccggcgacagattttttaaaaaatggatttggccaaccatggacttattctactgcaacagttaaacgctcagcgagagtttggtttcctgtgtgactgcacggttgcaatcggcgatgtatacttcaaggcacacaaatcagttcttgcttcattctccaattactttaagatgttgtttgtccatcagaccagtgagtgtgtccgcttgaaaccaactgacatacagcccgacatcttcagctatctcttacacttgatgtacactgggaagatggcgcctcagctcatcgacccggttcgattagaacagggcatcaagtttctgcacgcctacccgctcattcaggaagccagcctcgccagccagggagccttttctcaccctgaccaagttttcccactggcttcttcattgtatggcattcagattgcagatcatcagttgagacaagccaccaagattgcttcagcacctgaaaaactcgggcgagatccacggccacagacctccaggataagccaggagcaggtccctgaggcctcacagctctcccagctgacttcaaatctggcccaggtgaatcggacaaatatgactccctcagaccccctgcagacctcgctgtctccagaacttgtttccactcctgttcctccccctcctcccggggaggagaccaatctggaagcatcttcctccgatgagcagcctgcgtccctcacaatagcccacgtcaagccaagcatcatgaagaggaatgggagctttccaaagtactatgcctgccacctgtgtggacggcgcttcactctccggagcagcttacgtgaacacctccagatccacacaggagtacctttcacatctagccaacagggagaaagtcgcgtccccctgactctctgtagcaatgcagctgacctcgggaaagatgccatggaagtgcctgaagccgggatgataagtgacagtgagctgcagcacatctctgattctcccatcatcgatgggcagcagcagtcggaaaccccacccccctcagacattgctgacattgacaacctggagcaggccgaccaggagagggaggtgaagaggcggaagtacgagtgcacaatatgtggacgcaaatttatccagaaaagccactggagggaacacatgtacatacacaccgggaagcctttcaagtgcagcacttgtgacaaaagcttttgcagggccaaccaggctgcccgccacgtgtgcctcaaccagagcatcgacacttacaccatggtggacaaacagactctggaactctgcacatttgaggaagggagtcagatggacaacatgctggtgcaaacaaacaaaccctacaaatgcaacttgtgtgacaaaacattctccactcccaatgaggttgttaaacattcatgccaaaaccagaactcggatgtttttgccctagacgaagggcgatccattctcctgggcagtggggactcggaagtaacggagcctgaccacccagtgttagcttccatcaaaaaggaacaagaaaccgtcttactagactgaatgtcacttatctttttaaaaaactctcatttttacaaagactatcttccctcccttccctgaattcagaactgtagttctccatggcatgatacaaacaggtccttgttctcttctcctcttccccttttccacatcccagccccacctctgtaaaggctttgtgcattataaacctggaatgtatcgactttctttcaggggatattggaaagataatggtcattatacttataaactcaaattttgagaggttttagattattcagaagcatacttggaactaatgaagggtatataataaaacaactggaatccaatttggtaagctaaaattatgactttccctgggtaaaaagtcttctcagaaaaacaatgtcagaaaataacagcgtgctgcttagaaatacggctgggctctgtactatgcaaaatctagaaagtgtggggaaactttaaacccaagaaaacgttcttagtattcatcctccaggtgtcttacttcagaatgcatcctttgagattatgtccacttaagagaaatcatcagttaagaaatctactttaacaaaacaaaaaggagaaaaagtaataatgtgatggcaatcttaatttttgggtacaacatgacaagctgtgagtttgtgtgtttgtaagagaaaaatgtgtgggtacttgctaataaacaggtgaattaatgcacatccttatctcattgctggcttctttccaagttgagcaacaacaaaatgctgtatttgagtttctgacaaatttgttttaaaaatcaaatttgaatgtactattctataaattgcctttctgaatagaacatgacatgccattttctagcagctgccagtgataatttgttttacactaacttttaaatcagtgtgtgtactgcagggaaaaggatataggaatactcatcttacaggggaatttgtgaccagaagatgtagtaacttcaatgactgaaagtcaatgctgatagtttactggcaacattaattgaagcatcaaaaataaatggcaaagagaaatcaggacaaaaaatctaattgctgtttgggaaaaaacttgattttgatgtttattctccaggtttttggttgtttttttttctttcttctttcttaatgcctgaaattttctccattggcccgaaagcagtaaaaattgttcattaatcttccgttaggccaataaaagaagggcctcacaagacaaaacaggagccagaagtaaggactgaaggagaaggggagaatagctaatagctatagtatatgtatatgttaaaaactgaatatcccatcatcctatttcatgtatagttgagttctcaaatttgtaagtttttatacatcctttcattgaataaacgtttaattaaatgagtaaaaaaaaaaaaaaaaaaaa

SEQ ID NO: 206198 - DNA, 1545 bp, Artificial Sequence
  derived and/or modified sequence
atggacctggccaaccacggcctgatcctgctgcagcagctgaacgcccagagagagttcggcttcctgtgcgactgcaccgtggccatcggcgacgtgtacttcaaggcccacaagagcgtgctggccagcttcagcaactacttcaagatgctgttcgtgcaccagaccagcgagtgcgtgagactgaagcccaccgacatccagcccgacatcttcagctacctgctgcacctgatgtacaccggcaagatggccccccagctgatcgaccccgtgagactggagcagggcatcaagttcctgcacgcctaccccctgatccaggaggccagcctggccagccagggcgccttcagccaccccgaccaggtgttccccctggccagcagcctgtacggcatccagatcgccgaccaccagctgagacaggccaccaagatcgccagcgcccccgagaagctgggcagagaccccagaccccagaccagcagaatcagccaggagcaggtgcccgaggccagccagctgagccagctgaccagcaacctggcccaggtgaacagaaccaacatgacccccagcgaccccctgcagaccagcctgagccccgagctggtgagcacccccgtgcccccccccccccccggcgaggagaccaacctggaggccagcagcagcgacgagcagcccgccagcctgaccatcgcccacgtgaagcccagcatcatgaagagaaacggcagcttccccaagtactacgcctgccacctgtgcggcagaagattcaccctgagaagcagcctgagagagcacctgcagatccacaccggcgtgcccttcaccagcagccagcagggcgagagcagagtgcccctgaccctgtgcagcaacgccgccgacctgggcaaggacgccatggaggtgcccgaggccggcatgatcagcgacagcgagctgcagcacatcagcgacagccccatcatcgacggccagcagcagagcgagacccccccccccagcgacatcgccgacatcgacaacctggagcaggccgaccaggagagagaggtgaagagaagaaagtacgagtgcaccatctgcggcagaaagttcatccagaagagccactggagagagcacatgtacatccacaccggcaagcccttcaagtgcagcacctgcgacaagagcttctgcagagccaaccaggccgccagacacgtgtgcctgaaccagagcatcgacacctacaccatggtggacaagcagaccctggagctgtgcaccttcgaggagggcagccagatggacaacatgctggtgcagaccaacaagccctacaagtgcaacctgtgcgacaagaccttcagcacccccaacgaggtggtgaagcacagctgccagaaccagaacagcgacgtgttcgccctggacgagggcagaagcatcctgctgggcagcggcgacagcgaggtgaccgagcccgaccaccccgtgctggccagcatcaagaaggagcaggagaccgtgctgctggactag

SEQ ID NO: 206199 - DNA, 1545 bp, Artificial Sequence
  derived and/or modified sequence
atggatctggcgaatcatggccttatcctgctgcaacagctgaatgcacagcgcgaatttggctttctctgcgactgtaccgtggccatcggagatgtttacttcaaagctcacaaatcagtactagcctctttttcgaattactttaaaatgctcttcgtgcaccagacgtccgagtgtgtgaggctgaaaccaactgatatccaaccggatatcttctcctacttgcttcatctgatgtatactggcaaaatggcaccccagttgatcgacccagtgcgtctggagcagggaatcaagttcctgcacgcctaccctctgatccaggaagcttcactagcaagccagggagcattttcgcatcccgaccaagtgtttcctcttgccagcagtctgtatggaatccagattgccgatcaccagctccggcaggccacaaaaatcgctagtgctccagagaaactgggtcgggaccctcgccctcagacgagtcgtatctcccaggagcaggttcccgaggcatcacagcttagtcagttgacttccaatttggcccaggttaacagaaccaatatgaccccaagtgacccactccaaactagcctgtccccggaattggtgagcacacccgtgcctccacccccccctggggaagaaacaaatttggaggcatcaagtagcgatgagcagccagccagccttaccatcgctcacgtcaagccaagcattatgaaacgcaatgggtctttccccaagtactatgcctgtcacctgtgtggacggaggttcacacttaggagtagtcttagagaacatttacagatacatacaggcgttccctttacctcttcacagcagggtgagtcacgcgtgccactgaccctatgttctaatgctgcggatctgggaaaagacgcaatggaagtacctgaagccgggatgatctctgactctgagctgcagcacatctcagatagtcccattatagacggccagcaacagagtgagaccccgccgccatctgatatcgcagacattgataatctggagcaagcagaccaggaacgggaagtgaagcggcgcaagtatgaatgtactatttgtggacggaagttcattcaaaagtcacactggcgcgagcacatgtacatacataccggcaaaccatttaaatgctcgacatgcgataagtcattttgtcgggcaaatcaagcagcccggcacgtgtgcctaaatcaatccattgacacatatactatggtggataaacagacgctcgagctctgcactttcgaggaaggctctcaaatggataatatgttggtccagaccaacaagccgtataagtgcaacctgtgcgacaaaactttctccacccctaatgaagtggtgaaacacagctgccaaaatcagaactctgacgtgttcgctctcgatgagggacgaagcatcctcctgggaagtggagactccgaggtgaccgagccagatcatcccgtactcgccagcattaagaaagaacaggaaaccgtgctgctggattag

SEQ ID NO: 206200 - DNA, 1545 bp, Artificial Sequence
  derived and/or modified sequence
atggacctggccaaccacggcctcatcctgctgcagcagctgaatgcccagcgggagtttggcttcctgtgtgactgcaccgtggccatcggagatgtgtacttcaaggcccacaagtctgtgctggccagcttcagcaactacttcaagatgctgtttgtgcaccagaccagtgaatgtgtgcggctgaagcccacagacatccagcctgacatcttctcctacctgctgcacctgatgtacaccgggaagatggccccccagctgattgatcctgtgcggctggagcagggcatcaagttcctgcacgcctaccccctcatccaggaggccagcctggccagccagggcgccttcagccacccagaccaggtgttccccctggccagcagcctgtatggcatccagattgctgaccaccagctgcggcaggccaccaagatcgccagcgcccctgagaagctgggccgggacccccggccccagaccagccgcatcagccaggagcaggtgcctgaggccagccagctgagccagctgaccagcaacctggcccaggtgaacagaaccaacatgacccccagcgaccccctgcagaccagcctgagccctgagctggtgtccacccctgtgcccccacctcctcctggagaggagaccaacctggaggccagcagcagtgatgagcagcctgccagcctgaccatcgcccacgtgaagcccagcatcatgaagagaaatggcagcttccccaagtactatgcctgccacctgtgtggccgccgcttcaccctgcggagcagcctgcgggagcacctgcagatccacactggagtgcccttcaccagcagccagcagggcgagagccgggtgcccctgaccctgtgcagcaatgctgctgacctgggcaaggatgccatggaggtgcctgaggccggcatgatcagtgacagcgagctgcagcacatcagtgacagccccatcattgatggccagcagcagagcgagaccccacctccaagtgacattgctgacatcgacaacctggagcaggccgaccaggagcgggaggtgaagaggaggaaatatgagtgcaccatctgtggcaggaagttcatccagaagagccactggagggagcacatgtacatccacacaggcaagcccttcaagtgcagcacctgtgacaagagcttctgccgggccaaccaggccgcccggcacgtgtgcctgaaccagagcattgacacctacaccatggtggacaagcagaccctggagctgtgcacctttgaggagggcagccagatggacaacatgctggtgcagaccaacaagccctacaagtgcaacctgtgtgacaagaccttcagcaccccaaatgaggtggtgaagcacagctgccagaaccagaacagtgatgtgtttgccctggatgagggccgcagcatcctgctgggcagcggggacagcgaggtgacagagccagaccaccctgtgctggccagcatcaagaaggagcaggagaccgtgctgctggactag

SEQ ID NO: 206201 - DNA, 1545 bp, Artificial Sequence
  derived and/or modified sequence
atggacctggccaaccacggcctgatcctgctgcagcagctgaacgctcagcgcgaattcggtttcctttgcgattgtacagtagcgatcggcgacgtctactttaaagcccacaagtcagtgttggcttctttctctaactactttaagatgcttttcgttcaccagacgagcgagtgtgtaaggctaaagcctactgatatacaacctgatattttcagctatctgttgcatttgatgtatacaggaaagatggctccacagctgatcgaccccgtgaggttagagcagggcataaagtttctccacgcctatcctcttatccaggaggcaagcctcgcatcacagggtgccttctctcaccccgaccaagtctttcccctcgcctcatccctgtatggtatccagatcgccgaccaccagctaaggcaggcaaccaagattgcatctgctcccgaaaagctggggcgggatccacgtcctcagacttctaggatctcgcaggaacaagtgcccgaagcctcacagctgagtcagctgacatcaaacttggcccaggtaaatagaaccaatatgactcccagtgacccacttcagacttctctctcccccgagctggtcagcacaccggtcccaccgcctcctccaggggaagaaacgaatttggaagctagttcatccgatgagcagcccgcctccctgaccattgcccacgtgaaaccaagtattatgaaacgcaatggatcttttcctaaatattatgcatgccatctttgtggtcgacggttcaccctgagaagttccctccgcgagcacttgcaaatccacactggggtgccatttacctcaagccaacagggcgagtctcgtgtgccattgaccttatgttccaatgcggcggatctaggaaaagacgctatggaagtccctgaggccggaatgatctccgattctgaactccagcacatttcagacagccccattatcgatggacagcagcagtccgaaacaccccctccctctgacatcgcagacattgacaatttggagcaggcggatcaagaaagagaggttaaaaggagaaaatacgagtgtaccatctgtggacgtaagtttatccagaagtctcattggcgcgagcacatgtatattcataccggcaagccttttaaatgtagtacatgtgataaaagtttttgtcgagccaaccaggccgcgcgccacgtttgtctcaaccaaagcatcgatacatacaccatggtcgataagcagacgttggagctgtgcaccttcgaagagggcagccagatggataacatgctcgtgcaaaccaacaagccttataagtgcaacctgtgcgataaaaccttcagcactccaaatgaggtcgtcaaacatagctgccagaaccagaattcagacgttttcgctctggatgaggggagaagcattctccttggttcgggggacagcgaggtgacggagccagatcatcctgtcctggccagtatcaaaaaagagcaggagaccgtcctgcttgactag

SEQ ID NO: 206202 - DNA, 1545 bp, Artificial Sequence
  derived and/or modified sequence
atggatctcgccaatcatggacttatcctgctccaacaactgaacgcgcaaagggagttcgggtttttgtgcgactgcactgtggctatcggcgacgtgtactttaaagctcacaaatctgtcctcgccagtttttcaaattactttaagatgctgtttgtgcatcaaacatccgagtgcgtgcgacttaaacccacagatatccagcctgacattttcagctatttgctgcaccttatgtatacggggaagatggctccccagctgattgatcctgtgcgtcttgagcagggcattaagttcctgcatgcttatccactcatccaggaagcttctttggctagccagggagcattctcccaccccgatcaagtgtttcctcttgcctcatccttgtacgggattcaaattgcagatcaccagctgaggcaagccacaaagatagcctcagccccagaaaagctcgggagagaccctcgccctcagacatctagaatttctcaggagcaggttcctgaggcatcccaattgagtcagttaacatccaatctcgcacaggtgaataggaccaatatgacccctagcgatcctctccagactagcctttctccagaactggtctcgaccccagttccaccacccccaccgggtgaggagactaatttggaagcatcgagctcagacgaacagccagcttcactaacaattgcccatgttaaaccatctattatgaaacgcaacgggtcatttcctaagtactacgcctgtcacctatgtgggagacgcttcaccttgagaagcagtctgcgtgaacacttacagattcacaccggcgtgccttttaccagctcacagcaaggcgagtcaagggtgcctcttacgctttgcagcaacgctgctgacctaggaaaagacgcaatggaggttcccgaggcgggtatgatctccgacagtgaactgcagcatatttccgactcccccattattgatggtcagcagcagagcgagactcccccaccttctgacatcgccgatattgataatctcgagcaggccgatcaggagcgggaggtaaagagaaggaagtacgagtgtactatctgtggccgaaagtttatccaaaaatctcactggcgggagcacatgtatattcacaccggaaaaccttttaagtgcagcacctgcgataagtctttttgtcgggcaaaccaagccgctcgccacgtttgtctgaatcaatctattgacacgtacacaatggtcgacaaacagaccctggagctttgtacgttcgaggaggggagccagatggacaacatgctggtacaaaccaataagccctacaagtgtaacctttgtgacaaaactttttcaacccccaatgaggtggtcaaacacagttgtcagaaccaaaattcggatgtttttgctcttgatgaggggagatcaatactgttgggctctggagacagcgaagttaccgagccagatcaccctgtactggcatcgatcaagaaggaacaagagactgtactactggactag

SEQ ID NO: 206203 - DNA, 3090 bp, Artificial Sequence
  derived and/or modified sequence
accgaccgcggcggcagcagcagcagcagcagcgagaggcagaggcggcggcggcggggaggacagcacggccgaggctgcccagaggcgcctcctccacaccccccgccgcagcagcaccggcgacagattttttaaaaaatggatttggccaaccatggacttattctactgcaacagttaaacgctcagcgagagtttggtttcctgtgtgactgcacggttgcaatcggcgatgtatacttcaaggcacacaaatcagttcttgcttcattctccaattactttaagatgttgtttgtccatcagaccagtgagtgtgtccgcttgaaaccaactgacatacagcccgacatcttcagctatctcttacacttgatgtacactgggaagatggcgcctcagctcatcgacccggttcgattagaacagggcatcaagtttctgcacgcctacccgctcattcaggaagccagcctcgccagccagggagccttttctcaccctgaccaagttttcccactggcttcttcattgtatggcattcagattgcagatcatcagttgagacaagccaccaagattgcttcagcacctgaaaaactcgggcgagatccacggccacagacctccaggataagccaggagcaggtccctgaggcctcacagctctcccagctgacttcaaatctggcccaggtgaatcggacaaatatgactccctcagaccccctgcagacctcgctgtctccagaacttgtttccactcctgttcctccccctcctcccggggaggagaccaatctggaagcatcttcctccgatgagcagcctgcgtccctcacaatagcccacgtcaagccaagcatcatgaagaggaatgggagctttccaaagtactatgcctgccacctgtgtggacggcgcttcactctccggagcagcttacgtgaacacctccagatccacacaggagtacctttcacatctagccaacagggagaaagtcgcgtccccctgactctctgtagcaatgcagctgacctcgggaaagatgccatggaagtgcctgaagccgggatgataagtgacagtgagctgcagcacatctctgattctcccatcatcgatgggcagcagcagtcggaaaccccacccccctcagacattgctgacattgacaacctggagcaggccgaccaggagagggaggtgaagaggcggaagtacgagtgcacaatatgtggacgcaaatttatccagaaaagccactggagggaacacatgtacatacacaccgggaagcctttcaagtgcagcacttgtgacaaaagcttttgcagggccaaccaggctgcccgccacgtgtgcctcaaccagagcatcgacacttacaccatggtggacaaacagactctggaactctgcacatttgaggaagggagtcagatggacaacatgctggtgcaaacaaacaaaccctacaaatgcaacttgtgtgacaaaacattctccactcccaatgaggttgttaaacattcatgccaaaaccagaactcggatgtttttgccctagacgaagggcgatccattctcctgggcagtggggactcggaagtaacggagcctgaccacccagtgttagcttccatcaaaaaggaacaagaaaccgtcttactagactgaatgtcacttatctttttaaaaaactctcatttttacaaagactatcttccctcccttccctgaattcagaactgtagttctccatggcatgatacaaacaggtccttgttctcttctcctcttccccttttccacatcccagccccacctctgtaaaggctttgtgcattataaacctggaatgtatcgactttctttcaggggatattggaaagataatggtcattatacttataaactcaaattttgagaggttttagattattcagaagcatacttggaactaatgaagggtatataataaaacaactggaatccaatttggtaagctaaaattatgactttccctgggtaaaaagtcttctcagaaaaacaatgtcagaaaataacagcgtgctgcttagaaatacggctgggctctgtactatgcaaaatctagaaagtgtggggaaactttaaacccaagaaaacgttcttagtattcatcctccaggtgtcttacttcagaatgcatcctttgagattatgtccacttaagagaaatcatcagttaagaaatctactttaacaaaacaaaaaggagaaaaagtaataatgtgatggcaatcttaatttttgggtacaacatgacaagctgtgagtttgtgtgtttgtaagagaaaaatgtgtgggtacttgctaataaacaggtgaattaatgcacatccttatctcattgctggcttctttccaagttgagcaacaacaaaatgctgtatttgagtttctgacaaatttgttttaaaaatcaaatttgaatgtactattctataaattgcctttctgaatagaacatgacatgccattttctagcagctgccagtgataatttgttttacactaacttttaaatcagtgtgtgtactgcagggaaaaggatataggaatactcatcttacaggggaatttgtgaccagaagatgtagtaacttcaatgactgaaagtcaatgctgatagtttactggcaacattaattgaagcatcaaaaataaatggcaaagagaaatcaggacaaaaaatctaattgctgtttgggaaaaaacttgattttgatgtttattctccaggtttttggttgtttttttttctttcttctttcttaatgcctgaaattttctccattggcccgaaagcagtaaaaattgttcattaatcttccgttaggccaataaaagaagggcctcacaagacaaaacaggagccagaagtaaggactgaaggagaaggggagaatagctaatagctatagtatatgtatatgttaaaaactgaatatcccatcatcctatttcatgtatagttgagttctcaaatttgtaagtttttatacatcctttcattgaataaacgtttaattaaatgag

SEQ ID NO: 206204 - protein, 1243 aa, Artificial Sequence
  derived and/or modified sequence
METRAAENTAIFMCKCCNLFSPNQSELLSHVSEKHMEEGVNVDEIIIPLRPLSTPEPPNSSKTGDEFLVMKRKRGRPKGSTKKSSTEEELAENIVSPTEDSPLAPEEGNSLPPSSLECSKCCRKFSNTRQLRKHICIIVLNLGEEEGEAGNESDLELEKKCKEDDREKASKRPRSQKTEKVQKISGKEARQLSGAKKPIISVVLTAHEAIPGATKIVPVEAGPPETGATNSETTSADLVPRRGYQEYAIQQTPYEQPMKSSRLGPTQLKIFTCEYCNKVFKFKHSLQAHLRIHTNEKPYKCPQCSYASAIKANLNVHLRKHTGEKFACDYCSFTCLSKGHLKVHIERVHKKIKQHCRFCKKKYSDVKNLIKHIRDAHDPQDKKVKEALDELCLMTREGKRQLLYDCHICERKFKNELDRDRHMLVHGDKWPFACELCGHGATKYQALELHVRKHPFVYVCAVCRKKFVSSIRLRTHIKEVHGAAQEALVFTSSINQSFCLLEPGGDIQQEALGDQLQLVEEEFALQGVNALKEEACPGDTQLEEGRKEPEAPGEMPAPAVHLASPQAESTALPPCELETTVVSSSDLHSQEVVSDDFLLKNDTSSAEAHAAPEKPPDMQHRSSVQTQGEVITLLLSKAQSAGSDQESHGAQSPLGEGQNMAVLSAGDPDPSRCLRSNPAEASDLLPPVAGGGDTITHQPDSCKAAPEHRSGITAFMKVLNSLQKKQMNTSLCERIRKVYGDLECEYCGKLFWYQVHFDMHVRTHTREHLYYCSQCHYSSITKNCLKRHVIQKHSNILLKCPTDGCDYSTPDKYKLQAHLKVHTALDKRSYSCPVCEKSFSEDRLIKSHIKTNHPEVSMSTISEVLGRRVQLKGLIGKRAMKCPYCDFYFMKNGSDLQRHIWAHEGVKPFKCSLCEYATRSKSNLKAHMNRHSTEKTHLCDMCGKKFKSKGTLKSHKLLHTADGKQFKCTVCDYTAAQKPQLLRHMEQHVSFKPFRCAHCHYSCNISGSLKRHYNRKHPNEEYANVGTGELAAEVLIQQGGLKCPVCSFVYGTKWEFNRHLKNKHGLKVVEIDGDPKWETATEAPEEPSTQYLHITEAEEDVQGTQAAVAALQDLRYTSESGDRLDPTAVNILQQIIELGAETHDATALASVVAMAPGTVTVVKQVTEEEPSSNHTVMIQETVQQASVELAEQHHLVVSSDDVEGIETVTVYTQGGEASEFIVYVQEAMQPVEEQAVEQPAQEL

SEQ ID NO: 206205 - DNA, 3678 bp, Artificial Sequence
  derived and/or modified sequence
agtctgagaagaaagggtgtagatggagaggcggtggcctcacctctgcatgctccgtgggaagcggcggaggcgcccagcatccctcctactctgcccttggtggaggtttacgagaaaacacggccatctttatgtgtaaatgttgtaacctcttctcaccaaatcagtcggaactcctctcccacgtttcagagaagcacatggaagaaggggttaatgttgatgagattattattccccttaggcctctgagtacacctgaaccccccaactcaagcaaaaccggagatgagtttttggtcatgaagaggaagagaggcaggcctaaggggtccacgaagaagtccagcacagaagaggagctggcagaaaacatcgtgagtccgactgaggacagcccgctggctccggaggaagggaacagcctgcctccaagcagcttggagtgtagcaagtgctgtcggaagttctccaacacgcgccagctgcggaagcacatctgcattatcgtgctgaatttgggtgaggaggaaggagaagcaggtaacgagtctgaccttgaactagaaaagaagtgtaaggaagatgatcgggaaaaagcctcgaaaagaccacggtcacagaaaacagagaaagtccagaagatctcaggaaaggaggccagacagctttctggggcgaagaaacccatcataagtgtggttttaactgcacacgaagcaattccaggtgctaccaagattgtgccagtggaggctgggccccctgaaacaggagctacaaattctgagaccacttcagcagacctggtgcctcggagaggctaccaggaatacgccattcagcagacaccttatgagcaaccaatgaagtcaagcaggctaggtcccactcagctcaaaatcttcacttgtgaatactgcaacaaggtcttcaagttcaagcactcgctgcaggcccacctgaggatccacaccaatgaaaagccatacaagtgcccccagtgcagctatgccagtgccatcaaggccaacctcaatgtgcacctgcgcaagcacactggagagaagttcgcctgcgactattgctcgttcacctgcctgagcaagggccacctcaaggtgcacatcgagcgagtgcacaagaagatcaagcagcactgccgcttctgcaagaagaagtactctgacgtcaagaacctcatcaagcacatccgagacgcgcatgacccacaggacaagaaggtcaaagaggccttggacgagctctgcctgatgacgagggagggcaagcggcagctgctctatgactgccacatctgtgagcgcaagttcaagaacgagctggtggaagaggagtttgccctccagggcgtgaatgcactcaaggaagaggcctgtcctggggacactcagctggaggagggccggaaggagccggaggcccctggggaaatgcctgccccagctgtgcacctggcctccccgcaggccgaaagcacagccctgccaccctgtgagctggaaaccaccgtggtctcctcctcagacctgcattctcaagaggtggtttcagatgattttttgttgaaaaatgatacctcctccgcagaggctcatgctgctcctgagaagcccccagacatgcagcacagaagctcagtccagacgcaaggtgaagtgatcacactactgctgtccaaggcccagagtgctgggtcagatcaggaaagccatggcgcccagagccccctaggggaagggcagaacatggctgtgctttcagctggtgacccagatcccagcaggtgtctcaggtcaaacccagctgaggcctcagacctcctccctccagtagctggtggtggggacaccatcacacatcagcctgactcttgcaaagctgcccctgagcaccggtcaggcatcaccgctttcatgaaggtcctgaacagtttacagaagaagcaaatgaacaccagcttgtgtgagcggatccggaaggtttatggagacctggagtgtgaatactgtggcaaacttttttggtaccaagtgcattttgatatgcatgtccgcacccacacccgggaacatctgtattattgctctcagtgtcattattcttccatcaccaaaaactgccttaaacgccacgtaattcagaaacacagtaacatcttgctgaagtgtcccaccgatggctgtgactactcaactccagataaatataagctacaggcacatcttaaagttcacacagcactggacaaaaggagttattcttgtcctgtttgtgaaaagtctttttcagaggatcgattgataaagtcacatatcaagaccaaccatcctgaggtctccatgagcaccatttctgaggttctcgggaggagggttcagctgaaagggctaattggaaagagagccatgaaatgcccatattgtgacttttatttcatgaagaatggctcagaccttcagcgtcatatttgggctcatgaaggtgtgaagcccttcaagtgttctttgtgtgagtatgcaactcgtagcaagagtaacctcaaggctcatatgaatcgtcacagcactgagaaaacccacctatgtgacatgtgtggcaagaaattcaaatcaaaagggacactgaaaagtcacaaactccttcacactgcagatgggaagcagtttaagtgcacggtgtgtgactacacagcggcccagaagccacagctgctgcggcacatggaacagcatgtctccttcaagcctttccgctgtgcccattgccattactcctgcaacatatctggctctctgaagcggcactacaacaggaagcaccctaatgaggagtatgccaacgtgggcaccggggagctggcagcggaggtgctcatccagcaaggtggtttgaagtgtcctgtttgcagctttgtatatggcaccaaatgggagttcaataggcacttgaagaacaaacatggcttgaaggtggtggaaattgatggagaccccaagtgggagacagcaacagaagctcctgaggagccctccacccagtatctccacatcacagaggccgaagaagacgttcaagggacacaggcagcggtggccgcgctccaggacctgagatacacctctgagagtggcgaccgactggaccccacggccgtgaacatcctgcagcagatcattgagctgggcgccgagacccatgacgccactgcccttgcctcggtggttgccatggcaccagggacggtgactgtggttaagcaggtcaccgaggaggagcccagctccaaccacacggtcatgatccaggagacggtccagcaagcgtccgtggagcttgccgagcagcaccacctggtggtgtcctccgacgacgtggagggcattgagacggtgactgtctacacgcagggcggggaggcctcggagttcatcgtctacgtgcaggaggccatgcagcctgtggaggagcaggctgtggagcagccggcccaggaactctagaggacatgtggcatcggatggccacagggcggggctgccaggctctgcaggcacccagggtggggaggccacccttcctgccctacccgcagaatggtgctctcctttgccctccctgcccagcagcctgataggactctcctagtccaac

SEQ ID NO: 206206 - DNA, 3732 bp, Artificial Sequence
  derived and/or modified sequence
atggagaccagagccgccgagaacaccgccatcttcatgtgcaagtgctgcaacctgttcagccccaaccagagcgagctgctgagccacgtgagcgagaagcacatggaggagggcgtgaacgtggacgagatcatcatccccctgagacccctgagcacccccgagccccccaacagcagcaagaccggcgacgagttcctggtgatgaagagaaagagaggcagacccaagggcagcaccaagaagagcagcaccgaggaggagctggccgagaacatcgtgagccccaccgaggacagccccctggcccccgaggagggcaacagcctgccccccagcagcctggagtgcagcaagtgctgcagaaagttcagcaacaccagacagctgagaaagcacatctgcatcatcgtgctgaacctgggcgaggaggagggcgaggccggcaacgagagcgacctggagctggagaagaagtgcaaggaggacgacagagagaaggccagcaagagacccagaagccagaagaccgagaaggtgcagaagatcagcggcaaggaggccagacagctgagcggcgccaagaagcccatcatcagcgtggtgctgaccgcccacgaggccatccccggcgccaccaagatcgtgcccgtggaggccggcccccccgagaccggcgccaccaacagcgagaccaccagcgccgacctggtgcccagaagaggctaccaggagtacgccatccagcagaccccctacgagcagcccatgaagagcagcagactgggccccacccagctgaagatcttcacctgcgagtactgcaacaaggtgttcaagttcaagcacagcctgcaggcccacctgagaatccacaccaacgagaagccctacaagtgcccccagtgcagctacgccagcgccatcaaggccaacctgaacgtgcacctgagaaagcacaccggcgagaagttcgcctgcgactactgcagcttcacctgcctgagcaagggccacctgaaggtgcacatcgagagagtgcacaagaagatcaagcagcactgcagattctgcaagaagaagtacagcgacgtgaagaacctgatcaagcacatcagagacgcccacgacccccaggacaagaaggtgaaggaggccctggacgagctgtgcctgatgaccagagagggcaagagacagctgctgtacgactgccacatctgcgagagaaagttcaagaacgagctggacagagacagacacatgctggtgcacggcgacaagtggcccttcgcctgcgagctgtgcggccacggcgccaccaagtaccaggccctggagctgcacgtgagaaagcaccccttcgtgtacgtgtgcgccgtgtgcagaaagaagttcgtgagcagcatcagactgagaacccacatcaaggaggtgcacggcgccgcccaggaggccctggtgttcaccagcagcatcaaccagagcttctgcctgctggagcccggcggcgacatccagcaggaggccctgggcgaccagctgcagctggtggaggaggagttcgccctgcagggcgtgaacgccctgaaggaggaggcctgccccggcgacacccagctggaggagggcagaaaggagcccgaggcccccggcgagatgcccgcccccgccgtgcacctggccagcccccaggccgagagcaccgccctgcccccctgcgagctggagaccaccgtggtgagcagcagcgacctgcacagccaggaggtggtgagcgacgacttcctgctgaagaacgacaccagcagcgccgaggcccacgccgcccccgagaagccccccgacatgcagcacagaagcagcgtgcagacccagggcgaggtgatcaccctgctgctgagcaaggcccagagcgccggcagcgaccaggagagccacggcgcccagagccccctgggcgagggccagaacatggccgtgctgagcgccggcgaccccgaccccagcagatgcctgagaagcaaccccgccgaggccagcgacctgctgccccccgtggccggcggcggcgacaccatcacccaccagcccgacagctgcaaggccgcccccgagcacagaagcggcatcaccgccttcatgaaggtgctgaacagcctgcagaagaagcagatgaacaccagcctgtgcgagagaatcagaaaggtgtacggcgacctggagtgcgagtactgcggcaagctgttctggtaccaggtgcacttcgacatgcacgtgagaacccacaccagagagcacctgtactactgcagccagtgccactacagcagcatcaccaagaactgcctgaagagacacgtgatccagaagcacagcaacatcctgctgaagtgccccaccgacggctgcgactacagcacccccgacaagtacaagctgcaggcccacctgaaggtgcacaccgccctggacaagagaagctacagctgccccgtgtgcgagaagagcttcagcgaggacagactgatcaagagccacatcaagaccaaccaccccgaggtgagcatgagcaccatcagcgaggtgctgggcagaagagtgcagctgaagggcctgatcggcaagagagccatgaagtgcccctactgcgacttctacttcatgaagaacggcagcgacctgcagagacacatctgggcccacgagggcgtgaagcccttcaagtgcagcctgtgcgagtacgccaccagaagcaagagcaacctgaaggcccacatgaacagacacagcaccgagaagacccacctgtgcgacatgtgcggcaagaagttcaagagcaagggcaccctgaagagccacaagctgctgcacaccgccgacggcaagcagttcaagtgcaccgtgtgcgactacaccgccgcccagaagccccagctgctgagacacatggagcagcacgtgagcttcaagcccttcagatgcgcccactgccactacagctgcaacatcagcggcagcctgaagagacactacaacagaaagcaccccaacgaggagtacgccaacgtgggcaccggcgagctggccgccgaggtgctgatccagcagggcggcctgaagtgccccgtgtgcagcttcgtgtacggcaccaagtgggagttcaacagacacctgaagaacaagcacggcctgaaggtggtggagatcgacggcgaccccaagtgggagaccgccaccgaggcccccgaggagcccagcacccagtacctgcacatcaccgaggccgaggaggacgtgcagggcacccaggccgccgtggccgccctgcaggacctgagatacaccagcgagagcggcgacagactggaccccaccgccgtgaacatcctgcagcagatcatcgagctgggcgccgagacccacgacgccaccgccctggccagcgtggtggccatggcccccggcaccgtgaccgtggtgaagcaggtgaccgaggaggagcccagcagcaaccacaccgtgatgatccaggagaccgtgcagcaggccagcgtggagctggccgagcagcaccacctggtggtgagcagcgacgacgtggagggcatcgagaccgtgaccgtgtacacccagggcggcgaggccagcgagttcatcgtgtacgtgcaggaggccatgcagcccgtggaggagcaggccgtggagcagcccgcccaggagctgtag

SEQ ID NO: 206207 - DNA, 3732 bp, Artificial Sequence
  derived and/or modified sequence
atggaaaccagagctgcggagaataccgcgattttcatgtgcaaatgctgtaatctgttctccccgaaccagtccgaactgctcagccacgtgtcagagaaacacatggaggaaggagttaacgttgacgagatcataattccgctacgaccattgagtactccggaaccgccaaactcctccaaaacaggtgatgaatttctggtgatgaaaagaaaacggggacgccctaaggggtcaacaaagaagtccagcacggaggaagagctggccgaaaacattgtttcgcctaccgaggactctccgctggcacctgaggagggcaactccttgcctccaagttcgctggagtgttctaaatgctgcagaaaattctcaaacactcgtcaattaaggaagcatatctgtataatcgtgctgaacctgggtgaagaggaaggtgaagccggaaatgagtctgacctcgaactcgagaaaaaatgtaaggaggatgatcgcgagaaagcctctaagagacctcgcagtcagaagacggaaaaggtacagaagataagtgggaaagaagccagacagctgtccggcgctaagaagcccatcattagtgttgtcctgacagcccacgaggccattccgggcgccaccaagatagtcccagtggaagccgggcctcccgaaactggagcaaccaatagcgagaccacttccgccgacctggtgcccaggcgggggtatcaggaatacgccatacagcagaccccgtatgaacagccgatgaaatctagtcgactggggccaacgcagctcaagatttttacttgcgagtattgtaataaagtgttcaagttcaaacatagtctccaggctcatctccgtatccacacaaatgagaagccatacaagtgcccgcagtgctcgtacgcatcggccatcaaggccaatctgaacgtccatttgcgcaagcatacaggtgagaaattcgcatgcgactactgtagcttcacctgcttaagtaaaggacatctcaaagtgcatattgagcgcgtgcacaagaagatcaagcagcactgtagattctgcaaaaagaagtactccgacgtcaaaaatctgatcaaacatatccgcgacgcacatgatccgcaggacaagaaggtcaaggaagcccttgacgagttgtgcctaatgacacgcgaggggaaaagacaactcttgtacgattgtcacatttgcgagcggaaattcaagaatgaactcgatagagatcgccatatgttggtgcacggagacaagtggccgttcgcatgcgaactttgtggccacggggccactaaataccaagcgctggaactgcatgtgcgaaaacacccattcgtgtacgtgtgcgccgtctgccgcaagaaattcgtctccagcatccgcctaagaacccatatcaaggaagttcacggagcggcccaagaagccctcgtgttcacaagtagcatcaaccagagcttttgtctcttagaaccaggaggagacatccagcaggaagccttaggtgaccagctgcagctcgtcgaagaagagtttgctcttcagggagttaacgctctgaaggaggaggcctgcccaggtgacacacagctcgaagagggacgcaaagagcccgaggcaccaggcgagatgccagcacctgcagtgcacctggccagtccacaggccgagtctaccgcgcttccaccttgcgagctggaaaccacggtggtttcctcgtccgatctgcatagtcaagaagtagtttctgacgacttcctgttgaaaaatgacacctcttcggccgaggcccacgccgcaccagaaaagcctcccgacatgcagcacagatcatccgtacagactcaaggagaggtaataaccctcctcctttccaaggcccagtcagcggggtccgatcaggaatctcacggagcccagtcacctctgggggaggggcaaaatatggcagttctctctgccggagatcctgaccccagcaggtgcttaagatccaaccctgccgaggcatcagaccttctgcctcccgttgccggagggggagacacaattacccatcagccagattcttgtaaggctgcacccgaacaccgctcaggcataacagcctttatgaaggttctgaatagcctgcagaagaagcagatgaacacgagcctgtgtgagagaatacgtaaggtgtacggcgacttggaatgcgagtactgcggaaagctgttctggtaccaagtgcattttgacatgcacgtccgcacccacaccagagagcacctgtattattgttcacaatgccattacagtagcattacaaaaaactgtctgaaaaggcacgtgatccaaaagcattccaacattctgttaaaatgcccgactgacggttgcgactactctacaccagacaagtacaaattacaagcccacctaaaggtacacactgccctcgataagcgctcctatagttgccctgtgtgcgagaaatccttttctgaggatagactgatcaagagccatataaagacaaaccaccctgaggtgtcaatgtccaccataagcgaggtgctaggaaggcgggtccagctgaagggacttattggaaaacgagcaatgaagtgtccttattgcgacttctacttcatgaaaaatggaagtgatctgcagcgccacatctgggctcatgagggtgttaagcccttcaagtgctctttgtgtgaatacgccacgagaagtaaatctaatttgaaggctcacatgaacaggcatagcacagagaaaacccacctctgtgatatgtgcggaaagaagttcaagagcaagggcaccctaaagtcccataagctgctgcatacagcagatggaaaacagtttaagtgtactgtgtgcgattacaccgcggctcaaaagccccagttgctcagacatatggaacaacacgtgagctttaaacctttccggtgtgcccactgtcactatagctgcaacatttccggcagtctcaagagacattacaatcgtaagcacccaaacgaggaatatgcaaatgttggcaccggagagcttgcagctgaggtattaatccagcagggtggactgaaatgccccgtgtgctctttcgtttatggcacgaagtgggaattcaatcgccacctcaaaaacaagcacggacttaaggttgttgaaattgatggagaccccaagtgggagacagctactgaagcacccgaggagccatctacacaatatttgcatattacagaggcagaggaagatgtccaaggtacccaggccgccgtggctgctcttcaggaccttcgctacactagtgagagcggagatcggctagacccaacagcggttaacattctgcaacagatcattgaacttggggctgaaacacatgatgccacggctttggctagtgtggtcgctatggcccccggcaccgtgaccgtggtcaagcaggttacagaggaagaaccttcttcaaatcataccgtcatgatccaagaaaccgtccagcaggcgtccgtagaactggccgagcagcatcaccttgtggtgtcctcagacgacgtcgagggaatcgagacggtgacagtgtatacacagggcggggaagcatctgaatttatcgtctatgtgcaggaagcgatgcagccagtggaggagcaggccgtggaacaacccgcgcaggaactatag

SEQ ID NO: 206208 - DNA, 3732 bp, Artificial Sequence
  derived and/or modified sequence
atggagaccagggctgctgaaaatacagccatcttcatgtgcaagtgctgcaacctcttcagccccaaccagagcgagctgctgagccacgtgtctgagaagcacatggaggagggcgtgaatgtggatgagatcatcatccccctgcggcccctgagcaccccagagccccccaacagcagcaagacaggagatgagttcctggtgatgaagaggaagaggggccggcccaagggcagcaccaagaagagcagcacagaggaggagctggccgagaacatcgtgagccccacagaggacagccccctggcccctgaggagggcaacagcctgccccccagcagcctggagtgcagcaagtgctgcaggaagttcagcaacacccggcagctgaggaagcacatctgcatcatcgtgctgaacctgggggaggaggagggggaggccggaaatgaaagtgacctggagctggagaagaagtgcaaggaggatgaccgggagaaggccagcaagaggcccaggagccagaagacagagaaggtgcagaagatcagcggcaaggaggcccggcagctgagcggggccaagaagcccatcatctctgtggtgctgacagcccacgaggccatccctggggccaccaagatcgtgcctgtggaggccggccccccagagaccggggccaccaacagcgagaccaccagcgctgacctggtgccccggcggggctaccaggagtatgccatccagcagaccccctatgagcagcccatgaagagcagccggctgggccccacccagctgaagatcttcacctgtgagtactgcaacaaggtgttcaagttcaagcacagcctgcaggcccacctgcgcatccacaccaatgagaagccctacaagtgcccccagtgcagctatgccagcgccatcaaggccaacctgaatgtgcacctgaggaagcacactggagagaagtttgcctgtgactactgcagcttcacctgcctgagcaagggccacctgaaggtgcacatcgagcgggtgcacaagaagatcaagcagcactgccgcttctgcaagaagaagtacagtgatgtgaagaacctgatcaagcacatcagagatgcccatgacccccaggacaagaaggtgaaggaggccctggatgagctgtgcctgatgacccgggagggcaagaggcagctgctgtatgactgccacatctgtgagaggaagttcaagaatgagctggaccgggacagacacatgctggtgcacggggacaagtggccctttgcctgtgagctgtgtggccatggagccaccaagtaccaggccctggagctgcacgtgaggaagcacccctttgtgtatgtgtgtgctgtgtgcaggaagaagtttgtgagcagcatccggctgcggacccacatcaaggaggtgcatggagctgcccaggaggccctggtgttcaccagcagcatcaaccagagcttctgcctgctggagcctggaggagacatccagcaggaggccctgggggaccagctgcagctggtggaggaggagtttgccctgcagggcgtgaatgccctgaaggaggaggcctgccctggggacacccagctggaggagggcaggaaggagcctgaggcccctggagagatgcctgccccagctgtgcacctggccagcccccaggccgagagcacagccctgcccccctgtgagctggagaccaccgtggtgagcagcagtgacctgcacagccaggaggtggtgtctgatgacttcctgctgaagaatgacaccagcagcgctgaggcccacgccgcccctgagaagcccccagacatgcagcacaggagctctgtgcagacccagggcgaggtgatcaccctgctgctgagcaaggcccagagcgctggcagtgaccaggagagccacggggcccagagccccctgggggagggccagaacatggctgtgctgtctgctggggaccctgaccccagccgctgcctgcggagcaacccagctgaggccagtgacctgctgccccctgtggccggcggcggggacaccatcacccaccagcctgacagctgcaaggccgcccctgagcacaggagcggcatcacagccttcatgaaggtgctgaacagcctgcagaagaagcagatgaacaccagcctgtgtgagcgcatcaggaaggtgtatggagacctggagtgtgagtactgcggcaagctgttctggtaccaggtgcactttgacatgcacgtgaggacccacacccgggagcacctgtactactgcagccagtgccactacagcagcatcaccaagaactgcctgaagagacatgtgatccagaagcacagcaacatcctgctgaagtgccccacagatggctgtgactacagcaccccagacaagtacaagctgcaggcccacctgaaggtgcacacagccctggacaagaggagctacagctgccctgtgtgtgagaagagcttctctgaagatagactcatcaagagccacatcaagaccaaccaccctgaggtgtccatgagcaccatcagcgaggtgctgggcagaagagtgcagctgaagggcctgattggcaagagggccatgaagtgcccctactgtgacttctacttcatgaagaatggaagtgacctgcagaggcacatctgggcccatgaaggagtgaagcccttcaagtgcagcctgtgtgaatatgccaccaggagcaagagcaacctgaaggcccacatgaacagacacagcacagagaagacccacctgtgtgacatgtgtgggaagaagttcaagagcaagggcaccctgaagagccacaagctgctgcacacagcagatggcaagcagttcaagtgcaccgtgtgtgactacacagctgcccagaagccccagctgctgcggcacatggagcagcacgtgtccttcaagcccttccgctgtgcccactgccactacagctgcaacatcagcggcagcctgaagaggcactacaacaggaagcaccccaatgaggagtatgccaacgtgggcactggagagctggccgctgaggtgctgatccagcagggcggcctgaagtgccctgtgtgcagctttgtgtatggcaccaagtgggagttcaacagacacctgaagaacaagcacggcctgaaggtggtggagattgatggagaccccaagtgggagacagccacagaggcccctgaggagcccagcacccagtacctgcacatcacagaagcagaagaagatgtgcagggcacccaggccgctgtggccgccctgcaggacctgcgctacaccagcgagagcggggaccggctggaccccacagctgtgaacatcctgcagcagatcatcgagctgggcgctgagacccatgatgccacagccctggcctctgtggtggccatggcccctggcaccgtgacagtggtgaagcaggtgacagaggaggagcccagcagcaaccacacagtgatgatccaggagaccgtgcagcaggcctctgtggagctggccgagcagcaccacctggtggtgtccagtgatgatgtggagggcattgaaacagtgacagtgtacacccagggcggggaggccagcgagttcatcgtgtatgtgcaggaggccatgcagcctgtggaggagcaggccgtggagcagcctgcccaggagctgtag

SEQ ID NO: 206209 - DNA, 4597 bp, Artificial Sequence
  derived and/or modified sequence
agactccatccgccatgttggatgccgcagattcgccataacctcgccggctcttttcttaaaaaaataaaaataaaaagcgaagcgtcagcagggcgccccgccccctcggtcggcacgggagggggcccggaagagcccgaggcttttttttcctccgcggtggggcgttgccatggagacgcgggcggcagaaaacacggccatctttatgtgtaaatgttgtaacctcttctcaccaaatcagtcggaactcctctcccacgtttcagagaagcacatggaagaaggggttaatgttgatgagattattattccccttaggcctctgagtacacctgaaccccccaactcaagcaaaaccggagatgagtttttggtcatgaagaggaagagaggcaggcctaaggggtccacgaagaagtccagcacagaagaggagctggcagaaaacatcgtgagtccgactgaggacagcccgctggctccggaggaagggaacagcctgcctccaagcagcttggagtgtagcaagtgctgtcggaagttctccaacacgcgccagctgcggaagcacatctgcattatcgtgctgaatttgggtgaggaggaaggagaagcaggtaacgagtctgaccttgaactagaaaagaagtgtaaggaagatgatcgggaaaaagcctcgaaaagaccacggtcacagaaaacagagaaagtccagaagatctcaggaaaggaggccagacagctttctggggcgaagaaacccatcataagtgtggttttaactgcacacgaagcaattccaggtgctaccaagattgtgccagtggaggctgggccccctgaaacaggagctacaaattctgagaccacttcagcagacctggtgcctcggagaggctaccaggaatacgccattcagcagacaccttatgagcaaccaatgaagtcaagcaggctaggtcccactcagctcaaaatcttcacttgtgaatactgcaacaaggtcttcaagttcaagcactcgctgcaggcccacctgaggatccacaccaatgaaaagccatacaagtgcccccagtgcagctatgccagtgccatcaaggccaacctcaatgtgcacctgcgcaagcacactggagagaagttcgcctgcgactattgctcgttcacctgcctgagcaagggccacctcaaggtgcacatcgagcgagtgcacaagaagatcaagcagcactgccgcttctgcaagaagaagtactctgacgtcaagaacctcatcaagcacatccgagacgcgcatgacccacaggacaagaaggtcaaagaggccttggacgagctctgcctgatgacgagggagggcaagcggcagctgctctatgactgccacatctgtgagcgcaagttcaagaacgagctggaccgtgaccgccatatgctggtccacggagacaagtggccttttgcctgtgagctctgtggccatggggccaccaagtaccaggcgctggaactgcatgtcaggaagcaccccttcgtgtacgtctgtgccgtctgccgcaagaagttcgtcagctccatcaggctgcgcacccacatcaaagaggtgcacggggctgcccaggaggccttggtcttcaccagttccatcaaccagagcttctgcctcctggaacctggtggggacatccagcaagaagctctgggggaccagctacagctggtggaagaggagtttgccctccagggcgtgaatgcactcaaggaagaggcctgtcctggggacactcagctggaggagggccggaaggagccggaggcccctggggaaatgcctgccccagctgtgcacctggcctccccgcaggccgaaagcacagccctgccaccctgtgagctggaaaccaccgtggtctcctcctcagacctgcattctcaagaggtggtttcagatgattttttgttgaaaaatgatacctcctccgcagaggctcatgctgctcctgagaagcccccagacatgcagcacagaagctcagtccagacgcaaggtgaagtgatcacactactgctgtccaaggcccagagtgctgggtcagatcaggaaagccatggcgcccagagccccctaggggaagggcagaacatggctgtgctttcagctggtgacccagatcccagcaggtgtctcaggtcaaacccagctgaggcctcagacctcctccctccagtagctggtggtggggacaccatcacacatcagcctgactcttgcaaagctgcccctgagcaccggtcaggcatcaccgctttcatgaaggtcctgaacagtttacagaagaagcaaatgaacaccagcttgtgtgagcggatccggaaggtttatggagacctggagtgtgaatactgtggcaaacttttttggtaccaagtgcattttgatatgcatgtccgcacccacacccgggaacatctgtattattgctctcagtgtcattattcttccatcaccaaaaactgccttaaacgccacgtaattcagaaacacagtaacatcttgctgaagtgtcccaccgatggctgtgactactcaactccagataaatataagctacaggcacatcttaaagttcacacagcactggacaaaaggagttattcttgtcctgtttgtgaaaagtctttttcagaggatcgattgataaagtcacatatcaagaccaaccatcctgaggtctccatgagcaccatttctgaggttctcgggaggagggttcagctgaaagggctaattggaaagagagccatgaaatgcccatattgtgacttttatttcatgaagaatggctcagaccttcagcgtcatatttgggctcatgaaggtgtgaagcccttcaagtgttctttgtgtgagtatgcaactcgtagcaagagtaacctcaaggctcatatgaatcgtcacagcactgagaaaacccacctatgtgacatgtgtggcaagaaattcaaatcaaaagggacactgaaaagtcacaaactccttcacactgcagatgggaagcagtttaagtgcacggtgtgtgactacacagcggcccagaagccacagctgctgcggcacatggaacagcatgtctccttcaagcctttccgctgtgcccattgccattactcctgcaacatatctggctctctgaagcggcactacaacaggaagcaccctaatgaggagtatgccaacgtgggcaccggggagctggcagcggaggtgctcatccagcaaggtggtttgaagtgtcctgtttgcagctttgtatatggcaccaaatgggagttcaataggcacttgaagaacaaacatggcttgaaggtggtggaaattgatggagaccccaagtgggagacagcaacagaagctcctgaggagccctccacccagtatctccacatcacagaggccgaagaagacgttcaagggacacaggcagcggtggccgcgctccaggacctgagatacacctctgagagtggcgaccgactggaccccacggccgtgaacatcctgcagcagatcattgagctgggcgccgagacccatgacgccactgcccttgcctcggtggttgccatggcaccagggacggtgactgtggttaagcaggtcaccgaggaggagcccagctccaaccacacggtcatgatccaggagacggtccagcaagcgtccgtggagcttgccgagcagcaccacctggtggtgtcctccgacgacgtggagggcattgagacggtgactgtctacacgcagggcggggaggcctcggagttcatcgtctacgtgcaggaggccatgcagcctgtggaggagcaggctgtggagcagccggcccaggaactctagaggacatgtggcatcggatggccacagggcggggctgccaggctctgcaggcacccagggtggggaggccacccttcctgccctacccgcagaatggtgctctcctttgccctccctgcccagcagcctgataggactctcctagtccaacttggggtgggcaaggcagtcagcatcaccagcaataccacaggaccctcaccccagcatagacacacaccccctgacccttaccatctgcttcctgaaagacttcagtgtcagctcccctacacacaccccacaccttcaccccttgcttcaagattcaaacagagactcccagtccccctcagcatcttccctgaatcacagccccagctccttgacccccatctaggtgccaaatgttcatctgcaaccgctatgcagtctggtgagagggagacagccatcacatagaaagtgaccgtacgggtttttaatcactgctgggtggggtgggggtagggggattgtcctggctttgtcgacaaagtcccacttccccgagtattaagggcccttggtatcaagtgaggtaaattcacccatcacagggtctcgccctaccatcctggaattatttcacttttaagataaatgcactatttcactgttcgcctcccattctaaggaggtgaggtggttggaataaaaacagttcctgtc

SEQ ID NO: 206210 - DNA, 3732 bp, Artificial Sequence
  derived and/or modified sequence
atggagacccgggccgccgagaacaccgccatcttcatgtgcaagtgctgtaatttattcagccccaaccagagcgaacttctaagtcacgtgagtgagaaacatatggaagagggggtgaacgtcgatgaaattatcatccctctgaggcccctctccaccccggaaccgccgaattcttccaaaaccggagacgagttcctcgtgatgaaacggaagaggggcaggccgaaaggctcaacaaagaagtcaagcactgaggaagagcttgccgagaatattgtgtccccaactgaggattcccctctcgcaccagaggaaggcaattccttacctcctagttctcttgagtgctcaaaatgttgccgaaaattttcgaacactcgccagctgaggaagcatatatgcataatagtgctcaatctcggtgaggaagaaggcgaagcaggcaacgagagcgatctggaactggaaaaaaagtgtaaagaagacgaccgcgagaaagcatccaagcggccgaggagtcaaaagaccgagaaagtccagaagatttccggaaaggaggcacgtcagttatccggcgcaaagaagcccatcatctcggtagtgctgaccgctcacgaagccattcctggtgccacaaagatcgtgcccgtagaggctgggccaccggaaacaggagctacaaactccgagacaacatcagctgacctggtgcctcgccgcggctatcaagagtacgctatacaacaaactccatatgagcaacccatgaagagttcgagactgggacccacacagctcaagatcttcacgtgcgagtattgcaacaaagtgttcaagttcaaacattccctccaggcccacttgagaatccacacgaacgaaaaaccatataaatgtccccagtgctcctacgcatccgctataaaagcaaatctgaatgtgcacctaaggaagcacacaggtgaaaagtttgcatgtgattattgctcattcacatgcctctcgaaggggcatttgaaagtgcacatagagcgagtgcacaagaaaattaaacaacactgccggttttgcaaaaagaagtattctgacgtgaagaacctgatcaaacacatacgagacgcccatgacccccaagacaagaaggtcaaggaggcattagacgagttatgcttgatgacaagggaaggcaaaagacagcttctgtacgattgtcatatctgtgagaggaaatttaagaacgagttggaccgagacaggcatatgctggtccacggcgataagtggcccttcgcctgtgaactgtgcggccacggagccacaaagtatcaggctttggaattgcacgtgagaaagcacccttttgtctacgtgtgcgctgtttgtagaaagaagtttgtgtcttcaattagactgcgaacccatatcaaggaggttcacggcgcagctcaggaagcgctcgtcttcacgtccagcattaaccaatcattctgcctcttggagccaggcggtgacattcaacaggaggctctgggcgaccaactgcagttggtggaagaggaattcgcgctccaaggtgtgaacgccttgaaagaggaggcctgtcccggcgacacgcagctcgaagagggaagaaaggagcccgaggcacctggggagatgccggcacctgcggttcacttggctagcccccaagctgaatccaccgctctgccgccttgcgaactagaaaccacagttgtgagttccagcgacctgcactcccaagaagtggttagcgacgattttcttctgaaaaatgatacctccagcgctgaagctcatgccgcccctgaaaaaccacctgatatgcaacacagaagttcagttcagacgcagggggaagttatcaccctcctgctgagcaaggcccagtcagcaggtagtgaccaggaatctcacggcgctcagtctccactgggggaaggtcagaacatggccgtgttgagcgcaggcgaccctgacccaagtcgctgcctcaggtccaaccctgctgaggcttccgacttgctgcccccggtcgcaggtggtggcgatactattacccatcagcccgatagctgtaaggctgccccagagcatcgttccggcattaccgcattcatgaaggtgctcaatagcttgcagaagaaacagatgaatacgtcactttgcgaacgaatcaggaaagtgtacggcgatctcgagtgcgagtattgtggtaagctcttttggtatcaagttcattttgacatgcatgtgcgcacacacacacgagagcacctttactactgctcacagtgccactattcatcaattactaagaactgtctgaaacgacacgtaattcaaaagcactctaatatcctgctgaagtgccccactgacggatgtgattacagcacaccagacaaatataagcttcaagcccacctgaaggttcataccgccctggacaaacggagctatagttgcccagtctgtgagaaaagctttagcgaagatcgcctcattaagtctcacattaagacaaaccaccccgaggtttcaatgagtaccatctctgaagtgctcggccgcagggtccagctgaaaggactgatagggaaacgcgctatgaagtgtccttactgcgacttttattttatgaaaaatggaagcgacctccagcgccacatttgggcacacgagggtgtgaagccgttcaagtgttctctctgcgagtacgccacgcgtagtaagagcaacttgaaagcccacatgaatagacattccaccgagaagacgcacctctgcgatatgtgcggcaagaaatttaagagcaaaggcactctcaagagccacaaactccttcatacggcggatgggaaacagttcaaatgcaccgtctgcgactataccgctgctcaaaaaccccaacttttgaggcatatggagcagcacgtgtccttcaagccattcaggtgtgcccactgtcattactcatgcaatatctctgggtcgctgaagcgacattacaacaggaagcatcccaacgaggaatatgcaaatgttggtaccggcgaactggccgctgaggtgttgatccagcagggcggcctgaagtgccccgtgtgctcatttgtgtacggcactaaatgggaattcaataggcatctgaagaacaaacacggactaaaggtagtggaaatcgatggggatcctaaatgggaaacagcgacagaagcccccgaagagcccagtactcagtacttgcatatcacagaggcagaagaagacgtgcagggtacccaggcggccgttgcagccctgcaggatctgaggtacacgtccgaatcaggggatcgactggaccccacggcggttaatattttgcaacaaattattgagctgggagccgaaacacacgacgccacagcactagcctcagtagttgctatggctcctggaacagttacggtcgtgaagcaagtgactgaagaagagccgagctcaaaccataccgtcatgattcaggaaaccgttcaacaggcatccgtggagttggctgaacagcaccatctcgtcgtctcctccgatgatgtggaaggtatcgagactgtgaccgtctacacccagggaggagaagcaagtgaatttatagtttatgtgcaggaagcaatgcagccagtagaggaacaggccgtggagcagccagcgcaggaattatag

SEQ ID NO: 206211 - DNA, 3732 bp, Artificial Sequence
  derived and/or modified sequence
atggaaactagagcggctgagaatactgccattttcatgtgcaagtgctgcaacctcttctccccaaaccagagcgagctgctgagtcatgtgtcagagaagcatatggaagaaggagttaatgtggacgagataataattccattacgtcctctgtcaaccccagaacccccaaatagctccaaaacaggcgacgaattccttgtcatgaaaagaaaacgaggacgtcccaaggggtcaactaagaagtcctctaccgaggaagaattggcggagaatattgtcagccctaccgaagactctcctcttgctccagaggagggtaactctctgccaccatcctctcttgagtgtagcaagtgttgcagaaaattctccaataccaggcagctgaggaagcatatctgcattattgttctgaacctcggggaggaggagggggaggcgggaaacgaatctgatcttgaattggaaaaaaagtgtaaagaggatgatcgagagaaggcaagtaaacggcctagaagtcagaaaacggagaaagttcaaaaaatcagcgggaaggaggcccgtcagttgtccggagccaagaaaccaattatctctgttgttctgaccgcccatgaagcaattcccggagctaccaagatcgttccggttgaggcaggtcctccagagaccggggctacaaattccgagaccacaagtgctgatcttgtgccacgcagaggctatcaggagtacgccattcaacaaacgccctacgaacagccaatgaaatccagccggctaggacctacacagttgaagattttcacttgtgagtattgtaacaaagtcttcaagttcaagcattctctgcaggctcacctgcgcattcacaccaatgagaaaccctataagtgtccgcaatgctcatacgcctccgctatcaaagccaacctcaacgtccatctgcggaagcacacgggggagaagttcgcctgcgattattgctccttcacctgtctgtcgaaaggacacctcaaagtccacattgaacgggtccacaagaaaattaagcagcattgccggttctgcaagaaaaaatattctgacgtgaaaaacctaatcaaacacatccgtgatgcccatgatcctcaggacaagaaagtcaaggaagccctggatgaactttgcctaatgactcgggaaggaaagaggcagctgctctatgattgtcacatttgcgagagaaaattcaagaacgaactggaccgggacagacatatgcttgtgcatggagataagtggccatttgcctgtgaattgtgtggacatggtgctacaaagtaccaggctctggaattacatgtgcggaagcacccttttgtgtacgtttgcgcagtctgtcgcaagaaattcgtttctagcatcaggttgagaacccatatcaaggaagtccacggagctgcccaggaagcactggtgttcacaagcagcatcaaccagtccttctgtttactcgagccgggaggagatatccaacaggaagctttgggcgaccaactgcagctcgtggaggaagagttcgcactccagggcgtaaacgccctgaaggaagaggcctgccccggtgatacccaacttgaggagggtaggaaggaacctgaagcccctggcgagatgccagctcctgccgttcatttagcaagtcctcaggcagaatccaccgccctccctccctgcgagctggagactaccgtggttagctcaagtgacctgcactctcaagaggtcgtctctgacgactttttgctcaagaacgataccagctctgcagaagcccacgcagccccagaaaaacctcccgatatgcagcaccgaagctccgtgcagactcagggagaggttataactctgctcttaagcaaggcgcagagcgcgggatcagaccaggaatcgcatggtgcccaatcaccattgggcgagggacagaatatggcggtgttatcagccggagacccagacccctcccgctgtcttaggagtaatcccgcagaggcatctgacctcctgccaccagtggctggtggcggtgacactataacccatcaaccagatagctgtaaggctgcacctgaacatcggtctgggattaccgcattcatgaaggttctcaacagcctgcagaagaaacagatgaatacctcactgtgcgagcgcataagaaaggtctatggagatctggagtgtgaatactgcggtaaactcttttggtaccaagtgcacttcgacatgcacgtgcgcactcacacacgcgaacacttatactattgttcacagtgccattactctagtattaccaagaactgtctgaagcgacatgtgattcaaaagcattccaatattttattgaaatgccccacagatggctgcgactattccacacctgataagtacaaactgcaggcccacctcaaggtgcatacggctctagacaaacggagttactcctgtcctgtctgcgagaagagttttagcgaggatcggctgatcaaatcccacattaagactaaccacccagaggttagtatgtccacaatcagcgaagtccttggacggcgtgtgcagcttaagggactgatcggaaaacgggctatgaagtgtccttactgcgatttctacttcatgaaaaacggatctgatctgcagcgccacatttgggcccacgagggggtcaagccctttaaatgctccctctgcgagtatgctaccaggtctaagtcaaatctgaaggcccacatgaatcggcacagcacagaaaaaactcatctatgtgatatgtgtggcaaaaagttcaaatcaaaaggcacactgaaaagccacaagctcttgcacaccgcagatggcaaacagtttaaatgtactgtgtgtgattacactgctgcccaaaagccacagctgctgcgacacatggagcagcatgtgagctttaagcctttcagatgcgcacactgtcattacagctgcaatatctccggaagcctgaagagacattataatcgtaagcatcccaacgaggagtatgccaacgtcggcactggagaactagccgctgaagttctgattcagcagggaggcctaaagtgtccagtttgcagctttgtctacggaacaaaatgggaattcaaccgccaccttaagaataaacacggcctgaaagtggttgagatcgatggcgatccaaaatgggaaactgcaaccgaggcccctgaggagcctagcacccagtaccttcacatcactgaagccgaggaagacgttcagggcacacaagctgctgttgcagctctacaggatttgcgttacacaagcgagtctggcgacagattggacccaacagcagtaaacatcctgcagcagattattgagttgggagctgagacccatgacgctaccgccctcgcctccgtcgtggcaatggctcccggaactgttaccgtggtcaagcaggtgaccgaagaggaaccttcctcaaaccatactgtgatgatccaggagacagtgcagcaggccagtgttgagcttgctgagcaacaccacctggtggtcagctcagacgacgtggaaggaattgagactgtcaccgtgtacacccaaggtggggaagcatctgaattcattgtctacgttcaagaagccatgcaaccagtggaggaacaagcagtcgagcaacctgctcaagagctttag

SEQ ID NO: 206212 - DNA, 4294 bp, Artificial Sequence
  derived and/or modified sequence
gtgcaggagtctgagaagaaagggtgtagatggagaggcggtggcctcacctctgcatgctccgtgggaagcggcggaggcgcccagcatccctcctactctgcccttggtggaggtttacgagaaaacacggccatctttatgtgtaaatgttgtaacctcttctcaccaaatcagtcggaactcctctcccacgtttcagagaagcacatggaagaaggggttaatgttgatgagattattattccccttaggcctctgagtacacctgaaccccccaactcaagcaaaaccggagatgagtttttggtcatgaagaggaagagaggcaggcctaaggggtccacgaagaagtccagcacagaagaggagctggcagaaaacatcgtgagtccgactgaggacagcccgctggctccggaggaagggaacagcctgcctccaagcagcttggagtgtagcaagtgctgtcggaagttctccaacacgcgccagctgcggaagcacatctgcattatcgtgctgaatttgggtgaggaggaaggagaagcaggtaacgagtctgaccttgaactagaaaagaagtgtaaggaagatgatcgggaaaaagcctcgaaaagaccacggtcacagaaaacagagaaagtccagaagatctcaggaaaggaggccagacagctttctggggcgaagaaacccatcataagtgtggttttaactgcacacgaagcaattccaggtgctaccaagattgtgccagtggaggctgggccccctgaaacaggagctacaaattctgagaccacttcagcagacctggtgcctcggagaggctaccaggaatacgccattcagcagacaccttatgagcaaccaatgaagtcaagcaggctaggtcccactcagctcaaaatcttcacttgtgaatactgcaacaaggtcttcaagttcaagcactcgctgcaggcccacctgaggatccacaccaatgaaaagccatacaagtgcccccagtgcagctatgccagtgccatcaaggccaacctcaatgtgcacctgcgcaagcacactggagagaagttcgcctgcgactattgctcgttcacctgcctgagcaagggccacctcaaggtgcacatcgagcgagtgcacaagaagatcaagcagcactgccgcttctgcaagaagaagtactctgacgtcaagaacctcatcaagcacatccgagacgcgcatgacccacaggacaagaaggtcaaagaggccttggacgagctctgcctgatgacgagggagggcaagcggcagctgctctatgactgccacatctgtgagcgcaagttcaagaacgagctggaccgtgaccgccatatgctggtccacggagacaagtggccttttgcctgtgagctctgtggccatggggccaccaagtaccaggcgctggaactgcatgtcaggaagcaccccttcgtgtacgtctgtgccgtctgccgcaagaagttcgtcagctccatcaggctgcgcacccacatcaaagaggtgcacggggctgcccaggaggccttggtcttcaccagttccatcaaccagagcttctgcctcctggaacctggtggggacatccagcaagaagctctgggggaccagctacagctggtggaagaggagtttgccctccagggcgtgaatgcactcaaggaagaggcctgtcctggggacactcagctggaggagggccggaaggagccggaggcccctggggaaatgcctgccccagctgtgcacctggcctccccgcaggccgaaagcacagccctgccaccctgtgagctggaaaccaccgtggtctcctcctcagacctgcattctcaagaggtggtttcagatgattttttgttgaaaaatgatacctcctccgcagaggctcatgctgctcctgagaagcccccagacatgcagcacagaagctcagtccagacgcaaggtgaagtgatcacactactgctgtccaaggcccagagtgctgggtcagatcaggaaagccatggcgcccagagccccctaggggaagggcagaacatggctgtgctttcagctggtgacccagatcccagcaggtgtctcaggtcaaacccagctgaggcctcagacctcctccctccagtagctggtggtggggacaccatcacacatcagcctgactcttgcaaagctgcccctgagcaccggtcaggcatcaccgctttcatgaaggtcctgaacagtttacagaagaagcaaatgaacaccagcttgtgtgagcggatccggaaggtttatggagacctggagtgtgaatactgtggcaaacttttttggtaccaagtgcattttgatatgcatgtccgcacccacacccgggaacatctgtattattgctctcagtgtcattattcttccatcaccaaaaactgccttaaacgccacgtaattcagaaacacagtaacatcttgctgaagtgtcccaccgatggctgtgactactcaactccagataaatataagctacaggcacatcttaaagttcacacagcactggacaaaaggagttattcttgtcctgtttgtgaaaagtctttttcagaggatcgattgataaagtcacatatcaagaccaaccatcctgaggtctccatgagcaccatttctgaggttctcgggaggagggttcagctgaaagggctaattggaaagagagccatgaaatgcccatattgtgacttttatttcatgaagaatggctcagaccttcagcgtcatatttgggctcatgaaggtgtgaagcccttcaagtgttctttgtgtgagtatgcaactcgtagcaagagtaacctcaaggctcatatgaatcgtcacagcactgagaaaacccacctatgtgacatgtgtggcaagaaattcaaatcaaaagggacactgaaaagtcacaaactccttcacactgcagatgggaagcagtttaagtgcacggtgtgtgactacacagcggcccagaagccacagctgctgcggcacatggaacagcatgtctccttcaagcctttccgctgtgcccattgccattactcctgcaacatatctggctctctgaagcggcactacaacaggaagcaccctaatgaggagtatgccaacgtgggcaccggggagctggcagcggaggtgctcatccagcaaggtggtttgaagtgtcctgtttgcagctttgtatatggcaccaaatgggagttcaataggcacttgaagaacaaacatggcttgaaggtggtggaaattgatggagaccccaagtgggagacagcaacagaagctcctgaggagccctccacccagtatctccacatcacagaggccgaagaagacgttcaagggacacaggcagcggtggccgcgctccaggacctgagatacacctctgagagtggcgaccgactggaccccacggccgtgaacatcctgcagcagatcattgagctgggcgccgagacccatgacgccactgcccttgcctcggtggttgccatggcaccagggacggtgactgtggttaagcaggtcaccgaggaggagcccagctccaaccacacggtcatgatccaggagacggtccagcaagcgtccgtggagcttgccgagcagcaccacctggtggtgtcctccgacgacgtggagggcattgagacggtgactgtctacacgcagggcggggaggcctcggagttcatcgtctacgtgcaggaggccatgcagcctgtggaggagcaggctgtggagcagccggcccaggaactctagaggacatgtggcatcggatggccacagggcggggctgccaggctctgcaggcacccagggtggggaggccacccttcctgccctacccgcagaatggtgctctcctttgccctccctgcccagcagcctgataggactctcctagtccaacttggggtgggcaaggcagtcagcatcaccagcaataccacaggaccctcaccccagcatagacacacaccccctgacccttaccatctgcttcctgaaagacttcagtgtcagctcccctacacacaccccacaccttcaccccttgcttcaagattcaaacagagactcccagtccccctcagcatcttccctgaatcacagccccagctccttgacccccatctaggtgccaaatgttcatctgcaaccgctatgcagtctggtgagagggagacagccatcacatagaaagtgaccgtacggg

SEQ ID NO: 206213 - DNA, 4686 bp, Artificial Sequence
  derived and/or modified sequence
gtgcaggagtctgagaagaaagggtgtagatggagaggcggtggcctcacctctgcatgctccgtgggaagcggcggaggcgcccagcatccctcctactctgcccttggtggaggtttacgaggtctgctggagtttgctggaggtccgctccataccctgtttgcctgggtatcaccagtggaggctgcagaacaacaaagattgctgcctgttcctgcctctggaagcttcgtcccagaggggcacctgccagatgccagccagagctctcctgtatgagaaaacacggccatctttatgtgtaaatgttgtaacctcttctcaccaaatcagtcggaactcctctcccacgtttcagagaagcacatggaagaaggggttaatgttgatgagattattattccccttaggcctctgagtacacctgaaccccccaactcaagcaaaaccggagatgagtttttggtcatgaagaggaagagaggcaggcctaaggggtccacgaagaagtccagcacagaagaggagctggcagaaaacatcgtgagtccgactgaggacagcccgctggctccggaggaagggaacagcctgcctccaagcagcttggagtgtagcaagtgctgtcggaagttctccaacacgcgccagctgcggaagcacatctgcattatcgtgctgaatttgggtgaggaggaaggagaagcaggtaacgagtctgaccttgaactagaaaagaagtgtaaggaagatgatcgggaaaaagcctcgaaaagaccacggtcacagaaaacagagaaagtccagaagatctcaggaaaggaggccagacagctttctggggcgaagaaacccatcataagtgtggttttaactgcacacgaagcaattccaggtgctaccaagattgtgccagtggaggctgggccccctgaaacaggagctacaaattctgagaccacttcagcagacctggtgcctcggagaggctaccaggaatacgccattcagcagacaccttatgagcaaccaatgaagtcaagcaggctaggtcccactcagctcaaaatcttcacttgtgaatactgcaacaaggtcttcaagttcaagcactcgctgcaggcccacctgaggatccacaccaatgaaaagccatacaagtgcccccagtgcagctatgccagtgccatcaaggccaacctcaatgtgcacctgcgcaagcacactggagagaagttcgcctgcgactattgctcgttcacctgcctgagcaagggccacctcaaggtgcacatcgagcgagtgcacaagaagatcaagcagcactgccgcttctgcaagaagaagtactctgacgtcaagaacctcatcaagcacatccgagacgcgcatgacccacaggacaagaaggtcaaagaggccttggacgagctctgcctgatgacgagggagggcaagcggcagctgctctatgactgccacatctgtgagcgcaagttcaagaacgagctggaccgtgaccgccatatgctggtccacggagacaagtggccttttgcctgtgagctctgtggccatggggccaccaagtaccaggcgctggaactgcatgtcaggaagcaccccttcgtgtacgtctgtgccgtctgccgcaagaagttcgtcagctccatcaggctgcgcacccacatcaaagaggtgcacggggctgcccaggaggccttggtcttcaccagttccatcaaccagagcttctgcctcctggaacctggtggggacatccagcaagaagctctgggggaccagctacagctggtggaagaggagtttgccctccagggcgtgaatgcactcaaggaagaggcctgtcctggggacactcagctggaggagggccggaaggagccggaggcccctggggaaatgcctgccccagctgtgcacctggcctccccgcaggccgaaagcacagccctgccaccctgtgagctggaaaccaccgtggtctcctcctcagacctgcattctcaagaggtggtttcagatgattttttgttgaaaaatgatacctcctccgcagaggctcatgctgctcctgagaagcccccagacatgcagcacagaagctcagtccagacgcaaggtgaagtgatcacactactgctgtccaaggcccagagtgctgggtcagatcaggaaagccatggcgcccagagccccctaggggaagggcagaacatggctgtgctttcagctggtgacccagatcccagcaggtgtctcaggtcaaacccagctgaggcctcagacctcctccctccagtagctggtggtggggacaccatcacacatcagcctgactcttgcaaagctgcccctgagcaccggtcaggcatcaccgctttcatgaaggtcctgaacagtttacagaagaagcaaatgaacaccagcttgtgtgagcggatccggaaggtttatggagacctggagtgtgaatactgtggcaaacttttttggtaccaagtgcattttgatatgcatgtccgcacccacacccgggaacatctgtattattgctctcagtgtcattattcttccatcaccaaaaactgccttaaacgccacgtaattcagaaacacagtaacatcttgctgaagtgtcccaccgatggctgtgactactcaactccagataaatataagctacaggcacatcttaaagttcacacagcactggacaaaaggagttattcttgtcctgtttgtgaaaagtctttttcagaggatcgattgataaagtcacatatcaagaccaaccatcctgaggtctccatgagcaccatttctgaggttctcgggaggagggttcagctgaaagggctaattggaaagagagccatgaaatgcccatattgtgacttttatttcatgaagaatggctcagaccttcagcgtcatatttgggctcatgaaggtgtgaagcccttcaagtgttctttgtgtgagtatgcaactcgtagcaagagtaacctcaaggctcatatgaatcgtcacagcactgagaaaacccacctatgtgacatgtgtggcaagaaattcaaatcaaaagggacactgaaaagtcacaaactccttcacactgcagatgggaagcagtttaagtgcacggtgtgtgactacacagcggcccagaagccacagctgctgcggcacatggaacagcatgtctccttcaagcctttccgctgtgcccattgccattactcctgcaacatatctggctctctgaagcggcactacaacaggaagcaccctaatgaggagtatgccaacgtgggcaccggggagctggcagcggaggtgctcatccagcaaggtggtttgaagtgtcctgtttgcagctttgtatatggcaccaaatgggagttcaataggcacttgaagaacaaacatggcttgaaggtggtggaaattgatggagaccccaagtgggagacagcaacagaagctcctgaggagccctccacccagtatctccacatcacagaggccgaagaagacgttcaagggacacaggcagcggtggccgcgctccaggacctgagatacacctctgagagtggcgaccgactggaccccacggccgtgaacatcctgcagcagatcattgagctgggcgccgagacccatgacgccactgcccttgcctcggtggttgccatggcaccagggacggtgactgtggttaagcaggtcaccgaggaggagcccagctccaaccacacggtcatgatccaggagacggtccagcaagcgtccgtggagcttgccgagcagcaccacctggtggtgtcctccgacgacgtggagggcattgagacggtgactgtctacacgcagggcggggaggcctcggagttcatcgtctacgtgcaggaggccatgcagcctgtggaggagcaggctgtggagcagccggcccaggaactctagaggacatgtggcatcggatggccacagggcggggctgccaggctctgcaggcacccagggtggggaggccacccttcctgccctacccgcagaatggtgctctcctttgccctccctgcccagcagcctgataggactctcctagtccaacttggggtgggcaaggcagtcagcatcaccagcaataccacaggaccctcaccccagcatagacacacaccccctgacccttaccatctgcttcctgaaagacttcagtgtcagctcccctacacacaccccacaccttcaccccttgcttcaagattcaaacagagactcccagtccccctcagcatcttccctgaatcacagccccagctccttgacccccatctaggtgccaaatgttcatctgcaaccgctatgcagtctggtgagagggagacagccatcacatagaaagtgaccgtacgggtttttaatcactgctgggtggggtgggggtagggggattgtcctggctttgtcgacaaagtcccacttccccgagtattaagggcccttggtatcaagtgaggtaaattcacccatcacagggtctcgccctaccatcctggaattatttcacttttaagataaatgcactatttcactgttcgcctcccattctaaggaggtgaggtggttggaataaaaacagttcctgtc

SEQ ID NO: 206214 - DNA, 4756 bp, Artificial Sequence
  derived and/or modified sequence
agactccatccgccatgttggatgccgcagattcgccataacctcgccggctcttttcttaaaaaaataaaaataaaaagcgaagcgtcagcagggcgccccgccccctcggtcggcacgggagggggcccggaagagcccgaggcttttttttcctccgcggtggggcgttgccatggagacgcgggcggcaggtctgctggagtttgctggaggtccgctccataccctgtttgcctgggtatcaccagtggaggctgcagaacaacaaagattgctgcctgttcctgcctctggaagcttcgtcccagaggggcacctgccagatgccagccagagctctcctgtatgagaaaacacggccatctttatgtgtaaatgttgtaacctcttctcaccaaatcagtcggaactcctctcccacgtttcagagaagcacatggaagaaggggttaatgttgatgagattattattccccttaggcctctgagtacacctgaaccccccaactcaagcaaaaccggagatgagtttttggtcatgaagaggaagagaggcaggcctaaggggtccacgaagaagtccagcacagaagaggagctggcagaaaacatcgtgagtccgactgaggacagcccgctggctccggaggaagggaacagcctgcctccaagcagcttggagtgtagcaagtgctgtcggaagttctccaacacgcgccagctgcggaagcacatctgcattatcgtgctgaatttgggtgaggaggaaggagaagcaggtaacgagtctgaccttgaactagaaaagaagtgtaaggaagatgatcgggaaaaagcctcgaaaagaccacggtcacagaaaacagagaaagtccagaagatctcaggaaaggaggccagacagctttctggggcgaagaaacccatcataagtgtggttttaactgcacacgaagcaattccaggtgctaccaagattgtgccagtggaggctgggccccctgaaacaggagctacaaattctgagaccacttcagcagacctggtgcctcggagaggctaccaggaatacgccattcagcagacaccttatgagcaaccaatgaagtcaagcaggctaggtcccactcagctcaaaatcttcacttgtgaatactgcaacaaggtcttcaagttcaagcactcgctgcaggcccacctgaggatccacaccaatgaaaagccatacaagtgcccccagtgcagctatgccagtgccatcaaggccaacctcaatgtgcacctgcgcaagcacactggagagaagttcgcctgcgactattgctcgttcacctgcctgagcaagggccacctcaaggtgcacatcgagcgagtgcacaagaagatcaagcagcactgccgcttctgcaagaagaagtactctgacgtcaagaacctcatcaagcacatccgagacgcgcatgacccacaggacaagaaggtcaaagaggccttggacgagctctgcctgatgacgagggagggcaagcggcagctgctctatgactgccacatctgtgagcgcaagttcaagaacgagctggaccgtgaccgccatatgctggtccacggagacaagtggccttttgcctgtgagctctgtggccatggggccaccaagtaccaggcgctggaactgcatgtcaggaagcaccccttcgtgtacgtctgtgccgtctgccgcaagaagttcgtcagctccatcaggctgcgcacccacatcaaagaggtgcacggggctgcccaggaggccttggtcttcaccagttccatcaaccagagcttctgcctcctggaacctggtggggacatccagcaagaagctctgggggaccagctacagctggtggaagaggagtttgccctccagggcgtgaatgcactcaaggaagaggcctgtcctggggacactcagctggaggagggccggaaggagccggaggcccctggggaaatgcctgccccagctgtgcacctggcctccccgcaggccgaaagcacagccctgccaccctgtgagctggaaaccaccgtggtctcctcctcagacctgcattctcaagaggtggtttcagatgattttttgttgaaaaatgatacctcctccgcagaggctcatgctgctcctgagaagcccccagacatgcagcacagaagctcagtccagacgcaaggtgaagtgatcacactactgctgtccaaggcccagagtgctgggtcagatcaggaaagccatggcgcccagagccccctaggggaagggcagaacatggctgtgctttcagctggtgacccagatcccagcaggtgtctcaggtcaaacccagctgaggcctcagacctcctccctccagtagctggtggtggggacaccatcacacatcagcctgactcttgcaaagctgcccctgagcaccggtcaggcatcaccgctttcatgaaggtcctgaacagtttacagaagaagcaaatgaacaccagcttgtgtgagcggatccggaaggtttatggagacctggagtgtgaatactgtggcaaacttttttggtaccaagtgcattttgatatgcatgtccgcacccacacccgggaacatctgtattattgctctcagtgtcattattcttccatcaccaaaaactgccttaaacgccacgtaattcagaaacacagtaacatcttgctgaagtgtcccaccgatggctgtgactactcaactccagataaatataagctacaggcacatcttaaagttcacacagcactggacaaaaggagttattcttgtcctgtttgtgaaaagtctttttcagaggatcgattgataaagtcacatatcaagaccaaccatcctgaggtctccatgagcaccatttctgaggttctcgggaggagggttcagctgaaagggctaattggaaagagagccatgaaatgcccatattgtgacttttatttcatgaagaatggctcagaccttcagcgtcatatttgggctcatgaaggtgtgaagcccttcaagtgttctttgtgtgagtatgcaactcgtagcaagagtaacctcaaggctcatatgaatcgtcacagcactgagaaaacccacctatgtgacatgtgtggcaagaaattcaaatcaaaagggacactgaaaagtcacaaactccttcacactgcagatgggaagcagtttaagtgcacggtgtgtgactacacagcggcccagaagccacagctgctgcggcacatggaacagcatgtctccttcaagcctttccgctgtgcccattgccattactcctgcaacatatctggctctctgaagcggcactacaacaggaagcaccctaatgaggagtatgccaacgtgggcaccggggagctggcagcggaggtgctcatccagcaaggtggtttgaagtgtcctgtttgcagctttgtatatggcaccaaatgggagttcaataggcacttgaagaacaaacatggcttgaaggtggtggaaattgatggagaccccaagtgggagacagcaacagaagctcctgaggagccctccacccagtatctccacatcacagaggccgaagaagacgttcaagggacacaggcagcggtggccgcgctccaggacctgagatacacctctgagagtggcgaccgactggaccccacggccgtgaacatcctgcagcagatcattgagctgggcgccgagacccatgacgccactgcccttgcctcggtggttgccatggcaccagggacggtgactgtggttaagcaggtcaccgaggaggagcccagctccaaccacacggtcatgatccaggagacggtccagcaagcgtccgtggagcttgccgagcagcaccacctggtggtgtcctccgacgacgtggagggcattgagacggtgactgtctacacgcagggcggggaggcctcggagttcatcgtctacgtgcaggaggccatgcagcctgtggaggagcaggctgtggagcagccggcccaggaactctagaggacatgtggcatcggatggccacagggcggggctgccaggctctgcaggcacccagggtggggaggccacccttcctgccctacccgcagaatggtgctctcctttgccctccctgcccagcagcctgataggactctcctagtccaacttggggtgggcaaggcagtcagcatcaccagcaataccacaggaccctcaccccagcatagacacacaccccctgacccttaccatctgcttcctgaaagacttcagtgtcagctcccctacacacaccccacaccttcaccccttgcttcaagattcaaacagagactcccagtccccctcagcatcttccctgaatcacagccccagctccttgacccccatctaggtgccaaatgttcatctgcaaccgctatgcagtctggtgagagggagacagccatcacatagaaagtgaccgtacgggtttttaatcactgctgggtggggtgggggtagggggattgtcctggctttgtcgacaaagtcccacttccccgagtattaagggcccttggtatcaagtgaggtaaattcacccatcacagggtctcgccctaccatcctggaattatttcacttttaagataaatgcactatttcactgttcgcctcccattctaaggaggtgaggtggttggaataaaaacagttcctgtc

SEQ ID NO: 206215 - protein, 653 aa, Artificial Sequence
  derived and/or modified sequence
MISSKMMSSNPEEDPLDTFLQYIEDMGMKAYDGLVIQNASDIARENDRLRNETNLAYLKEKNEKRRRQEEAIKRIGGEVGRGHEGSYVGKHFRMGFMTMPAPQDRLPHPCSSGFSVRSQSLHSVGGTDDDSSCGSRRQPPPKPKRDPSTKLSTSSETVSSTAASKSGKTPERTEASAKPRPHSDEYSKKIPPPKPKRNPNTQLSTSFDETYIKKHGPRRTSLPRDSSLSQMGSPAGDPEEEEPVYIEMVGNILRDFRKEDDDQSEAVYEEMKYPIFDDLGQDAKCDFDHHSCSSQCATPTVPDLDFAKASVPCPPKGLLCDIPPPFPNLLSHRPPLLVFPPAPVHCSPNSDESPLTPLEVTKLPVLENVSYMKQPAGASPSTLPSHVPGHAKLEKEQAAALGPASATPALSSSPPPPSTLYRTQSPHGYPKSHSTSPSPVSMGRSLTPLSLKRPPPYDAVHSGSLSRSSPSVPHSTPRPVSQDGAKMVNAAVNTYGAAPGGSRSRTPTSPLEELTSLFSSGRSLLRKSSSGRRSKEPAEKSTEELKVRSHSTEPLPKLDNKERGHHGASSSREPVKAQEWDGTPGTPVVTSRLGRCSVSPTLLAGNHSSEPKVSCKLGRSASTSGVPPPSVTPLRQSSDLQQSQVPSSLANRD

SEQ ID NO: 206216 - protein, 144 aa, Artificial Sequence
  derived and/or modified sequence
MISSKMMSSNPEEDPLDTFLQYIEDMGMKAYDGLVIQNASDIARENDRLRNETNLAYLKEKNEKRRRQEEAIKRINRGTESPKPQHGAITKVGQQGKRPPWGVFLQRACQSSGMGWNTRDTCGHQSTRKMLCEPHLVSGKPQFR

SEQ ID NO: 206217 - DNA, 1962 bp, Artificial Sequence
  derived and/or modified sequence
atgatcagcagcaagatgatgagcagcaaccccgaggaggaccccctggacaccttcctgcagtacatcgaggacatgggcatgaaggcctacgacggcctggtgatccagaacgccagcgacatcgccagagagaacgacagactgagaaacgagaccaacctggcctacctgaaggagaagaacgagaagagaagaagacaggaggaggccatcaagagaatcggcggcgaggtgggcagaggccacgagggcagctacgtgggcaagcacttcagaatgggcttcatgaccatgcccgccccccaggacagactgccccacccctgcagcagcggcttcagcgtgagaagccagagcctgcacagcgtgggcggcaccgacgacgacagcagctgcggcagcagaagacagcccccccccaagcccaagagagaccccagcaccaagctgagcaccagcagcgagaccgtgagcagcaccgccgccagcaagagcggcaagacccccgagagaaccgaggccagcgccaagcccagaccccacagcgacgagtacagcaagaagatccccccccccaagcccaagagaaaccccaacacccagctgagcaccagcttcgacgagacctacatcaagaagcacggccccagaagaaccagcctgcccagagacagcagcctgagccagatgggcagccccgccggcgaccccgaggaggaggagcccgtgtacatcgagatggtgggcaacatcctgagagacttcagaaaggaggacgacgaccagagcgaggccgtgtacgaggagatgaagtaccccatcttcgacgacctgggccaggacgccaagtgcgacttcgaccaccacagctgcagcagccagtgcgccacccccaccgtgcccgacctggacttcgccaaggccagcgtgccctgcccccccaagggcctgctgtgcgacatccccccccccttccccaacctgctgagccacagaccccccctgctggtgttcccccccgcccccgtgcactgcagccccaacagcgacgagagccccctgacccccctggaggtgaccaagctgcccgtgctggagaacgtgagctacatgaagcagcccgccggcgccagccccagcaccctgcccagccacgtgcccggccacgccaagctggagaaggagcaggccgccgccctgggccccgccagcgccacccccgccctgagcagcagcccccccccccccagcaccctgtacagaacccagagcccccacggctaccccaagagccacagcaccagccccagccccgtgagcatgggcagaagcctgacccccctgagcctgaagagaccccccccctacgacgccgtgcacagcggcagcctgagcagaagcagccccagcgtgccccacagcacccccagacccgtgagccaggacggcgccaagatggtgaacgccgccgtgaacacctacggcgccgcccccggcggcagcagaagcagaacccccaccagccccctggaggagctgaccagcctgttcagcagcggcagaagcctgctgagaaagagcagcagcggcagaagaagcaaggagcccgccgagaagagcaccgaggagctgaaggtgagaagccacagcaccgagcccctgcccaagctggacaacaaggagagaggccaccacggcgccagcagcagcagagagcccgtgaaggcccaggagtgggacggcacccccggcacccccgtggtgaccagcagactgggcagatgcagcgtgagccccaccctgctggccggcaaccacagcagcgagcccaaggtgagctgcaagctgggcagaagcgccagcaccagcggcgtgcccccccccagcgtgacccccctgagacagagcagcgacctgcagcagagccaggtgcccagcagcctggccaacagagactag

SEQ ID NO: 206218 - DNA, 435 bp, Artificial Sequence
  derived and/or modified sequence
atgatcagcagcaagatgatgagcagcaaccccgaggaggaccccctggacaccttcctgcagtacatcgaggacatgggcatgaaggcctacgacggcctggtgatccagaacgccagcgacatcgccagagagaacgacagactgagaaacgagaccaacctggcctacctgaaggagaagaacgagaagagaagaagacaggaggaggccatcaagagaatcaacagaggcaccgagagccccaagccccagcacggcgccatcaccaaggtgggccagcagggcaagagacccccctggggcgtgttcctgcagagagcctgccagagcagcggcatgggctggaacaccagagacacctgcggccaccagagcaccagaaagatgctgtgcgagccccacctggtgagcggcaagccccagttcagatag

SEQ ID NO: 206219 - DNA, 1962 bp, Artificial Sequence
  derived and/or modified sequence
atgatttcctccaagatgatgtctagcaaccccgaggaagaccctctagatacctttctccagtatatcgaggacatgggaatgaaggcctacgatggactagttattcagaatgcctctgatattgcgcgggagaacgatcggctaaggaacgagacaaacctcgcctatctcaaagaaaaaaatgaaaagaggcggagacaggaggaggccatcaagagaatcggaggggaggtgggcaggggtcacgaggggagctacgtaggaaagcatttcaggatgggtttcatgacaatgcctgcacctcaggatcggctaccacacccttgcagcagcggcttttctgtccgaagtcagagcctgcattccgtcggcggcaccgatgacgattcttcatgtggctcacgccgacagccgccccccaaacctaagagagacccttctaccaaattgtcaacgtctagtgaaacagtgtccagcaccgctgcctcaaaaagtggaaagacaccagaacgtactgaggcatcagctaagcctcggcctcactccgacgaatatagcaagaagatacctcccccaaagccgaagcgaaaccccaacactcagctctcaacttcctttgacgaaacctatatcaagaagcacggaccccgtcgcactagtctacctcgagattccagcttgagccaaatgggatcaccggctggagatccggaagaagaggaacctgtgtacatcgaaatggtaggaaacattctgagggactttcgcaaagaggatgacgaccagtccgaggccgtatatgaagagatgaaataccctatatttgacgacttgggccaggatgccaagtgcgactttgaccatcattcttgcagcagccaatgcgccacaccaaccgtgcccgacctggacttcgcaaaagcgtccgtgccttgtcctcccaagggattgctttgcgacatcccgccaccttttcccaatctgctctctcaccggccccctcttctcgtcttccctccggcacctgtgcactgcagccctaattccgacgaaagcccactcacaccgctggaggtaaccaaactgcctgtcctggaaaatgtgtcttacatgaaacagccagccggagcctctccctccaccctgccttcccatgtacccggccatgcgaagctcgaaaaagagcaggctgctgcactggggcccgccagcgccaccccagctttaagcagcagccccccccccccgagtaccctttatcgaacacagagtccccatggctatccaaagagccatagcacgagcccctcccccgtgtccatgggcaggtcactaactcctctgtctctcaaacgcccccccccctacgatgctgtgcactcaggaagtctgtcacggagctcaccaagcgttccccattcaaccccgaggccggtttcacaagacggagccaagatggttaacgccgctgtcaacacttatggcgccgcaccaggagggtctcgctcgcgcacacccacaagccctttggaggagttaaccagtttgttctcaagcggaagaagtttgttgcgcaaatcctcttccggccgccgctcaaaggaaccagctgaaaagtcgaccgaggagctaaaagtccggagtcactccacagagccattgcctaaactggacaataaggaacgcggtcaccacggggcttctagctctcgcgaaccggttaaagctcaggagtgggatggaacgcctggtacgcccgtggtgacttcacggctgggcaggtgctctgtcagccccaccttgttggctggcaaccacagttctgagcccaaggtgtcctgcaaactgggaaggtctgcctcaaccagtggtgtgcctcctccttcagttacaccattacgccaaagtagtgatttgcagcagtctcaggtaccaagtagcctggcaaatcgagactag

SEQ ID NO: 206220 - DNA, 435 bp, Artificial Sequence
  derived and/or modified sequence
atgattagctccaaaatgatgagttcaaacccagaagaagatcccctggatacctttctccagtacattgaggatatgggtatgaaagcttacgatggcttagtgatccaaaacgccagtgacatagctcgggagaatgaccgcctgcggaatgaaacaaacctggcttatctgaaagaaaagaacgagaagcgtagaaggcaggaggaagcgataaaacggatcaaccgggggaccgaaagcccaaagcctcagcatggcgcaattaccaaggtcggacagcagggtaagcgcccaccctggggggtgttcctgcaaagagcctgtcaaagtagcggcatgggatggaacacccgcgacacctgcggtcatcagtctacaagaaaaatgctgtgcgagccccacttagtgtccggcaagccacaattcaggtag

SEQ ID NO: 206221 - DNA, 1962 bp, Artificial Sequence
  derived and/or modified sequence
atgatcagcagcaagatgatgagcagcaaccctgaggaggaccccctggacaccttcctgcagtacatcgaggacatgggcatgaaggcctatgatggcctggtgatccagaatgccagtgacatcgccagagaaaatgaccggctgagaaatgagaccaacctggcctacctgaaggagaagaatgagaagagaagacggcaggaggaggccatcaagagaattggaggagaggtgggccggggccacgagggcagctatgtgggcaagcacttcaggatgggcttcatgaccatgcctgccccccaggaccggctgccccacccctgcagcagcggcttctctgtgcgcagccagagcctgcacagcgtgggcggcacagatgatgacagcagctgtggcagccggcggcagcccccacccaagcccaagagggaccccagcaccaagctgagcaccagcagcgagaccgtgagcagcacagctgccagcaagagcggcaagaccccagagaggacagaggccagcgccaagccccggccccacagtgatgagtacagcaagaagatccccccacccaagcccaagaggaaccccaacacccagctgagcaccagctttgatgagacctacatcaagaagcacggccccaggaggaccagcctgccccgggacagcagcctgagccagatgggcagccctgctggggaccctgaggaggaggagcctgtgtacatcgagatggtgggcaacatcctgcgggacttcagaaaagaagatgatgaccagagcgaggccgtgtatgaggagatgaagtaccccatctttgatgacctgggccaggatgccaagtgtgactttgaccaccacagctgcagcagccagtgtgccacccccaccgtgcctgacctggactttgccaaggcctctgtgccctgcccccccaagggcctgctgtgtgacatccccccacccttccccaacctgctgagccaccggccccccctgctggtgttccccccagcccctgtgcactgcagccccaacagtgatgagagccccctgacccccctggaggtgaccaagctgcctgtgctggagaatgtgtcctacatgaagcagcctgctggggccagccccagcaccctgcccagccacgtgcccggccacgccaagctggagaaggagcaggccgccgccctgggccctgccagcgccaccccagccctgagcagcagccccccaccacccagcaccctgtaccgcacccagagcccccacggctaccccaagagccacagcaccagccccagccctgtgtccatgggccgcagcctgacccccctgagcctgaagaggcccccaccctatgatgctgtgcacagcggcagcctgagccgcagcagccccagcgtgccccacagcacccccaggcctgtgtcccaggatggagccaagatggtgaatgctgctgtgaacacctatggagctgcccctgggggcagccgcagcaggacccccaccagccccctggaggagctgaccagcctcttcagcagcggccgcagcctgctgaggaagagcagcagcggccgccgcagcaaggagcctgctgagaagagcacagaggagctgaaggtgcgcagccacagcacagagcccctgcccaagctggacaacaaggagcggggccaccacggggccagcagcagccgggagcctgtgaaggcccaggagtgggatggcaccccaggcacccctgtggtgaccagccggctgggccgctgcagcgtgagccccaccctgctggccggcaaccacagcagcgagcccaaggtgtcctgcaagctgggccgcagcgccagcaccagcggcgtgcccccacccagcgtgacccccctgcggcagagcagtgacctgcagcagagccaggtgcccagcagcctggccaacagagactag

SEQ ID NO: 206222 - DNA, 435 bp, Artificial Sequence
  derived and/or modified sequence
atgatcagcagcaagatgatgagcagcaaccctgaggaggaccccctggacaccttcctgcagtacatcgaggacatgggcatgaaggcctatgatggcctggtgatccagaatgccagtgacatcgccagagaaaatgaccggctgagaaatgagaccaacctggcctacctgaaggagaagaatgagaagagaagacggcaggaggaggccatcaagaggatcaacagaggaacagagagccccaagccccagcacggggccatcaccaaggtgggccagcagggcaagaggcctccctggggcgtcttcctgcagagggcctgccagagcagcggcatgggctggaacacccgggacacctgtggccaccagagcaccaggaagatgctgtgtgagccccacctggtgtctgggaagccccagttcagatag

SEQ ID NO: 206223 - DNA, 1962 bp, Artificial Sequence
  derived and/or modified sequence
atgatcagcagcaagatgatgagcagcaaccccgaggaggaccccctcgacaccttcttacagtacatcgaggatatgggcatgaaagcctatgacgggctcgtgatccaaaacgcctccgatatcgcgcgcgaaaacgaccgcctccgtaatgagacaaatctcgcctaccttaaggaaaaaaatgagaaacgtcgtcgccaagaggaggctattaagagaataggcggtgaggtgggaaggggtcatgaaggttcctatgtgggtaaacacttcaggatgggatttatgactatgccagctccccaggataggctgccccatccttgttcttccggcttttcagtgcgtagccaaagcttacatagtgtcggcggaactgacgatgactcctcttgcggtagtcggaggcagcctcctcccaagccgaagagagacccctccacgaaactatcgacttcctctgagactgtgtcgtccacagctgcttccaaatctggaaagacacctgagaggaccgaagctagtgctaagcccaggccacatagcgacgaatatagtaaaaaaatccctcccccgaagcccaagagaaaccccaacacccagttatcgacttctttcgatgagacctatatcaagaagcacggaccacgtcggaccagtctcccgagggacagcagcctgagtcagatgggcagccccgctggcgatcctgaagaggaggaacccgtctatattgagatggtcgggaacatcctccgagatttccggaaggaggacgatgatcagtcagaggctgtttacgaagaaatgaagtatccaatcttcgacgatctgggccaggacgcaaagtgcgactttgaccatcatagctgcagcagccaatgcgccactccaacagtccccgaccttgactttgctaaggcctcggttccatgtccccccaagggattgctctgcgatatccctccaccatttcctaacttactgtcccataggcctcctctcctagtgttccccccggcccccgttcactgctcgcccaattcagatgagtcacctctcacccccctggaggtgacgaaactgcctgtgctggagaatgtcagctatatgaagcagccagcgggagccagcccgtcaaccctgcccagccacgtgcccggccacgccaaactcgagaaagaacaggcagccgccctcgggcccgcctctgctacccctgctctttcttcttctcctcctcccccttcaacactgtacagaactcagtctcctcacgggtacccgaagtctcactcaacaagcccttctccagtatctatgggcaggtctctgacaccacttagcctgaagaggccgcctccctacgatgcggtacattccgggagcctatcccgaagctccccctcagtgccccactccactccccgcccagttagccaggatggcgctaaaatggtcaatgcggctgtcaacacctacggtgcagccccaggagggagcaggtctaggacaccaacctctccactcgaggagctgacatccctgttctccagtggacgctccctgctccggaagtctagctccggcaggcgcagtaaagagcctgcagagaaaagtactgaggaactgaaggtcaggagccatagcaccgagcccctgccaaaactcgataataaggagagggggcaccacggggcctcatcctctagagaacctgtgaaggctcaggaatgggatggtacccccggaacccctgtggtgacttcaaggctgggccgatgctccgttagcccaactctgcttgcaggaaatcacagttccgagcccaaagtgagttgcaagctcggccggagcgcttctacttccggagtgccaccaccttccgtcactcctctacgacagtcaagcgatcttcaacagagtcaggtgccctcatcgctagctaatagagattag

SEQ ID NO: 206224 - DNA, 435 bp, Artificial Sequence
  derived and/or modified sequence
atgatcagcagcaagatgatgagcagcaaccccgaggaggaccccctggacacattcctgcagtacattgaagatatgggaatgaaggcttacgacgggcttgtcatacaaaacgccagcgatattgcgcgggagaatgatcgtctgcggaatgagacgaacctcgcttatttgaaggagaagaatgaaaaacggcgcagacaagaagaggctataaagaggatcaatcgcggcaccgagtctcctaagcctcagcatggggcaatcaccaaggtgggccagcaaggcaaacggccgccctggggagtattcctgcagcgcgcctgtcagtctagtggaatgggttggaatacgagagatacctgtggacatcagagcacaagaaaaatgctgtgcgaaccacacttggtttcaggaaagccacagttccgttag

SEQ ID NO: 206225 - DNA, 4828 bp, Artificial Sequence
  derived and/or modified sequence
aatttcttccctgctggacctggaaggagaggggctgtgtgttcatccccacccattagctatgccctcttttctccgaatgtcgatttaaggaagcaagcacctgtcttccgccactgcatcttcctagcaaactttaaaggccattttatctgataggaaggacatcgagaatgctctgatctagtgatgaagaatctgggagtcgacacttttcccatccagacacaatgcactttaattgaagaaacactgagctgaactacaagtctatttcttatggtgctggattactcctacagaactgccctgagatcaaccgtgagagagggctctgacagacacaagtcaccttctggttattgcacttagctctccctggggacttaaattttggcagtgttcctctttacatgatatcctccaagatgatgagttctaatcctgaggaagaccctttggacacatttctccagtacattgaggatatggggatgaaggcctatgatggcttggttattcagaatgcgtcagatattgctcgagagaatgatcgcttgagaaatgaaactaacctagcctatttgaaagagaagaatgaaaaacgccgaagacaagaagaagcaataaagcgcataggtggagaagtagggcgaggccacgaaggaagttacgtgggcaaacatttccgcatgggattcatgacaatgcctgctcctcaggacagacttccccatccttgctccagtggcttttctgtgagatcacagtccctgcactcggttgggggcacagacgatgacagcagctgtggctcacggagacaaccaccacccaaacccaagagggaccccagcaccaagctgagcacctcatcagagacagtcagcagcactgcagccagtaagagcgggaaaacccctgagaggactgaagcgtcagctaaaccaagaccccacagcgatgaatattccaagaagattcctcctcccaaaccgaagcgaaatccgaacactcagctgagcacatctttcgatgaaacgtacatcaaaaagcatgggccccggaggacgtcgctgccgcgggactcctccttgtcccagatgggcagccccgcgggagaccccgaggaagaggagcccgtgtacatcgagatggtggggaacattctcagagacttcaggaaggaggacgatgaccagagcgaggccgtctacgaggaaatgaagtaccctatctttgacgacttgggccaagacgccaaatgtgacttcgaccatcacagctgttcttcgcagtgtgctactcccacggtgcctgacttggacttcgccaaggcctcagtgccatgcccccccaaggggctgctttgcgacatccctccgcccttccccaacctgctttctcacagacccccgctgctggtatttccccccgcccccgtgcattgctcccccaactccgacgagtccccgcttacccctctggaggtcacgaagcttcccgtgctggaaaacgtgtcttacatgaaacagccagccggggcgtcgccctccacgctgccgtcccacgtccccggccatgcgaaactggagaaagagcaggccgcggccctgggacctgcctctgccacccctgcgctctcctcgtcgcccccacccccgtctacgctgtaccgaacccagtctccccatggctaccctaaaagtcactccacctctccctcccccgtcagcatggggaggtccctgactcccctgagcctcaaaaggcctcccccttacgacgctgtgcattcgggcagcctctcaaggagctctccttcagtgcctcactcgacccccagacccgtgtcgcaagatggggccaagatggtcaacgccgcggtgaacacctacggggcagccccgggtggctcccggtcccggacacccacgagcccgctggaggagctgaccagcctcttctcctccggccgcagcctgctgcgcaagtcgtccagtggccggcgctccaaagagcctgcagagaaatcaacagaggaactgaaagtccgaagccacagcacggagccattaccaaagttggacaacaaggaaagaggccaccatggggcgtcttcctccagagagcctgtcaaagctcaggaatgggatggaacaccagggacacctgtggtcaccagtcgactaggaagatgctctgtgagccccaccttgttagcgggaaaccacagttcagagcctaaagtaagctgcaaattaggccggtctgcgtcgacgtcaggtgtgcctcctccatcagtcactcccctcaggcaaagcagtgacctgcaacagagccaggtaccatcatcgttagccaatcgtgattgacttcctgtgatacaacttgccaaatgcttcccacctctgtctgtcctgttgctgtagacaactttcgcatttgcttttatttttctatgtgtgtatgggttaggggatgcgggggatgagttctggcagtctgtgttttcatttgaaaaagaatatctttcttccttgtgattggtggtgaaactttctttgctgtttgttaccaaatcgtttttgtctctggtttccatcattctgtaatataaatgtagtaaacttgtactatatgtattggcttagtggttcttttttaaattctttctctctttcatgttttgtgtacttttatactgtctctgaaaatttatcaatatttgataaatttatctactttgttttatgtagatttctttttaaatgttttgtccagaacactcgcacagatgttgtcaatgaatttgtacatatttcttagctcttatcctattatactgtaatatttctggtggttttatttttatttagcttggagcatgactgtaagacactgttgaatattgatgtccttataaatattcatatcccgattcatttggattgagtatggcagctagtctttcttctttcttaggctattgactggcctaagacaatttgactggccagacaaattgactggccagataatctagatatttaacaaaaactgcagattaataaggcaacctttaaatgaatgacttttctctcttataccaacaatatcagaaatgttctcagaaagggaatgtaagtgttcatgcatggtaaatgagatctcaattatcacttggagaaaagagacaagaaataaaggcataaactgaaatatcatttaatcctttacagcataatatgttgctctgatgttcgtttgggtacgtggttgtggatggggaattagtatggggaaaaatcactacacataaatgtcctatctttagctcacccaataggaattcaatacattgacttaatttgtgaggcttaattgtcgttactgttaagtattataggtgttaagtagggtggtgtcattctggaatgttttctctctgcttcctagcttcaatctttgcattcatgaaactcttctgaaatagcaacttataaaacactgatgatacctccaagggaactgcccattactgatgagaaaattacatattcatctattattttaaatgtcaggctattttaaaaacataactaagtagaataattgcgttttcttctaatgagagacattgtgcctcttagtgtttttgtctgacttaaatatgcaaaatagttgatttataaatatatgaggtatctgcaaatacaagaaatgagaggcttctctcaagggtatctcaagtaccatttagaatttcttgtgtcttaatttaaaatttaaatgcctttatataaatgttaaatgcctttataactaaatgtaccaactcaaacactttttggatataaaagaagtagaaacagtaagacactgaataaaataaataagataaactgccaacttagctaattaaagctattccaaaaatattgtacttaccaacatttaaagcttaaaaacattgggtactgaaagaagagaagtttagctaattggcagaggattgcactaatacaatcaagttttcaagtttatgacccttgctagtatattaccttcaatatctcagagatgttttgtattatttgttttgttttgcttttttcctagttgtctttatagctgtttcaccctaagccccttcaaactctcaatgaaagcaggttcttgggataaacttccagaatagagacaaggtataccctttgtgcctttgcattatcaactctttgttcacctgatgggaagttcttcgtttttcaaaatgtagcaagggagaaagcccaggacgcctttatatgctgttagtttccttacctgctgatagagattctgacacacagtcaaatcatacatgggctgtcagagctataaattagaaggctggcctctaggcttctcctctgtggcttatagccagttgtaatatacatgcattcctatactctagagatgaagtggtaagcatagctcatatgaacactgctctgaactcctctgacttagcattcaacttaagtcaagaaatacttattggctgggcgtggtggctcacgcctgtaatcccagcactctgggaggcagaggtgggtggatcacaaggtcaggagattgagaccatcctggctaacacggtgagaccccatctctactaaaaatacaaaaaattagccaggtgtggtggcgggcgcctgtagtcccagctacttgggaggctgaggcaggagaatgtggtgaacctgggaggtggagcttgcagtgagctgagatcgcaccactgcactccagcctgggtgacagagcgagactccatctc

SEQ ID NO: 206226 - DNA, 435 bp, Artificial Sequence
  derived and/or modified sequence
atgatatcctccaagatgatgagttctaatcctgaggaagaccctttggacacatttctccagtacattgaggatatggggatgaaggcctatgatggcttggttattcagaatgcgtcagatattgctcgagagaatgatcgcttgagaaatgaaactaacctagcctatttgaaagagaagaatgaaaaacgccgaagacaagaagaagcaataaagcgaatcaacagaggaactgaaagtccgaagccacagcacggagccattaccaaagttggacaacaaggaaagaggccaccatggggcgtcttcctccagagagcctgtcaaagctcaggaatgggatggaacaccagggacacctgtggtcaccagtcgactaggaagatgctctgtgagccccaccttgttagcgggaaaccacagttcaggtaa

SEQ ID NO: 206227 - DNA, 1962 bp, Artificial Sequence
  derived and/or modified sequence
atgattagcagcaagatgatgtcctctaaccctgaggaagaccctcttgacacctttctgcagtacatagaggacatggggatgaaagcatacgatggtcttgtcatacagaatgcatcagacatcgccagggagaatgataggttgcgaaacgaaacaaacctcgcttacctcaaagaaaagaatgagaaacgtcgacgacaggaggaggcaatcaaacggatagggggtgaagtgggcaggggtcacgaagggagttacgtcggcaagcacttccgcatggggtttatgaccatgcctgcacctcaagatagactccctcatccgtgttcttccggattctccgtgcgttcacagtctcttcactcggttggtgggaccgatgacgattcgtcctgcggctctcgccgacagcctcctcctaaacctaagcgcgatccatcaacaaagctctcaacttctagtgaaacggtgtcgtctaccgcggcttctaagtccggcaaaaccccagaaaggactgaggcctcagctaagcctcggcctcatagtgacgaatattccaagaagattccgcctccgaaaccaaaacgaaaccctaatacccagctgagtacctctttcgacgagacttacatcaagaagcacggccctcgtcggacatctctgcccagggattcatcactgtctcagatgggaagtcctgcaggcgaccctgaggaggaggaaccagtttacatcgaaatggtgggcaacatcctgagggatttccgtaaagaggacgacgaccagagcgaggccgtgtatgaggaaatgaagtaccccattttcgacgatctgggtcaagatgctaagtgcgacttcgatcaccatagttgctcgagtcagtgtgctactcctaccgtccctgatctggattttgctaaagctagcgttccctgtccacctaaaggcctgctgtgcgacattccccctccctttccgaatctgctttctcaccgccctccgttattagtgttccccccagctccagtccattgctcgccaaactctgatgaatcaccactgacacctttagaagtgaccaagctgcccgtgctcgagaacgtgagctacatgaagcaacccgctggagctagtccatctactctgccctctcatgtgcctggtcacgcaaagctggaaaaggaacaggccgctgctctcggccctgcaagcgccactcccgctctgagttctagcccaccacctccatctacactgtatagaacccagtcaccgcatggttatcccaagagccattcaacttctccttctccagtcagcatgggaagatccctaaccccactgagcctaaaaaggccacccccatatgacgcagtgcattctggctctctgagccgatcaagtccatctgtcccacacagcaccccacgcccagtaagccaagacggcgctaagatggtcaatgccgcagttaacacttacggcgctgcacctggtggttccaggtctagaactccaaccagccccctggaagagctaacctctctcttctcctccggcaggtcactgctgcggaaatcctcaagcggacgcagatcaaaggaacccgctgaaaaaagcacagaagagctcaaagtgagatctcattccacagagcctctgcctaaactggataacaaggagagaggacaccatggtgcgagcagctcccgcgaacccgtcaaggcacaggaatgggatggcactcccggaacccctgtggtcacatcgcggctgggtaggtgctccgtgagccctaccctgctggctgggaaccactcttccgaacccaaggtgtcttgtaagctaggacggtccgctagtaccagcggagtgccaccgccaagcgtgacgccccttaggcaatcttcagaccttcagcagtctcaggtgccgtcgagcctagcgaacagggactag

SEQ ID NO: 206228 - DNA, 435 bp, Artificial Sequence
  derived and/or modified sequence
atgatatcctctaaaatgatgagcagtaacccggaggaggaccctttggatacctttcttcaatatatcgaggacatgggtatgaaagcatacgacggtcttgtgattcagaatgcctcagacatcgcaagagagaatgatcggctccgtaatgagacaaacttggcctacctcaaagaaaagaacgagaagcggaggcgtcaggaagaagcgataaagcggattaatagagggactgaatcccctaaaccccagcacggggcaattactaaggtcggccagcaaggcaagcgacctccatggggagtatttttacaaagagcatgccagtccagcggcatgggttggaatacacgggatacctgcgggcaccagtctaccagaaagatgctgtgtgaaccacacctagtgagcgggaaaccgcaattccgatag

SEQ ID NO: 206229 - protein, 979 aa, Artificial Sequence
  derived and/or modified sequence
MSYDYHQNWGRDGGPRSSGGGYGGGPAGGHGGNRGSGGGGGGGGGGRGGRGRHPGHLKGREIGMWYAKKQGQKNKEAERQERAVVHMDERREEQIVQLLNSVQAKNDKESEAQISWFAPEDHGYGTEVSTKNTPCSENKLDIQEKKLINQEKKMFRIRNRSYIDRDSEYLLQENEPDGTLDQKLLEDLQKKKNDLRYIEMQHFREKLPSYGMQKELVNLIDNHQVTVISGETGCGKTTQVTQFILDNYIERGKGSACRIVCTQPRRISAISVAERVAAERAESCGSGNSTGYQIRLQSRLPRKQGSILYCTTGIILQWLQSDPYLSSVSHIVLDEIHERNLQSDVLMTVVKDLLNFRSDLKVILMSATLNAEKFSEYFGNCPMIHIPGFTFPVVEYLLEDVIEKIRYVPEQKEHRSQFKRGFMQGHVNRQEKEEKEAIYKERWPDYVRELRRRYSASTVDVIEMMEDDKVDLNLIVALIRYIVLEEEDGAILVFLPGWDNISTLHDLLMSQVMFKSDKFLIIPLHSLMPTVNQTQVFKRTPPGVRKIVIATNIAETSITIDDVVYVIDGGKIKETHFDTQNNISTMSAEWVSKANAKQRKGRAGRVQPGHCYHLYNGLRASLLDDYQLPEILRTPLEELCLQIKILRLGGIAYFLSRLMDPPSNEAVLLSIRHLMELNALDKQEELTPLGVHLARLPVEPHIGKMILFGALFCCLDPVLTIAASLSFKDPFVIPLGWEEARRRGFRYEKDYCWEYFLSSNTLQMLHNMKGQFAEHLLGAGFVSSRNPKDPESNINSDNEKIIKAVICAGLYPKVAKIRLNLGKKRKMVKVYTKTDGLVAVHPKSVNVEQTDFHYNWLIYHLKMRTSSIYLYDCTEVSPYCLLFFGGDISIQKDNDQETIAVDEWIVFQSPARIAHLVKELRKELDILLQEKIESPHPVDWNDTKSRDCAVLSAIIDLIKTQEKATPRNFPPRFQDGYYS

SEQ ID NO: 206230 - protein, 1008 aa, Artificial Sequence
  derived and/or modified sequence
MSYDYHQNWGRDGGPRSSGGGYGGGPAGGHGGNRGSGGGGGGGGGGRGGRGRHPGHLKGREIGMWYAKKQGQKNKEAERQERAVVHMDERREEQIVQLLNSVQAKNDKESEAQISWFAPEDHGYGTEVSTKNTPCSENKLDIQEKKLINQEKKMFRIRNRSYIDRDSEYLLQENEPDGTLDQKLLEDLQKKKNDLRYIEMQHFREKLPSYGMQKELVNLIDNHQVTVISGETGCGKTTQVTQFILDNYIERGKGSACRIVCTQPRRISAISVAERVAAERAESCGSGNSTGYQIRLQSRLPRKQGSILYCTTGIILQWLQSDPYLSSVSHIVLDEIHERNLQSDVLMTVVKDLLNFRSDLKVILMSATLNAEKFSEYFGNCPMIHIPGFTFPVVEYLLEDVIEKIRYVPEQKEHRSQFKRGFMQGHVNRQEKEEKEAIYKERWPDYVRELRRRYSASTVDVIEMMEDDKVDLNLIVALIRYIVLEEEDGAILVFLPGWDNISTLHDLLMSQVMFKSDKFLIIPLHSLMPTVNQTQVFKRTPPGVRKIVIATNIAETSITIDDVVYVIDGGKIKETHFDTQNNISTMSAEWVSKANAKQRKGRAGRVQPGHCYHLYNGLRASLLDDYQLPEILRTPLEELCLQIKILRLGGIAYFLSRLMDPPSNEAVLLSIRHLMELNALDKQEELTPLGVHLARLPVEPHIGKMILFGALFCCLDPVLTIAASLSFKDPFVIPLGKEKIADARRKELAKDTRSDHLTVVNAFEGWEEARRRGFRYEKDYCWEYFLSSNTLQMLHNMKGQFAEHLLGAGFVSSRNPKDPESNINSDNEKIIKAVICAGLYPKVAKIRLNLGKKRKMVKVYTKTDGLVAVHPKSVNVEQTDFHYNWLIYHLKMRTSSIYLYDCTEVSPYCLLFFGGDISIQKDNDQETIAVDEWIVFQSPARIAHLVKELRKELDILLQEKIESPHPVDWNDTKSRDCAVLSAIIDLIKTQEKATPRNFPPRFQDGYYS

SEQ ID NO: 206231 - DNA, 2940 bp, Artificial Sequence
  derived and/or modified sequence
atgagctatgactaccatcagaactggggaagggacggaggccctcgttcttccggcggaggctacgggggaggacctgccgggggacatggtgggaaccgcggtagtggtggtggaggtggtggaggcggcggaggaagaggtggccgcggtcgacatcccggtcacctgaagggaagagagatcgggatgtggtatgctaaaaagcaaggccaaaagaataaagaggccgagcgtcaagaaagagcagtggttcatatggacgagcgcagggaggagcagatagtgcagttgcttaattcggtccaggcgaagaacgacaaggaatcggaagctcagatctcctggtttgctcctgaggatcatgggtacggcacagaagtgagcacaaagaataccccatgctcagaaaacaagctggatatacaggaaaaaaagttaatcaaccaggagaagaagatgtttcgaattaggaataggtcctatatcgatcgcgacagtgagtatctgctgcaggaaaacgagcccgacggaactttagaccagaagttgctggaagatctgcagaagaagaaaaatgatctgagatacatcgaaatgcaacacttccgcgaaaagctgccgtcctatggaatgcaaaaagagctggtcaatctaattgacaatcaccaggtgacagttatcagcggtgagactgggtgtggcaaaaccacgcaggttacccaatttatccttgataattatatagaaaggggcaagggtagtgcatgcagaattgtttgtacacagccaaggaggatttcggccattagtgtcgctgaacgggtggccgccgaacgtgccgagagctgcggttctgggaacagcacgggctatcagattcgcctccagagtcgacttccacgcaagcaaggttccattctctattgcactacaggaatcatcctgcagtggttgcagtccgatccatatctgtcttccgtcagtcacatagtgctggacgaaatccacgaaaggaacctgcagtccgatgtcttgatgaccgtcgttaaagacctgctgaatttcaggagtgacttgaaggtgatactgatgagcgcaactctgaacgcggaaaaattttccgagtactttgggaattgccccatgattcatatccctggattcacctttccagtggtggagtatctgctggaggacgtgattgagaagattaggtacgttcctgagcagaaagagcaccgctcccaatttaaaaggggattcatgcagggccatgtgaatagacaggaaaaggaagagaaggaagcgatctataaggaacggtggccagattacgtgcgggagcttaggagacggtactcggccagtacagtcgacgtcattgaaatgatggaggacgacaaagtagacctcaatctgatcgtggccctgatccgatatatcgtgctggaggaagaggacggggctatccttgtcttcctgcccggctgggataacatctcaactctccatgatctcttaatgagtcaagtgatgtttaagagcgataagttcttgatcatccctctacacagcctgatgcccaccgtcaaccagacacaggtgttcaagcggacgccccctggtgtccggaaaattgtgatcgccacaaacattgctgagacctcaatcacaatcgatgacgttgtgtatgtgattgacggtgggaagatcaaagagacccactttgatactcagaacaatataagtacaatgtcagctgagtgggtctctaaggcaaatgctaaacagaggaaggggcgtgctggcagagtccagccgggccactgctatcatctgtacaatgggctccgggctagtctccttgacgactatcagttgcccgagatcttgcggactccgctggaggagctttgccttcagatcaaaattctccggcttgggggcattgcttatttcctttcccgcctgatggatccaccatccaatgaggcggtcctgttatcgatccggcacctcatggagttgaacgctctcgataaacaggaggaactcactcctctgggcgtgcatctcgctcgcctccctgtagagcctcatatcggcaagatgatcctttttggcgctctgttctgctgcctagatccagtgcttacgatcgccgctagcctgtctttcaaagacccgtttgttatcccacttgggtgggaagaggctagacgtcgcggtttccgctacgagaaggactattgctgggagtactttctgtcctctaatacactgcagatgctccacaacatgaagggtcagtttgccgagcacctgttgggcgccggatttgtgtcgagcaggaatccaaaggatcccgagtccaacatcaatagcgataacgagaagatcatcaaggcagtcatctgcgccggcctctaccctaaggtggcaaagatccgattgaatctggggaaaaaacggaagatggtgaaggtatacacaaaaacagacggcctggtcgctgtgcatcccaagtcagtaaatgttgagcaaacggattttcactacaactggctaatataccacctgaaaatgcggacatccagtatatacctttacgattgcaccgaagtgtccccttattgtctgctctttttcggcggtgacatctcaattcagaaggacaatgaccaggagacaatcgccgtggatgaatggatagtcttccagtctcctgcccgcattgcgcacctggtcaaagagttgcggaaggaactggatattctgctgcaggaaaagattgagtctccgcatcccgtggactggaatgataccaagtcccgcgactgtgcagtactgtcagcaattatagatctgatcaaaactcaggagaaggccactcctcgcaactttcccccgagatttcaagatgggtactacagttag

SEQ ID NO: 206232 - DNA, 3027 bp, Artificial Sequence
  derived and/or modified sequence
atgtcatatgactaccaccagaactggggaagagatgggggcccccgatcctccgggggcggttatggcggtggcccagctggcggtcatggcgggaacaggggaagtggcgggggaggagggggtggaggaggcggacgtggcgggcgaggaaggcatcccgggcacctgaaggggcgcgaaatcggcatgtggtatgccaaaaagcaaggccaaaaaaacaaagaagctgagcgccaggaaagagccgttgtccatatggatgaaagacgcgaggagcagatagtccagctgctgaatagtgttcaggccaagaatgacaaggaatccgaagcccaaatcagctggtttgcacccgaggaccacggctacggtacggaggtgtctacaaagaacacaccctgctcagagaacaaactggacatacaggagaagaagctgattaaccaagagaagaagatgttcaggattagaaacagaagctatatcgaccgcgattctgagtatttacttcaggaaaacgagcccgacggcacattagaccaaaagttgctggaggacctgcagaaaaaaaaaaacgacctccgctatattgagatgcagcactttcgtgagaaactcccatcatacgggatgcagaaggaactggtcaatctaatagacaatcaccaggtgaccgtgatcagcggcgagactggctgcggtaaaaccacacaggtgactcaattcatactggataactatatcgagcggggaaaaggatcggcctgcagaatagtgtgtactcagccacggaggatttccgccatctccgttgcggaacgcgtggctgcagagagagctgagtcctgtggtagcggcaactccaccgggtaccaaatccgtctgcagtccagattgccaagaaagcagggcagcattttgtactgcactactggtatcatcctgcagtggctgcagagtgacccatacctgagttccgtaagtcatatcgttctcgatgagatccacgagagaaacctgcaatctgatgtgctgatgaccgtagtgaaagacctgttgaactttcgttccgatttaaaagtgattctcatgtccgcgactttaaatgccgagaaattctcagagtacttcggcaattgtccaatgatccatattccgggattcacattcccagtggtagagtacctcctggaagacgtgatagaaaaaatccgctatgtgcctgagcagaaggagcacaggagccaattcaagagaggctttatgcagggccatgtcaacagacaagagaaggaggagaaggaagcgatctacaaggagagatggccggattacgtgcgggaactgcgtaggagatactcagccagtactgtcgatgtcattgaaatgatggaggatgacaaagtggatctcaacttgatcgtagccctgattcgatacattgtgttagaagaagaagatggagccatcctggtgtttctccccggctgggacaatattagtacacttcatgacttgctaatgagccaagtcatgttcaaatctgataaattcctgattatccctctccacagcttgatgcctacagtcaaccagacccaggttttcaagagaactcccccaggagttagaaaaatcgtgatcgcaaccaatattgctgagactagtattactatagacgatgtcgtctacgtcatagatggagggaagatcaaggaaacccacttcgatacccaaaataacataagcaccatgtccgccgaatgggtctctaaagcgaatgcaaagcagaggaagggtagagctggaagagtgcagcctggacactgttaccatctatataatggtctacgcgcctccctgttagacgactatcagctccccgaaattttgcgcacccccctagaggagctgtgtttacaaatcaagattttacgcttgggcggcatcgcatattttctcagtcgcctgatggatccacctagcaacgaagccgtcctccttagcatcaggcacctgatggaactgaatgccctcgacaagcaggaggagcttactccgcttggagtccatcttgccagactgcctgtagaaccgcatatcggcaaaatgattttgtttggcgcccttttttgctgcctggaccctgtgctaactatcgccgcaagcttgtcattcaaagatccttttgttatccccctcggtaaggagaagattgctgatgccaggaggaaggagctcgctaaggatactcggtctgatcacctaactgtcgttaatgccttcgaaggctgggaagaagctcggcgaaggggtttccgttatgaaaaggattactgttgggagtactttttgtcttccaataccctccagatgctccataatatgaaaggacagttcgcggagcatttactcggagcaggttttgtgtctagcagaaacccaaaagacccagaatcgaatatcaattccgacaacgagaaaattattaaggcagtgatctgcgctggattataccccaaagtagctaaaatcagactcaacctggggaagaagcggaagatggtgaaggtatacactaaaaccgatggacttgtcgcggtgcacccaaagagcgtcaatgtggaacaaactgatttccattacaactggctaatttaccatctcaagatgaggaccagttctatttacctctatgattgcaccgaggtgtccccctattgccttctgttctttgggggggacataagcattcagaaggataatgatcaggagacaattgcagtcgacgaatggatcgtcttccagagtcctgcgcgtattgcccatcttgttaaggaacttcgtaaggagcttgacatcctcctacaggaaaagatcgaatctcctcatcccgtggactggaacgatacaaaaagccgcgactgcgcagtgctgtcagcaattattgacctgatcaagacccaggaaaaggccacacctcgaaactttccgccacgctttcaagacggatattatagctag

SEQ ID NO: 206233 - DNA, 2940 bp, Artificial Sequence
  derived and/or modified sequence
atgtcctatgactaccaccagaactggggcagagatggcggccccaggagcagcggcggcggctacggcggcggccctgctgggggccacggcggcaacagaggcagcggcggcggcggcggcggcggcggcggcggccggggcggccggggccgccaccctggccacctgaagggccgggagatcggcatgtggtacgccaagaagcagggccagaagaacaaggaggccgagcggcaggagagagctgtggtgcacatggatgagcggcgggaggagcagatcgtgcagctgctgaacagcgtgcaggccaagaatgacaaggagagcgaggcccagatctcctggtttgcccctgaggaccacggctacggcacagaggtgtccaccaagaacaccccctgcagcgagaacaagctggacatccaggagaagaagctgatcaaccaggagaagaagatgttccgcatccggaacagaagctacatcgaccgggacagcgagtacctgctgcaggagaatgaaccagatggcaccctggaccagaagctgctggaggacctgcagaagaagaagaatgacctgcgctacatcgagatgcagcacttccgggagaagctgcccagctatggcatgcagaaggagctggtgaacctgattgacaaccaccaggtgaccgtcatctctggagagaccggctgtgggaagaccacccaggtgacccagttcatcctggacaactacatcgagcggggcaaaggaagtgcctgcagaattgtgtgcacccagccccggcgcatcagcgccatctctgtggccgagcgggtggccgctgagagagctgagagctgtggcagcggcaacagcacaggctaccagatccggctgcagagccggctgcccaggaagcagggcagcatcctgtactgcaccaccggcatcatcctgcagtggctgcagagcgacccctacctgagctctgtgagccacatcgtgctggatgagatccatgaaagaaacctgcagagtgatgtgctgatgacagtggtgaaggacctgctgaacttcagaagtgacctgaaggtgatcctgatgtctgccaccctgaatgctgagaagttcagcgagtacttcggcaactgccccatgatccacatccctggcttcaccttccctgtggtggagtacctgctggaggatgtgattgagaagatccgctacgtgcctgagcagaaggagcacaggagccagttcaagaggggcttcatgcagggccacgtgaaccggcaggagaaggaggagaaggaggccatctacaaggagcgctggccagactatgtgcgggagctgcggcggcgctacagcgccagcacagtggatgtgattgagatgatggaggatgacaaggtggacctgaacctgattgtggccctgatccgctacatcgtgctggaggaggaggatggagccatcctggtgttcctgcccggctgggacaacatcagcaccctgcatgacctgctgatgagccaggtgatgttcaagagtgacaagttcctgatcatccccctgcacagcctgatgcccaccgtgaaccagacccaggtgttcaagaggaccccacctggggtgaggaagatcgtgattgccaccaacattgctgagaccagcatcaccattgatgatgtggtgtatgtgattgatggcggcaagatcaaggagacccactttgacacccagaacaacatcagcaccatgtctgctgagtgggtgtccaaggccaatgccaagcagaggaagggccgggccggccgggtgcagcccggccactgctaccacctgtacaacggcctgcgggccagcctgctggatgactaccagctgcctgagatcctgcggacccccctggaggagctgtgcctgcagatcaagatcctgcggctgggcggcatcgcctacttcctgagccggctgatggacccccccagcaatgaggccgtgctgctgagcatccgccacctgatggagctgaatgccctggacaagcaggaggagctgacccccctgggcgtgcacctggcccggctgcctgtggagccccacatcggcaagatgatcctgtttggagccctcttctgctgcctggaccctgtgctgaccatcgccgccagcctgtccttcaaggacccctttgtgatccccctgggctgggaggaggcccggcggcggggcttccgctatgagaaggactactgctgggagtacttcctgagcagcaacaccctgcagatgctgcacaacatgaagggccagtttgctgagcacctgctgggcgccggctttgtgagcagcaggaaccccaaggaccctgagagcaacatcaacagcgacaatgagaagatcatcaaggccgtcatctgtgccggcctgtaccccaaggtggccaagatccggctgaacctgggcaagaagaggaagatggtgaaggtgtacaccaagacagatggcctggtggccgtgcaccccaagtctgtgaatgtggagcagacagacttccactacaactggctgatctaccacctgaagatgaggaccagcagcatctacctgtatgactgcacagaggtgagcccctactgcctgctcttcttcggcggggacatcagcatccagaaggacaatgaccaggagaccatcgctgtggatgagtggatcgtgttccagagccctgccagaattgcccacctggtgaaggagctgaggaaggagctggacatcctgctgcaggagaagattgagagcccccaccctgtggactggaatgacaccaagagccgggactgtgctgtgctgagcgccatcatcgacctgatcaagacccaggagaaggccaccccaagaaacttccccccacgcttccaggacggctactacagctag

SEQ ID NO: 206234 - DNA, 3027 bp, Artificial Sequence
  derived and/or modified sequence
atgtcctatgactaccaccagaactggggcagagatggcggccccaggagcagcggcggcggctacggcggcggccctgctgggggccacggcggcaacagaggcagcggcggcggcggcggcggcggcggcggcggccggggcggccggggccgccaccctggccacctgaagggccgggagatcggcatgtggtacgccaagaagcagggccagaagaacaaggaggccgagcggcaggagagagctgtggtgcacatggatgagcggcgggaggagcagatcgtgcagctgctgaacagcgtgcaggccaagaatgacaaggagagcgaggcccagatctcctggtttgcccctgaggaccacggctacggcacagaggtgtccaccaagaacaccccctgcagcgagaacaagctggacatccaggagaagaagctgatcaaccaggagaagaagatgttccgcatccggaacagaagctacatcgaccgggacagcgagtacctgctgcaggagaatgaaccagatggcaccctggaccagaagctgctggaggacctgcagaagaagaagaatgacctgcgctacatcgagatgcagcacttccgggagaagctgcccagctatggcatgcagaaggagctggtgaacctgattgacaaccaccaggtgaccgtcatctctggagagaccggctgtgggaagaccacccaggtgacccagttcatcctggacaactacatcgagcggggcaaaggaagtgcctgcagaattgtgtgcacccagccccggcgcatcagcgccatctctgtggccgagcgggtggccgctgagagagctgagagctgtggcagcggcaacagcacaggctaccagatccggctgcagagccggctgcccaggaagcagggcagcatcctgtactgcaccaccggcatcatcctgcagtggctgcagagcgacccctacctgagctctgtgagccacatcgtgctggatgagatccatgaaagaaacctgcagagtgatgtgctgatgacagtggtgaaggacctgctgaacttcagaagtgacctgaaggtgatcctgatgtctgccaccctgaatgctgagaagttcagcgagtacttcggcaactgccccatgatccacatccctggcttcaccttccctgtggtggagtacctgctggaggatgtgattgagaagatccgctacgtgcctgagcagaaggagcacaggagccagttcaagaggggcttcatgcagggccacgtgaaccggcaggagaaggaggagaaggaggccatctacaaggagcgctggccagactatgtgcgggagctgcggcggcgctacagcgccagcacagtggatgtgattgagatgatggaggatgacaaggtggacctgaacctgattgtggccctgatccgctacatcgtgctggaggaggaggatggagccatcctggtgttcctgcccggctgggacaacatcagcaccctgcatgacctgctgatgagccaggtgatgttcaagagtgacaagttcctgatcatccccctgcacagcctgatgcccaccgtgaaccagacccaggtgttcaagaggaccccacctggggtgaggaagatcgtgattgccaccaacattgctgagaccagcatcaccattgatgatgtggtgtatgtgattgatggcggcaagatcaaggagacccactttgacacccagaacaacatcagcaccatgtctgctgagtgggtgtccaaggccaatgccaagcagaggaagggccgggccggccgggtgcagcccggccactgctaccacctgtacaacggcctgcgggccagcctgctggatgactaccagctgcctgagatcctgcggacccccctggaggagctgtgcctgcagatcaagatcctgcggctgggcggcatcgcctacttcctgagccggctgatggacccccccagcaatgaggccgtgctgctgagcatccgccacctgatggagctgaatgccctggacaagcaggaggagctgacccccctgggcgtgcacctggcccggctgcctgtggagccccacatcggcaagatgatcctgtttggagccctcttctgctgcctggaccctgtgctgaccatcgccgccagcctgtccttcaaggacccctttgtgatccccctgggcaaggagaagattgctgatgcccggaggaaggagctggccaaggacaccaggagtgaccacctgactgtggtgaatgcctttgagggctgggaggaggccaggagaagaggcttccgctatgagaaggactactgctgggagtacttcctgagcagcaacaccctgcagatgctgcacaacatgaagggccagtttgctgagcacctgctgggcgccggctttgtgagcagcaggaaccccaaggaccctgagagcaacatcaacagcgacaatgagaagatcatcaaggctgtgatctgtgccggcctgtaccccaaggtggccaagatccggctgaacctgggcaagaagaggaagatggtgaaggtgtacaccaagacagatggcctggtggccgtgcaccccaagtctgtgaatgtggagcagacagacttccactacaactggctgatctaccacctgaagatgaggaccagcagcatctacctgtatgactgcacagaggtgagcccctactgcctgctcttctttggaggagacatcagcatccagaaggacaatgaccaggagaccatcgctgtggatgagtggatcgtgttccagagccctgcccgcatcgcccacctggtgaaggagctgaggaaggagctggacatcctgctgcaggagaagattgagagcccccaccctgtggactggaatgacaccaagagccgggactgtgctgtgctgagcgccatcatcgacctgatcaagacccaggagaaggccacccccaggaacttccccccacgcttccaggacggctactacagctag

SEQ ID NO: 206235 - DNA, 2940 bp, Artificial Sequence
  derived and/or modified sequence
atgagctacgactaccaccagaactggggccgggacggcggcccccgcagttccggcggtggttatggtggtggtccagcgggcggccacggcgggaaccgaggatcggggggcggcgggggtggaggtggaggggggagaggaggccgcggccgacacccagggcatctaaaaggaagagaaataggcatgtggtacgcaaaaaaacaggggcagaaaaataaagaagctgaacgacaggagcgtgccgtagtgcacatggacgagaggagagaggagcagatcgtgcagctgctgaattctgtgcaggccaaaaacgataaagaatccgaggcccaaataagctggttcgctccagaagatcacggatatggcacagaggtgtccactaaaaacactccttgtagtgaaaataagcttgacatacaggagaagaagctgatcaaccaggaaaaaaaaatgttcagaatcagaaatcgatcgtatatcgaccgggactccgaatacctgcttcaggaaaatgaaccggatgggactctggaccagaaattgttggaggatctacaaaaaaagaagaacgacctgaggtacatcgagatgcagcattttagggaaaaactgcccagctatggcatgcagaaggaactggtaaacctgatcgataatcaccaggttaccgtcatcagcggtgagaccgggtgcggcaaaacaacgcaggtgacccaatttatccttgacaactatattgagaggggaaagggctctgcatgcagaattgtatgcacacagccccgacggatttccgctatctccgtagccgaaagagtcgccgcagaacgggccgaatcttgtggctcgggaaacagcactggttaccagattaggctccagtctcgactgcctcgcaaacagggctccattctatactgcacaacaggcatcattctccaatggctacagtcagatccgtatctcagtagcgtgtcccatatcgtgctagacgagattcatgaaaggaatcttcagtcggatgttctgatgaccgtggtcaaagatctgctgaacttccggtctgatctgaaggtaatacttatgtcagccaccctgaatgctgaaaagttttccgaatatttcggaaattgccctatgattcacattcccggtttcaccttccccgttgtggagtatctgctcgaagacgtgattgaaaaaatccgctacgtccctgagcaaaaagaacatcggtcgcagtttaaaagaggttttatgcaagggcacgtgaaccgacaggagaaggaggagaaggaggctatctataaggaaaggtggcctgactacgtgcgagagctgcgccgcagatactccgcctcgactgtggacgtgattgagatgatggaggatgacaaggtggatctcaatctgatcgtcgctttaatcaggtatatagttctggaggaagaggatggcgccattctggtgttcttgcctggctgggataatatcagtactctccacgatttactgatgagccaggtaatgttcaagagcgacaaatttctgattatacctctgcatagtcttatgccaactgtgaaccagacacaggtgttcaagagaaccccgcctggagtgagaaagatcgtgatcgctaccaacattgccgagacctccattactatcgatgatgtggtgtacgtgatcgacggcggcaagatcaaggagacacactttgacacgcagaacaacatcagcacgatgtctgccgagtgggtaagtaaggctaatgccaaacagaggaaaggacgcgcaggcagggtgcaaccagggcattgctaccatctctataacggactccgggcctcgctcttggacgattatcagctgccagaaatcctgcggactcctctcgaagagctctgcttacagataaaaattctgcgactgggcgggatcgcctattttctgagcagattgatggacccaccttcgaacgaagcagtcctgctgtctatccgccatcttatggagctcaacgctttggacaagcaagaggagctgacaccgctgggtgtgcatctcgcccggctccccgtagagccccacattggcaaaatgatacttttcggcgccttattttgctgcctggacccagtcctcacaatcgcagcatctttgtccttcaaagatccgttcgtgattccactaggctgggaggaggccagaaggcgaggcttcagatatgaaaaggactactgctgggaatattttctcagctcgaatacactacagatgctgcataatatgaaggggcaatttgcagagcacctgctgggagccgggttcgttagttcaagaaacccaaaggacccagagtctaacatcaatagtgacaacgaaaagattatcaaggcggtaatttgcgccgggctgtatccgaaggtagcaaagatacgactgaatctcggaaagaagcgcaagatggtgaaagtttacactaaaaccgatgggctcgtcgctgtccatcccaaatccgtgaatgttgaacaaaccgattttcattacaactggttgatctaccacctaaagatgagaacctccagtatctacttgtatgattgtactgaggtttccccctactgtctcctcttcttcggaggagacatcagcatccagaaagataacgaccaggagaccatcgcagttgatgagtggattgtcttccaatcaccagctcgcatcgcccatttggtcaaggagcttagaaaagaactggacatattactacaggaaaagatcgagagcccacacccagtggattggaacgacaccaagagcagggactgtgccgtgctgtccgccataattgacctcataaaaacgcaagagaaggctactcctagaaacttcccgccccggtttcaggacggttactatagctag

SEQ ID NO: 206236 - DNA, 3027 bp, Artificial Sequence
  derived and/or modified sequence
atgagctacgactaccaccagaactggggccgggacggcggccccagatcttctgggggagggtacggaggaggcccggctggggggcacggagggaacaggggttctggggggggaggcggcggggggggagggggaaggggtgggagggggcgacaccccggtcatctgaaaggccgcgagataggtatgtggtacgcaaagaagcaaggacagaaaaacaaagaggcagaacggcaggagagagctgtcgtgcacatggacgaacgtagagaggaacagatagtccagttgcttaactccgtgcaagctaagaatgataaagaaagcgaggcccagatcagctggttcgcccctgaggatcatggatatggcacggaggtgtcaactaaaaatactccctgcagtgaaaataagctcgatatccaggagaagaagctgataaaccaggaaaaaaaaatgttcaggatccggaatcgctcctatattgatagagacagtgagtatctgctacaagaaaacgaaccagacgggaccttggaccagaagctcctggaggaccttcaaaagaaaaaaaacgatctgcgttacatcgaaatgcagcatttccgagaaaaactgcccagctacggtatgcagaaagagcttgtgaatctcattgataatcatcaagtcaccgtaattagtggcgaaactggctgcgggaagaccacccaggtaacacagttcatcctggataactatattgagcggggcaagggttccgcctgtcggattgtatgcacccaaccaagacgaatcagcgccataagcgtggctgaacgcgtcgccgcagagcgcgcagaatcctgtgggtcaggaaattctactggatatcagatccgactgcaaagtaggttgcctaggaagcaagggagtatactgtactgtactaccggaataatactgcagtggttacaatctgacccctacctcagtagcgtcagtcatatcgttctggatgaaattcacgagcgaaatttacaatccgacgtccttatgacagtggtgaaggacctgctgaacttccgtagcgacctgaaagtgatattgatgagtgcaacactcaacgctgagaaattcagtgagtattttggcaactgcccgatgatacacattccagggttcacgtttccagtagtcgagtatttgctcgaagatgtgatagaaaaaatccgatatgtgccagagcagaaagagcaccgcagtcaattcaagcgagggttcatgcagggccacgtaaatcggcaggaaaaggaggagaaggaggcaatatacaaggagcgatggccagactacgtgagagagctcaggcggcggtactcagcctcaaccgtcgacgttatagaaatgatggaagacgacaaggtggatctgaacctgatcgtggctttaatccggtacatcgtgttggaagaggaggatggcgctatcctggtgtttttgcccggctgggacaatatttcgaccctgcacgacttgctgatgagtcaggttatgtttaaatctgacaaattcctgatcattccgctccactccttgatgcccaccgtgaaccagacccaggtgttcaagcgcactccccccggcgtgcgcaagattgttattgccacgaacatcgccgaaacttcaatcaccatcgatgatgtcgtctacgtaattgacgggggaaagattaaagagactcactttgatacccagaacaacatatcaacgatgagtgctgagtgggtctcaaaagcaaatgccaagcaaaggaagggccgtgccggcagggtgcagccaggtcactgttatcacttatacaacggtctacgcgcttccctgctagacgattatcagttgcctgagatacttcgaaccccactggaggagctgtgcttgcaaatcaaaatactgagactgggcggcatcgcctatttcctgtcacgtttaatggaccccccgtctaatgaggccgtcctgctgtctatccgccacctgatggaactgaacgccttagataagcaggaagagcttacgccactgggagtgcacctggctaggctgccagtggagccccacatcggaaaaatgatcctgttcggggctctgttttgctgtctggatcctgtcctgaccatagcggcttctctctcttttaaagatcctttcgtgattccactgggtaaggaaaagattgcagacgctagacggaaggaactggcaaaggacacccggtccgaccatctgacagtcgttaacgcgtttgaggggtgggaagaagcccgccgccgcgggttcaggtacgagaaagactattgttgggagtacttcctgagcagcaacacccttcagatgttacataatatgaaaggtcagttcgctgaacatctgttaggtgcaggattcgtctcatctcggaacccaaaggacccggagtctaatattaactccgacaacgagaagattatcaaagctgtcatctgcgctggtctgtaccccaaagtcgctaagattagactgaacttgggaaagaaacgcaaaatggtgaaggtctatacgaagacagatggactggtcgccgttcaccctaagagcgtgaacgtagagcagactgatttccattacaattggttaatttaccacctgaaaatgaggacgagttccatttacctgtacgactgcactgaagtgagcccctactgtttattattttttggcggagacatttccatccagaaagacaatgatcaagagacaatagcggtggacgaatggatcgtcttccaaagtccagcacgcattgcacaccttgttaaggaactgcgcaaggagctggatatcctactccaggagaagatagagtctcctcaccccgtggactggaacgataccaaatcaagggattgcgcagtgctctctgctattatcgatttgatcaaaacacaagagaaggccacaccacggaatttcccgcctcggttccaggatgggtattacagttag

SEQ ID NO: 206237 - DNA, 2940 bp, Artificial Sequence
  derived and/or modified sequence
atgtcctatgactatcaccagaattggggacgggacggtgggcctcggtcttcaggtgggggatacggtgggggtccagccggaggtcacggcggtaatcgtggatcaggaggaggaggtggaggcggtgggggaggcagagggggacgtggaaggcacccgggacatctcaagggcagagagattggcatgtggtatgccaaaaagcagggtcagaagaacaaagaagctgagcgccaggagcgggctgtggtgcacatggacgaacgaagggaggagcagatagtgcaactgctgaattcggtgcaggccaagaatgacaaggagtccgaagcacaaatcagctggttcgcccctgaggatcacggttacggaacagaggtctctacgaaaaacaccccatgtagtgagaataagctagatatccaggaaaagaaactcattaatcaggagaaaaagatgtttaggatccggaacaggtcttatattgatcgcgattccgagtatttactgcaagagaacgaaccagatggaactctggatcaaaaacttctggaagacctgcagaaaaaaaagaacgacctacggtacatcgaaatgcagcattttcgagagaagttgccttcatacggaatgcaaaaagagctagtgaacctcatcgataaccatcaagtgacagttattagcggcgaaaccgggtgcggaaaaaccactcaggtaacccagtttatcttagataactatatcgaacgcggaaagggctccgcttgcaggatcgtctgcacacaaccacgacggatttcagctatctctgtggccgagcgagtggccgctgagcgcgctgagtcttgtggatctggaaactccactggttaccagatcagactgcagagccggctgcctcgcaagcaaggaagcattctctactgcaccaccgggattatcctccaatggctgcagtcggacccgtatttgtcgtcggtgtcacacatagtcttagatgagatccacgagcggaacctgcagagtgatgtcttgatgaccgttgtgaaagatctcctgaactttcggtcagacttgaaggtgatacttatgtcagctaccttgaatgctgaaaaattctcagaatatttcggaaactgtcccatgatccatatccctggttttacttttcccgtggtagaatacctgctggaggacgtaatcgaaaaaatcaggtacgtgcctgaacagaaggaacaccgcagccagtttaaacgcggattcatgcaagggcacgtgaacagacaggagaaagaggagaaggaggctatttacaaggaaaggtggccagactacgtacgagagttacggaggcgctacagcgccagcaccgttgatgtgatcgagatgatggaagacgacaaagtggatctaaacctgatcgtggcgctgataagatatatcgttctagaggaggaagacggggctatactagtgttcctaccaggttgggataatatttcaaccttgcacgacctactgatgagccaggtcatgtttaagagcgataaattcctgatcatcccactacacagtctgatgcccaccgtgaaccagacacaggttttcaaacggaccccccctggtgtgcgaaaaatcgtcatcgccacaaacattgctgagacttccatcaccatcgatgatgtagtatacgttattgatgggggtaaaatcaaggagactcactttgatacccagaataacattagtacgatgagtgccgagtgggtgtctaaagccaacgctaagcaaagaaagggacgcgctggacgagttcaaccaggccactgttaccatctctacaacgggctcagagcttcgctactagacgattatcagctaccagagattctcagaactcccttggaagaactgtgcctgcagatcaaaattctcaggctggggggtatagcttacttcctatcccggttaatggatccgcctagcaacgaggccgtgcttctgtccattcggcatttgatggagctgaacgctttggataagcaagaagagctgactcctctgggtgtgcacctcgctcgtcttccagtggaaccccacattggaaaaatgattctctttggggcactcttttgctgcttggaccccgtgctgactattgccgcaagcctctcgttcaaggacccgtttgttattccactggggtgggaagaggctcggagaaggggattccggtacgagaaagattactgctgggaatacttcctcagcagtaacaccctgcagatgttacataatatgaaggggcaattcgctgagcacttgctaggggcaggatttgtgagcagcaggaatcctaaggatcctgagtccaacattaacagcgataatgagaaaatcattaaagctgtgatctgcgcgggactgtaccccaaggttgccaagattcggttgaatttgggcaaaaagagaaagatggtgaaagtatataccaagacagacggacttgtcgcagtccacccgaagtccgtgaacgtcgagcagaccgactttcactacaattggctgatttaccatcttaaaatgcgcaccagctcaatctatctgtatgactgcactgaggtctccccatactgcctcctatttttcggaggagacattagtattcaaaaggacaacgatcaggagaccatagcagtcgatgaatggatcgtgttccagtccccagcacggattgcccatttggtcaaggagctgcgcaaggaactcgacatacttctccaagaaaagatagaatcgccacatcctgtggattggaacgacactaagagtcgggactgcgccgtgctgtcagcaattatagacttaataaaaacccaggaaaaagccacgccaagaaattttccacccagatttcaagatggttactactcttag

SEQ ID NO: 206238 - DNA, 3027 bp, Artificial Sequence
  derived and/or modified sequence
atgagctatgattatcaccagaactgggggagggatggaggtccaaggtcatccgggggtggatacggagggggtccggcaggcggtcacggcggtaaccgtgggtccggcggaggaggaggcggaggagggggaggccgaggagggaggggcagacatccagggcatttaaagggtagagaaatcgggatgtggtacgccaagaaacaggggcagaaaaataaagaggcagaaaggcaggaacgagccgttgtgcatatggacgaaaggagggaggagcaaattgtacaactccttaattcagtgcaggccaaaaacgataaggagtccgaggcgcaaatttcctggtttgcaccagaagaccacggatacggaactgaagtgagcacaaagaacacaccctgttccgagaacaaactggatattcaggaaaaaaagctcattaaccaagagaagaaaatgttcagaattagaaacagaagctacatcgatcgcgattccgagtacctgctacaagagaacgaaccagatggcacactggaccagaaactgctggaggacctccagaagaaaaagaatgacctgcgctatatcgagatgcagcactttagggagaagctcccctcctacggaatgcagaaagaacttgtcaatcttatcgataaccaccaggtcacagtcatttcgggggagaccggctgcggcaaaactacacaggtaactcaattcatcctggataactacattgagagaggtaaaggcagcgcatgcaggatagtgtgtacccagcccagacgcatttctgctataagcgtggccgagcgagtggccgcagagagagctgagagctgtggatcaggcaattctaccggttaccagattaggcttcagtcaaggctccctcgaaaacagggctctatactgtactgcacaaccggcatcatcctgcagtggctgcagtctgatccatacctgtcctcagtgagccacatcgtcctggatgagatccacgagcggaacttgcaatccgacgtcctgatgaccgtggttaaagaccttcttaatttccggtctgatctgaaggtgatactgatgtcagcaacgctcaatgcagagaagttttcagagtacttcggcaattgcccaatgattcacattccgggattcacctttcccgtcgtggagtacctattggaggatgtcatcgagaaaattaggtacgttccagagcagaaggagcatagaagccaattcaagcggggatttatgcagggtcacgtaaatcgacaggagaaagaggaaaaggaagctatttataaagaaagatggcccgattacgtgcgggaactccggagaaggtattccgcaagcacggtggacgtcattgaaatgatggaagacgataaggtggatttaaacctaatcgtcgctctgattcggtacatagtgctggaggaagaagacggagcgatccttgtgtttctccccggatgggacaatatcagtacactgcatgacctgctgatgagccaagttatgtttaagtcggataagttccttattatcccattgcactctctcatgccgacagtcaaccagactcaagttttcaagcgtacccccccaggggttagaaagattgtaatcgctactaacattgcagaaacctctatcaccattgatgatgtagtctatgtgatcgacggaggcaagatcaaggaaactcattttgatacccagaataacatctcaactatgtccgcggaatgggtttccaaagctaacgctaagcagcgtaagggtcgcgctggcagagtgcagccaggtcattgttatcacctctataacggcttaagggcctccctgctggacgactaccagctccctgaaattttgcgaacacccctagaggaattgtgtcttcagatcaagatccttcgcctcgggggaatcgcttactttctgagccgccttatggaccctccctccaacgaagctgtgctgctgtcgattcggcacctgatggagctgaacgcattggataaacaggaagaattgaccccactcggcgtgcacctggcccgtctcccagtcgaacctcacattggcaagatgatactgtttggggcacttttctgctgcctagaccctgttttaacaattgctgcctcactttcgtttaaggacccatttgttattccacttgggaaagagaaaattgccgacgctaggagaaaggagctggctaaagacaccagaagtgaccatttgacagtggtgaatgccttcgaaggctgggaggaggccagacggagagggttcaggtatgaaaaggactattgttgggagtacttcctgagttcaaacaccctgcaaatgctgcacaatatgaaggggcagttcgccgaacacttgttgggagcgggtttcgtatctagccgtaatcccaaagacccggaaagcaacatcaattctgacaatgaaaaaatcattaaagctgtcatttgcgcaggcctttaccccaaagtggctaagatcagacttaatttgggcaaaaaacgtaagatggtgaaagtgtatacaaaaacggacggtcttgtcgccgttcaccccaaaagcgtcaatgtggagcagacagatttccattataactggctgatatatcatttgaagatgcggacatcctccatctatctgtacgactgcaccgaggtgagtccatactgtctgcttttttttggcggtgatatttccattcagaaggataatgatcaggagacaatagctgtggacgaatggatcgtgtttcaaagtccagccaggattgcccaccttgtgaaggagctcaggaaggagttggacattctacttcaggaaaagatcgagtctccacatcctgtagactggaatgatacaaaatccagggattgcgccgttctgagtgctataatagacctcattaagacgcaggaaaaagccactcctcggaactttccccctagattccaagatgggtactatagttag

SEQ ID NO: 206239 - DNA, 2940 bp, Artificial Sequence
  derived and/or modified sequence
atgagctacgactaccaccagaactggggcagagacggcggccccagaagcagcggcggcggctacggcggcggccccgccggcggccacggcggcaacagaggcagcggcggcggcggcggcggcggcggcggcggcagaggcggcagaggcagacaccccggccacctgaagggcagagagatcggcatgtggtacgccaagaagcagggccagaagaacaaggaggccgagagacaggagagagccgtggtgcacatggacgagagaagagaggagcagatcgtgcagctgctgaacagcgtgcaggccaagaacgacaaggagagcgaggcccagatcagctggttcgcccccgaggaccacggctacggcaccgaggtgagcaccaagaacaccccctgcagcgagaacaagctggacatccaggagaagaagctgatcaaccaggagaagaagatgttcagaatcagaaacagaagctacatcgacagagacagcgagtacctgctgcaggagaacgagcccgacggcaccctggaccagaagctgctggaggacctgcagaagaagaagaacgacctgagatacatcgagatgcagcacttcagagagaagctgcccagctacggcatgcagaaggagctggtgaacctgatcgacaaccaccaggtgaccgtgatcagcggcgagaccggctgcggcaagaccacccaggtgacccagttcatcctggacaactacatcgagagaggcaagggcagcgcctgcagaatcgtgtgcacccagcccagaagaatcagcgccatcagcgtggccgagagagtggccgccgagagagccgagagctgcggcagcggcaacagcaccggctaccagatcagactgcagagcagactgcccagaaagcagggcagcatcctgtactgcaccaccggcatcatcctgcagtggctgcagagcgacccctacctgagcagcgtgagccacatcgtgctggacgagatccacgagagaaacctgcagagcgacgtgctgatgaccgtggtgaaggacctgctgaacttcagaagcgacctgaaggtgatcctgatgagcgccaccctgaacgccgagaagttcagcgagtacttcggcaactgccccatgatccacatccccggcttcaccttccccgtggtggagtacctgctggaggacgtgatcgagaagatcagatacgtgcccgagcagaaggagcacagaagccagttcaagagaggcttcatgcagggccacgtgaacagacaggagaaggaggagaaggaggccatctacaaggagagatggcccgactacgtgagagagctgagaagaagatacagcgccagcaccgtggacgtgatcgagatgatggaggacgacaaggtggacctgaacctgatcgtggccctgatcagatacatcgtgctggaggaggaggacggcgccatcctggtgttcctgcccggctgggacaacatcagcaccctgcacgacctgctgatgagccaggtgatgttcaagagcgacaagttcctgatcatccccctgcacagcctgatgcccaccgtgaaccagacccaggtgttcaagagaaccccccccggcgtgagaaagatcgtgatcgccaccaacatcgccgagaccagcatcaccatcgacgacgtggtgtacgtgatcgacggcggcaagatcaaggagacccacttcgacacccagaacaacatcagcaccatgagcgccgagtgggtgagcaaggccaacgccaagcagagaaagggcagagccggcagagtgcagcccggccactgctaccacctgtacaacggcctgagagccagcctgctggacgactaccagctgcccgagatcctgagaacccccctggaggagctgtgcctgcagatcaagatcctgagactgggcggcatcgcctacttcctgagcagactgatggacccccccagcaacgaggccgtgctgctgagcatcagacacctgatggagctgaacgccctggacaagcaggaggagctgacccccctgggcgtgcacctggccagactgcccgtggagccccacatcggcaagatgatcctgttcggcgccctgttctgctgcctggaccccgtgctgaccatcgccgccagcctgagcttcaaggaccccttcgtgatccccctgggctgggaggaggccagaagaagaggcttcagatacgagaaggactactgctgggagtacttcctgagcagcaacaccctgcagatgctgcacaacatgaagggccagttcgccgagcacctgctgggcgccggcttcgtgagcagcagaaaccccaaggaccccgagagcaacatcaacagcgacaacgagaagatcatcaaggccgtgatctgcgccggcctgtaccccaaggtggccaagatcagactgaacctgggcaagaagagaaagatggtgaaggtgtacaccaagaccgacggcctggtggccgtgcaccccaagagcgtgaacgtggagcagaccgacttccactacaactggctgatctaccacctgaagatgagaaccagcagcatctacctgtacgactgcaccgaggtgagcccctactgcctgctgttcttcggcggcgacatcagcatccagaaggacaacgaccaggagaccatcgccgtggacgagtggatcgtgttccagagccccgccagaatcgcccacctggtgaaggagctgagaaaggagctggacatcctgctgcaggagaagatcgagagcccccaccccgtggactggaacgacaccaagagcagagactgcgccgtgctgagcgccatcatcgacctgatcaagacccaggagaaggccacccccagaaacttcccccccagattccaggacggctactacagctag

SEQ ID NO: 206240 - DNA, 3027 bp, Artificial Sequence
  derived and/or modified sequence
atgagctacgactaccaccagaactggggcagagacggcggccccagaagcagcggcggcggctacggcggcggccccgccggcggccacggcggcaacagaggcagcggcggcggcggcggcggcggcggcggcggcagaggcggcagaggcagacaccccggccacctgaagggcagagagatcggcatgtggtacgccaagaagcagggccagaagaacaaggaggccgagagacaggagagagccgtggtgcacatggacgagagaagagaggagcagatcgtgcagctgctgaacagcgtgcaggccaagaacgacaaggagagcgaggcccagatcagctggttcgcccccgaggaccacggctacggcaccgaggtgagcaccaagaacaccccctgcagcgagaacaagctggacatccaggagaagaagctgatcaaccaggagaagaagatgttcagaatcagaaacagaagctacatcgacagagacagcgagtacctgctgcaggagaacgagcccgacggcaccctggaccagaagctgctggaggacctgcagaagaagaagaacgacctgagatacatcgagatgcagcacttcagagagaagctgcccagctacggcatgcagaaggagctggtgaacctgatcgacaaccaccaggtgaccgtgatcagcggcgagaccggctgcggcaagaccacccaggtgacccagttcatcctggacaactacatcgagagaggcaagggcagcgcctgcagaatcgtgtgcacccagcccagaagaatcagcgccatcagcgtggccgagagagtggccgccgagagagccgagagctgcggcagcggcaacagcaccggctaccagatcagactgcagagcagactgcccagaaagcagggcagcatcctgtactgcaccaccggcatcatcctgcagtggctgcagagcgacccctacctgagcagcgtgagccacatcgtgctggacgagatccacgagagaaacctgcagagcgacgtgctgatgaccgtggtgaaggacctgctgaacttcagaagcgacctgaaggtgatcctgatgagcgccaccctgaacgccgagaagttcagcgagtacttcggcaactgccccatgatccacatccccggcttcaccttccccgtggtggagtacctgctggaggacgtgatcgagaagatcagatacgtgcccgagcagaaggagcacagaagccagttcaagagaggcttcatgcagggccacgtgaacagacaggagaaggaggagaaggaggccatctacaaggagagatggcccgactacgtgagagagctgagaagaagatacagcgccagcaccgtggacgtgatcgagatgatggaggacgacaaggtggacctgaacctgatcgtggccctgatcagatacatcgtgctggaggaggaggacggcgccatcctggtgttcctgcccggctgggacaacatcagcaccctgcacgacctgctgatgagccaggtgatgttcaagagcgacaagttcctgatcatccccctgcacagcctgatgcccaccgtgaaccagacccaggtgttcaagagaaccccccccggcgtgagaaagatcgtgatcgccaccaacatcgccgagaccagcatcaccatcgacgacgtggtgtacgtgatcgacggcggcaagatcaaggagacccacttcgacacccagaacaacatcagcaccatgagcgccgagtgggtgagcaaggccaacgccaagcagagaaagggcagagccggcagagtgcagcccggccactgctaccacctgtacaacggcctgagagccagcctgctggacgactaccagctgcccgagatcctgagaacccccctggaggagctgtgcctgcagatcaagatcctgagactgggcggcatcgcctacttcctgagcagactgatggacccccccagcaacgaggccgtgctgctgagcatcagacacctgatggagctgaacgccctggacaagcaggaggagctgacccccctgggcgtgcacctggccagactgcccgtggagccccacatcggcaagatgatcctgttcggcgccctgttctgctgcctggaccccgtgctgaccatcgccgccagcctgagcttcaaggaccccttcgtgatccccctgggcaaggagaagatcgccgacgccagaagaaaggagctggccaaggacaccagaagcgaccacctgaccgtggtgaacgccttcgagggctgggaggaggccagaagaagaggcttcagatacgagaaggactactgctgggagtacttcctgagcagcaacaccctgcagatgctgcacaacatgaagggccagttcgccgagcacctgctgggcgccggcttcgtgagcagcagaaaccccaaggaccccgagagcaacatcaacagcgacaacgagaagatcatcaaggccgtgatctgcgccggcctgtaccccaaggtggccaagatcagactgaacctgggcaagaagagaaagatggtgaaggtgtacaccaagaccgacggcctggtggccgtgcaccccaagagcgtgaacgtggagcagaccgacttccactacaactggctgatctaccacctgaagatgagaaccagcagcatctacctgtacgactgcaccgaggtgagcccctactgcctgctgttcttcggcggcgacatcagcatccagaaggacaacgaccaggagaccatcgccgtggacgagtggatcgtgttccagagccccgccagaatcgcccacctggtgaaggagctgagaaaggagctggacatcctgctgcaggagaagatcgagagcccccaccccgtggactggaacgacaccaagagcagagactgcgccgtgctgagcgccatcatcgacctgatcaagacccaggagaaggccacccccagaaacttcccccccagattccaggacggctactacagctag

SEQ ID NO: 206241 - DNA, 3487 bp, Artificial Sequence
  derived and/or modified sequence
ttccagcggttgctggttctgacgggttgtagtctgccaggacaatgagttatgactaccatcagaactggggccgtgatgggggtccccgcagctccggtgggggctatggaggggggccagcagggggtcatggaggtaaccgaggctccggaggaggcggcggcggcggagggggtggtcgaggcggcaggggccggcatcccgggcacctgaaaggccgcgaaatcggcatgtggtacgcgaaaaaacaggggcagaagaacaaggaagcggagaggcaagagagagctgtagtacacatggatgaacgacgagaagaacaaattgtacagttactgaattctgttcaagcgaagaatgataaagagtcagaagcacagatatcctggtttgctcctgaggatcatggatacggtactgaagtttctactaagaacacaccatgctcagagaacaaacttgacatccaggaaaagaagttgataaatcaagaaaaaaaaatgtttagaatcaggaacagatcatatattgaccgagattctgagtatctcttgcaagaaaatgaaccagatggaactttagaccaaaaattattggaagatttacaaaagaaaaaaaatgaccttcggtatattgaaatgcagcatttcagagaaaagctgccttcgtatggaatgcaaaaggaattggtaaatttaattgataaccatcaggtaacagtaataagtggtgaaactggttgtggcaaaaccactcaagttactcagttcattttggataactacattgaaagaggaaaaggatctgcttgcagaatagtttgtactcagccaagaagaattagtgccatttcagttgcggaaagagtagctgcagaaagggcagaatcttgtggcagtggtaatagtactggatatcaaattcgtctccagagtcggttgccaaggaaacagggttctatcttatactgtacaacaggaatcatccttcagtggctccagtcagacccgtatttgtccagtgttagtcatatcgtacttgatgaaatccatgaaagaaatctgcagtcagatgttttaatgactgttgttaaagaccttctcaattttcgatctgacttgaaagtaatattgatgagtgcaacattgaatgcagaaaagttttcagaatattttggtaactgtccaatgatacatatacctggttttacctttccggttgtggaatatcttttggaagatgtaattgaaaaaataaggtatgttccagaacaaaaagaacacagatcccagtttaagaggggtttcatgcaagggcatgtaaatagacaagaaaaagaagaaaaagaagcaatatataaagaacgttggccagattatgtaagggaactgcgaagaaggtattctgcaagtactgtagatgttatagaaatgatggaggatgataaagttgatctgaatttgattgttgccctcatccgatacattgttttggaagaagaggatggtgcgatactggtctttctgccaggctgggacaatatcagcactttacatgatctcttgatgtcacaagtaatgtttaaatcagataaatttttaattatacctttacattcactgatgcctacagttaaccagacacaggtgtttaaaagaacccctcctggtgttcggaaaatagtaattgctaccaacattgcggagactagcattaccatagatgatgtcgtttatgtgatagatggaggaaaaataaaagagacgcattttgatactcagaacaatatcagtacaatgtccgctgagtgggttagtaaagctaatgccaaacagagaaaaggtcgagctggaagagttcaacctggtcattgctatcatctgtataatggtcttagagcaagtcttctagatgactatcaactgccagaaattttgagaactcctttggaagaactttgtttacaaataaagattttaaggctaggtggaattgcttattttctgagtagattaatggacccaccatcaaatgaggcagtgttactctccataagacacctgatggagctgaacgctttggataaacaagaagaattgacacctcttggagtccacttggcacgattacccgttgagccacatattggaaaaatgattctttttggagcactgttctgctgcttagacccagtactcactattgctgctagtctcagtttcaaagatccatttgtcattccactgggctgggaagaggctaggcgacgtggtttcagatacgaaaaggactattgctgggaatattttctgtcttcaaacacactgcagatgctgcataacatgaaaggacagtttgctgagcatcttcttggagctggatttgtaagcagtagaaatcctaaagatccagaatctaatataaattcagataatgagaagataattaaagctgtcatctgtgctggtttatatcccaaagttgctaaaattcgactaaatttgggtaaaaaaagaaaaatggtaaaagtttacacaaaaaccgatggcctggttgctgttcatcctaaatctgttaatgtggagcaaacagactttcactacaactggcttatctatcacctaaagatgagaacaagcagtatatacttgtatgactgcacagaggtttccccatactgtctcttgttttttggaggtgacatttccatccagaaggataacgatcaggaaactattgctgtagatgagtggattgtatttcagtctccagcaagaattgcccatcttgttaaggaattaagaaaggaactagatattcttctgcaagagaagattgaaagtcctcatcctgtagactggaatgacactaaatccagagactgtgcagtactgtcagctattatagacttgatcaaaacacaggaaaaggcaactcccaggaactttccgccacgattccaggatggatattacagctgacagcttttcaggggtggtctgaaaagccagtttgacagccattcttcatcattgtttaaattttggctggatgccaaaccctgggacatgaacaattttcatgtgtaaggtagaagccttcagtaggtagtaaagacttaatgtgcatgacttgatgttatatgtagagatatatatatatatatatatataccataaaagcaatatgttctctgatcatatactctgctgtggtcatgcccactctttgggagtatattccctttatatatattgagtattgtaccacttgagaaattcctttgttctgttatacaaaattaatctttctgctcataatgattgatgataccaccagtaaaaataggatgtttaccccaaaacaagtgtcaattaagaatttgaacacaaccacattttttaaaatgaaacttctatcggaagtaaattaatttgttgtaataaagtccagtatttaataaaatgtacaatgttaaatctca

SEQ ID NO: 206242 - DNA, 6733 bp, Artificial Sequence
  derived and/or modified sequence
aagtgggcgcacagtggcttccgggcccggacgccatttccagcggttgctggttctgacgggttgtagtctgccaggacaatgagttatgactaccatcagaactggggccgtgatgggggtccccgcagctccggtgggggctatggaggggggccagcagggggtcatggaggtaaccgaggctccggaggaggcggcggcggcggagggggtggtcgaggcggcaggggccggcatcccgggcacctgaaaggccgcgaaatcggcatgtggtacgcgaaaaaacaggggcagaagaacaaggaagcggagaggcaagagagagctgtagtacacatggatgaacgacgagaagaacaaattgtacagttactgaattctgttcaagcgaagaatgataaagagtcagaagcacagatatcctggtttgctcctgaggatcatggatacggtactgaagtttctactaagaacacaccatgctcagagaacaaacttgacatccaggaaaagaagttgataaatcaagaaaaaaaaatgtttagaatcaggaacagatcatatattgaccgagattctgagtatctcttgcaagaaaatgaaccagatggaactttagaccaaaaattattggaagatttacaaaagaaaaaaaatgaccttcggtatattgaaatgcagcatttcagagaaaagctgccttcgtatggaatgcaaaaggaattggtaaatttaattgataaccatcaggtaacagtaataagtggtgaaactggttgtggcaaaaccactcaagttactcagttcattttggataactacattgaaagaggaaaaggatctgcttgcagaatagtttgtactcagccaagaagaattagtgccatttcagttgcggaaagagtagctgcagaaagggcagaatcttgtggcagtggtaatagtactggatatcaaattcgtctccagagtcggttgccaaggaaacagggttctatcttatactgtacaacaggaatcatccttcagtggctccagtcagacccgtatttgtccagtgttagtcatatcgtacttgatgaaatccatgaaagaaatctgcagtcagatgttttaatgactgttgttaaagaccttctcaattttcgatctgacttgaaagtaatattgatgagtgcaacattgaatgcagaaaagttttcagaatattttggtaactgtccaatgatacatatacctggttttacctttccggttgtggaatatcttttggaagatgtaattgaaaaaataaggtatgttccagaacaaaaagaacacagatcccagtttaagaggggtttcatgcaagggcatgtaaatagacaagaaaaagaagaaaaagaagcaatatataaagaacgttggccagattatgtaagggaactgcgaagaaggtattctgcaagtactgtagatgttatagaaatgatggaggatgataaagttgatctgaatttgattgttgccctcatccgatacattgttttggaagaagaggatggtgcgatactggtctttctgccaggctgggacaatatcagcactttacatgatctcttgatgtcacaagtaatgtttaaatcagataaatttttaattatacctttacattcactgatgcctacagttaaccagacacaggtgtttaaaagaacccctcctggtgttcggaaaatagtaattgctaccaacattgcggagactagcattaccatagatgatgtcgtttatgtgatagatggaggaaaaataaaagagacgcattttgatactcagaacaatatcagtacaatgtccgctgagtgggttagtaaagctaatgccaaacagagaaaaggtcgagctggaagagttcaacctggtcattgctatcatctgtataatggtcttagagcaagtcttctagatgactatcaactgccagaaattttgagaactcctttggaagaactttgtttacaaataaagattttaaggctaggtggaattgcttattttctgagtagattaatggacccaccatcaaatgaggcagtgttactctccataagacacctgatggagctgaacgctttggataaacaagaagaattgacacctcttggagtccacttggcacgattacccgttgagccacatattggaaaaatgattctttttggagcactgttctgctgcttagacccagtactcactattgctgctagtctcagtttcaaagatccatttgtcattccactgggaaaagaaaagattgcagatgcaagaagaaaggaattggcaaaggatactagaagtgatcacttaacagttgtgaatgcgtttgagggctgggaagaggctaggcgacgtggtttcagatacgaaaaggactattgctgggaatattttctgtcttcaaacacactgcagatgctgcataacatgaaaggacagtttgctgagcatcttcttggagctggatttgtaagcagtagaaatcctaaagatccagaatctaatataaattcagataatgagaagataattaaagctgtcatctgtgctggtttatatcccaaagttgctaaaattcgactaaatttgggtaaaaaaagaaaaatggtaaaagtttacacaaaaaccgatggcctggttgctgttcatcctaaatctgttaatgtggagcaaacagactttcactacaactggcttatctatcacctaaagatgagaacaagcagtatatacttgtatgactgcacagaggtttccccatactgtctcttgttttttggaggtgacatttccatccagaaggataacgatcaggaaactattgctgtagatgagtggattgtatttcagtctccagcaagaattgcccatcttgttaaggaattaagaaaggaactagatattcttctgcaagagaagattgaaagtcctcatcctgtagactggaatgacactaaatccagagactgtgcagtactgtcagctattatagacttgatcaaaacacaggaaaaggcaactcccaggaactttccgccacgattccaggatggatattacagctgacagcttttcaggggtggtctgaaaagccagtttgacagccattcttcatcattgtttaaattttggctggatgccaaaccctgggacatgaacaattttcatgtgtaaggtagaagccttcagtaggtagtaaagacttaatgtgcatgacttgatgttatatgtagagatatatatatatatatatatataccataaaagcaatatgttctctgatcatatactctgctgtggtcatgcccactctttgggagtatattccctttatatatattgagtattgtaccacttgagaaattcctttgttctgttatacaaaattaatctttctgctcataatgattgatgataccaccagtaaaaataggatgtttaccccaaaacaagtgtcaattaagaatttgaacacaaccacattttttaaaatgaaacttctatcggaagtaaattaatttgttgtaataaagtccagtatttaataaaatgtacaatgttaaatctcagccaacctcttggattggtttctacattttcacctatggcttggttcatttgatatttttactatttttaaaacacgtgccctttttatatcaccctgtgcctcataatacagcaattgagagcacggtctggagcctgattacctcagttccagtctcagctctgtcagttagtcagtgtcttggcttctctcctttttccttatcttgtaagatacagttggcccttcatatccatgcattccacatctgtggattcaaacaactgtggatagaagatatttggggaaaaaaaggatggttgtgtctatactgaacatgtgcagacttttttccttgtcattccctaaacaatacagtttaacagctatttatatagtatttacattgtattaggtattataaataatctagagatgacttaaagaatatgggaggttgtgcctaggtaacatgcaaatactacgccattttattataaaagacttgagcatccatggatttaggtatttgaggggttggggttggaaaccagtcccccacagatactgagggacaactgtacatgtaacagttgtgaggatgaagtacattaatacatgtaaagcacataggctagtgcctgtactctctgaatcttagttgttatttgtccctgaaatattttcgtaaatgtctaacaatctattatattacactttttattttattgctacttatcttcttcgccaaggaatagtgtaacaacacatgctgtacattttcagccctatcagattgtgataaatactgttggttgccggccagcaactattttgtccctcccttcttgcttgcttattctggtgttcccttctgtgcagctctgtgtccaggtatgttggaccctttccctaagggtgaatcctgctgttctaaatgaatcacatgtggtcttatcccccttataagtaattgataaggcatgagtacataaacatgtcctagtgaatggcagctgagaagtgatcttcaagggggtgtctgaaaaatgttttactcactaataggcttagaggaggaaatcctgctctctctggacattgtcttttctgactctgatagttggaactgctgcagccaactaatgatcacaaggagacacggactcagactgaggttagctcagtggaaagatagaactcaccagagcctttgataatgccggtaagcttcagaattaacccattctagagctgctttacatgtggacttatgttgatataataaaaacccttcaattgtttaagccacttttaataggatattgttagttttttgttggttttttgttttgttttgttttgttttttgttttttggagacagtgtcttgccctgtcacccaggctggagtgcagtggtgtgatcttggttcactgcagcctcgacttcctgggttcaagtgatccttctgcctcagcctcccaaatagctgggactataggcatgcatcaccacacccagctaatttctgtattttttgtagagacaccgtttcaccatgttgcccaggctggtctcaaaactcctgtgctcaagcagtctgcccgccttggcttcccaaagtgctgacattacaggtatgagccactgcacccggtccctagtagggtatttttaacttggcaaaaagggtattaatcagaaacatacactatccatcactgagtattatactcttgattttgcaatgtaagagttttaacctatttgtctgacagaaggtgtaaaagtgctggacatgctgcagaaagaaacaggaaaagcatcttgctgcactccaaagaatgcaaattttaatgtgccttccaataaatgcaaggaaaccgaaagagttaatagtatcatacaatgactgggatgtattgataatgctacagtgatccattaacagcacttgttcaggtactgctcccaatcctgggaatgtgtgttacctgttatgtctcaaatcctttatcttggctgttcttctaaaagtgatctgtctgtcattgaatgctggcattagagtcatgtcacaatattagagcatactggttttgcctctaacgtcgaggtgaccatctggtctttcttgctctgtaagagtttctgtttgtgcttttttttcccttacttttattatccagtttaaatccagtcagttggccaaaatggtcttggaagaaaggatttagagattctgtaaaaaagattattagttggttctgtgtttgcaaaccagtatgtaattcccatatgaatggggaaaatgttcctgaggaattatttaattgatgaggcattcacagagattaaagcagttattgttacctccaatttatgtcttctgcacagctgattaggttggacattttaatccaaggtgctacttacattctgtttcttttgtttacaaaatagggcattactgagtagaaaatacattccaggtctaagaactgtttgttctttagtggattttaaagaataagacattaaattaagaaggaaaatctgtttgattcatcattttgagtaatgcagagaataactcttaaaaaaaaaacctgaaacagaaactttcaggaaaaaaacaaaagaaattaaactactgaataatctttcaaaagcatcgttgaacagtgagcacatgtgatgccttcccaattaattaatttgggcaaaagctctagataaacttacaccaattgttgcaaggcattctctattactgcatttttaaaacaaagtcctcccctaaaagttatgaattatacaaaagctttaggaggaattttagtactcctttacccaaaataaatagtggtaaatttccttctgttcttagctctgagtttgtatttatttataagtcattgtgatcatgtatacttatatatttttaatatgctaattgcttttaaatgggatttttgttctgattttaaaataatacatcctccctggacaatatttggaaatgtagcaaagtaaatcatgttaccattgttccattttgatatatataaactttaggtattattttatatataataaattttaagatattatatacaataaaattaaccaatttaa

SEQ ID NO: 206243 - protein, 748 aa, Artificial Sequence
  derived and/or modified sequence
MSGSGRKDFDVKHILRLRWKLFSHPSPSTGGPAGGGCLQQDGSGSFEHWGPSQSRLLKSQERSGVSTFWKKPSSSSSSSSSPSSSSSSFNPLNGTLLPVATRLQQGAPGQGTQQPARTLFYVESLEEEVVPGMDFPGPHEKGLVLQELKVEPDNSSQATGEGCGHRLSSTGHSMTPQSDLDSSSSEEFYQAVHHAEQTFRKMESYLKQQQLCDVILIVGNRKIPAHRLVLSSVSDYFAAMFTSDVCEAKQEEIKMEGIDPNALWDLVQFAYTGCLELKEDTIENLLAAACLLQLPQVVEVCCHFLMKLLHPSNCLGIRAFADAQGCIELMKVAHSYTMENIMEVIRNQEFLLLPAEELHKLLASDDVNVPDEETIFHALMMWVKYDMQSRCNDLSMLLAFIRLPLLPPQILADLENHALFKNDLECQKLILEAMKYHLLPERRTLMQSPRTKPRKSTVGTLYAVGGMDNNKGATTIEKYDLRTNLWIQAGMMNGRRLQFGVAVIDDKLFVIGGRDGLKTLNTVECYNPKTKTWTVLPPMSTHRHGLGVTVLEGPIYAVGGHDGWSYLNTVERWDPQSQQWTFVASMSIARSTVGVAALNGKLYSVGGRDGSSCLSSMEYYDPHTNKWNMCAPMCKRRGGVGVATCDGFLYAVGGHDAPASNHCSRLLDYVERYDPKTDTWTMVAPLSMPRDAVGVCLLGDRLYAVGGYDGQTYLNTMESYDPQTNEWTQMASLNIGRAGACVVVIKQP

SEQ ID NO: 206244 - DNA, 4159 bp, Artificial Sequence
  derived and/or modified sequence
acttacaggggaggaggaggcgctgaggcagagagaaaattgtactgtgaggaccttgacagcttcacaggcgggctttttcttttgcctccctatatgcgctagaatatctatttttctcttttacaaactgactatataaaaccacctcttctggcattgcagaaagcaattgactttctcagagccacccggcaggctatcggggcatcctcgaaaaggccagggacaggggcgcaggtgcaccaagagatctggcgaggggtacgcttcctcgagacttggggctctttctctctgcgctctccagacactgaactctgagctgcaaggacaagaacgccaccaccttccctactaaggctctgccacaagcgcatcccagtgaggtgtatccagctgcagccgcctccggagcttcggagcgctcagacctccctccctcgcgcatctccagcctaagggttgtcccacctcgccataacacggggctctcgcgcgggcatcgaggattctcagcttttggcgtcccagtcctgcctctgctcctgcctggtggtgtccccacgcccaggtcctgcggacccgaccacggctgaaacgcgcggctttgccgtctgcgctccagccttcgcctggcagagcgcgcagcccacctagcgtcttctggctctaggggtgcagagggcgcatcccgcctcttcctccgcccccgggccccgctgtcctcccccacctgctgaccagcctactcctgcgtgagctgccagccttttgccttctgtgcgtaaagcatgtcaggctctgggcgaaaagacttcgatgtgaagcacattctgcgactccgctggaaactcttcagccacccgtctccttccaccggcggcccggcggggggaggctgcctgcaacaggacggcagtggcagctttgagcactggggacccagccagagtcgcctgctcaaaagccaagagagaagcggtgtgagcactttctggaagaagccttcctcctcttcctcttcatcgtcctccccgtcctcttcctcctcttccttcaatccgctgaatggcaccctgcttccagttgccacgaggctgcagcaaggggctcctgggcagggcactcagcagccagccaggactctcttctacgtggagtcactagaggaggaggtggtgccaggcatggactttcctggaccacacgaaaaagggctggttctgcaagagctcaaagtggagccagacaactctagccaggcaacaggtgaaggatgtggacacaggctgtcatcaaccggccattcaatgacacctcaaagtgatttggactccagtagctctgaagaattctatcaagctgttcatcatgctgagcaaaccttcagaaagatggaaagttatttgaagcagcagcaactttgtgatgttatcctgattgttgggaaccgaaagatacctgcacataggcttgttctgagttcagtctccgactattttgcggccatgtttacaagtgatgtttgtgaagccaagcaagaggagatcaaaatggaaggcatagaccccaatgctctctgggaccttgtccaatttgcatatacaggctgcttggaattaaaagaggacaccattgagaaccttcttgctgcagcgtgccttcttcagcttccacaggtggtggaagtgtgctgccacttcctcatgaagcttttgcatccatctaactgtttaggaattcgagccttcgcagatgctcaaggatgcattgagttaatgaaggtggcccacagctacacaatggaaaacataatggaagttatcagaaatcaagagtttttactccttccagctgaggagctccataaactactggccagtgatgatgtcaatgttcctgatgaagaaaccatcttccatgcattgatgatgtgggtcaagtatgacatgcagagtagatgcaatgacctgagcatgcttcttgcctttataagactgccactgcttccaccacagatattggctgacctagaaaatcatgcattatttaagaatgatctggaatgtcaaaagctgattctagaagcaatgaaataccatctattgccagaaagaagaactttaatgcaaagtccgagaactaaacccagaaaatctacagtcggaactttgtatgctgtaggaggaatggataacaacaaaggagctacaactatagagaaatatgatctgagaacaaatctgtggatccaggcagggatgatgaatggcagaaggctgcagtttggtgtggctgttattgatgacaaactctttgtaattggaggtcgagatggcttaaagacattgaacactgttgaatgttacaatcccaaaaccaagacatggactgtcttaccaccaatgtcaacacacagacatggtctaggtgtaacagtacttgaaggccctatttatgctgtgggaggccatgatggctggagctatctgaatacagtggaaaggtgggatccacagagtcaacaatggacatttgtagccagtatgtcaattgctcggagcacagttggtgtagcagcattgaatggcaagttgtattcagttggaggtcgtgatggaagttcctgtttgagttcaatggaatattatgatcctcatacaaataagtggaacatgtgtgctcccatgtgtaagaggagagggggtgtcggagtggccacatgtgacggttttctttatgcagtaggaggtcatgatgctcctgcttcaaatcactgttcccggctactggattatgtagaaagatatgatcccaaaacagacacttggaccatggtggctcctttgagtatgcccagagatgctgttggggtctgtctccttggtgacagattatatgctgttggtggctatgatggacagacatacctcaacactatggaatcctatgacccacaaactaatgagtggacacagatggcttccttgaatattgggagagcaggtgcctgtgtggtagtcatcaagcaaccttgacttattgatattttacttggaaagattttacttgctggagtggttatttttatattgaatggcaagaatgagaacttccagagatgaaaactcttcaagaacaaggatctctgtagcgttacctactgatgttgaaagagttagtagatcaaacagaatagtaggaaacaagaaaacattaaacttatacaggaaaaatgtctggccatatgttagttagttcgggaatggttattggtaatttgttttgtattatagcatacaataactagagttaccaaaggcttgttttttcttgagcagttgaaaggagagaccaatatttgtgacatggatagtttcatgaccacaactcattcaatcattttatagtctatggcaatatccaagagattgccaagagtagaagacagaatatttcatctgacagtatctgattggtttactgtttttctaatcatatgtggtcataacgggaagcagaattatgctttattcaaacaaacctgcttctgcctcattttcctaagctatgagaacaattagagaaacagattcatgcttgtatcttgcattcagaaaacaaactgtcctactaatcaaagctgcatatctcatcagagataatggttgaattttattgcaaccatattggcaatctgaaactggcaaacacaaaggattgttttcactaggcttaccattttgctttgcttttttaacacactgagccaaagatgcagtgtaattattgggcttttgccttatgttgagttcagtgtaagcatggaagctagtgattctgaatgatatatatatccattgcatgttgaactcctttagaattttgttcttaaacaaacttagaatttcaaaagaaaaacatatgatccattaagttggagtgtttatgattattgctagaaagaaggcagacttcatattctcatcgcccatttttcaaacttgttacattgatctgtacattattttaagccacatgtttgtaattgtttaaaacaaagtggaaacattacacaatgtccttaataaataggcccatgtaaattttaattacaattaataaatgatcaaaaaatttgcatttaaaaaaaaaa

SEQ ID NO: 206245 - DNA, 2247 bp, Artificial Sequence
  derived and/or modified sequence
atgtctggatctgggaggaaagacttcgacgtgaaacatatcctgcgtctccggtggaagctctttagccaccctagtccaagtacgggcgggcctgccggaggcggctgcttacaacaagacggcagcggatcatttgagcactggggtccttctcagagccgacttctcaaatcacaggaacgctccggggtcagcaccttctggaagaagccttccagttcctccagttcatcatcatcaccttcctctagctcctcttcattcaaccccctcaatggaactttattgcctgtggcgactcggctgcagcagggcgctccagggcaagggacccagcagccagcgcggaccctcttttatgtcgagagcctcgaggaggaggtggtacccgggatggattttcccggaccacacgaaaaaggccttgtgcttcaggagcttaaggtggaacctgacaactccagccaggcaactggggaaggctgtggccataggctgtctagcacaggacatagcatgaccccccagagcgacctggactccagctcctctgaggaattttatcaggcagtacatcacgccgagcagacctttaggaaaatggaatcttacctcaagcagcagcaactatgtgacgtgatcctgatcgtgggcaatcgcaagattcccgctcaccggttggtcctatccagcgtgagcgactatttcgctgcgatgttcactagcgatgtctgcgaggcaaagcaggaggagattaagatggaaggcatcgaccccaatgctctgtgggatctggtgcaatttgcctacacgggctgccttgagctcaaggaggacacaatcgagaatcttttagctgctgcttgtttactccagttgccccaggtggtcgaagtatgttgtcactttctgatgaagctgttacatccatcaaactgtctgggcatccgggccttcgccgacgcacaaggatgcatcgaactaatgaaagtcgcccactcttatacaatggaaaatattatggaagtaattaggaatcaggaatttctactcctgccggccgaagaactgcacaagctgcttgccagcgatgatgtgaatgtccctgatgaggaaacaatcttccacgcccttatgatgtgggtgaagtatgatatgcagtctaggtgtaatgacctcagtatgctcctagccttcattcgtctgcctctgcttcccccccagatactcgctgacctcgagaatcacgccctcttcaaaaatgacctcgagtgtcagaagttgattctcgaggcaatgaagtaccatctgttaccagagcgaagaaccttgatgcagtcgcctcgcactaagccacggaagtctaccgtcggaacgctgtatgccgtcggcggtatggataacaacaagggagccaccaccatcgagaagtacgacttgcggaccaacctgtggatccaggccggaatgatgaacggtcgcagactacagttcggggtggctgtaatcgacgacaaactgtttgtcatcggcggcagagatgggctgaaaaccctcaatactgtagaatgctacaatcccaaaaccaagacatggaccgtgctgcccccgatgtccactcaccggcacgggttaggggtgactgtgctcgagggccccatctacgccgtggggggccatgacggctggtcatacctcaacactgttgaacggtgggatccccagagtcagcagtggacgtttgtcgcttcgatgagcattgcacggagtactgttggagtcgctgcgcttaacggaaaactctattctgttggcgggcgggatggatcaagctgcctcagcagcatggagtattatgatcctcacaccaataagtggaatatgtgtgcccccatgtgtaagcgcagaggcggagtgggggtggccacctgcgacggcttcctgtatgccgtgggcggccatgatgcccccgccagtaatcactgtagccggctgttggactacgtggagcgctatgaccctaagaccgacacctggactatggtggctccactgagtatgccccgggacgctgttggagtgtgtctcctgggcgatagactgtacgccgtaggtggttatgatggccagacatatttgaataccatggaatcctacgacccacaaacgaacgaatggacccaaatggcctctctgaatatcggacgcgctggcgcatgcgttgttgttatcaagcagccctag

SEQ ID NO: 206246 - DNA, 4115 bp, Artificial Sequence
  derived and/or modified sequence
gaaaattgtactgtgaggaccttgacagcttcacaggcgggctttttcttttgcctccctatatgcgctagaatatctatttttctcttttacaaactgactatataaaaccacctcttctggcattgcagaaagcaattgactttctcagagccacccggcaggctatcggggcatcctcgaaaaggccagggacaggggcgcaggtgcaccaagagatctggcgaggggtacgcttcctcgagacttggggctctttctctctgcgctctccagacactgaactctgagctgcaaggacaagaacgccaccaccttccctactaaggctctgccacaagcgcatcccagtgaggtgtatccagctgcagccgcctccggagcttcggagcgctcagacctccctccctcgcgcatctccagcctaagggttgtcccacctcgccataacacggggctctcgcgcgggcatcgaggattctcagcttttggcgtcccagtcctgcctctgctcctgcctggtggtgtccccacgcccaggtcctgcggacccgaccacggctgaaacgcgcggctttgccgtctgcgctccagccttcgcctggcagagcgcgcagcccacctagcgtcttctggctctaggggtgcagagggcgcatcccgcctcttcctccgcccccgggccccgctgtcctcccccacctgctgaccagcctactcctgcgtgagctgccagccttttgccttctgtgcgtaaagcatgtcaggctctgggcgaaaagacttcgatgtgaagcacattctgcgactccgctggaaactcttcagccacccgtctccttccaccggcggcccggcggggggaggctgcctgcaacaggacggcagtggcagctttgagcactggggacccagccagagtcgcctgctcaaaagccaagagagaagcggtgtgagcactttctggaagaagccttcctcctcttcctcttcatcgtcctccccgtcctcttcctcctcttccttcaatccgctgaatggcaccctgcttccagttgccacgaggctgcagcaaggggctcctgggcagggcactcagcagccagccaggactctcttctacgtggagtcactagaggaggaggtggtgccaggcatggactttcctggaccacacgaaaaagggctggttctgcaagagctcaaagtggagccagacaactctagccaggcaacaggtgaaggatgtggacacaggctgtcatcaaccggccattcaatgacacctcaaagtgatttggactccagtagctctgaagaattctatcaagctgttcatcatgctgagcaaaccttcagaaagatggaaagttatttgaagcagcagcaactttgtgatgttatcctgattgttgggaaccgaaagatacctgcacataggcttgttctgagttcagtctccgactattttgcggccatgtttacaagtgatgtttgtgaagccaagcaagaggagatcaaaatggaaggcatagaccccaatgctctctgggaccttgtccaatttgcatatacaggctgcttggaattaaaagaggacaccattgagaaccttcttgctgcagcgtgccttcttcagcttccacaggtggtggaagtgtgctgccacttcctcatgaagcttttgcatccatctaactgtttaggaattcgagccttcgcagatgctcaaggatgcattgagttaatgaaggtggcccacagctacacaatggaaaacataatggaagttatcagaaatcaagagtttttactccttccagctgaggagctccataaactactggccagtgatgatgtcaatgttcctgatgaagaaaccatcttccatgcattgatgatgtgggtcaagtatgacatgcagagtagatgcaatgacctgagcatgcttcttgcctttataagactgccactgcttccaccacagatattggctgacctagaaaatcatgcattatttaagaatgatctggaatgtcaaaagctgattctagaagcaatgaaataccatctattgccagaaagaagaactttaatgcaaagtccgagaactaaacccagaaaatctacagtcggaactttgtatgctgtaggaggaatggataacaacaaaggagctacaactatagagaaatatgatctgagaacaaatctgtggatccaggcagggatgatgaatggcagaaggctgcagtttggtgtggctgttattgatgacaaactctttgtaattggaggtcgagatggcttaaagacattgaacactgttgaatgttacaatcccaaaaccaagacatggactgtcttaccaccaatgtcaacacacagacatggtctaggtgtaacagtacttgaaggccctatttatgctgtgggaggccatgatggctggagctatctgaatacagtggaaaggtgggatccacagagtcaacaatggacatttgtagccagtatgtcaattgctcggagcacagttggtgtagcagcattgaatggcaagttgtattcagttggaggtcgtgatggaagttcctgtttgagttcaatggaatattatgatcctcatacaaataagtggaacatgtgtgctcccatgtgtaagaggagagggggtgtcggagtggccacatgtgacggttttctttatgcagtaggaggtcatgatgctcctgcttcaaatcactgttcccggctactggattatgtagaaagatatgatcccaaaacagacacttggaccatggtggctcctttgagtatgcccagagatgctgttggggtctgtctccttggtgacagattatatgctgttggtggctatgatggacagacatacctcaacactatggaatcctatgacccacaaactaatgagtggacacagatggcttccttgaatattgggagagcaggtgcctgtgtggtagtcatcaagcaaccttgacttattgatattttacttggaaagattttacttgctggagtggttatttttatattgaatggcaagaatgagaacttccagagatgaaaactcttcaagaacaaggatctctgtagcgttacctactgatgttgaaagagttagtagatcaaacagaatagtaggaaacaagaaaacattaaacttatacaggaaaaatgtctggccatatgttagttagttcgggaatggttattggtaatttgttttgtattatagcatacaataactagagttaccaaaggcttgttttttcttgagcagttgaaaggagagaccaatatttgtgacatggatagtttcatgaccacaactcattcaatcattttatagtctatggcaatatccaagagattgccaagagtagaagacagaatatttcatctgacagtatctgattggtttactgtttttctaatcatatgtggtcataacgggaagcagaattatgctttattcaaacaaacctgcttctgcctcattttcctaagctatgagaacaattagagaaacagattcatgcttgtatcttgcattcagaaaacaaactgtcctactaatcaaagctgcatatctcatcagagataatggttgaattttattgcaaccatattggcaatctgaaactggcaaacacaaaggattgttttcactaggcttaccattttgctttgcttttttaacacactgagccaaagatgcagtgtaattattgggcttttgccttatgttgagttcagtgtaagcatggaagctagtgattctgaatgatatatatatccattgcatgttgaactcctttagaattttgttcttaaacaaacttagaatttcaaaagaaaaacatatgatccattaagttggagtgtttatgattattgctagaaagaaggcagacttcatattctcatcgcccatttttcaaacttgttacattgatctgtacattattttaagccacatgtttgtaattgtttaaaacaaagtggaaacattacacaatgtccttaataaataggcccatgtaaattttaattacaattaataaatgatcaaaaaatttgcattt

SEQ ID NO: 206247 - DNA, 2247 bp, Artificial Sequence
  derived and/or modified sequence
atgagcggcagcggcaggaaggactttgatgtgaagcacatcctgcggctgcgctggaagctgttcagccaccccagccccagcactggaggccctgctgggggcggctgcctgcagcaggacggcagcggcagctttgagcactggggccccagccagagccggctgctgaagagccaggagaggtctggagtgtccaccttctggaagaagcccagcagcagcagcagcagcagcagcagccccagcagcagcagcagcagcttcaaccccctgaatggcaccctgctgcctgtggccacccggctgcagcagggcgcccctggccagggcacccagcagcctgcccggaccctcttctacgtggagagcctggaggaggaggtggtgcccggcatggacttccctggcccccatgagaagggcctggtgctgcaggagctgaaggtggagccagacaacagcagccaggccactggagagggctgcggccaccggctgagcagcacaggccacagcatgaccccccagagcgacctggacagcagcagcagcgaggagttctaccaggccgtgcaccacgccgagcagaccttcaggaagatggagagctacctgaagcagcagcagctgtgtgatgtgatcctgattgtgggcaacaggaagatcccagcccaccggctggtgctgagctctgtgtctgactactttgctgccatgttcaccagtgatgtgtgtgaggccaagcaggaggagatcaagatggagggcatcgaccccaatgccctgtgggacctggtgcagtttgcctacacaggctgcctggagctgaaggaggacaccatcgagaacctgctggccgccgcctgcctgctgcagctgccccaggtggtggaggtgtgctgccacttcctgatgaagctgctgcaccccagcaactgcctgggcatccgggcctttgctgatgcccagggctgcatcgagctgatgaaggtggcccacagctacaccatggagaacatcatggaggtgatccggaaccaggagttcctgctgctgcctgctgaggagctgcacaagctgctggccagtgatgatgtgaatgtgcctgatgaggagaccatcttccacgccctgatgatgtgggtgaagtatgacatgcagagccgctgcaatgacctgtccatgctgctggccttcatccggctgcccctgctgcccccccagatcctggccgacctggagaaccacgccctcttcaagaatgacctggagtgccagaagctgatcctggaggccatgaagtaccacctgctgcctgagaggaggaccctgatgcagagccccaggaccaagcccaggaagagcacagtgggcaccctgtatgctgtgggcggcatggacaacaacaagggggccaccaccatcgagaagtatgacctgcggaccaacctgtggatccaggccggcatgatgaatggaagaaggctgcagtttggagtggccgtgattgatgacaagctgtttgtgattggaggaagagatggcctgaagaccctgaacacagtggagtgctacaaccccaagaccaagacctggacagtgctgccccccatgagcacccaccgccacggcctgggcgtgacagtgctggagggccccatctatgctgtgggcggccatgatggctggagctacctgaacacagtggagcgctgggacccccagagccagcagtggacctttgtggcctccatgagcatcgcccggagcacagtgggcgtggccgccctgaatggcaagctgtacagcgtgggcggcagagatggcagcagctgcctgagctccatggagtactatgacccccacaccaacaagtggaacatgtgtgcccccatgtgcaagaggcggggcggcgtgggcgtggccacctgtgatggcttcctgtatgctgtgggcggccatgatgccccagccagcaaccactgcagccggctgctggactatgtggagagatatgaccccaagacagacacctggaccatggtggcccccctgtccatgcccagagatgctgtgggcgtgtgcctgctgggggaccggctgtatgctgtgggcggctatgatggccagacctacctgaacaccatggagagctatgacccccagaccaatgagtggacccagatggccagcctgaacatcggccgggccggggcctgtgtggtggtgatcaagcagccctag

SEQ ID NO: 206248 - DNA, 2247 bp, Artificial Sequence
  derived and/or modified sequence
atgagcggcagcggccggaaggacttcgacgtgaagcacatcctgcggctgagatggaaattgttctcccatccatctcccagcaccggtggaccagccgggggcggatgccttcagcaggatggctctggctcctttgagcattggggccctagccagtctaggcttctcaaatctcaggaacgcagcggcgtgtccacattttggaagaagcctagttcttcttcgagctctagctccagtccctctagctcatcctcctcgttcaaccctctgaacggtaccctgctccccgtggccactcggttgcagcagggagcccctggccagggtacccagcagcccgcacgaacattattttacgtagagtcattggaggaggaggtggtcccaggaatggattttcctggtccacacgagaaaggtctcgtgctgcaggaactaaaggttgaaccagacaatagcagtcaggccaccggagagggatgcgggcacagactgtctagcaccggacacagtatgactccacagtcagacctggatagctcatcctcggaggagttttatcaggctgtgcaccacgcggaacagaccttccgaaagatggagagttacctgaagcaacaacagttatgtgatgtaatcctgatagtagggaacaggaagatccctgcccaccggctggttctcagtagtgtgtccgattattttgcagctatgttcacgtcagatgtttgcgaagccaagcaagaagagataaaaatggaaggcatcgaccccaacgctctatgggatttggtgcagtttgcgtataccggctgcttagagcttaaggaagatacgatcgagaatcttctcgcggcggcttgtcttctccagctcccgcaggttgtggaggtctgttgtcacttcctgatgaagttactccacccaagcaactgcctgggcattcgcgcattcgcagatgctcaaggatgcatcgagctgatgaaagttgcccacagctacaccatggaaaatattatggaggtaatcaggaatcaggagtttctgttgctacccgccgaggaactgcacaagctgctggcctccgacgacgtgaacgtccctgatgaagagactatttttcacgcccttatgatgtgggtgaaatacgatatgcagtcccgttgtaacgacctgagcatgctgctagctttcattcgcctgcctttgctgccgcctcaaattctcgccgaccttgaaaatcacgccctattcaaaaatgacctcgagtgtcagaaactgattcttgaagcaatgaaatatcatctccttcccgaaaggagaacgctaatgcagtccccacggacaaaaccccggaaatcgaccgtaggcacactctacgccgttggcggaatggataataacaaaggcgccactactattgaaaagtatgacttacgaacaaacctttggatccaggccggcatgatgaacggaaggaggctacagttcggcgttgctgtgattgatgacaagcttttcgtcatcggcggtcgggatgggctgaaaacactgaatacagtcgaatgctataatcctaagactaagacatggaccgtgctcccacccatgtccacccataggcacggactgggtgtcaccgtcttagaagggccaatctacgccgtgggcgggcatgacggatggtcatatttaaatactgttgaaaggtgggacccccagtcccaacaatggactttcgtggcatcaatgtctatcgcccgatcaactgtgggagtagctgccctcaatggaaagctgtatagtgtgggtgggcgtgacgggagctcctgtctgtcatctatggagtattacgacccacacacgaacaagtggaatatgtgtgcgccgatgtgtaagcgaagaggtggcgtcggcgtggcgacttgcgatgggtttctgtacgcagtagggggccatgacgcacccgccagtaaccattgttcccggctcctcgattatgtagaaagatatgacccgaagacggatacctggacaatggtggcccctctctccatgcctagggacgcagtcggcgtttgcttgctgggggacaggttgtacgctgtgggcggctatgatggccagacctatctaaacaccatggagagctacgacccacagaccaatgagtggacccagatggcgtcccttaacatcggccgagcaggagcctgtgtggtggtcatcaagcagccttag

SEQ ID NO: 206249 - DNA, 2247 bp, Artificial Sequence
  derived and/or modified sequence
atgtcggggagcggcagaaaggatttcgatgtaaagcacattctccgcctacgctggaaactgtttagccaccctagcccttccacgggaggccctgccggtggcggatgcttacagcaggacggctctgggagctttgagcactggggaccaagccagtctaggctccttaaatctcaggagagatctggagtgtctactttctggaagaaaccctcctccagttcatcgagctccagctctccgtctagctccagttctagttttaacccactcaatggaacattactaccagtggccactcggttacagcagggcgctcccggacagggcacccagcagcccgcaaggactcttttttatgttgaaagcttagaagaggaggttgtgcccggaatggatttcccaggtcctcatgagaagggcctggtgctgcaggaattaaaggtggagccggataactcctctcaggctaccggggaagggtgtggacaccggctgagttcaacgggccacagtatgaccccgcaatccgatctagactcctcatcaagtgaagagttctatcaggccgttcaccacgccgagcagaccttccggaaaatggagtcctaccttaagcagcaacagctgtgtgatgtaatccttatcgtgggtaatcgtaaaataccagctcatagactggtcctgtctagcgtcagtgactactttgccgctatgtttacctctgatgtttgtgaagcaaagcaagaagaaatcaagatggaaggcatagaccctaacgccctctgggacttggtgcagttcgcctatacgggatgcttggaacttaaggaagacaccattgaaaaccttctggcggctgcctgcctgctgcaactgccacaagtcgtggaggtgtgttgccactttctgatgaagctgctgcatccaagcaattgcctgggaatcagggctttcgcagacgcccaaggatgcatcgagcttatgaaggttgcgcactcatacactatggagaacattatggaggtgataagaaaccaagaatttctgcttctgccagctgaagagttgcacaagctgctggcaagtgatgacgtgaacgtcccggatgaagaaaccatttttcatgctttgatgatgtgggttaagtatgacatgcaaagccggtgtaatgatctgtctatgctgctcgccttcattagattacccctgctgcctcctcagatactggccgatctggagaaccatgcgctgttcaagaacgacttggaatgtcagaaactgatcctggaggccatgaaataccatctcctgccggagcgtcgtacccttatgcaatccccaaggacaaaacccagaaaatcaactgtgggcacgttgtacgccgtgggtggcatggacaacaataagggagctaccaccatcgaaaaatatgacctgaggaccaacctgtggatccaagctgggatgatgaatgggaggagactccagtttggagtcgcagtgattgacgataaattgttcgtcatcggaggtcgggacggacttaagaccttgaacactgtggaatgttacaacccgaagactaagacatggactgtgctgccaccgatgtcgactcacagacatgggctgggcgtaacagtgctggaaggccctatctatgccgtgggtggccacgacggatggtcctatctcaataccgttgaaagatgggatccccaaagccagcagtggacatttgtagctagtatgagcatcgcccgatccacagttggagttgccgctttgaatggaaaactctactcagtcggcggtagggacggaagttcatgtctcagttcaatggaatattatgatccccacacaaataagtggaatatgtgcgcacctatgtgcaagcgcagaggcggagttggagtcgctacatgtgacggatttctctacgccgtggggggacacgatgctccggcaagcaatcattgttccaggttgctggactacgtcgagcgttacgaccccaagaccgacacttggaccatggtggcacccctcagcatgcctagagacgccgtaggcgtctgtctgctcggcgacaggctttacgcagtggggggatacgacggacaaacctatcttaataccatggaatcctacgacccccagaccaacgagtggacccaaatggcctctttgaatattgggagagctggagcttgtgtggtggtgattaagcagccctag

SEQ ID NO: 206250 - DNA, 2247 bp, Artificial Sequence
  derived and/or modified sequence
atgagcggcagcggcagaaaggacttcgacgtgaagcacatcctgagactgagatggaagctgttcagccaccccagccccagcaccggcggccccgccggcggcggctgcctgcagcaggacggcagcggcagcttcgagcactggggccccagccagagcagactgctgaagagccaggagagaagcggcgtgagcaccttctggaagaagcccagcagcagcagcagcagcagcagcagccccagcagcagcagcagcagcttcaaccccctgaacggcaccctgctgcccgtggccaccagactgcagcagggcgcccccggccagggcacccagcagcccgccagaaccctgttctacgtggagagcctggaggaggaggtggtgcccggcatggacttccccggcccccacgagaagggcctggtgctgcaggagctgaaggtggagcccgacaacagcagccaggccaccggcgagggctgcggccacagactgagcagcaccggccacagcatgaccccccagagcgacctggacagcagcagcagcgaggagttctaccaggccgtgcaccacgccgagcagaccttcagaaagatggagagctacctgaagcagcagcagctgtgcgacgtgatcctgatcgtgggcaacagaaagatccccgcccacagactggtgctgagcagcgtgagcgactacttcgccgccatgttcaccagcgacgtgtgcgaggccaagcaggaggagatcaagatggagggcatcgaccccaacgccctgtgggacctggtgcagttcgcctacaccggctgcctggagctgaaggaggacaccatcgagaacctgctggccgccgcctgcctgctgcagctgccccaggtggtggaggtgtgctgccacttcctgatgaagctgctgcaccccagcaactgcctgggcatcagagccttcgccgacgcccagggctgcatcgagctgatgaaggtggcccacagctacaccatggagaacatcatggaggtgatcagaaaccaggagttcctgctgctgcccgccgaggagctgcacaagctgctggccagcgacgacgtgaacgtgcccgacgaggagaccatcttccacgccctgatgatgtgggtgaagtacgacatgcagagcagatgcaacgacctgagcatgctgctggccttcatcagactgcccctgctgcccccccagatcctggccgacctggagaaccacgccctgttcaagaacgacctggagtgccagaagctgatcctggaggccatgaagtaccacctgctgcccgagagaagaaccctgatgcagagccccagaaccaagcccagaaagagcaccgtgggcaccctgtacgccgtgggcggcatggacaacaacaagggcgccaccaccatcgagaagtacgacctgagaaccaacctgtggatccaggccggcatgatgaacggcagaagactgcagttcggcgtggccgtgatcgacgacaagctgttcgtgatcggcggcagagacggcctgaagaccctgaacaccgtggagtgctacaaccccaagaccaagacctggaccgtgctgccccccatgagcacccacagacacggcctgggcgtgaccgtgctggagggccccatctacgccgtgggcggccacgacggctggagctacctgaacaccgtggagagatgggacccccagagccagcagtggaccttcgtggccagcatgagcatcgccagaagcaccgtgggcgtggccgccctgaacggcaagctgtacagcgtgggcggcagagacggcagcagctgcctgagcagcatggagtactacgacccccacaccaacaagtggaacatgtgcgcccccatgtgcaagagaagaggcggcgtgggcgtggccacctgcgacggcttcctgtacgccgtgggcggccacgacgcccccgccagcaaccactgcagcagactgctggactacgtggagagatacgaccccaagaccgacacctggaccatggtggcccccctgagcatgcccagagacgccgtgggcgtgtgcctgctgggcgacagactgtacgccgtgggcggctacgacggccagacctacctgaacaccatggagagctacgacccccagaccaacgagtggacccagatggccagcctgaacatcggcagagccggcgcctgcgtggtggtgatcaagcagccctag

SEQ ID NO: 206251 - protein, 796 aa, Artificial Sequence
  derived and/or modified sequence
MNQTASVSHHIKCQPSKTIKELGSNSPPQRNWKGIAIALLVILVVCSLITMSVILLTPDELTNSSETRLSLEDLFRKDFVLHDPEARWINDTDVVYKSENGHVIKLNIETNATTLLLENTTFVTFKASRHSVSPDLKYVLLAYDVKQIFHYSYTASYVIYNIHTREVWELNPPEVEDSVLQYAAWGVQGQQLIYIFENNIYYQPDIKSSSLRLTSSGKEEIIFNGIADWLYEEELLHSHIAHWWSPDGERLAFLMINDSLVPTMVIPRFTGALYPKGKQYPYPKAGQVNPTIKLYVVNLYGPTHTLELMPPDSFKSREYYITMVKWVSNTKTVVRWLNRAQNISILTVCETTTGACSKKYEMTSDTWLSQQNEEPVFSRDGSKFFMTVPVKQGGRGEFHHVAMFLIQSKSEQITVRHLTSGNWEVIKILAYDETTQKIYFLSTESSPRGRQLYSASTEGLLNRQCISCNFMKEQCTYFDASFSPMNQHFLLFCEGPRVPVVSLHSTDNPAKYFILESNSMLKEAILKKKIGKPEIKILHIDDYELPLQLSLPKDFMDRNQYALLLIMDEEPGGQLVTDKFHIDWDSVLIDMDNVIVARFDGRGSGFQGLKILQEIHRRLGSVEVKDQITAVKFLLKLPYIDSKRLSIFGKGYGGYIASMILKSDEKLFKCGSVVAPITDLKLYASAFSERYLGMPSKEESTYQAASVLHNVHGLKEENILIIHGTADTKVHFQHSAELIKHLIKAGVNYTMQVYPDEGHNVSEKSKYHLYSTILKFFSDCLKEEISVLPQEPEEDE

SEQ ID NO: 206252 - DNA, 2391 bp, Artificial Sequence
  derived and/or modified sequence
atgaaccagactgcaagtgtctcacaccacataaaatgtcagccaagcaaaaccataaaggagcttgggagtaatagcccaccacaacggaattggaagggtatcgcgatagctttgcttgtgatcctggtggtatgtagcctcattacaatgtctgttattctcctgactcccgacgaattgacaaacagctccgagacaagattatcacttgaagatctatttaggaaagatttcgtgctgcatgatcctgaggcaagatggattaatgacacagacgtggtgtataagtccgaaaatgggcacgttatcaagctaaacatagaaacaaatgctacaaccctcctcctggagaacacaaccttcgtcaccttcaaggcttccagacattcagtgtccccagacctgaaatacgttctgcttgcatatgatgttaagcagattttccactactcctacaccgcgtcctacgtgatctataatattcatacacgggaggtatgggagcttaatcctcccgaggtggaggatagtgtcctgcaatacgctgcttggggcgtgcagggacagcagttgatctacatctttgaaaacaacatctactatcagcctgacattaagtcctcgagcctgcgtctgaccagttctgggaaggaggagatcatcttcaacggaattgcagactggctttacgaggaggaactccttcattctcacatagcgcactggtggtctcccgacggagaaaggctggctttcctgatgatcaatgacagcctggtaccaaccatggtcatccctagattcactggagctctatacccaaagggaaagcagtacccctaccccaaggccggtcaagtcaaccccacaataaagctctacgtggtcaacctttacggaccgacccacacactggagttaatgccgcccgattccttcaaaagtagggagtattacattaccatggtaaaatgggtgtctaatactaagaccgtcgtgcgctggctaaaccgcgctcaaaatatatctatcttgacggtgtgtgagaccacaacaggagcatgcagtaagaaatacgaaatgacatcagatacgtggttgtcacagcagaatgaggagcccgtgttttcccgggatggcagcaagttttttatgaccgtccctgtgaaacagggtggccgaggtgagtttcaccatgtggcgatgttccttatccagagcaagtccgaacagattacagttcgccacctgacaagcggtaactgggaggtgatcaagattttagcttatgacgagaccacacagaaaatctatttcctctctaccgagagcagcccacgcggtagacaactgtattccgcatcaactgagggactgctgaaccgacagtgtattagctgcaatttcatgaaggagcagtgcacctacttcgatgccagcttcagtcccatgaatcaacatttcctgctgttctgtgaaggacccagagtcccagttgtgtctcttcattctaccgacaatcctgccaagtatttcatcctggagtcgaattctatgctgaaggaagcaattctgaagaaaaagatcggtaagcccgaaattaaaattcttcacatagatgattatgagctccctcttcagctgagcctgccaaaagatttcatggatagaaatcagtacgccctgctgctcattatggacgaggaacctggggggcagttggtgaccgacaaattccacatagactgggacagtgtgctaatcgacatggataatgtgatcgtggcgcgcttcgacggcaggggatcagggtttcagggcctgaagatccttcaggagatccacagacgactgggcagcgtggaggtcaaggaccagatcacagcagttaagtttctgctgaagctaccctatatcgattctaagcgactgtccatcttcggtaagggatacggaggctacatcgccagtatgattctgaaaagtgacgagaagctttttaagtgcggatccgtcgtcgcacctattactgatctcaaattgtatgcgagtgccttttcagaaaggtatctcggcatgccaagtaaggaagaaagcacttaccaggctgctagtgtgctccataacgtccatggactgaaagaggaaaatatactcatcattcacggcactgccgatacgaaggtccattttcagcatagcgcagagcttattaagcatctgatcaaggcaggagttaactacacaatgcaggtctaccccgacgagggccacaatgtgtctgaaaagagcaagtaccatttgtacagcaccatacttaagttcttctcggactgtctgaaggaagaaatcagtgtgctgccacaggagcccgaggaggatgaatag

SEQ ID NO: 206253 - DNA, 2391 bp, Artificial Sequence
  derived and/or modified sequence
atgaaccagacagcctctgtgagccaccacatcaagtgccagcccagcaagaccatcaaggagctgggcagcaacagccccccccagaggaactggaagggcatcgccatcgccctgctggtgatcctggtggtgtgcagcctcatcaccatgtctgtcatcctgctgaccccagatgagctgaccaacagcagcgagacccggctgagcctggaggacctcttcaggaaggactttgtgctgcatgaccctgaggcccgctggatcaatgacacagatgtggtgtacaagtcagaaaatggccacgtgatcaagctgaacatcgagaccaatgccaccaccctgctgctggagaacaccacctttgtgaccttcaaggccagccgccacagcgtgtccccagacctgaagtatgtgctgctggcctatgatgtgaagcagatcttccactacagctacacagccagctatgtgatctacaacatccacacccgggaggtgtgggagctgaaccccccagaggtggaggacagcgtgctgcagtatgctgcctggggcgtgcagggccagcagctgatctacatctttgagaacaacatctactaccagcctgacatcaagagcagcagcctgcggctgaccagcagcggcaaggaggagatcatcttcaacggcattgctgactggctgtatgaggaggagctgctgcacagccacatcgcccactggtggagcccagatggagagcggctggccttcctgatgatcaatgacagcctggtgcccaccatggtgatcccccgcttcaccggggccctgtaccccaagggcaagcagtacccctaccccaaggccggccaggtgaaccccaccatcaagctgtatgtggtgaacctgtatggccccacccacaccctggagctgatgcccccagacagcttcaagagccgggagtactacatcaccatggtgaagtgggtgagcaacaccaagacagtggtgcgctggctgaacagagcccagaacatcagcatcctgactgtgtgtgagaccaccactggagcctgcagcaagaagtatgagatgaccagtgacacctggctgagccagcagaatgaggagcctgtgttcagcagagatggcagcaagttcttcatgacagtgcctgtgaagcagggcggccgcggggagttccaccacgtggccatgttcctgatccagagcaagtctgagcagatcaccgtgcgccacctgaccagcggcaactgggaggtgatcaagatcctggcctatgatgagaccacccagaagatctacttcctgagcacagagagcagcccccggggccggcagctgtacagcgccagcacagagggcctgctgaaccggcagtgcatcagctgcaacttcatgaaggagcagtgcacctactttgatgccagcttcagccccatgaaccagcacttcctgctcttctgtgagggcccccgggtgcctgtggtgtccctgcacagcacagacaacccagccaagtacttcatcctggagagcaacagcatgctgaaggaggccatcctgaagaagaagattggcaagccagagatcaagatcctgcacattgatgattatgagctgcccctgcagctgagcctgcccaaggacttcatggacaggaaccagtatgccctgctgctgatcatggatgaggagcccggcggccagctggtgacagacaagttccacatcgactgggacagcgtgctgattgacatggacaacgtgattgtggccaggtttgatggccggggcagcggcttccagggcctgaagatcctgcaggagatccaccggcggctgggctctgtggaggtgaaggaccagatcacagctgtgaagttcctgctgaagctgccctacatcgacagcaagaggctgagcatctttgggaagggctacggcggctacatcgcctccatgatcctgaagagtgatgagaagctgttcaagtgtggctctgtggtggcccccatcacagacctgaagctgtatgccagcgccttcagcgagcgctacctgggcatgcccagcaaggaggagagcacctaccaggccgcctctgtgctgcacaacgtgcacggcctgaaggaggagaacatcctgatcatccatggaacagctgacaccaaggtgcacttccagcacagcgctgagctgatcaagcacctgatcaaggccggcgtgaactacaccatgcaggtgtacccagatgagggccacaacgtgtctgagaagagcaagtaccacctgtacagcaccatcctgaagttcttcagtgactgcctgaaggaggagatctctgtgctgccccaggagcctgaggaggatgaatag

SEQ ID NO: 206254 - DNA, 2391 bp, Artificial Sequence
  derived and/or modified sequence
atgaaccagaccgccagcgtgagccaccacatcaagtgccagccctccaagacaattaaggaactcggatcaaacagtccaccgcagagaaactggaaaggcatcgccattgcactgctggtgatcttggtggtttgttccttaattaccatgtctgttatcctgctgacgccagatgaactaaccaactccagtgagacacgattgagcttggaggatctcttccggaaagattttgtgctgcacgatcccgaggccaggtggatcaatgacacagatgtggtgtacaagtctgagaatggacatgttattaaactgaacatagagaccaatgctacaacgttgctcctggagaatacaaccttcgtgacattcaaggccagccgccacagtgtgtcccccgatcttaagtatgtgttactcgcttacgatgtgaagcagatcttccactatagctataccgcctcttatgtaatttataacatccatacaagggaggtttgggagctgaacccaccggaagtggaggattccgtgttacaatatgcggcctggggcgtacagggtcagcagctgatatatatcttcgaaaacaatatctattaccaaccagacataaaaagcagttctttgagactaacctcgtccggaaaagaggagattatcttcaatgggatagcagattggctttatgaagaggaacttttgcactctcatatcgcgcactggtggtcccccgatggcgaaaggttagcatttttgatgatcaacgactcgctggtgccgacaatggtgattccgcggttcaccggagcactgtatcccaagggaaaacagtacccttacccaaaagcgggacaggtgaatcctactatcaagctgtacgtggtgaatctctacggccctacacacacccttgagttgatgccaccagattcattcaagtctcgagagtattacattactatggtgaagtgggtatcaaatacgaaaacagtggtgaggtggctgaacagggctcagaacatatcgatccttacagtttgtgagaccactaccggggcctgtagtaaaaagtatgaaatgacaagtgacacttggctctcccagcagaacgaggaacccgtcttctccagggacggctcgaagttcttcatgaccgtgcccgtgaagcagggaggaaggggtgagttccatcatgtagcgatgtttctgatacagagcaaatccgaacagataaccgtgcgtcatctgacatcaggtaactgggaggtaatcaagatcttagcatatgacgagacaactcagaaaatatacttcctgagtacggaaagttctcctagagggcgccagctgtatagtgcttcaaccgaaggattgttgaatcgccagtgtatcagttgcaattttatgaaggaacagtgtacgtacttcgacgcgtcatttagccccatgaatcagcatttcctcttattttgtgagggcccccgcgttcccgtggttagtttgcactcgaccgataatcccgctaagtactttatcttagagagcaactccatgctgaaagaggccattcttaagaaaaagatcggaaagccggaaattaaaattctccatattgatgactacgaattgcctctgcagctttcactgccgaaggacttcatggaccgcaatcagtacgccttactgctcatcatggacgaggagcctggtggccagctggtcaccgataagtttcatatcgactgggattccgtgctgatagatatggacaatgtgattgttgctcgttttgatggacgaggctccggcttccaggggctcaaaatcctacaggagatccatcgccgcctcggtagcgtggaggttaaagatcagatcacggccgtgaaatttctgctgaaactaccttacatagactcgaaaagactaagtatcttcggcaagggatacggcggttatatcgcttccatgatcttaaagtccgacgagaagctgttcaagtgtggcagcgtagtcgctcctatcacggacctgaagctctatgcaagcgctttctctgagcgttacctggggatgccctccaaagaggagagcacgtatcaagccgcaagtgtgctacacaatgtccatggcttgaaggaggaaaatatactaattatccacggcactgccgacactaaggtccattttcaacactcagccgaacttattaaacacctcatcaaagctggggtgaactatacaatgcaagtctatcccgatgagggacataatgtatctgagaagagcaaatatcacctctattccactattctgaagtttttctctgattgtctgaaggaagagatatctgtcctgccccaagagcctgaggaggatgaatag

SEQ ID NO: 206255 - DNA, 2391 bp, Artificial Sequence
  derived and/or modified sequence
atgaatcagacagcctccgtgtcacaccatatcaagtgtcagccgtcgaagaccatcaaggaactcggatctaatagcccccctcagcggaactggaaaggaattgccatcgctctgctagtgatccttgtcgtgtgcagccttataacaatgtccgtgatactgctgactcctgacgaactgaccaatagctcagagactcggctgagcttagaagatctgttcagaaaagacttcgtgctccatgatcctgaggccagatggattaacgacacagacgtggtctataaatccgaaaacggccatgtgatcaagttaaatatcgagacaaatgcaactacattactgttagagaatactacgttcgtgactttcaaggccagccgtcatagtgtgtcgcctgatttaaagtacgttctgctggcttacgacgtgaagcagatcttccattacagctatacagcctcttacgtcatttacaatatccacacccgcgaagtgtgggaactgaacccgcctgaggtcgaagattccgtgctgcagtatgcagcttggggagtgcaggggcaacaactgatctatatcttcgaaaataatatttactatcagcccgatatcaagtcctccagcctccgactgacgtcctcaggcaaggaagaaatcatatttaacggaatagcggattggctatacgaggaagagttgctgcacagccacatcgctcactggtggtcccctgacggcgagcggctggccttcctcatgattaacgactctctggttccaacaatggttataccgaggtttaccggtgcactgtatcccaaaggtaagcaatatccatatcctaaggccggacaggtcaatcctacgatcaagctgtatgtggtcaatctatatggaccaacacacaccctcgaactcatgcctcccgactcttttaagtcacgggaatactacattaccatggtaaagtgggtgtccaatactaaaacagttgttcgctggctcaacagggctcaaaacatctccatattgactgtgtgtgaaaccacgaccggggcttgtagtaaaaaatacgagatgactagcgatacatggctctctcaacagaacgaagagccagtcttcagccgggacgggagtaagtttttcatgactgtgcctgtgaaacaggggggtcggggagaattccatcatgtcgctatgtttctcatacagagtaagagcgagcagatcacagtgaggcatctcacttccggcaactgggaggtgattaaaattcttgcatacgacgagacaacccaaaaaatctactttctttccacggaatcaagtccaaggggcaggcagttgtacagcgcctccacagagggtctgttgaacagacaatgtatctcctgtaacttcatgaaggagcagtgtacttacttcgacgcatcctttagtcctatgaaccagcattttctgctcttctgcgaagggcctcgggtcccagttgtaagtctacattccaccgacaacccagctaagtacttcatcctcgagtccaatagcatgctgaaagaagctatcctcaaaaagaagataggaaagcccgagattaaaatcttgcatattgacgactatgaactgccattgcagttgagcctgccaaaagactttatggacaggaatcaatatgccttgctgctgattatggacgaggagccagggggacagctggttaccgataagttccacatcgattgggacagtgttctgatcgatatggacaacgtcattgtggcacgcttcgatggacgtgggagcgggttccagggcctgaaaattctgcaggaaatccaccgtcgcctgggctccgtggaggttaaagatcagatcacagcagtaaagttcttgctgaagctgccctacatcgactccaagcgactgagtatttttggcaaaggatatggagggtacatcgcatctatgattctgaagagcgacgagaaactgtttaagtgcgggagcgtggtggcaccaataaccgatctgaaattgtatgctagcgcattctccgagcgatacttaggtatgccgtctaaggaagaaagtacctatcaagctgccagcgtgttgcacaatgtgcacgggctgaaagaagaaaatattctgatcattcatgggaccgcagacactaaagtacatttccagcactctgcggaactcatcaaacacttgatcaaggctggcgtgaattacactatgcaggtctaccctgacgaaggccataacgtgtcagagaagagtaagtaccacctttactccaccatactcaagttctttagtgattgcttaaaggaagaaatatctgtgctcccgcaggaaccagaagaggacgaatag

SEQ ID NO: 206256 - DNA, 2391 bp, Artificial Sequence
  derived and/or modified sequence
atgaaccagaccgccagcgtgagccaccacatcaagtgccagcccagcaagaccatcaaggagctgggcagcaacagccccccccagagaaactggaagggcatcgccatcgccctgctggtgatcctggtggtgtgcagcctgatcaccatgagcgtgatcctgctgacccccgacgagctgaccaacagcagcgagaccagactgagcctggaggacctgttcagaaaggacttcgtgctgcacgaccccgaggccagatggatcaacgacaccgacgtggtgtacaagagcgagaacggccacgtgatcaagctgaacatcgagaccaacgccaccaccctgctgctggagaacaccaccttcgtgaccttcaaggccagcagacacagcgtgagccccgacctgaagtacgtgctgctggcctacgacgtgaagcagatcttccactacagctacaccgccagctacgtgatctacaacatccacaccagagaggtgtgggagctgaacccccccgaggtggaggacagcgtgctgcagtacgccgcctggggcgtgcagggccagcagctgatctacatcttcgagaacaacatctactaccagcccgacatcaagagcagcagcctgagactgaccagcagcggcaaggaggagatcatcttcaacggcatcgccgactggctgtacgaggaggagctgctgcacagccacatcgcccactggtggagccccgacggcgagagactggccttcctgatgatcaacgacagcctggtgcccaccatggtgatccccagattcaccggcgccctgtaccccaagggcaagcagtacccctaccccaaggccggccaggtgaaccccaccatcaagctgtacgtggtgaacctgtacggccccacccacaccctggagctgatgccccccgacagcttcaagagcagagagtactacatcaccatggtgaagtgggtgagcaacaccaagaccgtggtgagatggctgaacagagcccagaacatcagcatcctgaccgtgtgcgagaccaccaccggcgcctgcagcaagaagtacgagatgaccagcgacacctggctgagccagcagaacgaggagcccgtgttcagcagagacggcagcaagttcttcatgaccgtgcccgtgaagcagggcggcagaggcgagttccaccacgtggccatgttcctgatccagagcaagagcgagcagatcaccgtgagacacctgaccagcggcaactgggaggtgatcaagatcctggcctacgacgagaccacccagaagatctacttcctgagcaccgagagcagccccagaggcagacagctgtacagcgccagcaccgagggcctgctgaacagacagtgcatcagctgcaacttcatgaaggagcagtgcacctacttcgacgccagcttcagccccatgaaccagcacttcctgctgttctgcgagggccccagagtgcccgtggtgagcctgcacagcaccgacaaccccgccaagtacttcatcctggagagcaacagcatgctgaaggaggccatcctgaagaagaagatcggcaagcccgagatcaagatcctgcacatcgacgactacgagctgcccctgcagctgagcctgcccaaggacttcatggacagaaaccagtacgccctgctgctgatcatggacgaggagcccggcggccagctggtgaccgacaagttccacatcgactgggacagcgtgctgatcgacatggacaacgtgatcgtggccagattcgacggcagaggcagcggcttccagggcctgaagatcctgcaggagatccacagaagactgggcagcgtggaggtgaaggaccagatcaccgccgtgaagttcctgctgaagctgccctacatcgacagcaagagactgagcatcttcggcaagggctacggcggctacatcgccagcatgatcctgaagagcgacgagaagctgttcaagtgcggcagcgtggtggcccccatcaccgacctgaagctgtacgccagcgccttcagcgagagatacctgggcatgcccagcaaggaggagagcacctaccaggccgccagcgtgctgcacaacgtgcacggcctgaaggaggagaacatcctgatcatccacggcaccgccgacaccaaggtgcacttccagcacagcgccgagctgatcaagcacctgatcaaggccggcgtgaactacaccatgcaggtgtaccccgacgagggccacaacgtgagcgagaagagcaagtaccacctgtacagcaccatcctgaagttcttcagcgactgcctgaaggaggagatcagcgtgctgccccaggagcccgaggaggacgagtag

SEQ ID NO: 206257 - DNA, 6278 bp, Artificial Sequence
  derived and/or modified sequence
aaatattttgcactggaaaaactataatctggagagacagaggagttgagagtgcccctttaaactgcaggactgcaattgatctctgtatgttttctggttttcgtccctttgaaaggggaatgagagccaggatcattggctgtactgtggagctgtcacatctccatactgaaaaggtacactgcaagtgaatttaaaccgtttttggctttctattgcatattgccaagagctttgagactgatgaaccaagtaaatgctctatttagggctaagtgagatacagattcctccaatctgatagcgtttcagcctccggagtgaggaagcagcagaaacagaagcagcagaagcaacagcagtagcagcggcagcagcaacagcagcagcccctactgaagtccaatagaggagacttgatctctagttcattctggaactccgcctgggattgtgcactgtccagggtcctgaaacatgaaccaaactgccagcgtgtcccatcacatcaagtgtcaaccctcaaaaacaatcaaggaactgggaagtaacagccctccacagagaaactggaagggaattgctattgctctgctggtgattttagttgtatgctcactcatcactatgtcagtcatcctcttaaccccagatgaactcacaaattcgtcagaaaccagattgtctttggaagacctctttaggaaagactttgtgcttcacgatccagaggctcggtggatcaatgatacagatgtggtgtataaaagcgagaatggacatgtcattaaactgaatatagaaacaaatgctaccacattattattggaaaacacaacttttgtaaccttcaaagcatcaagacattcagtttcaccagatttaaaatatgtccttctggcatatgatgtcaaacagatttttcattattcgtatactgcttcatatgtgatttacaacatacacactagggaagtttgggagttaaatcctccagaagtagaggactccgtcttgcagtacgcggcctggggtgtccaagggcagcagctgatttatatttttgaaaataatatctactatcaacctgatataaagagcagttcattgcgactgacatcttctggaaaagaagaaataatttttaatgggattgctgactggttatatgaagaggaactcctgcattctcacatcgcccactggtggtcaccagatggagaaagacttgccttcctgatgataaatgactctttggtacccaccatggttatccctcggtttactggagcgttgtatcccaaaggaaagcagtatccgtatcctaaggcaggtcaagtgaacccaacaataaaattatatgttgtaaacctgtatggaccaactcacactttggagctcatgccacctgacagctttaaatcaagagaatactatatcactatggttaaatgggtaagcaataccaagactgtggtaagatggttaaaccgagctcagaacatctccatcctcacagtctgtgagaccactacaggtgcttgtagtaaaaaatatgagatgacatcagatacgtggctctctcagcagaatgaggagcccgtgttttctagagacggcagcaaattctttatgacagtgcctgttaagcaagggggacgtggagaatttcaccacgtagctatgttcctcatccagagtaaaagtgagcaaattaccgtgcggcatctgacatcaggaaactgggaagtgataaagatcttggcatacgatgaaactactcaaaaaatttactttctgagcactgaatcttctcccagaggaaggcagctgtacagtgcttctactgaaggattattgaatcgccaatgcatttcatgtaatttcatgaaagaacaatgtacatattttgatgccagttttagtcccatgaatcaacatttcttattattctgtgaaggtccaagggtcccagtggtcagcctacatagtacggacaacccagcaaaatattttatattggaaagcaattctatgctgaaggaagctatcctgaagaagaagataggaaagccagaaattaaaatccttcatattgacgactatgaacttcctttacagttgtcccttcccaaagattttatggaccgaaaccagtatgctcttctgttaataatggatgaagaaccaggaggccagctggttacagataagttccatattgactgggattccgtactcattgacatggataatgtcattgtagcaagatttgatggcagaggaagtggattccagggtctgaaaattttgcaggagattcatcgaagattaggttcagtagaagtaaaggaccaaataacagctgtgaaatttttgctgaaactgccttacattgactccaaaagattaagcatttttggaaagggttatggtggctatattgcatcaatgatcttaaaatcagatgaaaagctttttaaatgtggatccgtggttgcacctatcacagacttgaaattgtatgcctcagctttctctgaaagataccttgggatgccatctaaggaagaaagcacttaccaggcagccagtgtgctacataatgttcatggcttgaaagaagaaaatatattaataattcatggaactgctgacacaaaagttcatttccaacactcagcagaattaatcaagcacctaataaaagctggagtgaattatactatgcaggtctacccagatgaaggtcataacgtatctgagaagagcaagtatcatctctacagcacaatcctcaaattcttcagtgattgtttgaaggaagaaatatctgtgctaccacaggaaccagaagaagatgaataatggactgtatttatacagaactgaagggaatattgaggctcaatgaaacctgacaaagagactgtaatattgtagttgctccagaatgtcaagggcagcttacggagatgtcactggagcagcacgctcagagacagtgaactagcatttgaatacacaagtccaagtctactgtgttgctaggggtgcagaacccgtttctttgtatgagagaggtcaaagggttggtttcctgggagaaattagttttgcattaaagtaggagtagtgcatgttttcttctgttatccccctgtttgttctgtaactagttgctctcattttaatttcactggccaccatcatctttgcatataatgcacaatctatcatctgtcctacagtccctgatctttcatggctgagctgcaatctaacactttactgtacctttataataagtgcaattctttcattgtctattattatgcttaagaaaatattcagttaataaaaaacagagtattttatgtaatttctgtttttaaaaagacattattaaatgggtcaaaggacatatagaaatgtggatttcagcaccttccaaagttcagccagttatcagtagatacaatatctttaaatgaacacacgagtgtatgtctcacaatatatatacacaagtgtgcatatacagttaatgaaactatctttaaatgttattcatgctataaagagtaaacgtttgatgaattagaagagatgctcttttccaagctataatggatgctttgtttaatgagccaaatatgatgaaacattttttccaattcaaattctagctattgctttcctataaatgtttgggttgtgtttggtattgtttttagtggttaatagttttccagttgcatttaattttttgaatatgataccttgtcacatgtaaattagatacttaaatattaaattatagtttctgataaagaaattttgttaacaatgcaatgccactgagtgctattttgctcttttggtggagaaggcttttttcaaaactcttggtccttttacttctttctctcagtgcagaatcaattctcattttcatcgtaaaagcaaatagctggattatttcatttgccagtttctatttagtattccatgcctgcccaattcatctgttactgtttaatttcaattcttctggtgagaattagaaatgaaatattttttattcattggccaaaaagttcacagacagcagtgtttgctatttactttgaattgaaggcacaaaatgcatcaattcctgtgctgtgttgacttgcagtagtaagtaactgagagcataaaataaacctgactgtatgaagtcaatttaagtgatgagaacatttaactttggtgactaaagtcagaatatcttctcacttcacttaagggatcttccagaagatatctaaaagtctgtaataagcttagaagttcagataaatctaggcaggatactgcatttttgtggttttaaaaaagtccttaggacagactgaattatcataacttatggcatcaggaggaaactttaaaatatcaaggaatcactcagtcaccctcctgttttgttgaaggatcaaccccaaattctgggtatttgagtacatgtgaatcatggatttggtattcaactttttccctggatgctttggaatcgtgtcttccatgctccactgggttcaatttaaaataggagaggctttctcttctgaaagatccattttaggtctttttcaagaatagtgaacacattttttaacaaaataagttgtaattttaaaaggaaagttttgcctattttattaagatggaaatttctttttaggctaatttgaaatccaactgaagctttttaaccaatattttaaatttgaaccactagagttttttatgatgcaaatgattatgttgtctgaaaggtgtggttttattgaatgtctatttgagtatcatttaaaaagtatttgccttttactgtcatcatttctcttgttttattattattatcaatgtttatctatttttcaattaatttaatacagtttctaatgtgaaagacatttttctggaacccgttttccccttaaacactaaagagacctcaagtgaaagcatattgcttagtaggaaggtagaaaatgttaatccctgcgattctttgagttttaatgacagggtcattttcagtaaaggaaatgctcaccaacacatagtcaccaactattaaaggaatcatgtgattggattttcccctgtatacatgtacccttggtcataatcccactatttcatacatatttatgcattgctagattttcctaggactccaatagcatgctttccaagtgttattattcccttaatgttaaagaaaaaaatcaatatattgaattctttaattaaataggtaagcagtattaaatcatccacagagataaacaatctcttgaaactcttttgaaagagaaaagtgtttgttcactttcattgccttcattaagatctccaaatactcagagactaagcaggctattctcatctctttgagtttcctgacagaactaaaggaaggaatcactcttcaaaagatggatctcacttcactctgaaaatgtgcctttttttaattgggtgtttagcataaaaatcactattggggatcttacagatgtctgttgtagatctattacaatgaggtgacttagacattgggctttaccatattagagaattacttaagccattgtccttcaaatgttgggcttggagacagaagtaccttggactgaattgctttcaagtctctagaatcactgacagcacatagcttctatgaggagttatatatgaaataccacttgtgtccctcctcaagttctctgaccaccttcacatcctgcggccaccaacactgtatggatacaatctggcctctcagctctgctcactttcactttctgttctggggattctctgatactaattttggctacttggtagaaccaagagacaaatcgcttacatgctgcaaaccgatgtgaaggtgttactaacccgctaaaacacaattaatgaaagactgtagcaggtaactgatctttccctcagatattctacatggtccatggaagactctgtgggccgcagaagcccatagctgcatacccttctattttcctcttccccatttcactcttttaagctccctactcctattccctatgatcactttccaaaataaacggcaggtgtgctagctgttgtcttagactctgctttctggaaactatttttcccctccacaagaaattatcactgtgaatattacaggaggagaaataaaataagaataaatcagtggtttattttca

SEQ ID NO: 206258 - protein, 888 aa, Artificial Sequence
  derived and/or modified sequence
MDESALLDLLECPVCLERLDASAKVLPCQHTFCKRCLLGIVGSRNELRCPECRTLVGSGVEELPSNILLVRLLDGIKQRPWKPGPGGGSGTNCTNALRSQSSTVANCSSKDLQSSQGGQQPRVQSWSPPVRGIPQLPCAKALYNYEGKEPGDLKFSKGDIIILRRQVDENWYHGEVNGIHGFFPTNFVQIIKPLPQPPPQCKALYDFEVKDKEADKDCLPFAKDDVLTVIRRVDENWAEGMLADKIGIFPISYVEFNSAAKQLIEWDKPPVPGVDAGECSSAAAQSSTAPKHSDTKKNTKKRHSFTSLTMANKSSQASQNRHSMEISPPVLISSSNPTAAARISELSGLSCSAPSQVHISTTGLIVTPPPSSPVTTGPSFTFPSDVPYQAALGTLNPPLPPPPLLAATVLASTPPGATAAAAAAGMGPRPMAGSTDQIAHLRPQTRPSVYVAIYPYTPRKEDELELRKGEMFLVFERCQDGWFKGTSMHTSKIGVFPGNYVAPVTRAVTNASQAKVPMSTAGQTSRGVTMVSPSTAGGPAQKLQGNGVAGSPSVVPAAVVSAAHIQTSPQAKVLLHMTGQMTVNQARNAVRTVAAHNQERPTAAVTPIQVQNAAGLSPASVGLSHHSLASPQPAPLMPGSATHTAAISISRASAPLACAAAAPLTSPSITSASLEAEPSGRIVTVLPGLPTSPDSASSACGNSSATKPDKDSKKEKKGLLKLLSGASTKRKPRVSPPASPTLEVELGSAELPLQGAVGPELPPGGGHGRAGSCPVDGDGPVTTAVAGAALAQDAFHRKASSLDSAVPIAPPPRQACSSLGPVLNESRPVVCERHRVVVSYPPQSEAELELKEGDIVFVHKKREDGWFKGTLQRNGKTGLFPGSFVENI

SEQ ID NO: 206259 - protein, 99 aa, Artificial Sequence
  derived and/or modified sequence
MDESALLDLLECPVCLERLDASAKVLPCQHTFCKRCLLGIVGSRNELRCPECRTLVGSGVEELPSNILLVRLLDGIKQRPWKPGPGGGSGTNCTNALRS

SEQ ID NO: 206260 - protein, 79 aa, Artificial Sequence
  derived and/or modified sequence
MDESALLDLLECPVCLERLDASAKVLPCQHTFCKRCLLGIVGSRNELRCPECRTLVGSGVEELPSNILLVRLLDGIKQR

SEQ ID NO: 206261 - DNA, 300 bp, Artificial Sequence
  derived and/or modified sequence
atggacgagagcgccctgctggacctgctggagtgccccgtgtgcctggagagactggacgccagcgccaaggtgctgccctgccagcacaccttctgcaagagatgcctgctgggcatcgtgggcagcagaaacgagctgagatgccccgagtgcagaaccctggtgggcagcggcgtggaggagctgcccagcaacatcctgctggtgagactgctggacggcatcaagcagagaccctggaagcccggccccggcggcggcagcggcaccaactgcaccaacgccctgagaagctag

SEQ ID NO: 206262 - DNA, 240 bp, Artificial Sequence
  derived and/or modified sequence
atggacgagagcgccctgctggacctgctggagtgccccgtgtgcctggagagactggacgccagcgccaaggtgctgccctgccagcacaccttctgcaagagatgcctgctgggcatcgtgggcagcagaaacgagctgagatgccccgagtgcagaaccctggtgggcagcggcgtggaggagctgcccagcaacatcctgctggtgagactgctggacggcatcaagcagagatag

SEQ ID NO: 206263 - DNA, 2667 bp, Artificial Sequence
  derived and/or modified sequence
atggatgagtcagctcttctggacctcctggagtgtccagtgtgcctggagcgactggacgcaagcgcaaaggtgctcccctgccagcacactttttgtaaacgttgtctgcttggaattgtgggatcgaggaatgaactacgatgtcccgagtgccggaccctggttggatccggggttgaagagttaccatctaatattttgctggtgcggctgctggatgggattaaacaacgaccatggaagcccggtcctggagggggatctggcaccaactgcaccaacgctctcaggagccagtctagcacggtcgctaactgttcatccaaggatctgcagagctctcaggggggacaacaaccccgtgtacagagctggagtccccccgttagaggcatccctcagcttccttgtgcaaaagctctctataattacgaggggaaagaacctggtgacttgaaattctctaaaggcgatataattattctgagacggcaagtggacgagaattggtaccacggggaggtaaacgggatccatggtttctttccaacgaactttgttcagataatcaaacctcttccacagccaccgccgcagtgtaaggcattatatgacttcgaggtcaaggataaggaagctgacaaggactgcctgccttttgctaaggacgatgtactgacggtcatccgcagagttgatgaaaattgggccgaggggatgctcgcagacaagatcgggatctttccaatctcttacgtggagtttaattcggccgctaaacagctgattgagtgggataaaccccccgtacccggagtggacgccggggagtgttctagtgccgcagcccagtctagcactgcgcctaagcactcggataccaagaagaatacaaagaagcggcactcttttacaagtcttaccatggcaaataagagcagtcaggcatcccagaatagacactccatggaaatctctcctcccgtactgatctcctcaagcaacccaactgcagccgcacgtatctccgagctgtcggggctgtcatgctcggctccttctcaagtacatataagcactacaggactaattgtaacgcctccaccgagctcaccagtgactacagggccatcctttacattcccttccgacgtcccttaccaggctgcactcggcaccttaaacccacccctgcctcctccccccctgctggccgctactgtgttagccagcacaccccctggcgctacagccgcggcagccgcagctggcatgggtccgcgaccaatggcaggctctacagatcagatcgctcacctgaggcctcagacacgtccatctgtgtacgttgctatctacccatacaccccacggaaagaggacgagctggagctgaggaagggagagatgttcctggttttcgagcggtgccaggacggctggttcaagggtacatccatgcatacttccaaaatcggggtgtttcccggtaactatgtggctccagtgacccgtgcagtcacaaacgcttctcaggccaaagtccccatgagcactgctggacagacatcacggggagtgaccatggtttctcccagcaccgccgggggacccgcccagaaactgcagggaaacggggtggcaggttccccttccgtggtccccgctgccgtggtgagcgcagcacacattcagacatccccccaggctaaggtgctgctgcatatgacagggcagatgacggtgaatcaggcccgaaatgctgtgcgcacagtggcggcacataatcaggagcggccgaccgccgcagtaactccaatccaagtccaaaatgcggcagggctgtcgccagcttccgtgggactcagtcaccattcgcttgcgtctccccagcccgcccccttaatgccgggaagtgccacacacacagctgctatttccatcagccgggcctcagcccctcttgcttgcgccgcagccgcgcctctgacgtctccatcaattacatctgcaagcctcgaggccgaacctagcgggcggatcgttactgtcctgcccggactcccgacaagtccagattcagcatcatctgcgtgcggcaacagttctgcaacaaaaccggacaaagactcaaagaaggagaaaaagggactcctaaaactgctgtccggtgcctccaccaagcggaagccacgggtctcacccccagcatcgcccaccctggaagtggagctgggaagcgccgaattgcccctacagggtgctgtgggtccagagctgccccctggcgggggacacggcagggcaggctcttgccctgtggatggagatggtcccgtcaccacagcggtggccggtgccgctctcgcacaggacgcttttcatcgtaaggcctcatcacttgattccgcggtaccaatcgcacctccgcccagacaagcgtgtagcagcctgggccctgtcttaaacgaaagccgaccagtcgtttgcgagcggcatcgtgtggtcgtctcctaccctccgcagagcgaggccgagcttgaacttaaggagggagatatcgtgtttgtgcataaaaaacgtgaggacggctggttcaaaggaaccctacagagaaatggaaagaccggactgtttccaggcagcttcgtggagaacatctag

SEQ ID NO: 206264 - DNA, 300 bp, Artificial Sequence
  derived and/or modified sequence
atggatgagtctgctcttctcgatctgctagagtgtcccgtctgcctggaaaggcttgacgcctctgctaaagtgctgccatgtcaacacactttttgcaaaaggtgtttgttggggatagttggctcccgcaacgagctgcgatgccctgagtgcagaacattagtggggtcaggagtcgaagagttgcctagcaacatactgctcgtgagactgcttgatggaatcaaacagagaccctggaagccaggtcccggaggggggagcgggacgaattgcacgaacgctttaaggtcttag

SEQ ID NO: 206265 - DNA, 240 bp, Artificial Sequence
  derived and/or modified sequence
atggatgagtccgccctgctggacctcttagaatgtccagtgtgcctggaacggcttgatgcgagcgctaaggtcttgccttgccagcacaccttttgtaagcgttgtctattagggatcgtcggatccaggaacgaactgcgctgccctgaatgtcgtaccctcgtggggagtggagtagaggaactcccatcgaacatcctgctggtgagactgcttgacggcattaagcagagatag

SEQ ID NO: 206266 - DNA, 2667 bp, Artificial Sequence
  derived and/or modified sequence
atggatgagagcgccctgctggacctgctggagtgccctgtgtgcctggagcggctggatgccagcgccaaggtgctgccctgccagcacaccttctgcaagcgctgcctgctgggcatcgtgggcagcagaaatgagctgcgctgcccagaatgtaggaccctggtgggcagcggcgtggaggagctgcccagcaacatcctgctggtgcggctgctggatggcatcaagcagaggccctggaagccaggccctgggggcggcagcggcaccaactgcaccaatgccctgcggagccagagcagcacagtggccaactgcagcagcaaggacctgcagagcagccagggcggccagcagccccgggtgcagagctggagcccccctgtgcggggcatcccccagctgccctgtgccaaggccctgtacaactatgagggcaaggagcccggggacctgaagttcagcaaaggagacatcatcatcctgcggcggcaggtggatgagaactggtaccatggagaggtgaatggcatccacggcttcttccccaccaactttgtgcagatcatcaagcccctgccccagcccccaccccagtgcaaggccctgtatgactttgaggtgaaggacaaggaggccgacaaggactgcctgccctttgccaaggatgatgtgctgaccgtcatcagaagagtggatgagaactgggccgagggcatgctggccgacaagattggcatcttccccatctcctatgtggagttcaacagcgctgccaagcagctgattgagtgggacaagccccctgtgcctggggtggatgctggggagtgcagcagcgctgctgcccagagcagcacagcccccaagcacagcgacaccaagaagaacaccaagaagaggcacagcttcaccagcctgaccatggccaacaagagcagccaggccagccagaacagacacagcatggagatcagcccccctgtgctgatcagcagcagcaaccccacagctgctgcccgcatcagcgagctgagcggcctgagctgcagcgcccccagccaggtgcacatcagcaccaccggcctgattgtgaccccaccacccagcagccctgtgaccaccggccccagcttcaccttccccagtgatgtgccctaccaggccgccctgggcaccctgaacccccccctgcccccaccacccctgctggccgccaccgtgctggccagcaccccacctggggccacagctgctgctgctgctgctggcatgggcccccggcccatggccggcagcacagaccagatcgcccacctgcggccccagacccggcccagcgtgtatgtggccatctacccctacacccccaggaaagaagatgagctggagctgaggaagggggagatgttcctggtgtttgagcgctgccaggacggctggttcaagggcacctccatgcacaccagcaagattggagtcttccctggcaactacgtggcccctgtgaccagggctgtgaccaatgccagccaggccaaggtgcccatgagcacagctggccagaccagcagaggagtgaccatggtgagccccagcacagctgggggccctgcccagaagctgcagggcaatggagtggccggcagccccagcgtggtgcctgctgctgtggtgtctgctgcccacatccagaccagcccccaggccaaggtgctgctgcacatgacaggccagatgacagtgaaccaggccagaaatgctgtgaggacagtggccgcccacaaccaggagcggcccacagctgctgtgacccccatccaggtgcagaatgctgctggcctgagccctgcctctgtgggcctgagccaccacagcctggccagcccccagcctgcccccctgatgcctggcagcgccacccacacagctgccatcagcatcagccgggccagcgcccccctggcctgtgccgctgctgcccccctgaccagccccagcatcaccagcgccagcctggaggccgagcccagcggccgcatcgtgacagtgctgcccggcctgcccaccagcccagattctgccagcagcgcctgtggcaacagcagcgccaccaagccagacaaggacagcaagaaggagaagaagggcctgctgaagctgctgagcggggccagcaccaagaggaagccccgggtgagccccccagccagccccaccctggaggtggagctgggcagcgctgagctgcccctgcagggcgctgtgggccctgagctgcccccaggcggcggccacggccgggccggcagctgccctgtggatggagatggccctgtgaccacagctgtggccggggccgccctggcccaggatgccttccacaggaaggccagcagcctggacagcgctgtgcccatcgcccccccaccccggcaggcctgcagcagcctgggccctgtgctgaatgaaagcaggcctgtggtgtgtgagcggcaccgggtggtggtgtcctacccaccccagagcgaggccgagctggagctgaaggagggggacatcgtgtttgtgcacaagaagagagaagatggctggttcaagggcaccctgcagagaaatggcaagacaggcctcttccctggcagctttgtggagaacatctag

SEQ ID NO: 206267 - DNA, 300 bp, Artificial Sequence
  derived and/or modified sequence
atggatgagagcgccctgctggacctgctggagtgccctgtgtgcctggagcggctggatgccagcgccaaggtgctgccctgccagcacaccttctgcaagcgctgcctgctgggcatcgtgggcagcagaaatgagctgcgctgcccagaatgtaggaccctggtgggcagcggcgtggaggagctgcccagcaacatcctgctggtgcggctgctggatggcatcaagcagaggccctggaagccaggccctgggggcggcagcggcaccaactgcaccaatgccctgcggagctag

SEQ ID NO: 206268 - DNA, 240 bp, Artificial Sequence
  derived and/or modified sequence
atggatgagagcgccctgctggacctgctggagtgccctgtgtgcctggagcggctggatgccagcgccaaggtgctgccctgccagcacaccttctgcaagcgctgcctgctgggcatcgtgggcagcagaaatgagctgcgctgcccagaatgtaggaccctggtgggcagcggcgtggaggagctgcccagcaacatcctgctggtgcggctgctggatggcatcaagcagaggtag

SEQ ID NO: 206269 - DNA, 2667 bp, Artificial Sequence
  derived and/or modified sequence
atggacgagagcgccctgctggacctgctggagtgccccgtgtgcctagagcgtttagacgccagtgctaaggtactgccatgtcaacacaccttttgcaagcgctgccttttgggcattgtggggtcccgtaacgagctgcgttgccccgaatgtagaacgctagtcggctccggcgttgaggaattgccatctaacatcctgctggttcgcctactggacgggattaagcaacgcccctggaagccaggccctggcgggggctccgggacaaattgcacgaacgccttgagaagccagtcttcgacagtggccaactgctcttcaaaggatctgcagtctagccagggagggcagcaacctcgggttcagagttggtccccacctgtccgtgggattccacagctaccttgtgccaaagctctgtataactatgagggcaaagagcccggggatctgaaattttccaaaggtgatattatcatactgcggagacaggtggacgaaaactggtaccatggtgaggtaaacggcatccatgggtttttccctacaaacttcgttcagatcattaagcctctgccgcagcccccaccacaatgtaaagcattgtacgacttcgaagttaaggacaaggaagcagacaaggattgcctgccctttgctaaagacgatgttcttacggtcatcaggagggtggacgagaactgggccgagggcatgctcgccgacaaaattggtatatttccaattagttatgttgaattcaattcagccgctaagcagctgatagagtgggataaaccccccgtccctggagtggacgccggcgagtgtagctctgccgccgcgcagtcaagtacagcccctaagcatagtgacactaagaagaacacaaagaagcgtcactctttcacttctcttacaatggcgaacaagtccagtcaggcgagtcagaacaggcatagcatggaaatcagcccacccgtccttatatcctccagcaacccaacggcagcagcccggataagtgaactcagtggcttgagctgcagcgccccctctcaggtccacatatctaccaccggacttattgtcaccccgccaccgtcgtcccccgttacaacaggtcccagctttacatttcccagcgatgtgccttatcaggccgctctcgggactctcaacccacccctaccccccccaccattacttgcagcgactgttttagcctccactcccccaggcgccaccgccgctgccgccgctgccggcatgggcccgagacctatggccgggagcactgatcagatcgcccacctgaggcctcaaactaggcccagcgtgtatgtggctatatatccgtacaccccacggaaggaggacgaactggagctgagaaaaggggaaatgtttcttgttttcgaaagatgccaggacggttggtttaaagggactagtatgcacacgtctaagattggtgtgtttccagggaactatgtcgcgcctgttacccgcgccgtaactaatgcttcacaggcgaaggtccccatgtcaacagcaggccagacaagtcgaggggttactatggtaagcccatcaactgccggaggacctgctcaaaagctgcagggcaatggggtcgctggcagcccctctgttgtgccagcagccgtcgtgtcagccgcacacattcaaacatctccacaggccaaagttctgttgcacatgaccggccagatgactgtcaatcaagctaggaacgccgtcagaactgtagcggctcacaaccaggagagaccaaccgccgccgtcaccccaatccaggtgcagaacgctgcaggactgagccctgcatccgttggactaagccaccactcgcttgccagcccacaacctgctcccctgatgcccggatccgccacccacaccgccgcaatttctatctcacgcgcatccgcacctttagcttgcgcagccgcagccccactcacctcaccttcgattacctcagcaagccttgaggcagaaccgtcgggccgaatcgtaaccgtattgcctggactccctacctctccagactcagcatcctccgcgtgcggtaattctagtgcaacaaaaccagataaggactccaaaaaggagaaaaaaggattgcttaaattgctaagcggcgcctctactaagcgcaaaccccgtgtaagccctcctgcctctcccaccctggaagtcgagctgggcagtgcagagctgccgctgcagggggctgtgggccccgagcttccaccgggaggggggcacggtcgggcaggttcatgtcccgttgatggcgacgggcccgttactacagcagtcgctggagccgccctcgctcaggacgcttttcatcgaaaagctagttccctggatagtgccgttcccattgctcctccacctaggcaggcctgtagctctttaggacctgtccttaacgaatccagaccagtcgtttgcgaaagacatagggtggtagtgagctatcccccccagagcgaggccgagctggaactcaaggagggcgacatcgtcttcgtgcacaaaaaacgggaggacggctggtttaaagggaccttgcagcggaacgggaaaactggactattcccagggtctttcgtcgagaatatttag

SEQ ID NO: 206270 - DNA, 300 bp, Artificial Sequence
  derived and/or modified sequence
atggacgagagcgccctgctggacctgctggagtgccccgtgtgcctcgaaaggctggacgcgtctgccaaggtgctgccatgtcagcacaccttctgcaaacgttgtctacttgggattgtgggatcacgcaacgaactccgctgtccagagtgcagaaccttagtagggagtggtgtggaggaactgccttcaaacatcttgctcgtacgcctgctcgatggaattaagcagcgaccgtggaagcccggccccggcggcggctcaggaaccaattgcacaaacgccctgcggtcctag

SEQ ID NO: 206271 - DNA, 240 bp, Artificial Sequence
  derived and/or modified sequence
atggacgagagcgccctgctggacctgctggagtgccccgtgtgcctcgagagactggacgcaagtgctaaagtgctgccatgccagcataccttctgcaagaggtgcctcctgggtatagtgggatcacgaaacgagctgaggtgccccgagtgtcggactctcgtggggagtggagtagaggagcttccttcaaatatcctgctggtgagacttctcgatgggatcaagcagaggtag

SEQ ID NO: 206272 - DNA, 2667 bp, Artificial Sequence
  derived and/or modified sequence
atggacgaaagtgccttgctggatctattggaatgtcctgtttgcctggagcgtctggacgcaagcgctaaagttctgccctgtcagcatacattttgtaaacgctgtctgctgggaattgtgggatcccgaaatgagctccgttgtcccgaatgcaggaccctggtcgggagcggggtggaagagctgcctagcaatatcctgttggtgagactactggacggaattaagcagaggccatggaagcctggcccaggtggcggaagcggcaccaattgtacgaatgctctcaggtcacagtccagcaccgttgccaattgcagcagtaaagacctccagtcaagccagggaggacagcaaccgcgtgtccagtcatggagcccacctgtccggggaatcccgcagctgccatgtgctaaagccctgtacaattatgagggaaaggaacccggtgatctcaaattttcaaagggcgatatcatcatccttcgtaggcaggttgatgaaaattggtatcacggggaagtcaacggcattcacgggttttttcccactaacttcgtccagataattaagcctcttcctcagcctccacctcaatgtaaggccctgtacgattttgaagtgaaagataaagaagccgataaggactgtctgccatttgccaaagatgacgtcctgacagttatacgacgcgtggacgaaaattgggccgaagggatgctcgccgacaaaatcggaatctttccaatttcctacgtcgagtttaacagcgccgctaagcagttgattgagtgggataagccaccagtgccaggagtcgatgcgggtgaatgctcatccgctgctgcacagagttctaccgcccctaagcacagtgacaccaagaagaacacaaaaaaacggcacagcttcacgtccctgaccatggccaataaatctagccaggctagccagaatcgccattctatggaaataagtccaccagtcctcatttcttcctcgaatcctacagccgctgccagaattagtgagctgagtggcctgtcctgctcagccccttcacaggtgcacatctcaaccacgggtttgattgtcactcctccaccaagttcccccgtgacgaccggcccaagcttcacgttccccagcgacgtcccataccaagctgccctcggcaccctgaatccgccattgcccccacctccactgctggctgccaccgtgctggcttcgaccccaccaggagccaccgccgcagctgctgctgccggaatggggcctcgtcctatggctgggtcaacggatcagatcgcccatctgagacctcagaccaggccctctgtgtatgtggccatctacccatatacccccaggaaagaagatgaattggagctccggaaaggagagatgtttttggtcttcgagcggtgtcaggacgggtggttcaagggtaccagcatgcacacctctaaaatcggtgtatttcctggcaactacgtggcgcctgtcacccgtgccgtgacaaatgcaagccaggcaaaggtgccaatgagcaccgccggacagacttcgcgaggggtcacgatggtcagtccttccacagcaggcggaccggctcagaaactccagggtaatggcgtggccggttcccctagtgtagtgcctgccgctgtcgtttccgctgcccacattcagacatctccccaggcaaaggtcctactgcacatgacaggtcagatgactgtgaaccaagcccgaaatgcagtgcgcacagtagccgcacacaatcaagagcgcccaaccgcggcagttaccccaatccaagtgcaaaatgccgctggactttcccccgcaagcgtgggactcagtcatcattcactggccagtccgcagccagccccactgatgccaggatccgctacccacacagccgcaatctctattagcagggcgtctgcgcctttggcctgtgcagctgccgctcccctgacttctccttctatcaccagcgcatccctcgaagccgaaccttcaggacgcattgtaactgttctgccaggactgccgacttcacctgactccgcaagttcagcctgcggaaatagtagtgccacaaaaccggataaggattcaaagaaggaaaaaaaagggcttctgaaactgcttagtggagccagcaccaagcgaaaaccccgtgtcagtccacctgcatcccctacactggaagtggagttgggaagcgccgaacttccgctccaaggtgcagtcggacccgagcttccccctgggggtggtcatggtagagcagggagctgccctgtagacggcgacgggccagtgaccacagcggtggcgggtgctgcactggcacaggacgccttccaccgtaaagctagtagcctggactccgctgtgcctatcgccccaccacctcggcaggcctgcagtagcctgggtcccgttctcaatgaaagtcggccagtggtgtgcgaaaggcacagagttgtggtgtcatacccaccgcagagcgaagccgaactcgaacttaaagaaggggatatcgtgttcgtacacaagaaaagagaagacggctggttcaagggcacattgcaacggaacggcaaaaccggactcttccccggatcttttgtcgaaaacatttag

SEQ ID NO: 206273 - DNA, 300 bp, Artificial Sequence
  derived and/or modified sequence
atggacgagtcagctctgcttgacttgcttgaatgcccagtctgcctcgagaggcttgatgcgagcgccaaagtgctgccgtgccagcacacattttgtaagaggtgcctgctcgggatcgtgggttcaaggaacgagctgaggtgccccgaatgtagaactcttgtaggcagcggcgttgaagagctgccgtcaaacatactcctggttcggctattagatggcattaaacagcggccatggaaaccaggcccaggtgggggatcaggtaccaactgtactaatgcactcaggtcttag

SEQ ID NO: 206274 - DNA, 240 bp, Artificial Sequence
  derived and/or modified sequence
atggatgagtccgctctgctagacctgctggagtgtcctgtgtgcctcgaaagactcgacgcctccgccaaagtcttaccatgccagcatactttctgtaaacgctgcttactcggcatcgtcggctctcgaaacgaactgcggtgtcccgagtgcagaacgctagtgggcagtggcgtcgaggagctgccctcaaacatcttgctggtgaggctcctggatggaataaaacagcgctag

SEQ ID NO: 206275 - DNA, 487 bp, Artificial Sequence
  derived and/or modified sequence
gcggccggcgcggggtcgacggggacccagcgtcggcggacccctagccgcggagaaggcggtggtctcgacattcccccatccccgccctggagcaaagtctgaaatggatgttacatgagtcattttaagggatgcacacaactatgaacatttctgaagattttttctcagtaaagtagataaagatggatgaatcagccttgttggatcttttggagtgtccggtgtgtctagagcgccttgatgcttctgcgaaggtcttgccttgccagcatacgttttgcaagcgatgtttgctggggatcgtaggttctcgaaatgaactcagatgtcccgagtgcaggactcttgttggctcgggtgtcgaggagcttcccagtaacatcttgctggtcagacttctggatggcatcaaacagaggccttggaaacctggtcctggtgggggaagtgggaccaactgcacaaatgcattaaggtctca

SEQ ID NO: 206276 - DNA, 591 bp, Artificial Sequence
  derived and/or modified sequence
cagagtttatcaactactgccctgaagggcgcttttctgttttagctgctttcaagcaaatctgtgtcttttagaattgtcaaccttcagctctttttggttgggcaaaattaaacagttctatttttaataacagcgaagaaacatatgtatttaatattgggatcatttaccacgagcgattacatgaggcatggtttcttaaacgctaaagtggcttaaaaaagggaatttagttggatataaaagtaaatttcagagcaaagtctgaaatggatgttacatgagtcattttaagggatgcacacaactatgaacatttctgaagattttttctcagtaaagtagataaagatggatgaatcagccttgttggatcttttggagtgtccggtgtgtctagagcgccttgatgcttctgcgaaggtcttgccttgccagcatacgttttgcaagcgatgtttgctggggatcgtaggttctcgaaatgaactcagatgtcccgagtgcaggactcttgttggctcgggtgtcgaggagcttcccagtaacatcttgctggtcagacttctggatggcatcaaacagagg

SEQ ID NO: 206277 - DNA, 5272 bp, Artificial Sequence
  derived and/or modified sequence
cgccccgggcgccggctgcgtcccggcctcctcctcctcttcctccgccctccttggctgggaaagtgggaggcggcggcggcggcgtggtgtgtgtgcgcgcgtgaggggggcagcagagaggagtctcccggtgccgccgcggcgtcagagacactgcgagcggcgagcgcggtggggccgcatctgcatcagccgccgcagccgctgcggggccgcgaacaaagaggaggagccgaggcgcgagagcaaagtctgaaatggatgttacatgagtcattttaagggatgcacacaactatgaacatttctgaagattttttctcagtaaagtagataaagatggatgaatcagccttgttggatcttttggagtgtccggtgtgtctagagcgccttgatgcttctgcgaaggtcttgccttgccagcatacgttttgcaagcgatgtttgctggggatcgtaggttctcgaaatgaactcagatgtcccgagtgcaggactcttgttggctcgggtgtcgaggagcttcccagtaacatcttgctggtcagacttctggatggcatcaaacagaggccttggaaacctggtcctggtgggggaagtgggaccaactgcacaaatgcattaaggtctcagagcagcactgtggctaattgtagctcaaaagatctgcagagctcccagggcggacagcagcctcgggtgcaatcctggagccccccagtgaggggtatacctcagttaccatgtgccaaagcattatacaactatgaaggaaaagagcctggagaccttaaattcagcaaaggtgacatcatcattttgcgaagacaagtggatgaaaattggtaccatggggaagtcaatggaatccatggctttttccccaccaactttgtgcagattattaaaccgttacctcagcccccacctcagtgcaaagcactttatgactttgaagtgaaagacaaggaagcagacaaagattgccttccatttgcaaaggatgatgttctgactgtgatccgaagagtggatgaaaactgggctgaaggaatgctggcagacaaaataggaatatttccaatttcatatgttgagtttaactcggctgctaagcagctgatagaatgggataagcctcctgtgccaggagttgatgctggagaatgttcctcggcagcagcccagagcagcactgccccaaagcactccgacaccaagaagaacaccaaaaagcggcactccttcacttccctcactatggccaacaagtcctcccaggcatcccagaaccgccactccatggagatcagcccccctgtcctcatcagctccagcaaccccactgctgctgcacggatcagcgagctgtctgggctctcctgcagtgccccttctcaggttcatataagtaccaccgggttaattgtgaccccgcccccaagcagcccagtgacaactggcccctcgtttactttcccatcagatgttccctaccaagctgcccttggaactttgaatcctcctcttccaccaccccctctcctggctgccactgtccttgcctccacaccaccaggcgccaccgccgctgctgctgctgctggaatgggaccgaggcccatggcaggatccactgaccagattgcacatttacggccgcagactcgccccagtgtgtatgttgctatatatccatacactcctcggaaagaggatgaactagagctgagaaaaggggagatgtttttagtgtttgagcgctgccaggatggctggttcaaagggacatccatgcataccagcaagataggggttttccctggcaattatgtggcaccagtcacaagggcggtgacaaatgcttcccaagctaaagtccctatgtctacagctggccagacaagtcggggagtgaccatggtcagtccttccacggcaggagggcctgcccagaagctccagggaaatggcgtggctgggagtcccagtgttgtccccgcagctgtggtatcagcagctcacatccagacaagtcctcaggctaaggtcttgttgcacatgacggggcaaatgacagtcaaccaggcccgcaatgctgtgaggacagttgcagcgcacaaccaggaacgccccacggcagcagtgacacccatccaggtacagaatgccgccggcctcagccctgcatctgtgggcctgtcccatcactcgctggcctccccacaacctgcgcctctgatgccaggctcagccacgcacactgctgccatcagtatcagtcgagccagtgcccctctggcctgtgcagcagctgctccactgacttccccaagcatcaccagtgcttctctggaggctgagcccagtggccggatagtgaccgttctccctggactccccacatctcctgacagtgcttcatcagcttgtgggaacagttcagcaaccaaaccagacaaggatagcaaaaaagaaaaaaagggtttgttgaagttgctttctggcgcctccactaaacggaagccccgcgtgtctcctccagcatcgcccaccctagaagtggagctgggcagtgcagagcttcctctccagggagcggtggggcccgaactgccaccaggaggtggccatggcagggcaggctcctgccctgtggacggggacggaccggtcacgactgcagtggcaggagcagccctggcccaggatgcttttcataggaaggcaagttccctggactccgcagttcccatcgctccacctcctcgccaggcctgttcctccctgggtcctgtcttgaatgagtctagacctgtcgtttgtgaaaggcacagggtggtggtttcctatcctcctcagagtgaggcagaacttgaacttaaagaaggagatattgtgtttgttcataaaaaacgagaggatggctggttcaaaggcacattacaacgtaatgggaaaactggccttttcccaggaagctttgtggaaaacatatgaggagactgacactgaagaagcttaaaatcacttcacacaacaaagtagcacaaagcagtttaacagaaagagcacatttgtggacttccagatggtcaggagatgagcaaaggattggtatgtgactctgatgccccagcacagttaccccagcgagcagaatgaagaagatgtttgtgtgggttttgttagtctggattcggatgtataaggtgtgccttgtactgtctgatttactacacagagaaacttttttttttttttaagatatatgactaaaatggacaattgtttacaaggcttaactaatttatttgcttttttaaacttgaacttttcgtataatagatacgttctttggattatgattttaagaaattattaatttatgaaatgataggtaaggagaagctggattatctcctgttgagagcaagagattcgttttgacatagagtgaatgcattttcccctctcctcctccctgctaccattatattttggggttatgttttgcttctttaagatagaaatcccagttctctaatttggttttcttctttgggaaaccaaacatacaaatgaatcagtatcaattagggcctggggtagagagacagaaacttgagagaagagaagttagtgattccctctctttctagtttggtaggaatcaccctgaagacctagtcctcaatttaattgtgtgggtttttaattttcctagaatgaagtgactgaaacaatgagaaagaatacagcacaacccttgaacaaaatgtatttagaaatatatttagttttatagcagaagcagctcaattgtttggttggaaagtaggggaaattgaagttgtagtcactgtctgagaatggctatgaagcgtcatttcacattttaccccaactgacctgcatgcccaggacacaagtaaaacatttgtgagatagtggtggtaagtgatgcactcgtgttaagtcaaaggctataagaaacactgtgaaaagttcatattcatccattgtgattctttccccacgtcttgcatgtattactggattcccacagtaatatagactgtgcatggtgtgtatatttcattgcgatttcctgttaagatgagtttgtactcagaattgaccaattcaggaggtgtaaaaataaacagtgttctcttctctaccccaaagccactactgaccaaggtctcttcagtgcactcgctccctctctggctaaggcatgcattagccactacacaagtcattagtgaaagtggtcttttatgtcctcccagcagacagacatcaaggatgagttaaccaggagactactcctgtgactgtggagctctggaaggcttggtgggagtgaatttgcccacaccttacaattgtggcaggatccagaagagcctgtctttttatatccattccttgatgtcattggcctctcccaccgatttcattacggtgccacgcagtcatggatctgggtagtccggaaaacaaaaggagggaagacagcctggtaatgaataagatccttaccacagttttctcatgggaaatacataataaaccctttcatctttttttttttcctttaagaattaaaactgggaaatagaaacatgaactgaaaagtcttgcaatgacaagaggtttcatggtcttaaaaagatactttatgtggttgaagatgaaatcattcctaaattaaccttttttttaaaaaaaaacaatgtatattatgttcctgtgtgttgaatttaaaaaaaaaatactttacttggatattcatgtaatatataaaggtttggtgaaatgaactttagttaggaaaaagctggcatcagctttcatctgtgtaagttgacaccaatgtgtcataatattctttattttgggaaattagtgtattttataaaaattttaaaaagaaaaaagactactacaggttaagataatttttttacctgtcttttctccatattttaagctatgtgattgaagtacctctgttcatagtttcctggtataaagttggttaaaatttcatctgttaatagatcattaggtaatataatgtatgggttttctattggttttttgcagacagtagagggagattttgtaacaagggcttgttacacagtgatatggtaatgataaaattgcgatttatcactccttttcatgttaataatttgaggactggataaaaggtttcaagattaaaatttgatgttcaaacctttgt

SEQ ID NO: 206278 - DNA, 2667 bp, Artificial Sequence
  derived and/or modified sequence
atggacgagagcgccctgctggacctgctggagtgccccgtgtgcctggagagactggacgccagcgccaaggtgctgccctgccagcacaccttctgcaagagatgcctgctgggcatcgtgggcagcagaaacgagctgagatgccccgagtgcagaaccctggtgggcagcggcgtggaggagctgcccagcaacatcctgctggtgagactgctggacggcatcaagcagagaccctggaagcccggccccggcggcggcagcggcaccaactgcaccaacgccctgagaagccagagcagcaccgtggccaactgcagcagcaaggacctgcagagcagccagggcggccagcagcccagagtgcagagctggagcccccccgtgagaggcatcccccagctgccctgcgccaaggccctgtacaactacgagggcaaggagcccggcgacctgaagttcagcaagggcgacatcatcatcctgagaagacaggtggacgagaactggtaccacggcgaggtgaacggcatccacggcttcttccccaccaacttcgtgcagatcatcaagcccctgccccagccccccccccagtgcaaggccctgtacgacttcgaggtgaaggacaaggaggccgacaaggactgcctgcccttcgccaaggacgacgtgctgaccgtgatcagaagagtggacgagaactgggccgagggcatgctggccgacaagatcggcatcttccccatcagctacgtggagttcaacagcgccgccaagcagctgatcgagtgggacaagccccccgtgcccggcgtggacgccggcgagtgcagcagcgccgccgcccagagcagcaccgcccccaagcacagcgacaccaagaagaacaccaagaagagacacagcttcaccagcctgaccatggccaacaagagcagccaggccagccagaacagacacagcatggagatcagcccccccgtgctgatcagcagcagcaaccccaccgccgccgccagaatcagcgagctgagcggcctgagctgcagcgcccccagccaggtgcacatcagcaccaccggcctgatcgtgacccccccccccagcagccccgtgaccaccggccccagcttcaccttccccagcgacgtgccctaccaggccgccctgggcaccctgaacccccccctgccccccccccccctgctggccgccaccgtgctggccagcaccccccccggcgccaccgccgccgccgccgccgccggcatgggccccagacccatggccggcagcaccgaccagatcgcccacctgagaccccagaccagacccagcgtgtacgtggccatctacccctacacccccagaaaggaggacgagctggagctgagaaagggcgagatgttcctggtgttcgagagatgccaggacggctggttcaagggcaccagcatgcacaccagcaagatcggcgtgttccccggcaactacgtggcccccgtgaccagagccgtgaccaacgccagccaggccaaggtgcccatgagcaccgccggccagaccagcagaggcgtgaccatggtgagccccagcaccgccggcggccccgcccagaagctgcagggcaacggcgtggccggcagccccagcgtggtgcccgccgccgtggtgagcgccgcccacatccagaccagcccccaggccaaggtgctgctgcacatgaccggccagatgaccgtgaaccaggccagaaacgccgtgagaaccgtggccgcccacaaccaggagagacccaccgccgccgtgacccccatccaggtgcagaacgccgccggcctgagccccgccagcgtgggcctgagccaccacagcctggccagcccccagcccgcccccctgatgcccggcagcgccacccacaccgccgccatcagcatcagcagagccagcgcccccctggcctgcgccgccgccgcccccctgaccagccccagcatcaccagcgccagcctggaggccgagcccagcggcagaatcgtgaccgtgctgcccggcctgcccaccagccccgacagcgccagcagcgcctgcggcaacagcagcgccaccaagcccgacaaggacagcaagaaggagaagaagggcctgctgaagctgctgagcggcgccagcaccaagagaaagcccagagtgagcccccccgccagccccaccctggaggtggagctgggcagcgccgagctgcccctgcagggcgccgtgggccccgagctgccccccggcggcggccacggcagagccggcagctgccccgtggacggcgacggccccgtgaccaccgccgtggccggcgccgccctggcccaggacgccttccacagaaaggccagcagcctggacagcgccgtgcccatcgcccccccccccagacaggcctgcagcagcctgggccccgtgctgaacgagagcagacccgtggtgtgcgagagacacagagtggtggtgagctaccccccccagagcgaggccgagctggagctgaaggagggcgacatcgtgttcgtgcacaagaagagagaggacggctggttcaagggcaccctgcagagaaacggcaagaccggcctgttccccggcagcttcgtggagaacatctag

SEQ ID NO: 206279 - protein, 1028 aa, Artificial Sequence
  derived and/or modified sequence
MMFPWKQLILLSFIGCLGGELLLQGPVFIKEPSNSIFPVGSEDKKITLHCEARGNPSPHYRWQLNGSDIDMSMEHRYKLNGGNLVVINPNRNWDTGTYQCFATNSLGTIVSREAKLQFAYLENFKTKMRSTVSVREGQGVVLLCGPPPHSGELSYAWIFNEYPSFVEEDSRRFVSQETGHLYISKVEPSDVGNYTCVVTSMVTNARVLGSPTPLVLRSDGVMGEYEPKIEVQFPETLPAAKGSTVKLECFALGNPIPQINWRRSDGLPFSSKIKLRKFSGVLEIPNFQQEDAGSYECIAENSRGKNVARGRLTYYAKPHWVQLIKDVEIAVEDSLYWECRASGKPKPSYRWLKNGAALVLEERTQIENGALTISNLSVTDSGMFQCIAENKHGLVYSSAELKVVASAPDFSKNPMKKLVQVQVGSLVSLDCKPRASPRALSSWKKGDVSVQEHERISLLNDGGLKIANVTKADAGTYTCMAENQFGKANGTTHLVVTEPTRITLAPSNMDVSVGESVILPCQVQHDPLLDIIFTWYFNGALADFKKDGSHFEKVGGSSSGDLMIRNIQLKHSGKYVCMVQTGVDSVSSAADLIVRGSPGPPENVKVDEITDTTAQLSWKEGKDNHSPVISYSIQARTPFSVGWQTVTTVPEVIDGKTHTATVVELNPWVEYEFRVVASNKIGGGEPSLPSEKVRTEEAVPEVPPSEVNGGGGSRSELVITWDPVPEELQNGEGFGYVVAFRPLGVTTWIQTVVTSPDTPRYVFRNESIVPYSPYEVKVGVYNNKGEGPFSPVTTVFSAEEEPTVAPSQVSANSLSSSEIEVSWNTIPWKLSNGHLLGYEVRYWNGGGKEESSSKMKVAGNETSARLRGLKSNLAYYTAVRAYNSAGAGPFSATVNVTTKKTPPSQPPGNVVWNATDTKVLLNWEQVKAMENESEVTGYKVFYRTSSQNNVQVLNTNKTSAELVLPIKEDYIIEVKATTDGGDGTSSEQIRIPRITSMDARGSTSAISNVHPMSSYMPIVLFLIVYVLW

SEQ ID NO: 206280 - DNA, 3087 bp, Artificial Sequence
  derived and/or modified sequence
atgatgttcccttggaagcagttgattctgctaagttttattggctgtctggggggcgaactcttgcttcaggggccagtgttcataaaggaaccgtctaactccatctttccagtcggtagtgaggacaaaaagataacccttcactgtgaggcccgagggaatcccagccctcactaccgctggcagctgaacggaagcgacattgacatgtctatggagcataggtataagctcaacggaggtaacctggtcgtaatcaaccccaataggaactgggataccggtacatatcagtgctttgccaccaactcgctgggtacgattgtgagccgtgaggctaagctccagttcgcatatctggagaatttcaaaaccaaaatgaggtcgacagtgtcagtgagagaaggccagggtgttgtccttctctgcggcccacccccacatagcggggaattgtcatacgcatggatttttaatgaatacccatcgttcgtggaagaggactctcgcaggttcgttagccaggagacaggacatctctacatcagcaaggttgagccatcagacgtgggtaactacacctgcgtggtgaccagtatggtcaccaatgcccgcgtgcttgggtcgcccacccccttggtgctgagatccgacggcgtgatgggcgaatatgagccaaagatcgaagtgcagttcccagagacactgcctgcggccaaaggttcaaccgtcaagctggaatgcttcgctctcggaaaccccatcccccagattaactggcgccgctcggatggccttcctttctcttccaagatcaagctcagaaaattctcaggcgtgctggaaatacccaattttcagcaagaggacgccggtagttatgagtgcatcgccgaaaacagccgtggcaagaatgttgccagaggtaggctaacctactatgcaaagcctcattgggttcagctcatcaaagacgtggaaatcgctgtggaggactcgttgtactgggagtgtagggcttcaggcaagcctaaaccatcctatcgctggctaaaaaacggtgcagctctggtgctggaggagcgcacccagatcgaaaacggcgctttgactataagcaatctgtccgtcaccgactcggggatgttccagtgcatcgccgagaacaaacacggcttggtgtattctagcgccgagcttaaagtggtggcctcggctcccgacttcagcaagaatccgatgaaaaagctcgttcaagtgcaagtggggtcgttggtgtccctggactgcaagcccagggcctctccccgggccctgtcatcttggaagaagggcgacgtgtcagtgcaggagcacgaacgtatcagtctgctgaatgacggcgggctcaagatcgctaacgtgacaaaggcggatgcaggaacttacacctgtatggctgagaatcaatttggaaaggctaacggtactacacacctcgttgtgaccgaaccaacacggatcaccctcgctcccagtaacatggacgtgagtgtgggggaatccgtaattttaccatgtcaggtgcagcatgacccactgcttgacatcatttttacctggtacttcaatggagccttggcagactttaaaaaggatggatcccactttgagaaggttggcggcagtagcagcggtgatctgatgatccggaatatccagctgaaacacagcgggaagtacgtgtgtatggttcagacgggcgtagacagtgtgtccagcgctgccgaccttatcgtgagaggaagccccgggcctccagaaaacgtgaaggttgatgagatcaccgatactactgctcagctctcctggaaagaaggtaaggataatcatagccctgttatttcttattccatccaggcaagaactccgttcagtgtcgggtggcagacagtgactacagtaccagaggttattgacggaaagacgcataccgcaacagtggtggagctgaacccatgggtggagtacgaattcagggtcgtggctagcaataaaattggcggaggggagccctctttgccatcagagaaggtaaggacagaggaggccgtgcctgaggtgcctccgtcagaagtaaatgggggcggagggtcacggagtgaattggtgatcacatgggaccccgtccctgaggagcttcagaacggagaaggcttcgggtacgtagttgcctttaggccactcggcgtgaccacgtggatacagaccgtggttacctctcccgacacaccccgttacgtgtttcggaacgagagcattgtaccatattccccatatgaagttaaagtgggcgtttataacaacaagggggaaggaccatttagccctgttaccaccgtgtttagcgccgaggaagagcctaccgtggctccatcacaggtgtctgccaattccctctctagcagcgagattgaggtgagctggaatacaattccctggaagctttctaacggccatcttctgggctacgaggtccgctactggaacggcgggggaaaggaggaatcctcaagcaaaatgaaggtggccggtaatgagactagcgccagactccgcggattgaagagcaatctggcatactacaccgctgtcagggcctataactctgctggcgccggtcccttcagcgctacagtgaacgtgaccaccaaaaagactccaccatcacagccccctggcaatgttgtgtggaatgctaccgatactaaggttttattaaactgggaacaggttaaagctatggagaacgaaagcgaggtgacaggttacaaggtcttttaccgtaccagttctcaaaataatgtccaggttctcaacactaataagacttctgccgaactggtgctgcctattaaagaggattacatcattgaggtcaaggccaccaccgacggaggggatgggacatctagcgagcagattcgcattccaaggatcaccagtatggatgcccgcgggagcacaagtgccatcagtaacgtccacccaatgtcctcatacatgcctattgtcctattccttattgtttacgttctgtggtag

SEQ ID NO: 206281 - DNA, 3087 bp, Artificial Sequence
  derived and/or modified sequence
atgatgttcccctggaagcagctgatcctgctgtccttcatcggctgcctgggcggggagctgctgctgcagggccctgtgttcatcaaggagcccagcaacagcatcttccctgtgggcagcgaggacaagaagatcaccctgcactgtgaggcccggggcaaccccagcccccactaccgctggcagctgaatggaagtgacatcgacatgtccatggagcaccgctacaagctgaatggaggcaacctggtggtgatcaaccccaacagaaactgggacaccggcacctaccagtgctttgccaccaacagcctgggcaccatcgtgtcccgggaggccaagctgcagtttgcctacctggagaacttcaagaccaagatgaggagcacagtgtctgtgcgggagggccagggcgtggtgctgctgtgtggccccccaccccacagcggggagctgtcctatgcctggatcttcaatgagtaccccagctttgtggaggaggacagcagaagatttgtgtcccaggagaccggccacctgtacatcagcaaggtggagcccagtgatgtgggcaactacacctgtgtggtgacctccatggtgaccaatgcccgggtgctgggcagccccacccccctggtgctgcggagtgatggagtgatgggagaatatgagcccaagattgaggtgcagtttcctgagaccctgcctgctgccaagggcagcacagtgaagctggagtgctttgccctgggcaaccccatcccccagatcaactggaggagaagtgatggcctgcccttcagcagcaagatcaagctgaggaagttctctggagtgctggagatccccaacttccagcaggaggatgctggcagctatgagtgcatcgccgagaacagccggggcaagaatgtggcccggggccgcctgacctactatgccaagccccactgggtgcagctgatcaaggatgtggagattgctgtggaggacagcctgtactgggagtgccgggccagcggcaagcccaagcccagctaccgctggctgaagaatggagctgccctggtgctggaggagaggacccagattgaaaatggagccctgaccatcagcaacctgtctgtgacagattctggcatgttccagtgcatcgccgagaacaagcacggcctggtgtacagcagcgctgagctgaaggtggtggccagcgccccagacttcagcaagaaccccatgaagaagctggtgcaggtgcaggtgggcagcctggtgtccctggactgcaagccccgggccagcccccgggccctgagctcctggaagaagggagatgtgtctgtgcaggagcacgagcgcatcagcctgctgaatgatggcggcctgaagatcgccaacgtgaccaaggcagatgctggcacctacacctgcatggccgagaaccagtttgggaaggccaacggcaccacccacctggtggtgacagagcccacccgcatcaccctggcccccagcaacatggatgtgtctgtgggggagagcgtcatcctgccctgccaggtgcagcacgaccccctgctggacatcatcttcacctggtacttcaacggggccctggccgacttcaagaaggatggcagccactttgagaaggtgggcggcagcagcagcggggacctgatgatccggaacatccagctgaagcacagcggcaagtatgtgtgcatggtgcagacaggagtggacagcgtgagcagcgctgctgacctgattgtgcggggcagccctggccccccagaaaatgtgaaggtggatgagatcacagacaccacagcccagctgtcctggaaggagggcaaggacaaccacagccctgtgatctcctacagcatccaggcccggacccccttctctgtgggctggcagacagtgaccaccgtgcctgaggtgattgatggcaagacccacacagccaccgtggtggagctgaacccctgggtggagtatgagttccgggtggtggccagcaacaagattggaggaggagagcccagcctgcccagcgagaaggtgaggacagaggaggccgtgcctgaggtgcccccatctgaggtgaatggaggcggcggcagccgctctgagctggtgatcacctgggaccctgtgcctgaggagctgcagaatggagagggcttcggctacgtggtggccttccggcccctgggcgtgaccacctggatccagacagtggtgaccagcccagacacccccaggtatgtgttcagaaatgaaagcatcgtgccctacagcccctatgaggtgaaggtgggcgtgtacaacaacaagggggagggccccttcagccctgtgaccaccgtcttctctgctgaggaggagcccaccgtggcccccagccaggtgtctgccaacagcctgagcagcagcgagattgaggtgtcctggaacaccatcccctggaagctgagcaatggccacctgctgggctatgaggtgcgctactggaatggaggcggcaaggaggagagcagcagcaagatgaaggtggccggaaatgagaccagcgcccggctgcggggcctgaagagcaacctggcctactacacagctgtgcgggcctacaacagcgctggagctggccccttcagcgccaccgtgaatgtgaccaccaagaagaccccacccagccagcccccaggaaatgtggtgtggaatgccacagacaccaaggtgctgctgaactgggagcaggtgaaggccatggagaatgaaagtgaggtgacaggctacaaggtgttctaccgcaccagcagccagaacaacgtgcaggtgctgaacaccaacaagaccagcgctgagctggtgctgcccatcaaggaggactacatcatcgaggtgaaggccaccacagatggaggagatggcaccagcagcgagcagatccgcatcccccgcatcacctccatggatgcccggggcagcaccagcgccatcagcaatgtgcaccccatgagcagctacatgcccatcgtgctcttcctgattgtgtatgtgctgtggtag

SEQ ID NO: 206282 - DNA, 3087 bp, Artificial Sequence
  derived and/or modified sequence
atgatgttcccctggaagcagctgatcctgctgagcttcatcggctgcctgggaggtgagctgctgctccaaggtcctgtgttcatcaaagagcctagcaacagcatctttcccgtgggatccgaggacaaaaagattaccctgcactgcgaggcacgcggtaacccttcgccccactacagatggcaactaaatggatctgatatcgatatgtcaatggagcatagatataagctgaatggaggaaatctggtagtgatcaatcccaatcgtaactgggataccggtacctatcagtgctttgccacgaactctctgggaaccattgtgagtcgggaagccaaactgcagttcgcttacctggagaactttaagacgaaaatgcgcagcaccgtctctgtacgggaaggccaaggtgtcgtgctgctgtgcggaccgccaccacatagcggggagttgtcttacgcatggattttcaacgagtacccaagcttcgtagaggaagacagtaggcggttcgtgtcgcaggagaccggccacctgtatatttcaaaggttgagccttctgacgtgggaaactacacatgtgtggtcacctccatggtgacaaatgcaagagtcctcgggtcaccgacccccctagtcctgcggagcgatggcgtgatgggcgagtacgagcccaagatcgaagtccagttccccgagaccctgccagctgctaaaggttcaacggtcaaactcgagtgcttcgccctgggaaatcccatcccacagatcaactggaggcggagcgacgggctgcctttttctagcaagataaaattgaggaagttcagtggcgtgctcgaaatcccaaatttccagcaggaggatgccggaagttatgaatgcattgctgaaaatagcagaggcaagaatgttgcgcgtggccggctgacttactacgctaagccacactgggttcagttgataaaggacgtggagatcgctgtggaggacagcctgtactgggaatgtcgggcaagtggtaaaccaaagccctcataccgatggctcaagaacggggccgctctggtgttggaggaaaggactcagatcgagaacggtgctctcaccataagcaatctatcagtgaccgatagcggcatgttccagtgcatcgctgaaaataagcacggactcgtctatagcagtgccgagcttaaggtcgtcgcaagtgcaccggatttctctaaaaaccccatgaagaaactggtccaagtacaggttggttctttagttagtctcgattgcaaaccacgagcgtctccaagagctctgtcatcatggaaaaagggagatgtgtccgtgcaagagcacgagcggattagcttactgaatgacggcggactgaagatcgctaatgtaaccaaggcagatgccggcacttatacctgtatggcagaaaatcagttcgggaaggcaaatggcacgacccacctcgtggtcactgagccaacacggatcacactggccccttcaaatatggacgtctctgtgggggagtccgtgatcctcccctgccaggttcagcacgacccgttgttggacatcatttttacctggtacttcaacggcgccctcgcagatttcaagaaagatggctctcactttgagaaggtgggcggttcttccagcggggacctgatgattcggaacatccagctaaagcactctggcaagtacgtttgtatggtccagacaggggttgacagcgtctcgtcagcagccgacttgatcgtgagagggagcccaggaccccccgaaaacgtgaaagtggatgaaatcacagacaccactgcccaactgtcgtggaaagagggcaaagataaccattcaccagtaatcagctacagtatccaggctcgaacgccattctctgtgggatggcaaaccgtcactactgtgcctgaagtcattgacggaaagacacatacagctaccgtggtcgaactcaatccctgggtcgagtacgaatttcgggtggtggcctcaaacaagatcggcggaggtgagcctagcctgccttctgaaaaggtccggactgaggaagccgtgcctgaggtgcctccctccgaagtgaatgggggtgggggatctcgttctgagcttgtcattacgtgggaccccgtacccgaggagcttcagaacggggaaggattcggctacgtggttgcattccgccccttgggcgtcaccacctggattcagaccgtggtcacatctcccgacacacctaggtacgttttccggaacgaatcaatagtgccttactccccatatgaggtaaaggttggagtgtacaacaataagggggagggccccttttcccccgttacaacagtatttagcgccgaagaagaaccaaccgttgctcccagtcaggtctccgctaattccctgagcagttctgagatcgaagtgtcatggaacactattccctggaaactcagtaacggtcatctactgggttatgaggtgcggtactggaacggcggaggaaaagaagaatcatcctctaagatgaaggtggctggcaacgagacaagcgctaggttacgaggtctgaagagtaacctcgcttactatacagcagtaagagcctacaactcagctggagcaggccctttcagtgccactgttaatgtcaccaccaagaaaacccctccatcccagccacctggaaacgtggtctggaacgccaccgatacaaaggttttactcaactgggaacaggtgaaagccatggagaatgagtccgaagttacagggtataaggtgttttaccgcacatcctcccagaacaatgtacaggtactgaataccaataagacaagcgccgagctggtactcccaatcaaagaggattatattatagaagtaaaagctaccactgacgggggggacggaacttcgtcggaacagatcagaattccgcggatcacttccatggatgctcgcggatctacttcagctatctccaacgtacatccgatgtcgtcatatatgcctattgtcttatttctgatcgtttatgtgttgtggtag

SEQ ID NO: 206283 - DNA, 3087 bp, Artificial Sequence
  derived and/or modified sequence
atgatgttcccatggaaacagctaatactgctctccttcattggctgcctgggtggtgaacttctgttgcaaggccctgtgttcataaaggaacccagcaatagcatctttcccgtggggagcgaagataaaaaaatcactctgcactgcgaggcgagaggcaatccatccccacattatcggtggcagttgaacggctctgatatcgatatgtcaatggaacaccgatacaagctgaatggcggaaatctagttgttatcaatccaaaccggaactgggataccggcacgtaccaatgctttgccactaacagcttgggaactattgtgtcaagagaagccaaacttcagttcgcgtatttggaaaacttcaagacgaaaatgcgctctactgtgtccgtccgggaaggccagggcgtggtattgctgtgcggacccccaccccactccggagagctgtcctacgcatggatcttcaatgaataccccagcttcgttgaggaggattcacggcgtttcgtctcacaagagacaggacatttgtatatttctaaggtcgagccctcggatgttggaaattacacctgcgtggtgaccagcatggtgacaaatgcccgtgtacttggatctcccaccccgctggtactgcgcagcgatggagttatgggcgagtacgaacccaaaatcgaggtgcagttcccggaaaccttacccgctgccaagggcagcactgttaagctggagtgttttgccctcggcaatccaattcctcagatcaattggaggcggtcagacggcctgcccttcagtagcaagatcaagcttaggaagttttctggggttcttgaaatcccgaattttcagcaggaggatgcagggtcctacgaatgcattgcagaaaactccaggggcaagaacgtcgccagggggaggctgacctattatgccaagccgcattgggtacaattgatcaaggatgtagagattgccgtcgaagacagtttgtactgggagtgtagagcatccgggaaaccgaagccgtcatacagatggctgaagaatggagccgcactggtacttgaagaaaggactcaaatcgaaaacggggctctaacgattagcaacttgagtgtgacggatagcggtatgttccagtgtatcgcagaaaacaagcatggcctggtttatagctctgctgagctgaaggttgtcgcaagcgcccctgacttttccaagaatcctatgaaaaagcttgtccaggtgcaagttgggagcctggtcagtttggattgcaagcccagggcatcacctagggcactcagcagttggaagaagggtgatgtctccgtccaggagcacgagaggatctccctgttgaatgacggcggactaaaaatcgcaaacgtaacgaaggccgacgccggaacctacacttgtatggctgagaatcagtttggaaaggctaatggtactacccatctcgttgtgactgagcctacgagaatcacgctggccccatcaaacatggacgtgtcagtgggggagagtgtcattctcccatgtcaggtgcagcatgacccattgctggatattatcttcacctggtacttcaacggggcactcgctgattttaagaaagacggctctcatttcgagaaagtgggaggctcctcaagtggagaccttatgatccgaaacattcagctgaagcactctggcaagtatgtgtgcatggtgcagactggcgtggactccgtgtccagcgctgccgacctcattgtgagaggctcccccggtcccccagagaacgtgaaggtcgatgaaataacagacacaacggcacaactcagttggaaggaggggaaggataaccactcaccagttataagttattctatccaagctagaaccccctttagcgtgggctggcagaccgtaaccactgtccccgaggtcatcgacgggaagacccacacagccactgtcgtggagctgaacccgtgggtggagtatgaattcagagtcgtcgcgtccaataaaatcggtggcggtgagcccagcctccccagtgagaaggtaagaactgaggaggctgtcccagaggtcccccctagtgaggttaatggcggagggggatctaggagcgagttagtcattacatgggatcccgtgcctgaggagctacaaaatggtgaaggtttcggctacgtcgtcgcttttcgtccgttaggtgtaaccacctggattcagaccgtcgttacgtcacccgacaccccaaggtacgtttttcgcaacgaatctattgtcccgtactcaccgtacgaggttaaggtcggcgtgtacaataacaagggagaagggcctttctctcccgtaacgacagtctttagcgcggaagaagagccgaccgtggccccatcacaggtcagcgccaacagtctgagcagctcagaaattgaggtgtcgtggaacactattccctggaagctgtcaaacgggcacctgcttggatacgaagttcgctactggaatgggggaggtaaggaggaatccagttcaaagatgaaggtggctgggaacgaaacatctgccaggctgagaggcctgaagtcgaacttggcctactacactgcagttcgtgcgtacaatagcgcgggagcagggcctttttccgctaccgtcaacgtgacaacaaagaaaacacccccatcacagcctcccggtaacgtggtgtggaacgctactgacaccaaggttctcctcaactgggagcaagtgaaagcaatggagaatgagtctgaggtaacaggatacaaggttttctatagaacatcatcccagaacaatgtgcaggtgttgaatacaaataagacatctgctgaactcgtgctaccgattaaagaagattacatcattgaggtgaaagcaacaacagatggaggagatggaacctcgtccgaacagatccggattccccgaatcacttccatggatgcacgaggttccaccagcgcaatctcgaatgtgcaccctatgtctagctacatgcccattgtgctgtttctgattgtgtacgtgctgtggtag

SEQ ID NO: 206284 - DNA, 4948 bp, Artificial Sequence
  derived and/or modified sequence
gagttactcttgcatttggcaattaaagatgatgtttccatggaaacagttgatcctgctttcattcattggctgcttaggaggtgagcttctcttacaaggccctgtatttatcaaagaacccagcaacagcattttccctgttggttcagaagataaaaaaataactttgcattgtgaagcaagaggcaatccatcacctcattacagatggcagctgaatggaagtgatattgatatgagtatggaacatcgttataagttgaatggaggaaatcttgtggttattaatcccaacagaaattgggatacaggaacttaccaatgttttgcaacaaattcacttggaacaattgtcagcagagaagccaaacttcagtttgcctatcttgaaaattttaaaaccaaaatgaggagtacagtgtctgtgcgtgaaggccagggagttgtgctgctctgcggccccccaccacactctggagaactgtcatatgcttggatcttcaatgaatacccatcgtttgttgaagaagatagtcggagatttgtctcccaggagacagggcacctctacatatctaaggtggagccgtctgatgtgggaaattacacatgtgtggtgacaagtatggtgacaaatgcccgagtgctgggctctccaactcctttggtgctacgttctgatggtgtgatgggtgaatatgaacctaaaatagaagttcagtttccagaaactcttccagcagctaaaggttcgactgtgaaattggaatgttttgcccttggaaatcccatacctcagattaattggagaagaagtgatgggctgccattttccagcaaaattaaattaaggaagttcagtggtgtgcttgaaatccccaacttccaacaggaagatgcaggttcctatgaatgcattgctgagaattcacgaggaaaaaatgttgccagagggcgtctcacttactatgcaaagccccattgggttcaactcataaaggatgtggaaatagccgtggaggacagtctttattgggaatgcagggcaagcggcaagcccaagccttcctaccgatggctgaaaaatggagcagccctggtgctagaggagagaacacagatagaaaatggtgcccttacaatatcaaacctaagtgtgactgattctggcatgttccaatgcatagcagaaaacaaacatggccttgtttattccagtgctgagctcaaagttgttgcttctgctccagatttttcaaagaatccaatgaagaagttggttcaggtgcaggtgggcagcctggtcagcttggattgtaaacccagagcctccccaagggcactctcttcctggaagaagggggatgtgagcgtgcaggagcatgaaagaatttctttgttaaacgatggaggactcaaaatagccaatgtgactaaagctgatgctggaacttacacctgcatggcagaaaaccagtttgggaaagcaaatggcacaacacatttggttgttacggaaccaacaagaataactttggcaccatctaacatggatgtttctgttggtgaaagcgtcatattgccctgccaggtacaacatgacccgctgttagacatcatctttacctggtatttcaatggggcccttgcagattttaagaaagatggatctcactttgagaaagttggtgggagttcatctggtgatttaatgatcagaaacattcagctgaaacacagtgggaaatatgtttgtatggtgcaaacgggggtggacagtgtttcatctgctgctgacctcatagtaagaggttcacctggaccaccagaaaatgtgaaggtagatgaaattacagacacaacagcccaactctcttggaaagaaggtaaagacaaccatagcccagttatatcctattctatccaggctcggacacctttctccgtgggttggcaaaccgtcacaacagtgcctgaggtcatcgatgggaagacgcacacagccactgtagttgagttaaacccatgggtggaatatgaatttcgggttgtagccagtaacaaaattggaggtggagaaccaagtttaccctcagaaaaagtaagaactgaagaggcagttccagaagtgcctccttctgaagtcaatggaggaggcggaagccggtctgaacttgtgataacctgggatccagtccctgaagaactacagaatggtgaaggttttgggtatgttgttgctttccgccctcttggggttaccacctggatccagacagtggtgacatcccctgacaccccaagatatgtctttaggaatgaaagcatcgtgccatattcaccatatgaagttaaagtgggtgtttataataacaaaggtgaaggaccatttagcccagtgacaacagtgttctctgcagaagaagagcctacagtggccccatctcaagtctctgcaaatagcctatcttcctcagaaattgaggtttcatggaacaccattccttggaagttgagcaatggacatttactgggctatgaggtgcggtactggaatgggggtggaaaggaggaatcatccagtaagatgaaagtggcaggaaatgagacatcagccagactacggggcctgaagagcaacctggcctattacacggctgtccgggcttacaacagtgccggcgctgggccttttagcgccacagttaatgtaaccaccaagaaaacgcctcccagtcagccaccaggaaatgttgtttggaatgccacagacactaaagtgttacttaattgggagcaagttaaagccatggagaatgagtcagaagtaacaggatataaagttttctataggactagcagtcaaaataacgtacaagtactgaacacaaataaaacttcagctgaacttgtgctgcccattaaagaggactacattattgaagtcaaggccacaacagatggaggggatgggaccagtagtgaacagatcaggattccacgaataaccagtatggatgcaagaggatccacttcagccatctcgaatgtccaccctatgtcaagttatatgcctatagtactgttcttaattgtatatgtcctgtggtgatattaactcctttttattatttattggaaagttatttggttaccaaaaaaagtgctttcatgaaatgcagtgattatgcatgtttttttcaactcttatttttaactttctacttcattataggtaaatatgaatataattaaaaaaacagtaaatccttttaggggaatctgaaatgccttaatattaacttgataaaccaaaggaatttacatattacatacttcagacttttgatataaatgttcttaaactatgagtttaagcactgcctatggataaagactcacacactctcacatgtacacacacacgcatgagaatttctttttacattgaaaaactctttcatttaattcaaatgctattttcccattataatagcattatttggaagacttaaccagtatcaatttgaaatgctgatttaagtccccaaggatgaaaaatacattttaaaaattattttgttggagaggagtggcatgtgattcaaaagagcattgttggaaaatgctactgtggggcttagaagaatgatgtttggtttggtatgctgctaactagttgtaagactttacaaatcactttgccatctgtacctctcaattattcctctataaaatatggagataataatacctatctgatcagactttgccccatgaattagtttttaaaagataaagactgaagtatgaaagtgcttttgtcaccccaaatgcaattgacccatgcaaaatattagcatgaatttatttaatcacataaaagtcatgaagaccagccagattttcaagcttcattctgtttcattcagttatattccaaaattcaaatgatcacattttattctttctcaaaaaaaaaaagtttttttaaattaaaaaaggaattgtttccttcacagctatgaataagctttcaggttttattaaaacctagaggaaaaaatcaggaatgacctgaatctcaacccaaatattaaacaaaatccacataatccctcatttcaatttccaattccattaagggaccctctctttttggatggcagagatggttttttaatgaaatcccaccatctatctgagtgagtctggcaggctttttagttcctgagttaaatttgtaatagaaccaaggcaatgctgctgactttgatatgtatgactcagtctttcaatatgtggttttcaaaaaattgttgaagacgtgacttcatagcaatatatagagaataaattaaaatcagcagattgagttttcaacattgcaaaatcagttttttacctctttcctaccaatttcacattttgcagaaacttgttcacatttccaacaatatcagaattagaaaacagttcagataacaagaaagattaaaaattagggaaattctgatatcaccataaagcactattttacatttagagattacatttaagataaagtcatcatacacaaaaacaataaatatttataactttctctataaggtccgcatatactgtatatattgaaacaatctgaatgactagtagatttcatatgaccattgttatttccactttctccaatacttgtattttatgctacatgtaatgaagttggacctttttattatttagtaattcctatatgttcctatacttttcattttcaagatgattgctctattgtttcatgttgtttctagcaatatatctccatgagatatgcactttgtttcatattgaaaagtataaaatttatctttcaattcctgtgtgtgtatcctatggttatctgtatgtattattttctattctaataaaatttataacaagcaaa

SEQ ID NO: 206285 - DNA, 3087 bp, Artificial Sequence
  derived and/or modified sequence
atgatgttcccctggaagcagctgatcctgctgagcttcatcggctgcctgggcggcgagctgctgctgcagggccccgtgttcatcaaggagcccagcaacagcatcttccccgtgggcagcgaggacaagaagatcaccctgcactgcgaggccagaggcaaccccagcccccactacagatggcagctgaacggcagcgacatcgacatgagcatggagcacagatacaagctgaacggcggcaacctggtggtgatcaaccccaacagaaactgggacaccggcacctaccagtgcttcgccaccaacagcctgggcaccatcgtgagcagagaggccaagctgcagttcgcctacctggagaacttcaagaccaagatgagaagcaccgtgagcgtgagagagggccagggcgtggtgctgctgtgcggcccccccccccacagcggcgagctgagctacgcctggatcttcaacgagtaccccagcttcgtggaggaggacagcagaagattcgtgagccaggagaccggccacctgtacatcagcaaggtggagcccagcgacgtgggcaactacacctgcgtggtgaccagcatggtgaccaacgccagagtgctgggcagccccacccccctggtgctgagaagcgacggcgtgatgggcgagtacgagcccaagatcgaggtgcagttccccgagaccctgcccgccgccaagggcagcaccgtgaagctggagtgcttcgccctgggcaaccccatcccccagatcaactggagaagaagcgacggcctgcccttcagcagcaagatcaagctgagaaagttcagcggcgtgctggagatccccaacttccagcaggaggacgccggcagctacgagtgcatcgccgagaacagcagaggcaagaacgtggccagaggcagactgacctactacgccaagccccactgggtgcagctgatcaaggacgtggagatcgccgtggaggacagcctgtactgggagtgcagagccagcggcaagcccaagcccagctacagatggctgaagaacggcgccgccctggtgctggaggagagaacccagatcgagaacggcgccctgaccatcagcaacctgagcgtgaccgacagcggcatgttccagtgcatcgccgagaacaagcacggcctggtgtacagcagcgccgagctgaaggtggtggccagcgcccccgacttcagcaagaaccccatgaagaagctggtgcaggtgcaggtgggcagcctggtgagcctggactgcaagcccagagccagccccagagccctgagcagctggaagaagggcgacgtgagcgtgcaggagcacgagagaatcagcctgctgaacgacggcggcctgaagatcgccaacgtgaccaaggccgacgccggcacctacacctgcatggccgagaaccagttcggcaaggccaacggcaccacccacctggtggtgaccgagcccaccagaatcaccctggcccccagcaacatggacgtgagcgtgggcgagagcgtgatcctgccctgccaggtgcagcacgaccccctgctggacatcatcttcacctggtacttcaacggcgccctggccgacttcaagaaggacggcagccacttcgagaaggtgggcggcagcagcagcggcgacctgatgatcagaaacatccagctgaagcacagcggcaagtacgtgtgcatggtgcagaccggcgtggacagcgtgagcagcgccgccgacctgatcgtgagaggcagccccggcccccccgagaacgtgaaggtggacgagatcaccgacaccaccgcccagctgagctggaaggagggcaaggacaaccacagccccgtgatcagctacagcatccaggccagaacccccttcagcgtgggctggcagaccgtgaccaccgtgcccgaggtgatcgacggcaagacccacaccgccaccgtggtggagctgaacccctgggtggagtacgagttcagagtggtggccagcaacaagatcggcggcggcgagcccagcctgcccagcgagaaggtgagaaccgaggaggccgtgcccgaggtgccccccagcgaggtgaacggcggcggcggcagcagaagcgagctggtgatcacctgggaccccgtgcccgaggagctgcagaacggcgagggcttcggctacgtggtggccttcagacccctgggcgtgaccacctggatccagaccgtggtgaccagccccgacacccccagatacgtgttcagaaacgagagcatcgtgccctacagcccctacgaggtgaaggtgggcgtgtacaacaacaagggcgagggccccttcagccccgtgaccaccgtgttcagcgccgaggaggagcccaccgtggcccccagccaggtgagcgccaacagcctgagcagcagcgagatcgaggtgagctggaacaccatcccctggaagctgagcaacggccacctgctgggctacgaggtgagatactggaacggcggcggcaaggaggagagcagcagcaagatgaaggtggccggcaacgagaccagcgccagactgagaggcctgaagagcaacctggcctactacaccgccgtgagagcctacaacagcgccggcgccggccccttcagcgccaccgtgaacgtgaccaccaagaagaccccccccagccagccccccggcaacgtggtgtggaacgccaccgacaccaaggtgctgctgaactgggagcaggtgaaggccatggagaacgagagcgaggtgaccggctacaaggtgttctacagaaccagcagccagaacaacgtgcaggtgctgaacaccaacaagaccagcgccgagctggtgctgcccatcaaggaggactacatcatcgaggtgaaggccaccaccgacggcggcgacggcaccagcagcgagcagatcagaatccccagaatcaccagcatggacgccagaggcagcaccagcgccatcagcaacgtgcaccccatgagcagctacatgcccatcgtgctgttcctgatcgtgtacgtgctgtggtag

SEQ ID NO: 206286 - protein, 716 aa, Artificial Sequence
  derived and/or modified sequence
MARMSFVIAACQLVLGLLMTSLTESSIQNSECPQLCVCEIRPWFTPQSTYREATTVDCNDLRLTRIPSNLSSDTQVLLLQSNNIAKTVDELQQLFNLTELDFSQNNFTNIKEVGLANLTQLTTLHLEENQITEMTDYCLQDLSNLQELYINHNQISTISAHAFAGLKNLLRLHLNSNKLKVIDSRWFDSTPNLEILMIGENPVIGILDMNFKPLANLRSLVLAGMYLTDIPGNALVGLDSLESLSFYDNKLVKVPQLALQKVPNLKFLDLNKNPIHKIQEGDFKNMLRLKELGINNMGELVSVDRYALDNLPELTKLEATNNPKLSYIHRLAFRSVPALESLMLNNNALNAIYQKTVESLPNLREISIHSNPLRCDCVIHWINSNKTNIRFMEPLSMFCAMPPEYKGHQVKEVLIQDSSEQCLPMISHDSFPNRLNVDIGTTVFLDCRAMAEPEPEIYWVTPIGNKITVETLSDKYKLSSEGTLEISNIQIEDSGRYTCVAQNVQGADTRVATIKVNGTLLDGTQVLKIYVKQTESHSILVSWKVNSNVMTSNLKWSSATMKIDNPHITYTARVPVDVHEYNLTHLQPSTDYEVCLTVSNIHQQTQKSCVNVTTKNAAFAVDISDQETSTALAAVMGSMFAVISLASIAVYFAKRFKRKNYHHSLKKYMQKTSSIPLNELYPPLINLWEGDSEKDKDGSADTKPTQVDTSRSYYMW

SEQ ID NO: 206287 - DNA, 2151 bp, Artificial Sequence
  derived and/or modified sequence
atggccagaatgagcttcgtgatcgccgcctgccagctggtgctgggcctgctgatgaccagcctgaccgagagcagcatccagaacagcgagtgcccccagctgtgcgtgtgcgagatcagaccctggttcaccccccagagcacctacagagaggccaccaccgtggactgcaacgacctgagactgaccagaatccccagcaacctgagcagcgacacccaggtgctgctgctgcagagcaacaacatcgccaagaccgtggacgagctgcagcagctgttcaacctgaccgagctggacttcagccagaacaacttcaccaacatcaaggaggtgggcctggccaacctgacccagctgaccaccctgcacctggaggagaaccagatcaccgagatgaccgactactgcctgcaggacctgagcaacctgcaggagctgtacatcaaccacaaccagatcagcaccatcagcgcccacgccttcgccggcctgaagaacctgctgagactgcacctgaacagcaacaagctgaaggtgatcgacagcagatggttcgacagcacccccaacctggagatcctgatgatcggcgagaaccccgtgatcggcatcctggacatgaacttcaagcccctggccaacctgagaagcctggtgctggccggcatgtacctgaccgacatccccggcaacgccctggtgggcctggacagcctggagagcctgagcttctacgacaacaagctggtgaaggtgccccagctggccctgcagaaggtgcccaacctgaagttcctggacctgaacaagaaccccatccacaagatccaggagggcgacttcaagaacatgctgagactgaaggagctgggcatcaacaacatgggcgagctggtgagcgtggacagatacgccctggacaacctgcccgagctgaccaagctggaggccaccaacaaccccaagctgagctacatccacagactggccttcagaagcgtgcccgccctggagagcctgatgctgaacaacaacgccctgaacgccatctaccagaagaccgtggagagcctgcccaacctgagagagatcagcatccacagcaaccccctgagatgcgactgcgtgatccactggatcaacagcaacaagaccaacatcagattcatggagcccctgagcatgttctgcgccatgccccccgagtacaagggccaccaggtgaaggaggtgctgatccaggacagcagcgagcagtgcctgcccatgatcagccacgacagcttccccaacagactgaacgtggacatcggcaccaccgtgttcctggactgcagagccatggccgagcccgagcccgagatctactgggtgacccccatcggcaacaagatcaccgtggagaccctgagcgacaagtacaagctgagcagcgagggcaccctggagatcagcaacatccagatcgaggacagcggcagatacacctgcgtggcccagaacgtgcagggcgccgacaccagagtggccaccatcaaggtgaacggcaccctgctggacggcacccaggtgctgaagatctacgtgaagcagaccgagagccacagcatcctggtgagctggaaggtgaacagcaacgtgatgaccagcaacctgaagtggagcagcgccaccatgaagatcgacaacccccacatcacctacaccgccagagtgcccgtggacgtgcacgagtacaacctgacccacctgcagcccagcaccgactacgaggtgtgcctgaccgtgagcaacatccaccagcagacccagaagagctgcgtgaacgtgaccaccaagaacgccgccttcgccgtggacatcagcgaccaggagaccagcaccgccctggccgccgtgatgggcagcatgttcgccgtgatcagcctggccagcatcgccgtgtacttcgccaagagattcaagagaaagaactaccaccacagcctgaagaagtacatgcagaagaccagcagcatccccctgaacgagctgtacccccccctgatcaacctgtgggagggcgacagcgagaaggacaaggacggcagcgccgacaccaagcccacccaggtggacaccagcagaagctactacatgtggtag

SEQ ID NO: 206288 - DNA, 2151 bp, Artificial Sequence
  derived and/or modified sequence
atggcccggatgtcctttgtgatcgctgcttgccagctcgtcctggggctgctaatgacctcgttaacagaatcctccatacagaactccgaatgcccacaactgtgtgtttgcgaaatccgcccttggtttacaccccagagcacgtaccgcgaagctacaactgttgattgcaacgaccttcggcttacccgtatcccaagcaacttgtcaagtgatactcaggttcttctcctccagtctaataatatcgctaagacagtggatgaactccaacagctctttaatttaacagaacttgacttctcgcagaacaacttcacaaacattaaggaagtaggcctggccaatctaacccagttgactacactgcatctagaagagaaccagataacagagatgaccgactattgcctacaggatctgagtaacctgcaggagttgtacattaaccacaatcagatatccaccatctcggcacacgcctttgcgggtttaaagaacctgctgagactgcacctaaattctaacaagctaaaggtaatagatagccgctggtttgattccactcccaatttggaaatactgatgattggggagaatcccgtgatcgggattttagacatgaatttcaagcctttggctaatctgaggtccctggtactggccggaatgtacctgaccgatattcccggtaacgctcttgtgggcctggactcccttgagtcactttccttttatgacaataagctggtaaaagtgccccagctggcgctgcagaaggttcccaacctgaaattccttgacctcaataaaaaccccattcacaaaattcaagagggtgactttaagaacatgttgcgcctcaaggagcttggaatcaataacatgggcgagctggtctcggttgaccgttacgcccttgacaatttacctgagcttaccaagctggaggccaccaataatccaaagctgagctacattcaccgattagccttccgctctgtaccagcccttgaatccttgatgctgaataataacgcactgaacgccatatatcagaagaccgtagaaagcctcccaaaccttcgcgagattagtattcattcaaatcccttgcgttgcgattgcgtgattcactggattaactccaataaaacgaatattcgctttatggagcccttgtcaatgttctgcgccatgccgccagaatacaaaggacatcaagtgaaggaagtacttattcaagacagtagcgagcaatgccttcccatgatcagccacgattcgttcccgaacagattgaacgtcgatatcggaacaaccgtctttcttgactgtagggcgatggccgaaccggagcccgagatatattgggtgacacctatcggcaacaaaattacagtagaaactctaagtgacaagtataaactaagctccgaagggaccttggaaatctctaatatccagatagaggatagcggccgctacacctgtgtcgctcaaaacgtgcagggagccgacacccgggtggctacaattaaggtcaatggtaccctgctcgacgggacacaggtactcaaaatttatgttaagcagaccgagtctcattctattcttgttagttggaaagtcaattctaatgtgatgacgtccaatctgaagtggagtagcgccacaatgaagatcgacaacccccacatcacatacactgccagagtcccggtggatgtccacgaatacaatctgacccaccttcagccgtctaccgactatgaggtgtgcttgactgtgtccaacattcaccagcagacccagaaatcttgcgtcaacgtgactaccaagaatgctgcctttgcagtggacatcagtgaccaagagacatctacagccttggccgccgttatgggcagcatgttcgccgtgatatctctggctagtattgcggtgtattttgccaagcggttcaaacgtaaaaattatcatcatagtctcaaaaagtacatgcagaagactagcagcattccgctgaatgagctctacccccccttgattaatctctgggagggggatagtgaaaaggacaaagacggaagtgcagacaccaagccaactcaggtagacacatctcggagctactatatgtggtag

SEQ ID NO: 206289 - DNA, 3823 bp, Artificial Sequence
  derived and/or modified sequence
aaagcggggcgcaccgcgggcgccggcaacgagccggtgaacgaggcgaggcccgtgcgcccgcggctgcaagcgcccgcctggcggggagaggggccgacggcgtcagcccgggcggcggcatccctaggcgcctggggcgccttcctccggacctggccgctcgctgccccgccctctgcaccccacttctccgaccctccttcccagtcctgcctccccctgccctggcctctgagagccgactgagcccagccccgtgcagcagcggttgcctgtgtcgccgcctagtctccggtcttggtgctctcccgggggtgccccaaggagccagtgcgcgctgcgggctgggaaggaggcgccgctcagctagtcctcctcctcctcctcgtctttctcctcctcctgctgctgctgccgccgccgccgccgtgggtgccgggtccgcgcgcaccccaacacccccaccagctgggcctcggggcacatctccagacttcaatttggctgaaataattcatgccacggacctgtgcacatgcctggaattgagagacacagttaaaagactccaagttgctttctgccttttgaaaactcctgaaaaccatccctttggactctggaattctacacagctcaaccaagactttgcttgaatgtttacattttctgctcgctgtcctacatatcacaatatagtgttcacgttttgttaaaactttggggtgtcaggagttgagcttgctcagcaagccagcatggctaggatgagctttgttatagcagcttgccaattggtgctgggcctactaatgacttcattaaccgagtcttccatacagaatagtgagtgtccacaactttgcgtatgtgaaattcgtccctggtttaccccacagtcaacttacagagaagccaccactgttgattgcaatgacctccgcttaacaaggattcccagtaacctctctagtgacacacaagtgcttctcttacagagcaataacatcgcaaagactgtggatgagctgcagcagcttttcaacttgactgaactagatttctcccaaaacaactttactaacattaaggaggtcgggctggcaaacctaacccagctcacaacgctgcatttggaggaaaatcagattaccgagatgactgattactgtctacaagacctcagcaaccttcaagaactctacatcaaccacaaccaaattagcactatttctgctcatgcttttgcaggcttaaaaaatctattaaggctccacctgaactccaacaaattgaaagttattgatagtcgctggtttgattctacacccaacctggaaattctcatgatcggagaaaaccctgtgattggaattctggatatgaacttcaaacccctcgcaaatttgagaagcttagttttggcaggaatgtatctcactgatattcctggaaatgctttggtgggtctggatagccttgagagcctgtctttttatgataacaaactggttaaagtccctcaacttgccctgcaaaaagttccaaatttgaaattcttagacctcaacaaaaaccccattcacaaaatccaagaaggggacttcaaaaatatgcttcggttaaaagaactgggaatcaacaatatgggcgagctcgtttctgtcgaccgctatgccctggataacttgcctgaactcacaaagctggaagccaccaataaccctaaactctcttacatccaccgcttggctttccgaagtgtccctgctctggaaagcttgatgctgaacaacaatgccttgaatgccatttaccaaaagacagtcgaatccctccccaatctgcgtgagatcagtatccatagcaatcccctcaggtgtgactgtgtgatccactggattaactccaacaaaaccaacatccgcttcatggagcccctgtccatgttctgtgccatgccgcccgaatataaagggcaccaggtgaaggaagttttaatccaggattcgagtgaacagtgcctcccaatgatatctcacgacagcttcccaaatcgtttaaacgtggatatcggcacgacggttttcctagactgtcgagccatggctgagccagaacctgaaatttactgggtcactcccattggaaataagataactgtggaaaccctttcagataaatacaagctaagtagcgaaggtaccttggaaatatctaacatacaaattgaagactcaggaagatacacatgtgttgcccagaatgtccaaggggcagacactcgggtggcaacaattaaggttaatgggacccttctggatggtacccaggtgctaaaaatatacgtcaagcagacagaatcccattccatcttagtgtcctggaaagttaattccaatgtcatgacgtcaaacttaaaatggtcgtctgccaccatgaagattgataaccctcacataacatatactgccagggtcccagtcgatgtccatgaatacaacctaacgcatctgcagccttccacagattatgaagtgtgtctcacagtgtccaatattcatcagcagactcaaaagtcatgcgtaaatgtcacaaccaaaaatgccgccttcgcagtggacatctctgatcaagaaaccagtacagcccttgctgcagtaatggggtctatgtttgccgtcattagccttgcgtccattgctgtgtactttgccaaaagatttaagagaaaaaactaccaccactcattaaaaaagtatatgcaaaaaacctcttcaatcccactaaatgagctgtacccaccactcattaacctctgggaaggtgacagcgagaaagacaaagatggttctgcagacaccaagccaacccaggtcgacacatccagaagctattacatgtggtaactcagaggatattttgcttctggtagtaaggagcacaaagacgtttttgctttattctgcaaaagtgaacaagttgaagacttttgtatttttgactttgctagtttgtggcagagtggagaggacgggtggatatttcaaatttttttagtatagcgtatcgcaagggtttgacacggctgccagcgactctaggcttccagtctgtgtttggtttttattcttatcattattatgattgttattatattattattttattttagttgttgtgctaaactcaataatgctgttctaactacagtgctcaataaaatgattaatgacaggatggggttcccctgtgcttttaccagtagcatgaccccttctgaagccatccgtagaaagtactttgtcctccaaaaagctaacatacggttttgaagcagcattgaaacttttgtagcaatctggtctatagacttttaactcaagaagctaaggctagacttgttaccttcgttgaatgatgttagttgactgtactgtaatgttgtatcaactgaattgaatgtttgcctttaaacaatgaattttctttttctttccttttttttttttttgttgtaatagttaaagaggcttagaacaagctaacaggcaatagaaatatgtatatcagattttttaatgtaacaaactacatgttaattgttatcttattctttttatctttagtagacacttttaaaagaaaagacaagtttgttgtgtttaactcaccaacacgtggtgtataatgaagacagaactataataaattagttttgttctgattttttagaacacttgcaataatgtatcatttatagttcttgctagttgcagtggtaatatttttcacatccataaaaacaactaccaaaata

SEQ ID NO: 206290 - DNA, 2151 bp, Artificial Sequence
  derived and/or modified sequence
atggccaggatgagctttgtgattgctgcctgccagctggtgctgggcctgctgatgaccagcctgacagagagcagcatccagaacagtgaatgtccccagctgtgtgtgtgtgagatccggccctggttcaccccccagagcacctaccgggaggccaccaccgtggactgcaatgacctgcggctgacccgcatccccagcaacctgagcagtgacacccaggtgctgctgctgcagagcaacaacatcgccaagacagtggatgagctgcagcagctgttcaacctgacagagctggacttcagccagaacaacttcaccaacatcaaggaggtgggcctggccaacctgacccagctgaccaccctgcacctggaggagaaccagatcacagagatgacagactactgcctgcaggacctgagcaacctgcaggagctgtacatcaaccacaaccagatcagcaccatcagcgcccacgcctttgctggcctgaagaacctgctgcggctgcacctgaacagcaacaagctgaaggtgattgacagccgctggtttgacagcacccccaacctggagatcctgatgattggagagaaccctgtgattggcatcctggacatgaacttcaagcccctggccaacctgcggagcctggtgctggccggcatgtacctgacagacatccctggaaatgccctggtgggcctggacagcctggagagcctgtccttctatgacaacaagctggtgaaggtgccccagctggccctgcagaaggtgcccaacctgaagttcctggacctgaacaagaaccccatccacaagatccaggagggggacttcaagaacatgctgcggctgaaggagctgggcatcaacaacatgggagagctggtgtctgtggacagatatgccctggacaacctgcctgagctgaccaagctggaggccaccaacaaccccaagctgagctacatccaccggctggccttccgctctgtgcctgccctggagagcctgatgctgaacaacaatgccctgaatgccatctaccagaagacagtggagagcctgcccaacctgcgggagatcagcatccacagcaaccccctgcgctgtgactgtgtgatccactggatcaacagcaacaagaccaacatccgcttcatggagcccctgtccatgttctgtgccatgcctcctgagtacaagggccaccaggtgaaggaggtgctgatccaggacagcagcgagcagtgcctgcccatgatcagccatgacagcttccccaaccggctgaatgtggacatcggcaccaccgtcttcctggactgccgggccatggccgagcctgagcctgagatctactgggtgacccccatcggcaacaagatcaccgtggagaccctgagtgacaagtacaagctgagcagcgagggcaccctggagatcagcaacatccagatcgaggacagcggccgctacacctgtgtggcccagaatgtgcagggcgctgacaccagggtggccaccatcaaggtgaatggcaccctgctggatggcacccaggtgctgaagatctacgtgaagcagacagagagccacagcatcctggtgtcctggaaggtgaacagcaatgtgatgaccagcaacctgaagtggagcagcgccaccatgaagattgacaacccccacatcacctacacagcccgggtgcctgtggatgtgcatgagtacaacctgacccacctgcagcccagcacagattatgaggtgtgcctgactgtgagcaacatccaccagcagacccagaagagctgtgtgaatgtgaccaccaagaatgctgcctttgctgtggacatcagtgaccaggagaccagcacagccctggccgctgtgatgggctccatgtttgctgtgatcagcctggccagcattgctgtgtactttgccaagcgcttcaagaggaagaactaccaccacagcctgaagaagtacatgcagaagaccagcagcatccccctgaatgagctgtacccacccctcatcaacctgtgggagggggacagcgagaaggacaaggatggcagcgctgacaccaagcccacccaggtggacaccagccgcagctactacatgtggtag

SEQ ID NO: 206291 - DNA, 2151 bp, Artificial Sequence
  derived and/or modified sequence
atggcccggatgagcttcgtgatcgccgcctgccagctggtgctgggactgctgatgacgtctctgacagagtctagtatccagaacagcgaatgccctcagctatgcgtatgcgagatacggccatggtttacacctcagtcaacttaccgagaggcaacaacagttgattgtaacgacctgcgcctcaccaggattccgtctaacctttcgagtgacacccaggtattactacttcaatcaaataatattgccaaaaccgtggacgagctgcagcagctctttaacctgacagagctcgacttcagccaaaataatttcactaacatcaaggaagtgggtttggcaaaccttacccagttgaccaccttgcaccttgaggagaaccagatcactgaaatgaccgactactgtctccaggatctgagtaacttacaggaactgtacatcaaccacaatcagatttcgaccatctcagcgcacgctttcgctgggcttaagaaccttcttaggctacaccttaactctaataaactgaaagtgatcgacagtcgctggtttgacagtactcctaacctggaaatcttaatgatcggcgagaaccctgtgatcggaatactggacatgaatttcaagccgctggcaaatctccggtctctagttctggcggggatgtatctgaccgacattcccggaaacgccctggtcggattagactcactagaatctctcagcttttatgacaacaagctggtaaaggtgcctcagctggcattacagaaggtgcccaatctaaagtttctggacctgaacaaaaacccaatccacaaaatccaggagggtgatttcaagaatatgttgcgtcttaaggagctggggataaacaacatgggcgagctggtgtccgtggatagatatgccttagacaatctaccagaactgacgaaacttgaagcaacgaataatcctaaactgtcctatatccataggctcgcattccgctcagtacccgcgctcgagagtctgatgcttaacaacaatgcactgaatgccatttatcaaaaaacggttgaaagccttcccaatctgagagaaattagtatacattccaatccgctccgttgtgattgcgtcatccactggattaatagtaacaagactaacatccgcttcatggaacccctgtcgatgttttgcgccatgccccctgaatataaaggtcatcaagttaaagaggtcttgatccaagactccagcgagcagtgtttacccatgatttcccatgatagcttccctaacagactgaatgtggatatcggtactactgtatttctggactgcagagctatggctgagccggagccagaaatttattgggtcacccccattggaaacaaaatcaccgttgagacattaagtgataaatataagctgagcagtgaggggacccttgagataagcaacatccaaatcgaagacagtggcaggtatacttgtgtggcccagaacgtacagggcgctgatacaagggtggccaccattaaggtgaatggaaccctgctggacggaacccaggtcctaaaaatttacgtaaagcagactgaatcccattccatactggtcagctggaaagtcaactctaacgtcatgacgagcaacctcaagtggagctcggcaacaatgaagatcgacaacccccacatcacgtataccgcccgggtaccagtggatgtgcatgagtacaacttgacgcatctacagcccagcaccgattatgaggtctgcctgaccgtatcaaacattcatcaacagacccagaaatcttgtgtgaatgttaccaccaaaaatgcggccttcgccgtcgacatatctgatcaggagacttccactgcgctagcagcagtcatggggagtatgttcgctgtgatctctctggcttcaattgccgtgtatttcgcaaagagattcaagagaaaaaattaccaccatagtttgaagaaatatatgcaaaagactagcagtatacccctcaacgaactgtatcccccgctgataaacttatgggaaggggatagtgagaaggacaaggatggttcagcagacaccaagccgacacaagtagatacttccaggtcgtactacatgtggtag

SEQ ID NO: 206292 - DNA, 2151 bp, Artificial Sequence
  derived and/or modified sequence
atggcccgtatgagttttgtgatagctgcatgccaactagtgctgggcctgttgatgacgtcactcacagagagctccattcaaaatagcgaatgtcctcaactgtgtgtttgtgagatccgcccttggttcaccccccaaagcacctacagggaagcgacaacggttgattgtaacgacttaaggctgacaaggatcccttctaatctgagcagcgatacgcaagtgctgctgctgcagagtaacaatattgccaagactgttgatgagctgcagcagctctttaacctcaccgagctcgatttttcccaaaacaactttacgaacattaaagaagtgggcttggccaacctgacccagcttactaccctgcatctggaagagaatcagatcactgaaatgaccgactactgcctgcaggatctcagcaacctgcaggagctgtatattaaccataatcagatttccacgatttcagcccatgcatttgcgggacttaagaaccttttgcggctgcaccttaactcaaacaagctgaaggttattgacagccgttggttcgacagcacccctaatctggaaatcctgatgatcggcgaaaaccccgtcattggcattttggacatgaacttcaagccattagccaaccttagaagcctagttctggcaggcatgtacctaacagatatccctggaaatgccctcgtgggcctcgactccctggagtctttgtccttctatgataataaactggtaaaggtgccacagctggccctacagaaggtgcccaatctgaagttccttgacttaaacaagaaccccatccacaagatacaggagggagactttaaaaatatgctgcgcttaaaagaactgggaatcaacaacatgggggaactcgtgtccgttgatcgctatgccttggacaatctgcccgagttgaccaagctcgaggcgacaaataaccccaagctttcctacatccaccggctggcttttaggagcgtccctgccctggaatctctcatgctcaataataacgccttaaacgccatctaccagaagaccgtcgagagcctgcctaacttgagagaaatcagcatacactctaatcccctgagatgcgactgcgtcattcattggatcaactccaacaaaaccaatattcggttcatggagcctttgagcatgttctgtgccatgccacctgagtacaagggccatcaggtcaaggaggtgctgatccaggactcgtcggaacagtgtttgcccatgatcagtcatgattcattccccaaccgcttgaacgtcgacatcggcacaacagtgttcctggattgccgggcaatggcggaaccagagcccgagatttactgggtgacacctatcggtaataagattactgttgaaacgctgagtgacaaatataaattgagttctgaggggacactggagatctccaatatccaaattgaggatagcgggcgatacacctgcgtcgcacagaatgtgcaaggcgctgacacccgggtggcaaccattaaagtcaacggcactctcctcgatggaacccaggtcttaaaaatctatgttaaacagacagagagtcattcgatcctcgtctcctggaaggtcaactctaatgtgatgaccagcaaccttaaatggtcatccgccaccatgaagatcgacaatccgcacattacctacacggcccgagtccccgttgatgtccatgagtacaacctgacacacctccagccttccactgactatgaggtatgcctgaccgtgagtaatattcatcagcagacgcagaaatcttgcgttaacgtgacaacaaagaacgccgcatttgctgtggacatctccgatcaggagacctctaccgcccttgccgcagtgatgggaagtatgttcgccgtcattagtcttgcatcgatcgctgtgtactttgccaagcggttcaagaggaaaaactatcaccactcactcaaaaagtacatgcagaaaacttcctctataccgctcaatgagctctatccccctctgattaacctgtgggagggcgattccgagaaggataaagacggctcagccgatacaaaaccgactcaggtagacacttccaggagctattacatgtggtag

SEQ ID NO: 206293 - protein, 4427 aa, Artificial Sequence
  derived and/or modified sequence
MSSKAEKKQRLSGRGSSQASWSGRATRAAVATQEQGNAPAVSEPELQAELPKEEPEPRLEGPQAQSEESVEPEADVKPLFLSRAALTGLADAVWTQEHDAILEHFAQDPTESILTIFIDPCFGLKLELGMPVQTQNQLVYFIRQAPVPITWENFEATVQFGTVRGPYIPALLRLLGGVFAPQIFANTGWPESIRNHFASHLHKFLACLTDTRYKLEGHTVLYIPAEAMNMKPEMVIKDKELVQRLETSMIHWTRQIKEMLSAQETVETGENLGPLEEIEFWRNRCMDLSGISKQLVKKGVKHVESILHLAKSSYLAPFMKLAQQIQDGSRQAQSNLTFLSILKEPYQELAFMKPKDISSKLPKLISLIRIIWVNSPHYNTRERLTSLFRKVCDCQYHFARWEDGKQGPLPCFFGAQGPQITRNLLEIEDIFHKNLHTLRAVRGGILDVKNTCWHEDYNKFRAGIKDLEVMTQNLITSAFELVRDVPHGVLLLDTFHRLASREAIKRTYDKKAVDLYMLFNSELALVNRERNKKWPDLEPYVAQYSGKARWVHILRRRIDRVMTCLAGAHFLPRIGTGKESVHTYQQMVQAIDELVRKTFQEWTSSLDKDCIRRLDTPLLRISQEKAGMLDVNFDKSLLILFAEIDYWERLLFETPHYVVNVAERAEDLRILRENLLLVARDYNRIIAMLSPDEQALFKERIRLLDKKIHPGLKKLHWALKGASAFFITECRIHASKVQMIVNEFKASTLTIGWRAQEMSEKLLVRISGKRVYRDLEFEEDQREHRAAVQQKLMNLHQDVVTIMTNSYEVFKNDGPEIQQQWMLYMIRLDRMMEDALRLNVKWSLLELSKAINGDGKTSPNPLFQVLVILKNDLQGSVAQVEFSPTLQTLAGVVNDIGNHLFSTISVFCHLPDILTKRKLHREPIQTVVEQDEDIKKIQTQISSGMTNNASLLQNYLKTWDMYREIWEINKDSFIHRYQRLNPPVSSFVADIARYTEVANNVQKEETVTNIQFVLLDCSHLKFSLVQHCNEWQNKFATLLREMAAGRLLELHTYLKENAEKISRPPQTLEELGVSLQLVDALKHDLANVETQIPPIHEQFAILEKYEVPVEDSVLEMLDSLNGEWVVFQQTLLDSKQMLKKHKEKFKTGLIHSADDFKKKAHTLLEDFEFKGHFTSNVGYMSALDQITQVRAMLMAMREEENSLRANLGIFKIEQPPSKDLQNLEKELDALQQIWEIARDWEENWNEWKTGRFLILQTETMETTAHGLFRRLTKLAKEYKDRNWEIIETTRSKIEQFKRTMPLISDLRNPALRERHWDQVRDEIQREFDQESESFTLEQIVELGMDQHVEKIGEISASATKELAIEVALQNIAKTWDVTQLDIVPYKDKGHHRLRGTEEVFQALEDNQVALSTMKASRFVKAFEKDVDHWERCLSLILEVIEMILTVQRQWMYLENIFLGEDIRKQLPNESTLFDQVNSNWKAIMDRMNKDNNALRSTHHPGLLDTLIEMNTILEDIQKSLDMYLETKRHIFPRFYFLSNDDLLEILGQSRNPEAVQPHLKKCFDNIKLLRIQKVGGPSSKWEAVGMFSGDGEYIDFLHSVFLEGPVESWLGDVEQTMRVTLRDLLRNCHLALRKFLNKRDKWVKEWAGQVVITASQIQWTADVTKCLLTAKERADKKILKVMKKNQVSILNKYSEAIRGNLTKIMRLKIVALVTIEIHARDVLEKLYKSGLMDVNSFDWLSQLRFYWEKDLDDCVIRQTNTQFQYNYEYLGNSGRLVITPLTDRCYMTLTTALHLHRGGSPKGPAGTGKTETVKDLGKALGIYVIVVNCSEGLDYKSMGRMYSGLAQTGAWGCFDEFNRINIEVLSVVAHQILCILSALAAGLTHFHFDGFEINLVWSCGIFITMNPGYAGRTELPENLKSMFRPIAMVVPDSTLIAEIILFGEGFGNCKILAKKVYTLYSLAVQQLSRQDHYDFGLRALTSLLRYAGKKRRLQPDLTDEEVLLLSMRDMNIAKLTSVDAPLFNAIVQDLFPNIELPVIDYGKLRETVEQEIRDMGLQSTPFTLTKVFQLYETKNSRHSTMIVGCTGSGKTASWRILQASLSSLCRAGDPNFNIVREFPLNPKALSLGELYGEYDLSTNEWTDGILSSVMRTACADEKPDEKWILFDGPVDTLWIENMNSVMDDNKVLTLINGERIAMPEQVSLLFEVEDLAMASPATVSRCGMVYTDYADLGWKPYVQSWLEKRPKAEVEPLQRMFEKLINKMLAFKKDNCKELVPLPEYSGITSLCKLYSALATPENGVNPADGENYVTMVEMTFVFSMIWSVCASVDEEGRKRIDSYLREIEGSFPNKDTVYEYFVDPKIRSWTSFEDKLPKSWRYPPNAPFYKIMVPTVDTVRYNYLVSSLVANQNPILLVGPVGTGKTSIAQSVLQSLPSSQWSVLVVNMSAQTTSNNVQSIIESRVEKRTKGVYVPFGGKSMITFMDDLNMPAKDMFGSQPPLELIRLWIDYGFWYDRTKQTIKYIREMFLMAAMGPPGGGRTVISPRLRSRFNIINMTFPTKSQIIRIFGTMINQKLQDFEEEVKPIGNVVTEATLDMYNTVVQRFLPTPTKMHYLFNLRDISKVFQGMLRANKDFHDTKSSITRLWIHECFRVFSDRLVDAADTEAFMGIISDKLGSFFDLTFHHLCPSKRPPIFGDFLKEPKVYEDLTDLTVLKTVMETALNEYNLSPSVVPMQLVLFREAIEHITRIVRVIGQPRGNMLLVGIGGSGRQSLARLASSICDYTTFQIEVTKHYRKQEFRDDIKRLYRQAGVELKTTSFIFVDTQIADESFLEDINNILSSGEVPNLYKPDEFEEIQSHIIDQARVEQVPESSDSLFAYLIERVQNNLHIVLCLSPMGDPFRNWIRQYPALVNCTTINWFSEWPQEALLEVAEKCLIGVDLGTQENIHRKVAQIFVTMHWSVAQYSQKMLLELRRHNYVTPTKYLELLSGYKKLLGEKRQELLAQANKLRTGLFKIDETREKVQVMSLELEDAKKKVAEFQKQCEEYLVIIVQQKREADEQQKAVTANSEKIAVEEIKCQALADNAQKDLEEALPALEEAMRALESLNKKDIGEIKSYGRPPAQVEIVMQAVMILRGNEPTWAEAKRQLGEQNFIKSLINFDKDNISDKVLKKIGAYCAQPDFQPDIIGRVSLAAKSLCMWVRAMELYGRLYRVVEPKRIRMNAALAQLREKQAALAEAQEKLREVAEKLEMLKKQYDEKLAQKEELRKKSEEMELKLERAGMLVSGLAGEKARWEETVQGLEEDLGYLVGDCLLAAAFLSYMGPFLTNYRDEIVNQIWIGKIWELQVPCSPSFAIDNFLCNPTKVRDWNIQGLPSDAFSTENGIIVTRGNRWALMIDPQAQALKWIKNMEGGQGLKIIDLQMSDYLRILEHAIHFGYPVLLQNVQEYLDPTLNPMLNKSVARIGGRLLMRIGDKEVEYNTNFRFYITTKLSNPHYSPETSAKTTIVNFAVKEQGLEAQLLGIVVRKERPELEEQKDSLVINIAAGKRKLKELEDEILRLLNEATGSLLDDVQLVNTLHTSKITATEVTEQLETSETTEINTDLAREAYRPCAQRASILFFVLNDMGCIDPMYQFSLDAYISLFILSIDKSHRSNKLEDRIDYLNDYHTYAVYRYTCRTLFERHKLLFSFHMCAKILETSGKLNMDEYNFFLRGGVVLDREGQMDNPCSSWLADAYWDNITELDKLTNFHGLMNSFEQYPRDWHLWYTNAAPEKAMLPGEWENACNEMQRMLIVRSLRQDRVAFCVTSFIITNLGSRFIEPPVLNMKSVLEDSTPRSPLVFILSPGVDPTSALLQLAEHMGMAQRFHALSLGQGQAPIAARLLREGVTQGHWVFLANCHLSLSWMPNLDKLVEQLQVEDPHPSFRLWLSSIPHPDFPISILQVSIKMTTEPPKGLKANMTRLYQLMSEPQFSRCSKPAKYKKLLFSLCFFHSVLLERKKFLQLGWNIIYGFNDSDFEVSENLLSLYLDEYEETPWDALKYLIAGINYGGHVTDDWDRRLLTTYINDYFCDQSLSTPFHRLSALETYFIPKDGSLASYKEYISLLPGMDPPEAFGQHPNADVASQITEAQTLFDTLLSLQPQITPTRAGGQTREEKVLELAADVKQKIPEMIDYEGTQKLLALDPSPLNVVLLQEIQRYNTLMQTILFSLTDLEKGIQGLIVMSTSLEEIFNCIFDAHVPPLWGKAYPSQKPLAAWTRDLAMRVEQFELWASRARPPVIFWLSGFTFPTGFLTAVLQSSARQNNVSVDSLSWEFIVSTVDDSNLVYPPKDGVWVRGLYLEGAGWDRKNSCLVEAEPMQLVCLMPTIHFRPAESRKKSAKGMYSCPCYYYPNRAGSSDRASFVIGIDLRSGAMTPDHWIKRGTALLMSLDS

SEQ ID NO: 206294 - protein, 4196 aa, Artificial Sequence
  derived and/or modified sequence
MSSKAEKKQRLSGRGSSQASWSGRATRAAVATQEQGNAPAVSEPELQAELPKEEPEPRLEGPQAQSEESVEPEADVKPLFLSRAALTGLADAVWTQEHDAILEHFAQDPTESILTIFIDPCFGLKLELGMPVQTQNQLVYFIRQAPVPITWENFEATVQFGTVRGPYIPALLRLLGGVFAPQIFANTGWPESIRNHFASHLHKFLACLTDTRYKLEGHTVLYIPAEAMNMKPEMVIKDKELVQRLETSMIHWTRQIKEMLSAQETVETGENLGPLEEIEFWRNRCMDLSGISKQLVKKGVKHVESILHLAKSSYLAPFMKLAQQIQDGSRQAQSNLTFLSILKEPYQELAFMKPKDISSKLPKLISLIRIIWVNSPHYNTRERLTSLFRKVCDCQYHFARWEDGKQGPLPCFFGAQGPQITRNLLEIEDIFHKNLHTLRAVRGGILDVKNTCWHEDYNKFRAGIKDLEVMTQNLITSAFELVRDVPHGVLLLDTFHRLASREAIKRTYDKKAVDLYMLFNSELALVNRERNKKWPDLEPYVAQYSGKARWVHILRRRIDRVMTCLAGAHFLPRIGTGKESVHTYQQMVQAIDELVRKTFQEWTSSLDKDCIRRLDTPLLRISQEKAGMLDVNFDKSLLILFAEIDYWERLLFETPHYVVNVAERAEDLRILRENLLLVARDYNRIIAMLSPDEQALFKERIRLLDKKIHPGLKKLHWALKGASAFFITECRIHASKVQMIVNEFKASTLTIGWRAQEMSEKLLVRISGKRVYRDLEFEEDQREHRAAVQQKLMNLHQDVVTIMTNSYEVFKNDGPEIQQQWMLYMIRLDRMMEDALRLNVKWSLLELSKAINGDGKTSPNPLFQVLVILKNDLQGSVAQVEFSPTLQTLAGVVNDIGNHLFSTISVFCHLPDILTKRKLHREPIQTVVEQDEDIKKIQTQISSGMTNNASLLQNYLKTWDMYREIWEINKDSFIHRYQRLNPPVSSFVADIARYTEVANNVQKEETVTNIQFVLLDCSHLKFSLVQHCNEWQNKFATLLREMAAGRLLELHTYLKENAEKISRPPQTLEELGVSLQLVDALKHDLANVETQIPPIHEQFAILEKYEVPVEDSVLEMLDSLNGEWVVFQQTLLDSKQMLKKHKEKFKTGLIHSADDFKKKAHTLLEDFEFKGHFTSNVGYMSALDQITQVRAMLMAMREEENSLRANLGIFKIEQPPSKDLQNLEKELDALQQIWEIARDWEENWNEWKTGRFLILQTETMETTAHGLFRRLTKLAKEYKDRNWEIIETTRSKIEQFKRTMPLISDLRNPALRERHWDQVRDEIQREFDQESESFTLEQIVELGMDQHVEKIGEISASATKELAIEVALQNIAKTWDVTQLDIVPYKDKGHHRLRGTEEVFQALEDNQVALSTMKASRFVKAFEKDVDHWERCLSLILEVIEMILTVQRQWMYLENIFLGEDIRKQLPNESTLFDQVNSNWKAIMDRMNKDNNALRSTHHPGLLDTLIEMNTILEDIQKSLDMYLETKRHIFPRFYFLSNDDLLEILGQSRNPEAVQPHLKKCFDNIKLLRIQKVGGPSSKWEAVGMFSGDGEYIDFLHSVFLEGPVESWLGDVEQTMRVTLRDLLRNCHLALRKFLNKRDKWVKEWAGQVVITASQIQWTADVTKCLLTAKERADKKILKVMKKNQVSILNKYSEAIRGNLTKIMRLKIVALVTIEIHARDVLEKLYKSGLMDVNSFDWLSQLRFYWEKDLDDCVIRQTNTQFQYNYEYLGNSGRLVITPLTDRCYMTLTTALHLHRGGSPKGPAGTGKTETVKDLGKALGIYVIVVNCSEGLDYKSMGRMYSGLAQTGAWGCFDEFNRINIEVLSVVAHQILCILSALAAGLTHFHFDGFEINLVWSCGIFITMNPGYAGRTELPENLKSMFRPIAMVVPDSTLIAEIILFGEGFGNCKILAKKVYTLYSLAVQQLSRQDHYDFGLRALTSLLRYAGKKRRLQPDLTDEEVLLLSMRDMNIAKLTSVDAPLFNAIVQDLFPNIELPVIDYGKLRETVEQEIRDMGLQSTPFTLTKVFQLYETKNSRHSTMIVGCTGSGKTASWRILQASLSSLCRAGDPNFNIVREFPLNPKALSLGELYGEYDLSTNEWTDGILSSVMRTACADEKPDEKWILFDGPVDTLWIENMNSVMDDNKVLTLINGERIAMPEQVSLLFEVEDLAMASPATVSRCGMVYTDYADLGWKPYVQSWLEKRPKAEVEPLQRMFEKLINKMLAFKKDNCKELVPLPEYSGITSLCKLYSALATPENGVNPADGENYVTMVEMTFVFSMIWSVCASVDEEGRKRIDSYLREIEGSFPNKDTVYEYFVDPKIRSWTSFEDKLPKSWRYPPNAPFYKIMVPTVDTVRYNYLVSSLVANQNPILLVGPVGTGKTSIAQSVLQSLPSSQWSVLVVNMSAQTTSNNVQSIIESRVEKRTKGVYVPFGGKSMITFMDDLNMPAKDMFGSQPPLELIRLWIDYGFWYDRTKQTIKYIREMFLMAAMGPPGGGRTVISPRLRSRFNIINMTFPTKSQIIRIFGTMINQKLQDFEEEVKPIGNVVTEATLDMYNTVVQRFLPTPTKMHYLFNLRDISKVFQGMLRANKDFHDTKSSITRLWIHECFRVFSDRLVDAADTEAFMGIISDKLGSFFDLTFHHLCPSKRPPIFGDFLKEPKVYEDLTDLTVLKTVMETALNEYNLSPSVVPMQLVLFREAIEHITRIVRVIGQPRGNMLLVGIGGSGRQSLARLASSICDYTTFQIEVTKHYRKQEFRDDIKRLYRQAGVELKTTSFIFVDTQIADESFLEDINNILSSGEVPNLYKPDEFEEIQSHIIDQARVEQVPESSDSLFAYLIERVQNNLHIVLCLSPMGDPFRNWIRQYPALVNCTTINWFSEWPQEALLEVAEKCLIGVDLGTQENIHRKVAQIFVTMHWSVAQYSQKMLLELRRHNYVTPTKYLELLSGYKKLLGEKRQELLAQANKLRTGLFKIDETREKVQVMSLELEDAKKKVAEFQKQCEEYLVIIVQQKREADEQQKALESLNKKDIGEIKSYGRPPAQVEIVMQAVMILRGNEPTWAEAKRQLGEQNFIKSLINFDKDNISDKVLKKIGAYCAQPDFQPDIIGRVSLAAKSLCMWVRAMELYGRLYRVVEPKRIRMNAALAQLREKQAALAEAQEKLREVAEKLEMLKKQYDEKLAQKEELRKKSEEMELKLERAGMLVSGLAGEKARWEETVQGLEEDLGYLVGDCLLAAAFLSYMGPFLTNYRDEIVNQIWIGKIWELQVPCSPSFAIDNFLCNPTKVRDWNIQGLPSDAFSTENGIIVTRGNRWALMIDPQAQALKWIKNMEGGQGLKIIDLQMSDYLRILEHAIHFGYPVLLQNVQEYLDPTLNPMLNKSVARIGGRLLMRIGDKEVEYNTNFRFYITTKLSNPHYSPETSAKTTIVNFAVKEQGLEAQLLGIVVRKERPELEEQKDSLVINIAAGKRKLKELEDEILRLLNEATGSLLDDVQLVNTLHTSKITATEVTEQLETSETTEINTDLAREAYRPCAQRASILFFVLNDMGCIDPMYQFSLDAYISLFILSIDKSHRSNKLEDRIDYLNDYHTYAVYRYTCRTLFERHKLLFSFHMCAKILETSGKLNMDEYNFFLRGGVVLDREGQMDNPCSSWLADAYWDNITELDKLTNFHGLMNSFEQYPRDWHLWYTNAAPEKAMLPGEWENACNEMQRMLIVRSLRQDRVAFCVTSFIITNLGSRFIEPPVLNMKSVLEDSTPRSPLVFILSPGVDPTSALLQLAEHMGMAQRFHALSLGQGQAPIAARLLREGVTQGHWVFLANCHLSLSWMPNLDKLVEQLQVEDPHPSFRLWLSSIPHPDFPISILQVSIKMTTEPPKGLKANMTRLYQLMSEPQFSRCSKPAKYKKLLFSLCFFHSVLLERKKFLQLGWNIIYGFNDSDFEVSENLLSLYLDEYEETPWDALKYLIAGINYGGHVTDDWDRRLLTTYINDYFCDQSLSTPFHRLSALETYFIPKDGSLASYKEYISLLPGMDPPEAFGQHPNADVASQITEAQTLFDTLLSLQPQITPTRAGGQTREEKVLELAADVKQKIPEMIDYEGTQKLLALDPSPLNVVLLQEIQRYNTLMQTILFSLTDLEIPSCVSHKSERVVLELSAVKHPRQ

SEQ ID NO: 206295 - DNA, 13284 bp, Artificial Sequence
  derived and/or modified sequence
atgagctctaaggccgagaagaagcagcggctctccggtcgggggagttcccaagcaagctggtccgggcgtgctacgagagcagccgtagccactcaggaacaggggaacgcccccgccgtgtctgagccagagctccaggcggagctgcctaaggaggaacccgaaccgaggctggaaggcccgcaagcccagagcgaagagagcgtggaacccgaggctgacgtgaaacctttattcctgagccgagccgcactaaccggtctggctgacgcggtctggacccaggagcacgatgccatcttagaacactttgcccaagaccctaccgagtccatcctgactatcttcattgatccttgttttggtctgaaactggagctgggaatgcctgttcagactcagaaccaactggtctacttcattagacaggcccccgttccaatcacctgggagaacttcgaagctaccgtgcagtttgggactgtacgtggcccttacatcccggctctcctgaggcttttaggtggcgtattcgcaccccagatttttgctaatacaggctggcccgaatctatcaggaaccactttgcctcccacttgcataagttcctagcatgtctgacagatactagatataaattggagggacacactgtgctctacatcccagctgaagccatgaatatgaagccggaaatggtgatcaaagataaggagttagtgcagaggctggagacaagcatgatacattggaccagacagataaaagaaatgctgtccgcccaggagactgtggaaaccggcgaaaatctcggacctctggaagagatcgagttttggcggaataggtgtatggatctaagcggcatcagcaagcagctggttaaaaagggcgtaaagcacgttgaatccattctccatcttgcaaaatccagctatcttgccccattcatgaaactggcacagcagattcaggacggaagccgtcaggcccagagtaacctgacctttctctcaatactgaaggagccttaccaggagcttgcctttatgaagcctaaagacatttcatctaagctgccaaagctgatcagtctgattcggataatctgggtgaattcaccccactacaatactcgggaaaggcttacaagtctgtttcgcaaggtctgcgactgccagtaccactttgcacggtgggaagatggcaagcagggtcctctgccttgtttttttggcgcccagggacctcagatcactcggaacctgctcgaaatcgaggacatctttcataaaaatctccacactctccgggctgtccgcggcggtattctggatgtaaagaacacttgctggcacgaggactacaataagttccgcgcaggcattaaggatctggaggtgatgactcaaaacctgattacatctgctttcgaacttgtgcgagacgtgccacacggtgtgctcttactggacacatttcacagactggcatctcgtgaagcgataaagcgcacatacgacaagaaggcggtcgacctctatatgctgttcaacagcgagttagctctggtgaaccgtgagcgcaataagaaatggcccgacctcgaaccatacgtagcccagtactctggtaaagcgcggtgggtacatatcctgcgaaggagaatcgatcgagtgatgacttgcttagccggcgcccattttctccctcggattggcactggcaaggagtccgttcatacatatcagcagatggtccaggccattgacgagctagtacggaagactttccaagaatggacctcttccctggataaagactgcattcgtagacttgacactcccttgctcagaatatcccaagaaaaagccggcatgttggacgtgaactttgataagtccctgctaatcctgttcgctgaaatcgattactgggagcggctcctgttcgagactcctcattatgttgtgaacgtggctgaaagagcggaagacttacgcatcctgagagagaatctgttgctggtggccagggactataatagaatcatcgcgatgttatcccccgacgagcaggcactttttaaggaacgcatcagactgctggacaagaagattcaccctgggctcaaaaaattacactgggccttgaaaggagcatctgctttcttcatcactgagtgtagaattcatgcctcaaaggtgcagatgattgtcaatgaattcaaagcatccacgctgactattgggtggcgggcacaggaaatgagcgagaagctcttggtccggattagcgggaagagggtataccgtgacctggaattcgaagaggatcagagggagcaccgggccgcggtgcagcagaaactgatgaacctacatcaggacgttgtcacgataatgacgaacagttatgaagtattcaagaacgatggccctgagatccagcagcagtggatgttgtacatgatacgactggaccggatgatggaggacgccctgagactgaacgtgaagtggagcctgctagagctgtctaaagccatcaacggagacggaaagactagccctaaccccctgtttcaggtccttgtaatcctaaaaaatgatctccagggctcggtggcgcaggttgagttctcaccaaccctgcagactttagccggcgtagtcaatgacatcggaaaccacctgttcagcaccatatcggtgttctgtcacctcccggatatactgactaaacgcaagttgcacagagaacccatccagacggtagtcgagcaggacgaggacatcaagaaaatacagacccaaatatctagcggcatgacgaataacgcatcactgctgcagaattatctcaagacatgggatatgtatcgggagatttgggagatcaacaaggattcatttattcacaggtaccagaggctgaatccccctgtctcatctttcgtcgcagacattgcccgatacaccgaagttgccaacaacgtccaaaaggaggagactgtgacaaacattcaattcgtgctgctcgattgcagccaccttaaattctccttagttcagcactgcaacgagtggcagaacaaattcgccacgctgctgcgcgaaatggctgctggacggctgttggagctacacacttacctcaaggagaacgctgagaagatttcgaggccaccccagacgctggaggagctgggcgttagccttcaactcgtcgatgccttaaagcacgatctggctaatgtagagactcagatcccgccaatccacgagcagttcgccattctagagaagtatgaagtgccagttgaggacagtgtgttagaaatgctagattcccttaacggagaatgggttgtgttccagcagactttgcttgactctaaacaaatgctgaagaaacataaagaaaaattcaagaccggtctcatccacagcgcagacgatttcaagaagaaggcacataccttactggaagatttcgagttcaagggccatttcacaagtaacgtcggttatatgagtgccctcgatcaaattacccaagttagagctatgctgatggctatgagagaggaggagaattctctacgggcaaacctgggcatttttaagatcgaacagcctcccagcaaggacttgcagaatctcgaaaaagagttagacgccttgcagcaaatttgggaaattgcacgagattgggaagagaactggaacgagtggaagacagggcgatttctgatcctgcagaccgaaacaatggagaccaccgcccacgggctgttcaggagactgaccaagctagcaaaggaatataaagaccgaaattgggaaataatcgagacaacccgctctaaaattgaacagtttaaaaggacaatgcctcttattagcgacctgcggaaccctgccttgcgagagcggcactgggaccaagtgcgggatgagatccaacgagagttcgaccaagagtccgaaagttttacactcgagcagatcgttgaactgggaatggatcagcatgttgaaaagataggcgagatcagcgcctccgccaccaaggagcttgcaatagaagtcgcccttcagaatatcgcaaaaacttgggatgttacccagctggacattgtaccatacaaggataagggccaccaccggcttcgaggaaccgaagaggtcttccaggcccttgaggataaccaggtggctttgagcaccatgaaggctagtcggtttgtgaaagccttcgaaaaggacgtcgatcattgggagcgatgtctgtccttgatactggaggtcatcgagatgattctgacagtgcagagacagtggatgtacctcgagaatattttcttaggagaggatatccggaaacagctgcctaacgaatcgactctctttgaccaggtcaacagcaactggaaggctataatggatagaatgaacaaggacaataacgccctgcgatccactcaccatccaggcctgctggataccctgatcgagatgaacacaatcctcgaggatattcagaagagcctcgacatgtacctggagactaagcgacatatatttcccaggttttactttttgtctaatgatgacctgttggagatcctcgggcagagccgcaatccggaggctgtacagccacacctgaagaagtgttttgataacattaagttgctgaggattcaaaaagtcggagggccctcttccaagtgggaagccgtgggcatgttcagcggggacggagaatacatcgacttcctgcactcggtgtttcttgaaggccccgtcgagtcgtggcttggggatgtcgaacagactatgagagtgactctgcgtgatctcctgcgcaattgccacctggcgctgcgcaaattcctgaacaagcgcgataagtgggtcaaggaatgggctggacaggtggtcatcacggcttcccaaatccagtggaccgccgacgtgaccaaatgcttgctgactgcaaaggagcgggccgacaagaagattctgaaggtgatgaagaagaaccaggtgagtattttgaataaatatagtgaggctattaggggtaatctgaccaagattatgaggctgaagatcgtggcactggtaacgatcgaaatccatgctcgggatgtactagagaaactttataaatccggcctcatggacgtcaatagcttcgactggctgtcccagctacgcttctactgggaaaaggacctggacgactgcgtgattagacagactaacacgcagtttcagtacaactatgagtacctgggcaattctggcagattggtgatcaccccacttactgaccgatgctacatgactctgacaactgccctgcatcttcaccggggaggatcacctaagggcccagccggaacagggaaaacggagacagtgaaggatttaggaaaagcacttggtatctacgtcatcgtcgtcaattgctcagagggcctggattataagtccatgggcaggatgtacagcggcctcgcacagacaggggcatggggttgctttgacgaattcaacagaatcaatatcgaggtgctgtctgttgtcgctcaccagattttgtgcatcctctcagcgcttgcagctggcctcacccatttccattttgacggcttcgagatcaatctcgtgtggtcgtgcggaatttttatcaccatgaaccctggctacgctgggcggacagagctgcccgaaaacctgaaatccatgtttcggcccatcgctatggtcgtgccagactcaacattgatcgcagaaataatcctgttcggtgaaggatttggcaattgtaagatactcgctaaaaaggtgtataccttgtacagcctagcagtgcagcaactgtctaggcaggatcactacgacttcggattgcgtgctttaacatctctcctacggtatgctggtaagaagaggagactgcagcccgacctgacagacgaggaagtcctgctcctctctatgagggatatgaacattgccaagctaacttcagttgacgcccccctgttcaacgccatcgttcaggatcttttccccaatattgaattacccgttatagactatggaaaactgagagaaacagtggaacaagaaatccgagatatgggcctgcagtccactccattcactcttactaaggtcttccaactatacgaaaccaaaaactcacgccattcaacgatgatagtgggttgcacaggctctgggaaaaccgctagttggagaattctgcaagcaagcctgagctccctctgtagggcaggggatccaaacttcaatatcgtgagagagttccctctaaatcccaaggccctgagcctcggcgagctctatggggagtacgacctctccaccaatgaatggacagacggtattctgagttcggtcatgcgcaccgcctgtgcagacgagaagcccgacgaaaaatggatcttattcgacgggccagtggatactttgtggattgaaaacatgaatagcgttatggacgataacaaagtccttactcttatcaacggggagaggatcgccatgccagagcaagtgagccttctgttcgaagtggaagatctcgctatggcctcccctgctaccgttagcaggtgcggcatggtgtacaccgattacgcggacctgggctggaagccatatgtgcaaagctggcttgagaagcggccaaaggcagaggtggaacccctgcaaagaatgtttgaaaaactgataaataaaatgctggcttttaaaaaagataactgcaaggaactggtgccgttgcctgagtattccggtattacatccctgtgcaaactgtatagcgctctggcaaccccagagaatggcgtcaaccccgcagatggtgaaaactatgtgactatggtggaaatgacatttgttttttccatgatctggtccgtctgcgctagcgtggatgaggaaggcagaaaacgaattgatagctacctgcgagaaatcgagggaagttttcccaacaaggataccgtgtacgaatactttgttgatcccaaaatccgttcatggaccagctttgaggataaactccccaaaagctggaggtacccccctaatgctcccttttacaagataatggtgcctacagtggacaccgtgcgatataactacctggtgagttcccttgtggccaaccaaaaccccatactgttggtggggcccgtgggcacgggaaaaaccagcatcgctcagtctgtactgcaatccttgccatcctcacagtggagcgtgcttgtagtgaatatgtcagcccaaaccacctcgaacaacgtgcagtcaatcattgaaagcagggtagaaaagagaaccaaaggcgtgtacgttcccttcggaggtaaaagcatgatcacatttatggacgatctgaatatgccagctaaagacatgtttggctcccaacccccattggagctgatcagactatggattgactacgggttctggtacgatcgaacaaaacagacaattaagtatataagggagatgtttctgatggcagccatgggccctcctggaggcggcagaactgtaatttcgccaagattaagatctagatttaacattattaatatgacgttccccaccaaatcacaaattatccgaatctttggaaccatgatcaaccagaaactccaggattttgaagaggaagtcaagccaatcggaaacgtggttaccgaggccacactcgatatgtacaacacagtagtgcagaggtttcttcctactccaacgaagatgcattacctcttcaaccttagggatattagtaaggtgtttcaagggatgctgcgggccaataaggactttcacgacacaaagagcagtattacaagactgtggatacacgaatgctttcgtgtgttcagcgaccggctggtggacgcggcggacaccgaggcattcatgggcatcatctctgacaaactgggatcgttttttgatctcacattccatcatctttgtccttccaaaaggcctccaatttttggggacttcctgaaggaacctaaggtatacgaggatttgaccgacctgaccgttctgaagactgtaatggaaaccgccctcaacgagtataatctttcacccagcgtggtcccaatgcagttagtgctattcagggaggccattgagcacattacaaggattgtgagagtgatcggccaaccgcgaggaaacatgctacttgtcggtatcggcgggtcaggcagacagtctttagcgcgactagccagtagtatttgtgactataccacctttcagattgaggtcacaaaacattatcgtaagcaggagtttcgagacgatatcaagcgactctaccgacaggcaggggtggaactgaagaccacatcctttatattcgtggacacccaaattgctgacgaaagctttctcgaggatataaataatatactatcttccggcgaggtccctaatctttacaaaccggacgagttcgaggaaattcagtcgcacatcatcgaccaagctagggtggagcaggtgccagagtctagcgattcgttgtttgcctatctgatagagcgtgtgcagaacaacttgcacatcgtactttgtctttctcctatgggcgacccgttccggaactggattcgacaatatcccgccctggtgaattgcactactataaattggttctccgaatggccacaggaagcattgctcgaggtagcggaaaagtgtctgattggcgtggacttgggtacccaggaaaatattcaccgcaaagtagctcagattttcgtcaccatgcactggtccgtggctcagtattctcaaaagatgctcttggagctgcgtaggcataactacgtgacaccaactaagtacctggaactgttgtcgggatataaaaagctgctcggggagaagcgtcaggagctgctcgctcaagccaataaactacggactggactgttcaaaatagatgaaacaagagaaaaggtgcaggtgatgagcctcgagctagaagatgcgaagaaaaaggtcgctgagttccagaagcaatgcgaggaatatctcgttatcatcgtgcagcagaagcgcgaggccgatgaacagcaaaaagccgtaaccgctaattccgaaaaaatcgctgtggaggaaattaagtgccaggcccttgcagataacgcacagaaggatctcgaggaggcactgccagccctagaagaggccatgagagcacttgagtccctgaataaaaaggacatcggagaaattaaatcttacggcaggcctcccgcccaggtggagatcgtcatgcaagccgtaatgatcctgcgggggaacgagcctacctgggcagaagcaaagagacaattgggggaacagaactttattaaaagcctcatcaacttcgataaggacaacatttctgataaggtcttgaaaaaaatcggcgcgtattgcgcccaaccagacttccagcctgatataattgggagagtgtcattagcagcaaagagcctgtgcatgtgggtccgcgccatggagctctatggacgtctttaccgagtggtggaacccaagcgcattcgtatgaacgctgctctggcacaactcagagagaaacaggccgccctggcggaagcccaggaaaagctgcgtgaagtcgctgagaaactggagatgctgaagaagcagtatgacgagaagctggcacagaaggaggaactgcgtaaaaaatctgaggagatggagttgaagctggagcgggccggaatgctcgtttcaggcctggctggagagaaagcccgatgggaggagactgtccagggtctggaagaagacttggggtacttggtgggcgattgtcttttggcggcagccttcctgtcctacatgggcccctttctgaccaactatcgggatgaaattgtgaatcaaatttggatcgggaaaatttgggaactgcaggtgccgtgctcccccagtttcgccattgacaactttctgtgcaacccaacgaaggtgcgtgattggaatatccagggtctaccctctgacgcttttagcaccgagaatggcatcatcgtaactcgggggaatagatgggccttgatgattgacccccaggcccaggcgctcaagtggatcaagaacatggaaggcggccaagggctcaaaattatcgatctacaaatgagcgattatttgaggatattagaacatgccatccattttggctaccctgtcttgctgcaaaatgttcaagagtacctcgatcccaccctgaatccaatgctgaataagtctgtcgcaaggatcggtggcaggttactgatgaggatcggggacaaggaggtcgaatataataccaacttcaggttctatataacgaccaaactgagcaatccacactactctccagaaacatcagccaagaccaccattgtcaattttgccgtgaaagagcaaggcctggaggctcagctgttgggtattgtcgtgcgcaaggagcgccccgaactcgaggaacaaaaggactccttagtcatcaacatagccgccggaaaacggaaactgaaggagctggaggatgaaattctccgcctgctgaatgaggcgaccgggtcactgctggacgacgtgcagttggtgaataccctacacacatctaagatcaccgccacagaggtaactgaacaactcgaaaccagcgaaactacagaaatcaataccgacctggcacgagaggcatatcgaccttgtgctcagcgtgctagcattctctttttcgtgctgaacgacatgggctgcatagatcccatgtaccaatttagtttagacgcttatatcagcctgtttatcctgtcaattgacaagagccatcggtcaaacaagctggaggaccggattgattatctaaatgactatcacacttacgctgtgtatcgctacacttgccgcacattgttcgagagacacaagctgctcttctccttccatatgtgtgcaaaaattctcgagacatccgggaagttgaacatggacgaatataattttttcctgcgagggggcgtggtcctggatagggagggccagatggacaacccgtgtagcagctggctggcagacgcttattgggataatatcacagaattggacaagttgacaaattttcatggactaatgaacagttttgagcagtatccccgggactggcacctgtggtacactaatgccgcacccgaaaaggctatgcttcctggcgagtgggagaacgcctgcaatgaaatgcagagaatgctgattgtgcggtccctccgccaggaccgggtggccttctgtgtcacatctttcattattacgaatctggggtctaggtttattgagcctccagtccttaacatgaaatctgtgttagaagactccacacctcgaagccccctggtgttcattctctcccctggcgttgatccgacttcagccctcctgcagctggcagaacatatgggcatggcgcagcgctttcacgctctctcgcttgggcaggggcaagcacctatcgccgccagacttctgagggaaggggtgacacagggtcactgggtgtttctcgccaactgccatctgtcgctgtcttggatgccaaatctggacaaactcgtggaacagctgcaggtggaggacccgcacccttctttcaggctgtggctgtcgagcattcctcatcctgacttcccaatctccattctccaagtgtctatcaaaatgaccactgagcctcccaaagggctgaaagcaaatatgacccggctttatcagctgatgagcgagccacagttcagccggtgtagtaagcctgctaagtacaaaaagctgctgttctcactctgttttttccactcagtgctgctcgaaaggaagaaatttctgcaacttgggtggaacattatttatggctttaatgactcagattttgaagtcagtgagaacttgttgagtctttaccttgacgagtacgaagaaactccctgggacgccctcaaatatctgatcgcggggatcaattacggcggccatgtcactgacgactgggataggagattgctcacgacatacattaatgattacttctgcgaccaatcgctgtccacgccttttcacagactgagcgcactggagacctacttcatcccaaaagacgggtcccttgccagttataaagagtacatatccctgctccccggcatggaccctcctgaagccttcggacagcatcctaacgcagacgttgcgagccagattactgaagcccagacactttttgacaccctgctgtcactgcagccacagattacgcctacacgcgccggggggcagacgcgggaagagaaggtcctggaactggcagcagacgtgaaacagaaaatccctgaaatgatcgactacgaggggacccagaagctgctggcactggaccccagccccctgaatgtggttcttctccaggagattcagagatataacaccttaatgcaaaccatcctgttctcacttaccgatctcgagaagggcatccagggactgatcgtcatgagtacatccctggaggagattttcaactgcatctttgatgcacacgttcctcctctttggggcaaggcataccctagccaaaagccactggcagcttggacaagagacctggctatgcgggtagaacagttcgagttatgggccagtagagccaggccgcctgtgattttttggttatcaggctttacttttcccaccgggttcttgaccgccgtgctccagtctagcgccagacagaataacgtgtcagttgactctctgtcatgggagttcattgtctccactgtcgacgactccaacctggtctacccaccaaaagacggagtgtgggtgagggggctctatttggaaggggccggctgggaccgtaaaaactcctgcttggtcgaagccgaacctatgcagctggtgtgtctcatgcccacaatccacttccgccctgccgagtcacggaagaaatctgcaaaaggaatgtatagttgcccctgttattattaccccaaccgggctggcagctcagacagggctagcttcgtcattggcatcgatctcagaagtggggctatgactcccgatcactggatcaagcgcggtacggcactcctgatgagtctcgactcctag

SEQ ID NO: 206296 - DNA, 12591 bp, Artificial Sequence
  derived and/or modified sequence
atgagtagcaaagctgagaaaaagcaacgattgtccggaagggggagcagccaagctagttggtccgggcgtgccactcgggctgccgtggccacgcaggaacagggaaacgcacccgccgtatccgagcctgaactgcaggccgagctgccaaaggaagaacccgagccaaggctggaaggaccacaggcccaaagcgaagaatccgtagagcccgaggctgacgtgaaaccgctgttcctgtcaagagccgcgctgacgggattggctgacgccgtctggacacaagaacacgatgcaatcctagagcactttgctcaggatcctactgagagtattctgactattttcattgatccatgctttggccttaagctcgaactcgggatgcccgtgcagacacagaatcagctggtgtacttcatacggcaggcccctgtgccaataacctgggaaaattttgaggcgactgtccaattcggaaccgtccgtggcccatatataccagctctgttgcgtctcctaggcggtgtgttcgcccctcagatttttgcaaacaccggatggcccgagtctatacgtaatcactttgcatcccacctgcataaatttttggcctgtctaaccgatacacgctacaagcttgaggggcataccgttttgtacatccctgctgaggcaatgaacatgaagcctgaaatggtgatcaaggataaggagcttgtgcagagattggaaacttcaatgattcactggactagacaaattaaggaaatgctgtctgctcaggagacagtcgagaccggcgaaaatttgggccccttggaggaaattgagttctggagaaatcgctgcatggacttgtcaggcatttccaagcagcttgtgaagaagggcgttaaacacgttgagagtattcttcacctggccaaatcaagctaccttgctccttttatgaaactcgctcaacagatacaggacggttcaaggcaggcgcaaagcaacttgacttttctctccattctgaaagaaccctaccaggagctggcatttatgaagccaaaagacataagcagcaagctgccaaagctgattagccttattcgcataatctgggtgaacagcccacactacaacacacgggagagactgacatcactgttccgcaaagtatgcgactgtcaataccatttcgctcgatgggaagacgggaagcagggccccctgccctgtttttttggagctcagggtccccagatcactaggaatcttttagagatcgaagacatcttccacaagaatctgcatacactgagggccgtaagaggcggaattcttgatgttaagaatacctgctggcatgaagactataataaattccgggcgggaatcaaagatctagaagttatgacccaaaacctgattacttcggctttcgagctggtgcgagatgtaccacacggggtcctacttctcgatacatttcataggttggcaagtcgagaagctatcaagagaacatacgataaaaaggcggtggacttgtatatgctctttaactccgaactggcactggtcaatcgcgagagaaacaagaagtggccagatctcgagccctatgtggcccagtacagcggtaaggcgcgctgggtgcatattctgagaagacggatcgaccgggtgatgacatgcttagcaggggcccactttttgcctagaatcgggaccggcaaggaaagtgtgcacacataccaacagatggtacaagccatcgatgagctcgtgcggaaaacttttcaggagtggacaagcagcctggacaaggactgcataagaaggctggacacacccctgctgagaatatctcaggaaaaagcggggatgttggatgtgaacttcgacaagagcctgctaatactgttcgccgaaattgactactgggaacgcctgttgtttgaaaccccccattacgtggtgaacgtcgcagagcgagctgaggacctccggattctgagggagaacctgctgctcgtggctagggactataaccgcataatcgccatgctgagtccagatgagcaagcactattcaaggagaggattaggctactggataaaaaaatccacccaggattgaaaaagttgcactgggcgctgaaaggggcctctgcatttttcattactgagtgtaggatccacgcctcaaaggttcaaatgatcgttaatgagtttaaagctagtaccctcactattggttggagggcccaggagatgtcagaaaagctgctcgttaggattagcggtaagcgagtgtaccgtgacctggagtttgaagaggaccaaagagagcaccgggcagcggtgcagcaaaagctgatgaatctacaccaggacgtggtaacaatcatgactaatagctacgaggtttttaaaaacgatgggcctgaaatacagcagcagtggatgctgtatatgatacggctggacagaatgatggaggacgccctccggctcaacgtgaagtggtctttactagagctttctaaggctataaacggtgatggaaaaacctctccgaacccgctgtttcaggtgctcgtgatcctaaagaacgatctccagggaagcgtggcccaagtcgaattctcacccactctgcagacactagccggggtagttaatgacattgggaatcacttgttcagcacgatctccgtcttctgtcacctgcccgacattctgacaaaaagaaagcttcaccgtgaaccaattcaaactgtggtcgaacaagatgaggatattaaaaagatccagactcagatctcctctggtatgaccaataatgcgagccttctgcagaactacctaaagacatgggatatgtatagggaaatttgggaaattaacaaggattcatttatacaccggtaccagaggctgaaccctcccgtctcctcttttgttgctgatatcgctcggtatacggaagtcgcaaataacgtgcagaaggaggagaccgtcacaaatatacaatttgtgttattggattgctcccatttaaagttcagtctagtccagcattgcaatgagtggcagaataagtttgccacactgttacgagaaatggctgcaggacggttactggaactgcatacttacctgaaggagaacgccgaaaagatctcaagacctccccagactctcgaggagctaggcgtctcccttcaactagtagacgctctgaagcatgaccttgcaaacgtggagacacagatccctccaatacacgaacagtttgccatactggagaagtacgaagtgccggttgaagacagcgtccttgaaatgctggatagcctgaacggggaatgggtggtgttccagcaaaccttactcgactctaagcagatgcttaagaaacacaaagagaaattcaagaccggcctgattcactctgccgatgactttaaaaagaaggctcacacactcttggaagactttgagttcaagggccatttcacatccaatgtgggttatatgtcagcgctagaccaaattactcaggtgcgggccatgctgatggctatgagggaggaagagaatagtctgcgtgccaacctaggcatcttcaaaatcgaacagccaccttccaaggaccttcagaatctcgaaaaagaactggatgctttgcaacaaatctgggaaatcgctcgagactgggaagagaactggaacgaatggaaaaccggacggttcttgatcctgcaaaccgagaccatggagacgactgctcatgggctctttaggaggctaactaagctagccaaggagtacaaagatagaaactgggagataatcgagactacacgaagtaaaatcgaacagtttaagcggaccatgcctcttatctctgacctcaggaacccagcgttgcgtgaaaggcactgggatcaagtacgggacgagatccagcgggagtttgaccaggagtccgagagtttcactctagagcagatcgtggaactggggatggatcagcacgtggagaaaatcggagagatatcagccagcgcaacgaaggagctcgcaatcgaggtggctctacagaacattgctaaaacatgggacgtgacacaactggacatcgttccttataaagacaaaggccaccacagactgagaggcacagaagaagtgttccaggccctggaagataatcaggtggccctatccacgatgaaggctagccgctttgtcaaagcattcgaaaaggatgtcgatcactgggagagatgtttgtccctgatcctggaggttattgagatgatcttgacagtgcagaggcagtggatgtatcttgagaatatctttctgggggaggatatccgcaaacagctccccaacgagagcacactatttgaccaggtcaattccaattggaaggccatcatggataggatgaataaggataataacgcactgcgctccacccaccaccccggcctcttggacaccctaattgagatgaacaccatcctcgaagatatacagaagtcattggatatgtatctcgagaccaagaggcatatctttcctcggttttatttcctttcaaatgatgacctcttggagatcctgggccagtctcgcaatcccgaagcagtccagccccatctgaaaaaatgcttcgacaacataaagctgcttagaatccaaaaggttggtggtccctcgtccaagtgggaggcagtcggaatgttctccggggacggagagtacatcgattttttacactcggttttccttgagggacctgtcgaatcttggctgggggatgttgaacaaacaatgagagtcactctgagggatctgctgcggaattgccatctcgccttgaggaagtttcttaataaaagggacaaatgggtgaaggagtgggctggccaagttgtgatcactgctagtcaaatccagtggaccgctgatgtgacaaagtgtttgttaacggcaaaggagcgtgccgacaagaaaatcctgaaagtcatgaaaaagaaccaggtgtctattcttaataagtactctgaagctatccgaggtaatctgacgaaaataatgaggttgaaaattgtcgccctggtgaccatcgagatccacgcacgtgacgtactggaaaaactgtacaagagtggccttatggatgtgaattcattcgactggctcagtcagttacggttctactgggaaaaagatctcgatgactgcgtgattcgtcagactaatacccagtttcagtacaactacgaatatctgggcaattcaggtcggctggttattacgcctctgacggatcggtgttatatgaccctgaccacagccctgcatctccacaggggtggatcccctaagggacctgccgggaccggaaagacggagacagttaaggacctggggaaagcgctgggcatttacgttattgtggtgaactgcagcgagggtctggattacaaatccatgggtaggatgtactctgggttggcccagactggggcgtggggctgctttgacgagttcaatcgcatcaatatcgaagtgctctccgtggtggctcaccagatcctctgcatactgtccgctctcgccgctggcctgacgcatttccattttgacggcttcgaaatcaacctggtgtggtcgtgtggcatcttcataactatgaaccccggatatgccggccgcacagagctgccggaaaacttaaagagtatgttccgccccattgccatggtagtgcccgactccactctcatcgccgaaattattctgtttggtgagggctttggtaattgcaagattctggccaagaaggtgtatacactgtattccctggcggtgcaacagctttcccgccaggaccattatgatttcggactgcgggcacttaccagcctgctaaggtacgcaggaaagaagcgcagattgcaaccagatttaactgacgaggaggtgttgctgctctccatgcgggacatgaacattgccaaactcactagtgttgatgcccctctttttaatgctattgttcaggatttatttcctaacatcgagctgccagttatcgattacggaaaacttcgggagaccgtagaacaggagattagggatatggggctgcaaagcactcctttcactcttacgaaggtattccagctgtatgagacgaagaatagccgacattccacgatgatcgtgggttgcacgggctctggcaagacggcgtcatggcggatcctccaagccagcctgtcctcactgtgccgggccggtgatcctaatttcaacatcgtgagggagttccccttgaatcctaaggctctatcccttggagagctgtatggcgagtacgacctgagcactaacgagtggacagacgggatattatcctcagtcatgcgcacggcttgtgctgacgaaaagccagatgaaaagtggatactctttgatggccccgtggatacgctgtggattgaaaatatgaacagcgtgatggatgacaataaagttctgaccttgattaatggagaacggattgccatgcccgagcaggtgtcgctcctgtttgaagttgaagacctcgctatggcctcccctgctactgttagtaggtgcggcatggtttacaccgattatgccgatttggggtggaaaccttacgttcagtcttggctggagaagagacctaaagctgaggtggagcctttgcagagaatgtttgaaaaactaattaacaagatgcttgccttcaaaaaagataactgtaaagaactcgtgcctctgcccgaatattccggcattacatctctgtgcaaactgtactcagcactggcgacccctgagaatggtgtgaatcctgcagacggtgagaattatgttaccatggtggaaatgacatttgtgttctcgatgatctggagcgtgtgtgccagtgtggacgaagagggtaggaagcggatcgactcgtacctccgcgaaatagagggttcattcccaaacaaagacactgtgtacgagtacttcgtggatcccaaaataaggagttggacatctttcgaagacaagctccccaagtcctggaggtacccccctaacgcccccttctataaaattatggtcccgaccgtagataccgtgcgctacaattacctcgtgtcttcacttgtggcaaaccagaaccccattctgctagtgggccctgtaggtacaggcaaaacgagtatcgcccaaagcgtccttcaaagtctgcccagtagtcagtggtccgtgttagtagtaaacatgagcgcccagaccacctcgaataacgtacagtccataatcgagagccgggtggagaagcgcacaaagggtgtgtatgttccctttgggggaaagtcaatgattacgttcatggatgatctcaacatgccagctaaagatatgtttggttcacagccgcccctcgagctgatcaggctctggatagactatggcttctggtatgatagaacaaagcagactatcaagtacatccgggagatgtttttgatggccgccatgggcccccccggtggaggacgaaccgtgattagtccacgcctgaggtccaggttcaatattatcaatatgacctttccgacgaaatcccagatcatccgaatcttcggcacaatgataaatcagaagctgcaggacttcgaagaagaagttaagccgatcggcaacgtggtgacagaagcaaccctggacatgtataacacagtcgtacaaagattcctccctacacccacaaagatgcactacctttttaatcttcgggacatttctaaagtgtttcagggcatgctgcgcgctaacaaggactttcatgacactaagagctccatcacaagactgtggatacacgagtgctttcgggtcttctctgaccgactggtggatgctgctgatactgaggcctttatgggcatcatctcagataagctaggttcctttttcgatctgacttttcatcacctgtgcccttctaaacggccgcccatctttggtgatttcctgaaagagccaaaggtgtacgaagatctcacagatcttacggttctaaaaaccgtgatggagacagctctgaatgaatacaacctgagtccttctgttgtgcctatgcagctggtgctgtttagggaggctattgaacatattacacgtattgtgcgcgtcatcggacagcccagaggaaacatgttacttgtcgggattggaggcagtgggcggcagtctttagcccgtctcgcaagctcaatctgcgactacaccacttttcagatcgaagtcacgaaacactacaggaagcaggaattccgcgacgatatcaaaagactttatagacaagccggagtagaacttaaaaccacaagctttatttttgttgacacgcagatcgcggatgagagttttctggaagacatcaataatatcctatccagtggggaagtgccaaatttatacaaaccagacgaattcgaagaaatccagagccacatcatcgaccaagccagagtcgagcaggtgcccgagtcctctgacagcctctttgcctacctgatcgaaagggtccagaataacctgcacattgttctgtgcctctccccgatgggcgatccctttagaaattggattcggcaatatccagcactggtcaactgcaccactattaactggttttccgagtggccccaggaagctctgcttgaagtcgccgaaaagtgtcttatcggcgtcgatctgggaacgcaggagaacattcacaggaaagtcgcacaaatcttcgtaacaatgcattggtcggttgcacagtactcacaaaagatgctgttagagctccggagacataactatgttactccgactaagtatctggaacttctgagtgggtacaagaagctccttggcgagaaacgccaggaacttctggcacaagcaaacaagttacggacaggcctcttcaaaattgatgagactagggaaaaggtgcaggtgatgagtcttgagctggaggacgcaaagaaaaaggttgccgagttccagaagcaatgtgaggaatacttggtgataattgtgcagcagaagcgggaagccgatgagcagcagaaagcccttgagagtctcaacaagaaagacataggcgaaatcaaatcctacggcaggccacccgcccaggtggagattgtcatgcaagccgtcatgatcttgcgcggtaacgaaccgacatgggctgaagccaagcgtcagttaggagagcagaatttcataaagagtctaataaatttcgacaaagacaatattagtgacaaagtgctcaaaaaaattggcgcatattgcgctcaacccgatttccagcctgacatcatcgggagagtgtccttggccgctaaaagcctctgtatgtgggttcgggccatggagttgtacgggaggttgtaccgggtagttgagcccaaacgcatacgcatgaatgctgctctggctcaactcagagagaaacaggcagccttggctgaagcacaggagaaactgcgggaagtcgctgaaaaactggagatgctcaaaaagcagtacgatgagaaactggcccagaaggaggagctgcgcaagaagtccgaggaaatggagctgaaactggagagagcgggcatgctggtgtccgggttggccggtgagaaagctcgctgggaggagaccgttcagggtcttgaggaggatctgggatacttggtcggcgactgtcttttggctgctgcctttcttagctacatgggacctttccttaccaattaccgtgatgagattgtgaatcagatctggattggaaagatctgggaattgcaggtgccatgcagtcccagcttcgcgattgataacttcctttgcaatcctaccaaagtgcgggattggaacattcaggggttgccgtctgacgccttctctactgaaaatggtataatcgttacacggggaaatcgctgggcgcttatgattgatccccaagcacaggccttaaagtggattaagaatatggagggaggccagggcctcaagataatagacctgcagatgtctgactacctccggatactggaacacgccattcatttcggctacccagtgctgctccagaacgtgcaagaatacttagatcctacactgaaccccatgcttaacaagagtgtagcccgcatcggcggcaggttactaatgaggataggcgataaggaggtagagtataacacaaatttccgtttttatatcacaacaaagctttctaatcctcattacagtccagaaacatctgccaaaaccaccatagtgaattttgcagtcaaagaacagggtttggaggcacagttactggggatagttgttcgcaaagagaggccagagcttgaggagcagaaggattccctggtgattaatatcgccgccggtaaacgaaaactgaaggaactggaggatgaaatccttagactgctaaatgaggctactgggtcccttctcgacgacgtgcagctggtaaataccctgcacacaagtaaaattaccgcaacggaggtgacggaacagctggagacttccgagaccaccgaaatcaacacggacctggcaagggaggcctacagaccatgtgcacagagggccagcattctgttcttcgttttgaatgacatgggatgcattgaccccatgtatcaatttagcctcgacgcatacatctctctgttcatcctatctatcgataagtcccaccggtccaacaaactggaggacagaattgactatcttaatgactaccacacctatgccgtgtacagatatacgtgtaggactctgttcgagagacataaactgctgttttcttttcatatgtgcgctaaaatcctcgagacctcaggaaaactgaacatggatgaatacaacttttttctgcggggcggcgtcgtcctcgaccgcgagggtcagatggataatccgtgtagcagctggttggccgacgcatattgggataacataaccgaactggataaactgacaaactttcacggcctgatgaactctttcgagcagtacccgagagactggcacttgtggtatactaacgcagctccggaaaaggcaatgctgcccggagagtgggaaaacgcatgcaatgaaatgcagcgcatgctaattgttcgtagtctccgtcaggaccgtgtggcattctgcgtgacaagtttcatcataacaaatctgggaagtcggttcatcgagcccccagtgcttaacatgaaatccgtgctcgaggacagcacccctcgctcccccctggtatttattctgagcccaggcgtggaccctacgtccgctctcctgcagctggcagagcatatgggcatggcacaacgctttcacgccctcagtctcggacagggacaggctcctatcgctgcacggctactgcgcgagggcgttactcagggccactgggtgtttttggcgaattgtcacctttccttatcctggatgcccaaccttgacaagctggtggaacaactgcaggttgaagaccctcacccatcatttcggttatggttgagtagtatacctcaccccgacttccctatctccatacttcaagtgtccattaagatgaccaccgagccaccaaagggcctaaaagcaaatatgacaagactgtaccagttaatgtcagagccccagttcagtcgctgcagcaaaccggctaagtataagaagttgctgtttagcttatgtttttttcacagcgtgttgctggagagaaaaaagtttctgcagctgggatggaacatcatttacgggttcaacgactccgattttgaggtcagtgagaacttgctgtcactctacttggatgaatacgaggaaaccccctgggatgctttaaaatatcttatcgcagggatcaattacgggggacacgtgaccgatgactgggaccgccgactcctcaccacgtacattaatgattacttctgcgaccagagcctctcaaccccttttcatcgattaagcgctctagaaacttacttcatccctaaagatggatctctggcgagctacaaggaatatatctctctcttgcccggcatggacccacctgaagcatttggacagcatccaaatgccgatgttgcatcccagattaccgaggcccagacgctgtttgacactctcttatcactgcagccccagatcacacccacccgggctggaggccaaacacgtgaagagaaggtgcttgagttagctgcagacgtcaagcagaagattccagaaatgattgattacgaagggacccaaaaactacttgcgcttgacccctccccgctgaacgtcgtgttgctgcaagagatacagcgctataacactctgatgcaaactatcttgttctctcttaccgatctggaaattccctcttgcgtatcccacaagtcagaacgagtagtgctcgagctcagcgccgtcaaacacccccgacagtag

SEQ ID NO: 206297 - DNA, 13284 bp, Artificial Sequence
  derived and/or modified sequence
atgagtagcaaagcggagaaaaagcagagacttagtgggagaggttccagtcaagcctcttggtccggtcgggcaacgcgggcagcagtagccacccaagagcagggaaacgcacccgccgttagcgagcccgaactgcaggctgagctacctaaagaagagcctgagccgagactggaagggcctcaggctcaatctgaggagtcagtagagcccgaggcggatgtgaaacccctcttcctgagtagggctgctctgaccgggttggcagatgccgtgtggacacaggaacatgatgccatcctcgagcacttcgcgcaggacccaacagagtcaatcctgaccatcttcattgatccatgctttgggctgaagcttgaactggggatgccggtacaaacccagaatcaactggtctactttatacggcaggcacctgtcccaattacctgggaaaacttcgaggccacagtccagttcgggacagtaaggggtccttacattcccgcactgctgcgcctgttagggggggtattcgccccccagatcttcgcaaatactggatggcctgaaagtatcagaaatcacttcgcttctcacctgcacaaattcctggcttgtctgacagacacacggtataagttagagggccacacggtcctgtatattcccgctgaggctatgaatatgaagcccgagatggtaatcaaggacaaagagctggtgcagaggctagagaccagtatgattcactggaccaggcaaatcaaggaaatgctgagcgctcaagaaacagtggaaacaggtgagaacctgggacctctagaggagatcgagttctggcggaatcgctgtatggacctctccggtatctcaaaacagctcgtgaaaaagggagtgaagcatgtggagagcatcttgcacctcgccaaatcttcctatttggcgccttttatgaaattggcacagcaaatccaggatggcagccgccaggctcagagcaatttgacctttctgtccattctcaaggagccgtatcaagaactggccttcatgaaaccaaaggatatttcaagcaaactgcctaagctcattagcctgatccgcatcatctgggtcaacagcccccactataataccagagagcgcctgacttccctattccgcaaagtttgcgattgccagtatcactttgccagatgggaagatggtaagcagggaccattgccgtgcttttttggagcccaaggccctcaaattacccgaaacctgcttgagatcgaggacattttccacaagaacctacatacactgcgggcggtgaggggaggtattctggacgttaagaatacttgttggcacgaagactacaacaaattcagagctggcatcaaagaccttgaggttatgactcaaaacctcatcacctcagccttcgaactcgtacgtgacgtacctcacggagtgctcctgcttgacacatttcatcgactggctagccgggaagccattaaacgcacctatgataagaaggcagttgacctatacatgctgtttaactctgagttagcgctggtgaaccgagaaagaaacaagaagtggccagacctggaaccctatgtcgcccagtattctgggaaagccaggtgggtacacatcctgagacggagaatagaccgcgtcatgacttgcctggcaggcgctcactttctcccacgcatcgggacaggaaaagagtctgtccacacctatcagcagatggtccaagccatcgatgaactggtcaggaaaaccttccaggagtggacttcctcactagataaggattgcatcagaagactggacacccctttgctgagaataagtcaagaaaaggctgggatgctggatgttaacttcgacaagtctctgttaattctattcgctgaaatagactactgggaacgactgctgttcgaaacaccccactatgtggtcaacgtcgctgaaagagcggaagacctgcgcattctccgcgagaatctcctgttggtagcccgagactataaccgcattatagccatgttgagtccagatgaacaagccctatttaaggaacggattcgcctactcgacaaaaaaatccacccaggtctgaagaagctgcactgggctttaaagggggcctccgccttcttcatcacagagtgccgtatacacgcctccaaggtccaaatgattgttaacgaattcaaagccagtactctcacgattgggtggagggcccaggagatgtccgaaaaactgttagtgcgcatatctggtaagcgtgtctatcgcgatttagagtttgaggaggaccagcgggaacatcgggccgccgtgcaacagaaactgatgaacttgcaccaagatgttgtcacaatcatgactaactcatacgaggtgtttaaaaacgacggacctgaaattcaacaacagtggatgctttacatgatcagactcgatcggatgatggaggatgccctgcggttaaatgttaagtggagcctcttggaactctccaaagcaatcaatggggacggtaaaacctcacccaacccactgttccaagttctggtgatcctgaaaaacgatttgcagggtagcgttgcacaggtggaattcagcccaaccctccaaaccctggcaggggtggtcaatgatatcgggaatcatctcttttctactattagcgtgttttgtcacttgcccgatatactgacgaaacgcaagcttcaccgagagccaatccagaccgtggttgagcaggacgaggatatcaaaaaaattcagactcagatcagctccggaatgactaataacgctagtttgctgcaaaactaccttaagacttgggacatgtatcgggagatctgggaaatcaacaaggatagcttcatacatcggtatcagaggctcaatccaccagtatcgtcctttgtcgctgatatcgctcgctataccgaggtggctaacaatgtccaaaaggaagaaacagtgacaaacattcaatttgtcttgctcgactgcagccaccttaagttttcccttgtgcaacactgtaatgaatggcaaaacaaattcgcgacactgttgcgagagatggccgcgggtcggctgcttgagttgcacacatacttgaaggaaaacgctgaaaaaataagcaggcctccacagaccctggaggaactaggagtgagcctgcagctcgtggatgccctcaaacatgacctcgctaacgtggaaacccagatccctcccatccacgagcaattcgcaatcctggagaagtatgaggttccagtggaggacagtgtcctggagatgctggattctttgaacggggagtgggtggtgttccagcagaccctgctcgacagcaaacagatgttaaagaagcacaaagaaaaattcaaaaccggcctgattcacagcgccgacgatttcaaaaaaaaggcccatacactgttggaggactttgaattcaaaggtcacttcacttccaacgtcggttatatgagtgcgctcgaccagatcacccaggttcgcgccatgcttatggctatgcgggaagaagaaaactcactccgggctaacctggggattttcaaaattgagcagcctccctccaaggatctgcaaaacctggagaaggagctcgatgctttgcagcagatttgggagattgctagggactgggaagagaattggaacgaatggaagacaggaagattcctcatcctgcaaacggaaaccatggagactaccgcacacggcttgttcaggcggctgacgaaacttgctaaagaatacaaagatagaaactgggaaattatagagacaactcgcagcaagattgagcagttcaagcgcaccatgccgctaatcagcgacctgaggaatcccgcactgagagagcgacactgggatcaggtacgagacgagattcagcgggagttcgaccaggaaagcgaatcctttaccctcgagcagattgtagagttagggatggaccaacacgtcgagaagattggggagatcagtgcctcggccactaaggagctggccattgaggtggcgctacagaacattgctaagacctgggacgtgactcagcttgacattgtaccatacaaagataaaggtcaccaccggctcaggggaacagaagaagtctttcaggcattggaagacaaccaagttgccctttctacaatgaaggccagccgttttgtgaaagctttcgagaaagacgttgaccattgggagcgttgtctgtcccttatacttgaggtcatcgagatgatactaactgtgcaacgacaatggatgtacttggaaaatatttttctgggcgaggatatccgtaagcaactccctaacgaatccaccctgtttgaccaggtgaactccaactggaaggcaatcatggaccgtatgaacaaagacaacaacgctctgagaagcacacaccacccaggcctattagacacccttatcgagatgaacacaatccttgaggatatccagaaatcccttgatatgtatctagagacgaaacgacacatcttccctcggttctactttctgtccaacgacgacctcctcgagatccttgggcaatctcgcaatcccgaagctgtgcagccccatctgaaaaagtgctttgacaatattaaactgctgcggattcaaaaagtcgggggcccaagcagcaagtgggaggcagtgggaatgttttccggggacggtgaatatattgatttcctgcattccgtctttctggagggtccggtcgagagttggctgggcgacgtcgagcagacgatgcgggtgaccctcagggatctcttgagaaattgccacctggccctgcgcaagttcctgaacaagagagataagtgggtgaaggaatgggccgggcaagtggttattactgcatcacagattcagtggaccgccgacgtgacaaagtgcctcctcacggccaaggaaagagccgacaagaagatcctgaaggtgatgaaaaagaatcaggtgagcattttgaataaatactctgaggctattcgggggaaccttacaaaaatcatgcgtcttaaaatcgtggctctcgtcaccattgaaattcatgcccgcgatgtcctcgagaagctgtacaaatccggtttaatggatgtgaatagttttgactggttaagccagttgcggttttactgggaaaaagatcttgacgactgtgtgatacgccagacaaacacccagtttcaatacaattacgaatatctgggcaattccggacgtcttgtgatcacaccactgacagatagatgctatatgacactgactaccgcactgcatctgcatagggggggaagtcctaaaggccccgcaggcactggcaagacagagacagtgaaggatctcggaaaagcactaggcatttatgtgatcgttgtgaactgctctgaaggcctggattataagagtatgggacgaatgtatagcggcctagctcagaccggagcttggggttgttttgacgagttcaaccggattaacatcgaggttctgagtgtggtagctcaccaaattctgtgtattctctccgctctcgccgctggtctgacacatttccatttcgacgggttcgagatcaatctcgtatggagctgcgggatatttatcaccatgaaccccgggtatgcaggtcgcaccgagctgccagagaacttgaagagtatgtttagacccatcgcaatggtggtgccagatagcaccctgatagccgaaattattcttttcggcgagggcttcggaaactgcaaaatattggccaaaaaggtatacactctgtatagtctggctgtacaacaacttagccggcaggaccactatgacttcggtctgcgtgctcttacctcgcttcttcggtacgcgggaaaaaagaggaggctgcagcctgatctcacagatgaagaagtcctgctcctctctatgcgcgacatgaatatcgccaagcttacatcagtggacgccccattgtttaatgccatcgttcaagacctgtttcctaacatcgaactccccgtcatagattacggcaagctgcgggaaactgtggagcaggaaattcgtgatatggggctgcagtcgacaccctttacactgacgaaagtgtttcagctgtatgagacgaagaattcccggcactccacaatgatcgtcggatgcacaggcagcggcaaaacagctagttggaggatcctgcaggccagtttgtcatctctatgtcgcgccggcgatccgaactttaacatcgtaagggagttccccttaaatcccaaggcactgtccctcggcgagttgtacggagaatatgatttgagcacgaatgaatggacagacgggatccttagctcggtgatgcgtacagcatgcgctgacgaaaagcccgacgagaaatggattttattcgacggtcccgtagacacgctttggattgagaatatgaattccgtgatggacgataataaagtgctgaccctcataaatggcgagcggatcgccatgccggagcaagtgtcattgctgttcgaggtggaagacctggctatggcctcaccagccacggtgtccaggtgcggaatggtgtatacggattacgccgacctcgggtggaagccgtatgtccaatcatggctcgagaagcggcctaaagccgaggtggaacctcttcagaggatgttcgagaaattgattaataagatgcttgcctttaaaaaagataactgcaaggaattagtacctctccccgagtactctggcatcactagcctgtgcaagctgtactcggcgttagccactcccgaaaatggggtcaacccagccgacggggaaaactatgttaccatggtcgagatgacatttgtgtttagcatgatttggagcgtgtgtgcttcggtcgacgaagaaggaaggaagcgcatcgattcctacctccgagaaatcgagggctcattccccaataaagatacagtctatgagtactttgttgatccaaagatacggtcttggacaagttttgaagacaagctcccgaagagctggagatatccccctaacgcccctttttacaagatcatggtgccaacagtcgacacagtgcgctacaactacctcgtatcctctctggtggccaaccagaacccaatcctactggtgggaccagtagggaccgggaagacctccattgcccagtccgtgctgcagtctttgcccagtagccaatggtcagtgctcgtggtcaatatgagcgctcagacaacttctaacaatgtgcaatctattattgagagcagagtggagaaacgaacaaaaggcgtgtatgtgcccttcgggggaaagtctatgattacttttatggacgacctcaatatgccagcaaaagacatgttcgggtctcagccccccctggagctcatccggctttggatagattacgggttttggtatgacaggacaaagcaaaccatcaaatacattcgcgagatgtttcttatggcagctatggggccccctgggggcggtcgcactgtcatttctccccgcctgaggtcaaggttcaatatcatcaatatgacgttccctacaaagagccagatcatccgcatttttggaacaatgatcaaccagaaattgcaagattttgaggaagaagtgaaacctatcggtaatgtggttactgaagccacactggatatgtacaatacggtcgtgcaacggttcctcccaacacccaccaagatgcactacctctttaacttacgtgatatttcaaaggtgttccaaggtatgctcagagccaacaaagacttccacgacacgaaaagtagtatcacgcgtctctggatccatgaatgttttcgggtgttctccgataggctggtggatgccgcagatactgaggcctttatggggataatctcagacaaactgggctcatttttcgacttgacttttcatcacctctgtccctcaaaacggccgccaatcttcggggacttcttaaaggaacccaaagtttacgaagacctcaccgatctaactgtgctcaaaactgtgatggagacggccctgaacgagtacaaccttagcccaagtgttgtgccaatgcagctggtgttgtttcgcgaggccatcgagcatataacccggatagtcagggtgatcggccaaccgcgcggaaacatgctgctggtgggaatcgggggttctggcagacaaagccttgcccgactcgcatcaagcatttgcgactacactacctttcagatagaagttaccaagcattaccgcaaacaagagttcagagatgatatcaagcgtctgtaccggcaggccggtgtcgaattaaaaactacctccttcatcttcgttgatacccagatcgcagacgagtcattcctcgaagatattaacaacatattatcatcaggggaggtgcccaatctgtataaacccgatgagttcgaagaaattcagagtcacatcatagaccaagcaagggtcgaacaggtgccagaatcatccgacagtttatttgcttacctcatcgagcgcgtccagaataacctgcacattgtgctctgtcttagcccaatgggtgaccctttcaggaactggattagacagtaccccgcactggtcaactgtaccactattaactggttttcggagtggccccaggaggctctcctggaagtggctgagaagtgccttatcggggtcgaccttggaacccaagagaacatccatcgcaaagtcgcacagatatttgtcacaatgcattggtctgtcgcccagtactcacagaaaatgttactggaactgcgtagacacaactacgtaacgccaacaaagtatctcgaattactgtccggctacaaaaaacttttgggcgagaagaggcaagagctcctggcccaggccaacaagctgaggactgggctgttcaagattgacgaaactagggaaaaggtgcaggtcatgtcgctcgagctggaggacgctaagaaaaaagtcgccgagttccaaaaacagtgcgaggaataccttgttattattgtgcaacagaagcgggaggcggacgagcagcagaaggcagtcacagctaattctgagaaaatcgctgtggaagaaatcaaatgccaagctctcgctgacaatgcccagaaggatttggaggaggctttgcctgccttagaagaggccatgcgagctctggaatccctcaacaaaaaggatattggagagatcaaatcatatggtcggccacccgcccaggtggagatagtcatgcaggctgttatgatcttgagaggtaacgaacctacatgggcggaagccaaaaggcaattgggtgagcagaattttattaaatccctgataaattttgataaagacaacatcagcgataaagttctcaagaaaattggtgcgtattgcgcgcagcccgacttccagccagatattataggccgtgtcagtcttgcggcgaaaagcttatgcatgtgggtgcgtgccatggagctgtatgggagactctacagagtggttgaacccaaacgaatccgcatgaatgctgctctggctcaactacgcgaaaagcaggctgctttggctgaagcacaggagaagctgcgcgaagtcgcggagaaactcgaaatgctgaaaaaacagtacgatgaaaagttggcgcaaaaggaagagctgcgcaagaaatcagaggagatggaacttaagttagagagggcaggaatgttagtgagtggtcttgctggagagaaagcgaggtgggaagagaccgtccaaggccttgaggaagatcttggctaccttgtgggagattgtttgttagcagcggcgtttctaagttatatgggcccgttcctcactaattatcgtgatgaaatcgtgaaccaaatctggatcggtaaaatttgggagttacaagttccttgttctccctccttcgccattgacaatttcttgtgcaatcctacaaaggttagggattggaatattcaaggactgccatctgatgcgttcagcactgaaaacgggatcatcgttactagaggtaaccgttgggctctgatgattgacccacaagctcaggcgctcaagtggatcaagaacatggaaggcggacaaggattgaaaataatcgatcttcagatgtcagattacttgaggattcttgaacatgccattcactttggttatcccgtgttgctacagaatgtgcaggagtacctggaccccacactgaaccccatgctcaataagagcgtggcccgcattggaggtcgactcctcatgcgaattggcgataaggaggtggagtataatacaaatttccgattttacatcacaaccaagttgagcaacccccactactctccagagactagcgcaaaaaccacaatagtcaatttcgccgtcaaggagcaaggcctcgaagcgcagctcctggggatcgtcgtcagaaaggagcgtcccgaactcgaggagcaaaaagatagtttggtgatcaacatcgccgcaggcaagcggaaactgaaggagctggaggacgagatcttgcgactcttaaacgaggccaccggatccttactggatgatgtacagttagttaacaccttgcatacatcaaagattaccgccaccgaggtgacagagcagcttgaaaccagcgagacaacagaaattaataccgacctggccagagaagcataccgcccatgcgcccagcgggcctctattctcttctttgtcctgaatgatatgggatgcattgacccgatgtaccagtttagcctagacgcctacatcagcctctttattctgtcaatcgacaagtcacataggtcaaataaacttgaggacaggattgactacttgaacgactaccacacttacgcggtgtaccggtatacttgtcgaacactgttcgagagacataagctgctgtttagtttccatatgtgcgctaagatactagagacctcagggaagcttaacatggacgagtacaatttcttcctgagagggggcgtagttttagacagggagggtcagatggataacccatgttcaagctggctagccgacgcctactgggataacattaccgaactggacaagctaaccaattttcacggcctcatgaatagctttgagcagtatcccagggattggcacctctggtatactaatgcagcgcctgaaaaggccatgctacctggcgagtgggagaacgcttgtaatgagatgcaaaggatgctgattgtacgctccttgcgacaggatcgggtcgcattctgcgttacatccttcattattacaaatctggggtcccgctttattgaacctcctgtgcttaatatgaaaagcgtgctcgaggatagcacccctagatcccctctggtgttcatcctttccccgggcgtggatccaacctcagctctgttgcaactggcagaacatatggggatggctcagcggtttcacgcactctcactgggtcagggtcaagcgcctatcgcagcacggttacttagagagggagtcacccagggacattgggttttcctggccaactgccatctgtccttgtcttggatgccgaaccttgataaactggtcgagcaactgcaggtggaagatccccatccctcttttaggctgtggttaagttcgattccacatcccgacttcccaatttctatcttgcaggtgtccatcaaaatgacaactgagccacccaaaggcttgaaggcaaatatgacacgcctgtaccagttgatgtccgaaccacagttctcccggtgcagcaagcccgctaagtataaaaagctcttgttctccctgtgcttcttccacagcgtgctgctggagaggaaaaagttcctgcagttgggctggaacattatttacggttttaacgactcggactttgaggtcagcgagaatcttctgagtctctatctggacgaatacgaggagactccttgggacgcgcttaagtacctcatagctggcatcaattatggagggcacgttaccgatgattgggataggcggctcctcaccacttatatcaacgattatttctgcgatcagtcactgagtacacccttccacaggctaagcgcactcgagacctatttcatccctaaggacggatctctcgcatcttataaagagtacatcagccttttgccgggcatggatcccccggaagcttttggtcaacaccccaacgcagatgtggcttcccaaatcaccgaggcgcagaccctctttgacacccttctgagcctgcagccccaaatcacgcccacaagagctggggggcaaacacgggaggaaaaagtgttagagctggctgcggacgtcaagcagaagatacccgagatgattgactatgagggtacgcagaagttgttagccctggacccttcacctcttaatgtcgtgttgctgcaggagattcaacggtacaacactcttatgcaaaccatactgttttcgttgactgacctcgaaaaggggattcagggcttgattgtcatgtcaacatcccttgaagaaatctttaattgtatcttcgacgctcacgttccccctttatggggtaaagcttaccccagtcagaaacccctggccgcttggacacgagacctagccatgcgggtcgagcaattcgaactatgggcatctagggcccgtccccctgtgatattttggcttagtggtttcacatttccgactggtttcctgactgcagtgctgcagagctcagcccgtcagaataacgtctcagtggactcgttgtcctgggaatttatcgttagtacggtcgacgacagcaacctcgtctatcctcccaaggacggtgtgtgggtgagaggactctacctggagggagcaggatgggataggaagaactcttgtctggtcgaggccgaacccatgcaactggtatgcttgatgcctacaattcactttcgtcccgctgagagcagaaaaaagagtgccaagggcatgtactcatgtccatgttactactatcccaaccgggcaggttcttccgatagggcctcctttgtgatcgggatcgatctgcggtcaggcgcaatgacacccgatcattggattaaaagggggacggctctgctcatgagtctggattcatag

SEQ ID NO: 206298 - DNA, 13284 bp, Artificial Sequence
  derived and/or modified sequence
atgagcagcaaggccgagaagaagcagaggctgagcggccggggcagcagccaggcctcctggagcggccgggccaccagggctgctgtggccacccaggagcagggcaatgccccagctgtgtctgagcctgagctgcaggccgagctgcccaaggaggagcctgagccccggctggagggcccccaggcccagagcgaggagagcgtggagcctgaggctgatgtgaagcccctcttcctgagccgggccgccctgaccggcctggctgatgctgtgtggacccaggagcatgatgccatcctggagcactttgcccaggaccccacagagagcatcctgaccatcttcatcgacccctgcttcggcctgaagctggagctgggcatgcctgtgcagacccagaaccagctggtgtacttcatccggcaggcccctgtgcccatcacctgggagaactttgaggccaccgtgcagtttggcaccgtgcggggcccctacatcccagccctgctgcggctgctgggcggcgtgtttgccccccagatctttgccaacacaggctggccagagagcatccggaaccactttgccagccacctgcacaagttcctggcctgcctgacagacacccgctacaagctggagggccacacagtgctgtacatcccagctgaggccatgaacatgaagccagagatggtgatcaaggacaaggagctggtgcagaggctggagacctccatgatccactggacccggcagatcaaggagatgctgagcgcccaggagaccgtggagaccggggagaacctgggccccctggaggagattgagttctggaggaaccgctgcatggacctgagcggcatcagcaagcagctggtgaagaagggcgtgaagcacgtggagagcatcctgcacctggccaagagcagctacctggcccccttcatgaagctggcccagcagatccaggacggcagccggcaggcccagagcaacctgaccttcctgagcatcctgaaggagccctaccaggagctggccttcatgaagcccaaggacatcagcagcaagctgcccaagctgatcagcctcatccgcatcatctgggtgaacagcccccactacaacacccgggagcggctgaccagcctcttcaggaaggtgtgtgactgccagtaccactttgcccgctgggaggatggcaagcagggccccctgccctgcttctttggagcccagggcccccagatcaccaggaacctgctggagattgaggacatcttccacaagaacctgcacaccctgcgggctgtgcggggcggcatcctggatgtgaagaacacctgctggcatgaggactacaacaagttccgggccggcatcaaggacctggaggtgatgacccagaacctgatcaccagcgcctttgagctggtgagagatgtgccccatggagtgctgctgctggacaccttccaccggctggccagccgggaggccatcaagaggacctatgacaagaaggctgtggacctgtacatgctgttcaacagcgagctggccctggtgaaccgggagaggaacaagaagtggccagacctggagccctacgtggcccagtacagcggcaaggcccgctgggtgcacatcctgcggaggagaattgacagagtgatgacctgcctggccggggcccacttcctgccccgcatcggcaccgggaaggagagcgtgcacacctaccagcagatggtgcaggccattgatgagctggtgaggaagaccttccaggagtggaccagcagcctggacaaggactgcatccggcggctggacacccccctgctgcgcatcagccaggagaaggccggcatgctggatgtgaactttgacaagagcctgctgatcctgtttgctgagattgactactgggagcggctgctgtttgagaccccccactacgtggtgaatgtggccgagagagctgaggacctgcgcatcctgcgggagaacctgctgctggtggcccgggactacaaccgcatcatcgccatgctgagcccagatgagcaggccctcttcaaggagcgcatccggctgctggacaagaagatccaccctggcctgaagaagctgcactgggccctgaagggggccagcgccttcttcatcacagaatgtcgcatccacgccagcaaggtgcagatgattgtgaatgagttcaaggccagcaccctgaccatcggctggagggcccaggagatgtctgagaagctgctggtgcgcatcagcggcaagagggtgtacagagacctggagtttgaggaggaccagcgggagcacagagctgctgtgcagcagaagctgatgaacctgcaccaggatgtggtgaccatcatgaccaacagctatgaggtgttcaagaatgatggccctgagatccagcagcagtggatgctgtacatgatccggctggacaggatgatggaggatgccctgcggctgaatgtgaagtggagcctgctggagctgagcaaggccatcaatggagatggcaagaccagccccaaccccctcttccaggtgctggtgatcctgaagaatgacctgcagggctctgtggcccaggtggagttcagccccaccctgcagaccctggccggcgtggtgaatgacatcggcaaccacctgttcagcaccatctctgtgttctgccacctgcctgacatcctgaccaagaggaagctgcaccgggagcccatccagacagtggtggagcaggatgaggacatcaagaagatccagacccagatcagcagcggcatgaccaacaatgccagcctgctgcagaactacctgaagacctgggacatgtaccgggagatctgggagatcaacaaggacagcttcatccaccgctaccagaggctgaacccccctgtgagcagctttgtggccgacatcgcccgctacacagaggtggccaacaacgtgcagaaggaggagaccgtgaccaacatccagtttgtgctgctggactgcagccacctgaagttcagcctggtgcagcactgcaatgagtggcagaacaagtttgccaccctgctgcgggagatggccgccggccgcctgctggagctgcacacctacctgaaggaaaatgctgagaagatcagccggcccccccagaccctggaggagctgggcgtgtccctgcagctggtggatgccctgaagcatgacctggccaacgtggagacccagatcccccccatccacgagcagtttgccatcctggagaagtatgaggtgcctgtggaggacagcgtgctggagatgctggacagcctgaatggagagtgggtggtgttccagcagaccctgctggacagcaagcagatgctgaagaagcacaaggagaagttcaagacaggcctcatccacagcgcagatgacttcaagaagaaggcccacaccctgctggaggactttgagttcaagggccacttcaccagcaatgtgggctacatgtctgccctggaccagatcacccaggtgcgggccatgctgatggccatgagggaggaggagaacagcctgcgggccaacctgggcatcttcaagattgagcagccccccagcaaggacctgcagaacctggagaaggagctggatgccctgcagcagatctgggagatcgcccgggactgggaggagaactggaatgagtggaagacaggccgcttcctgatcctgcagacagagaccatggagaccacagcccacggcctcttccggcggctgaccaagctggccaaggagtacaaggacaggaactgggagatcatcgagaccaccaggagcaagattgagcagttcaagaggaccatgcccctcatcagtgacctgagaaatcctgccctgcgggagcggcactgggaccaggtgagagatgagatccagcgggagtttgaccaggagagcgagagcttcaccctggagcagatcgtggagctgggcatggaccagcacgtggagaagattggagagatcagcgccagcgccaccaaggagctggccatcgaggtggccctgcagaacatcgccaagacctgggatgtgacccagctggacatcgtgccctacaaggacaagggccaccaccggctgcggggcacagaggaggtgttccaggccctggaggacaaccaggtggccctgagcaccatgaaggccagcagatttgtgaaggcctttgagaaggatgtggaccactgggagcgctgcctgagcctcatcctggaggtgattgagatgatcctgactgtgcagaggcagtggatgtacctggagaacatcttcctgggggaggacatcaggaagcagctgcccaatgaaagcaccctgtttgaccaggtgaacagcaactggaaggccatcatggacaggatgaacaaggacaacaatgccctgcggagcacccaccaccctggcctgctggacaccctgattgagatgaacaccatcctggaggacatccagaagagcctggacatgtacctggagaccaagaggcacatcttcccccgcttctacttcctgagcaatgatgacctgctggagatcctgggccagagcaggaaccctgaggccgtgcagccccacctgaagaagtgctttgacaacatcaagctgctgcgcatccagaaggtgggcggccccagcagcaagtgggaggccgtgggcatgttttctggagatggagagtacatcgacttcctgcacagcgtcttcctggagggccctgtggagagctggctgggagatgtggagcagaccatgagggtgaccctgcgggacctgctgaggaactgccacctggccctgaggaagttcctgaacaagagggacaagtgggtgaaggagtgggccggccaggtggtgatcacagccagccagatccagtggacagcagatgtgaccaagtgcctgctgacagccaaggagagagctgacaagaagatcctgaaggtgatgaagaagaaccaggtgtccatcctgaacaagtacagcgaggccatccggggcaacctgaccaagatcatgaggctgaagatcgtggccctggtgaccatcgagatccacgccagagatgtgctggagaagctgtacaagagcggcctgatggatgtgaacagctttgactggctgagccagctgcgcttctactgggagaaggacctggatgactgtgtgatccggcagaccaacacccagttccagtacaactatgagtacctgggcaacagcggccgcctggtgatcacccccctgacagaccgctgctacatgaccctgaccacagccctgcacctgcaccggggcggcagccccaagggccctgctggcaccgggaagacagagaccgtgaaggacctgggcaaggccctgggcatctacgtgattgtggtgaactgcagcgagggcctggactacaagtccatgggccgcatgtacagcggcctggcccagacaggagcctggggctgctttgatgagttcaaccgcatcaacatcgaggtgctgtctgtggtggcccaccagatcctgtgcatcctgagcgccctggccgccggcctgacccacttccactttgatggctttgagatcaacctggtgtggagctgtggcatcttcatcaccatgaaccctggctacgccggccgcacagagctgcctgagaacctgaagtccatgttccggcccatcgccatggtggtgcctgacagcaccctgattgctgagatcatcctgtttggagagggcttcggcaactgcaagatcctggccaagaaggtgtacaccctgtacagcctggccgtgcagcagctgagccggcaggaccactatgactttggcctgcgggccctgaccagcctgctgcgctatgccggcaagaagaggcggctgcagcctgacctgacagatgaggaggtgctgctgctgtccatgagggacatgaacatcgccaagctgacctctgtggatgcccccctcttcaatgccatcgtgcaggacctcttccccaacatcgagctgcctgtgattgattatggcaagctgcgggagaccgtggagcaggagatccgggacatgggcctgcagagcacccccttcaccctgaccaaggtgttccagctgtatgagaccaagaacagccgccacagcaccatgattgtgggctgcaccggcagcggcaagacagcctcctggaggatcctgcaggccagcctgagcagcctgtgcagagctggggaccccaacttcaacatcgtgcgggagttccccctgaaccccaaggccctgagcctgggggagctgtatggagaatatgacctgagcaccaatgagtggacagatggcatcctgagctctgtgatgaggacagcctgtgctgatgagaagccagatgagaagtggatcctgtttgatggccctgtggacaccctgtggattgagaacatgaacagcgtgatggatgacaacaaggtgctgaccctcatcaacggggagcgcatcgccatgcctgagcaggtgtccctgctgtttgaggtggaggacctggccatggccagccctgccaccgtgagccgctgtggcatggtgtacacagattatgctgacctgggctggaagccctacgtgcagagctggctggagaagaggcccaaggccgaggtggagcccctgcagaggatgtttgagaagctgatcaacaagatgctggccttcaagaaggacaactgcaaggagctggtgcccctgcctgagtacagcggcatcaccagcctgtgcaagctgtacagcgccctggccaccccagaaaatggagtgaacccagcagatggagaaaattatgtgaccatggtggagatgacctttgtgttctccatgatctggagcgtgtgtgcctctgtggatgaggagggcaggaagagaattgacagctacctgcgggagattgagggcagcttccccaacaaggacacagtgtatgagtactttgtggaccccaagatccgctcctggaccagctttgaggacaagctgcccaagtcctggagataccccccaaatgcccccttctacaagatcatggtgcccaccgtggacacagtgcgctacaactacctggtgagcagcctggtggccaaccagaaccccatcctgctggtgggccctgtgggcaccgggaagaccagcatcgcccagagcgtgctgcagagcctgcccagcagccagtggagcgtgctggtggtgaacatgtctgcccagaccaccagcaacaacgtgcagagcatcatcgagagccgggtggagaagaggaccaagggcgtgtatgtgccctttggaggcaagtccatgatcaccttcatggatgacctgaacatgcctgccaaggacatgtttggcagccagccccccctggagctgatccggctgtggattgattatggcttctggtatgacaggaccaagcagaccatcaagtacatccgggagatgttcctgatggccgccatgggccccccaggcggcggccgcaccgtcatcagcccccggctgcggagccgcttcaacatcatcaacatgaccttccccaccaagagccagatcatccgcatcttcggcaccatgatcaaccagaagctgcaggactttgaggaggaggtgaagcccatcggaaatgtggtgacagaggccaccctggacatgtacaacacagtggtgcagcgcttcctgcccacccccaccaagatgcactacctgttcaacctgcgggacatcagcaaggtgttccagggcatgctgcgggccaacaaggacttccatgacaccaagagcagcatcacccggctgtggattcatgagtgcttccgggtcttcagtgaccggctggtggatgctgctgacacagaggccttcatgggcatcatcagtgacaagctgggcagcttctttgacctgaccttccaccacctgtgccccagcaagaggcctcccatctttggagacttcctgaaggagcccaaggtgtatgaggacctgacagacctgactgtgctgaagacagtgatggagacagccctgaatgagtacaacctgagccccagcgtggtgcccatgcagctggtgctcttccgggaggccatcgagcacatcaccagaattgtgcgggtgattggccagccccggggcaacatgctgctggtgggcattggaggcagcggccggcagagcctggcccggctggccagcagcatctgtgactacaccaccttccagatcgaggtgaccaagcactacaggaagcaggagttcagagatgacatcaagaggctgtaccggcaggccggcgtggagctgaagaccaccagcttcatctttgtggacacccagattgctgatgagagcttcctggaggacatcaacaacatcctgagcagtggagaggtgcccaacctgtacaagccagatgaatttgaggagatccagagccacatcatcgaccaggcccgggtggagcaggtgcctgagagcagtgacagcctgtttgcctacctgattgagcgggtgcagaacaacctgcacatcgtgctgtgcctgagccccatgggagaccccttcaggaactggatccggcagtacccagccctggtgaactgcaccaccatcaactggttcagcgagtggccccaggaggccctgctggaggtggccgagaagtgcctgattggagtggacctgggcacccaggagaacatccacaggaaggtggcccagatctttgtgaccatgcactggagcgtggcccagtacagccagaagatgctgctggagctgcggcggcacaactacgtgacccccaccaagtacctggagctgctgagcggctacaagaagctgctgggggagaagaggcaggagctgctggcccaggccaacaagctgaggacaggcctcttcaagattgatgagacccgggagaaggtgcaggtgatgagcctggagctggaggatgccaagaagaaggtggccgagttccagaagcagtgtgaggagtacctggtgatcatcgtgcagcagaagcgggaggctgatgagcagcagaaggctgtgacagccaacagcgagaagattgctgtggaggagatcaagtgccaggccctggccgacaatgcccagaaggacctggaggaggccctgcctgccctggaggaggccatgagggccctggagagcctgaacaagaaggacatcggggagatcaagagctatggccggcccccagcccaggtggagatcgtgatgcaggccgtgatgatcctgcggggaaatgagcccacctgggccgaggccaagaggcagctgggggagcagaacttcatcaagagcctcatcaactttgacaaggacaacatcagtgacaaggtgctgaagaagatcggggcctactgtgcccagcctgacttccagcctgacatcatcggccgggtgtccctggccgccaagagcctgtgcatgtgggtgcgggccatggagctgtatggccgcctgtacagagtggtggagcccaagaggatccgcatgaatgctgccctggcccagctgcgggagaagcaggccgccctggccgaggcccaggagaagctgcgggaggtggccgagaagctggagatgctgaagaagcagtatgatgagaagctggcccagaaggaggagctgaggaagaagtctgaggagatggagctgaagctggagagagctggcatgctggtgtctggcctggccggggagaaggcccgctgggaggagaccgtgcagggcctggaggaggacctgggctacctggtgggggactgcctgctggccgccgccttcctgagctacatgggccccttcctgaccaactacagagatgagatcgtgaaccagatctggattggcaagatctgggagctgcaggtgccctgcagccccagctttgccatcgacaacttcctgtgcaaccccaccaaggtgcgggactggaacatccagggcctgcccagtgatgccttcagcacagaaaatggcatcatcgtgacccggggcaaccgctgggccctgatgattgacccccaggcccaggccctgaagtggatcaagaacatggagggcggccagggcctgaagatcatcgacctgcagatgtctgactacctgcgcatcctggagcacgccatccacttcggctaccctgtgctgctgcagaatgtgcaggagtacctggaccccaccctgaaccccatgctgaacaagtctgtggcccgcatcggcggccgcctgctgatgagaattggagacaaggaggtggagtacaacaccaacttccgcttctacatcaccaccaagctgagcaacccccactacagccctgagaccagcgccaagaccaccatcgtgaactttgctgtgaaggagcagggcctggaggcccagctgctgggcatcgtggtgaggaaggagaggcctgagctggaggagcagaaggacagcctggtgatcaacattgctgctgggaagaggaagctgaaggagctggaggatgagatcctgcggctgctgaatgaggccaccggcagcctgctggatgatgtgcagctggtgaacaccctgcacaccagcaagatcacagccacagaggtgacagagcagctggagaccagcgagaccacagagatcaacacagacctggcccgggaggcctaccggccctgtgcccagagggccagcatcctcttctttgtgctgaatgacatgggctgcatcgaccccatgtaccagttcagcctggatgcctacatcagcctcttcatcctgagcattgacaagagccacaggagcaacaagctggaggacagaattgactacctgaatgactaccacacctatgctgtgtaccgctacacctgcaggaccctgtttgagcggcacaagctgctcttctccttccacatgtgtgccaagatcctggagaccagcggcaagctgaacatggatgagtacaacttcttcctgcggggcggcgtggtgctggaccgggagggccagatggacaacccctgcagctcctggctggctgatgcctactgggacaacatcacagagctggacaagctgaccaacttccacggcctgatgaacagctttgagcagtacccccgggactggcacctgtggtacaccaatgctgcccctgagaaggccatgctgcccggggagtgggagaatgcctgcaatgagatgcagaggatgctgattgtgcgcagcctgcggcaggacagagtggccttctgtgtgaccagcttcatcatcaccaacctgggcagccgcttcatcgagccccctgtgctgaacatgaagtctgtgctggaggacagcacccccaggagccccctggtgttcatcctgagccctggggtggaccccaccagcgccctgctgcagctggccgagcacatgggcatggcccagcgcttccacgccctgagcctgggccagggccaggcccccatcgccgcccggctgctgcgggagggcgtgacccagggccactgggtgttcctggccaactgccacctgagcctgtcctggatgcccaacctggacaagctggtggagcagctgcaggtggaggacccccaccccagcttccggctgtggctgagcagcatcccccacccagacttccccatcagcatcctgcaggtgtccatcaagatgaccacagagccccccaagggcctgaaggccaacatgacccggctgtaccagctgatgtctgagccccagttcagccgctgcagcaagccagccaagtacaagaagctgctcttcagcctgtgcttcttccacagcgtgctgctggagaggaagaagttcctgcagctgggctggaacatcatctacggcttcaatgacagcgactttgaggtgtctgagaacctgctgagcctgtacctggatgaatatgaggagaccccctgggatgccctgaagtacctgattgctggcatcaactatggaggccacgtgacagatgactgggaccggcggctgctgaccacctacatcaatgactacttctgtgaccagagcctgagcacccccttccaccggctgagcgccctggagacctacttcatccccaaggatggcagcctggccagctacaaggagtacatcagcctgctgcccggcatggaccccccagaggccttcggccagcaccccaatgctgatgtggccagccagatcacagaggcccagaccctgtttgacaccctgctgagcctgcagccccagatcacccccaccagggctgggggccagacccgggaggagaaggtgctggagctggccgcagatgtgaagcagaagatccctgagatgattgattatgagggcacccagaagctgctggccctggaccccagccccctgaatgtggtgctgctgcaggagatccagcgctacaacaccctgatgcagaccatcctcttcagcctgacagacctggagaagggcatccagggcctcatcgtgatgagcaccagcctggaggagatcttcaactgcatctttgatgcccacgtgccccccctgtggggcaaggcctaccccagccagaagcccctggccgcctggacccgggacctggccatgagggtggagcagtttgagctgtgggccagccgggcccggccccctgtgatcttctggctgagcggcttcaccttccccaccggcttcctgacagctgtgctgcagagcagcgcccggcagaacaacgtgtctgtggacagcctgtcctgggagttcatcgtgtccacagtggatgacagcaacctggtgtacccacccaaggatggagtgtgggtgcggggcctgtacctggagggcgccggctgggacaggaagaacagctgcctggtggaggccgagcccatgcagctggtgtgcctgatgcccaccatccacttccggcctgctgagagcaggaagaagagcgccaagggcatgtacagctgcccctgctactactaccccaacagagctggcagcagtgaccgggccagctttgtgattggcatcgacctgcggagcggggccatgaccccagaccactggatcaagaggggcacagccctgctgatgagcctggacagctag

SEQ ID NO: 206299 - DNA, 12591 bp, Artificial Sequence
  derived and/or modified sequence
atgagcagcaaggccgagaagaagcagaggctgagcggccggggcagcagccaggcctcctggagcggccgggccaccagggctgctgtggccacccaggagcagggcaatgccccagctgtgtctgagcctgagctgcaggccgagctgcccaaggaggagcctgagccccggctggagggcccccaggcccagagcgaggagagcgtggagcctgaggctgatgtgaagcccctcttcctgagccgggccgccctgaccggcctggctgatgctgtgtggacccaggagcatgatgccatcctggagcactttgcccaggaccccacagagagcatcctgaccatcttcatcgacccctgcttcggcctgaagctggagctgggcatgcctgtgcagacccagaaccagctggtgtacttcatccggcaggcccctgtgcccatcacctgggagaactttgaggccaccgtgcagtttggcaccgtgcggggcccctacatcccagccctgctgcggctgctgggcggcgtgtttgccccccagatctttgccaacacaggctggccagagagcatccggaaccactttgccagccacctgcacaagttcctggcctgcctgacagacacccgctacaagctggagggccacacagtgctgtacatcccagctgaggccatgaacatgaagccagagatggtgatcaaggacaaggagctggtgcagaggctggagacctccatgatccactggacccggcagatcaaggagatgctgagcgcccaggagaccgtggagaccggggagaacctgggccccctggaggagattgagttctggaggaaccgctgcatggacctgagcggcatcagcaagcagctggtgaagaagggcgtgaagcacgtggagagcatcctgcacctggccaagagcagctacctggcccccttcatgaagctggcccagcagatccaggacggcagccggcaggcccagagcaacctgaccttcctgagcatcctgaaggagccctaccaggagctggccttcatgaagcccaaggacatcagcagcaagctgcccaagctgatcagcctcatccgcatcatctgggtgaacagcccccactacaacacccgggagcggctgaccagcctcttcaggaaggtgtgtgactgccagtaccactttgcccgctgggaggatggcaagcagggccccctgccctgcttctttggagcccagggcccccagatcaccaggaacctgctggagattgaggacatcttccacaagaacctgcacaccctgcgggctgtgcggggcggcatcctggatgtgaagaacacctgctggcatgaggactacaacaagttccgggccggcatcaaggacctggaggtgatgacccagaacctgatcaccagcgcctttgagctggtgagagatgtgccccatggagtgctgctgctggacaccttccaccggctggccagccgggaggccatcaagaggacctatgacaagaaggctgtggacctgtacatgctgttcaacagcgagctggccctggtgaaccgggagaggaacaagaagtggccagacctggagccctacgtggcccagtacagcggcaaggcccgctgggtgcacatcctgcggaggagaattgacagagtgatgacctgcctggccggggcccacttcctgccccgcatcggcaccgggaaggagagcgtgcacacctaccagcagatggtgcaggccattgatgagctggtgaggaagaccttccaggagtggaccagcagcctggacaaggactgcatccggcggctggacacccccctgctgcgcatcagccaggagaaggccggcatgctggatgtgaactttgacaagagcctgctgatcctgtttgctgagattgactactgggagcggctgctgtttgagaccccccactacgtggtgaatgtggccgagagagctgaggacctgcgcatcctgcgggagaacctgctgctggtggcccgggactacaaccgcatcatcgccatgctgagcccagatgagcaggccctcttcaaggagcgcatccggctgctggacaagaagatccaccctggcctgaagaagctgcactgggccctgaagggggccagcgccttcttcatcacagaatgtcgcatccacgccagcaaggtgcagatgattgtgaatgagttcaaggccagcaccctgaccatcggctggagggcccaggagatgtctgagaagctgctggtgcgcatcagcggcaagagggtgtacagagacctggagtttgaggaggaccagcgggagcacagagctgctgtgcagcagaagctgatgaacctgcaccaggatgtggtgaccatcatgaccaacagctatgaggtgttcaagaatgatggccctgagatccagcagcagtggatgctgtacatgatccggctggacaggatgatggaggatgccctgcggctgaatgtgaagtggagcctgctggagctgagcaaggccatcaatggagatggcaagaccagccccaaccccctcttccaggtgctggtgatcctgaagaatgacctgcagggctctgtggcccaggtggagttcagccccaccctgcagaccctggccggcgtggtgaatgacatcggcaaccacctgttcagcaccatctctgtgttctgccacctgcctgacatcctgaccaagaggaagctgcaccgggagcccatccagacagtggtggagcaggatgaggacatcaagaagatccagacccagatcagcagcggcatgaccaacaatgccagcctgctgcagaactacctgaagacctgggacatgtaccgggagatctgggagatcaacaaggacagcttcatccaccgctaccagaggctgaacccccctgtgagcagctttgtggccgacatcgcccgctacacagaggtggccaacaacgtgcagaaggaggagaccgtgaccaacatccagtttgtgctgctggactgcagccacctgaagttcagcctggtgcagcactgcaatgagtggcagaacaagtttgccaccctgctgcgggagatggccgccggccgcctgctggagctgcacacctacctgaaggaaaatgctgagaagatcagccggcccccccagaccctggaggagctgggcgtgtccctgcagctggtggatgccctgaagcatgacctggccaacgtggagacccagatcccccccatccacgagcagtttgccatcctggagaagtatgaggtgcctgtggaggacagcgtgctggagatgctggacagcctgaatggagagtgggtggtgttccagcagaccctgctggacagcaagcagatgctgaagaagcacaaggagaagttcaagacaggcctcatccacagcgcagatgacttcaagaagaaggcccacaccctgctggaggactttgagttcaagggccacttcaccagcaatgtgggctacatgtctgccctggaccagatcacccaggtgcgggccatgctgatggccatgagggaggaggagaacagcctgcgggccaacctgggcatcttcaagattgagcagccccccagcaaggacctgcagaacctggagaaggagctggatgccctgcagcagatctgggagatcgcccgggactgggaggagaactggaatgagtggaagacaggccgcttcctgatcctgcagacagagaccatggagaccacagcccacggcctcttccggcggctgaccaagctggccaaggagtacaaggacaggaactgggagatcatcgagaccaccaggagcaagattgagcagttcaagaggaccatgcccctcatcagtgacctgagaaatcctgccctgcgggagcggcactgggaccaggtgagagatgagatccagcgggagtttgaccaggagagcgagagcttcaccctggagcagatcgtggagctgggcatggaccagcacgtggagaagattggagagatcagcgccagcgccaccaaggagctggccatcgaggtggccctgcagaacatcgccaagacctgggatgtgacccagctggacatcgtgccctacaaggacaagggccaccaccggctgcggggcacagaggaggtgttccaggccctggaggacaaccaggtggccctgagcaccatgaaggccagcagatttgtgaaggcctttgagaaggatgtggaccactgggagcgctgcctgagcctcatcctggaggtgattgagatgatcctgactgtgcagaggcagtggatgtacctggagaacatcttcctgggggaggacatcaggaagcagctgcccaatgaaagcaccctgtttgaccaggtgaacagcaactggaaggccatcatggacaggatgaacaaggacaacaatgccctgcggagcacccaccaccctggcctgctggacaccctgattgagatgaacaccatcctggaggacatccagaagagcctggacatgtacctggagaccaagaggcacatcttcccccgcttctacttcctgagcaatgatgacctgctggagatcctgggccagagcaggaaccctgaggccgtgcagccccacctgaagaagtgctttgacaacatcaagctgctgcgcatccagaaggtgggcggccccagcagcaagtgggaggccgtgggcatgttttctggagatggagagtacatcgacttcctgcacagcgtcttcctggagggccctgtggagagctggctgggagatgtggagcagaccatgagggtgaccctgcgggacctgctgaggaactgccacctggccctgaggaagttcctgaacaagagggacaagtgggtgaaggagtgggccggccaggtggtgatcacagccagccagatccagtggacagcagatgtgaccaagtgcctgctgacagccaaggagagagctgacaagaagatcctgaaggtgatgaagaagaaccaggtgtccatcctgaacaagtacagcgaggccatccggggcaacctgaccaagatcatgaggctgaagatcgtggccctggtgaccatcgagatccacgccagagatgtgctggagaagctgtacaagagcggcctgatggatgtgaacagctttgactggctgagccagctgcgcttctactgggagaaggacctggatgactgtgtgatccggcagaccaacacccagttccagtacaactatgagtacctgggcaacagcggccgcctggtgatcacccccctgacagaccgctgctacatgaccctgaccacagccctgcacctgcaccggggcggcagccccaagggccctgctggcaccgggaagacagagaccgtgaaggacctgggcaaggccctgggcatctacgtgattgtggtgaactgcagcgagggcctggactacaagtccatgggccgcatgtacagcggcctggcccagacaggagcctggggctgctttgatgagttcaaccgcatcaacatcgaggtgctgtctgtggtggcccaccagatcctgtgcatcctgagcgccctggccgccggcctgacccacttccactttgatggctttgagatcaacctggtgtggagctgtggcatcttcatcaccatgaaccctggctacgccggccgcacagagctgcctgagaacctgaagtccatgttccggcccatcgccatggtggtgcctgacagcaccctgattgctgagatcatcctgtttggagagggcttcggcaactgcaagatcctggccaagaaggtgtacaccctgtacagcctggccgtgcagcagctgagccggcaggaccactatgactttggcctgcgggccctgaccagcctgctgcgctatgccggcaagaagaggcggctgcagcctgacctgacagatgaggaggtgctgctgctgtccatgagggacatgaacatcgccaagctgacctctgtggatgcccccctcttcaatgccatcgtgcaggacctcttccccaacatcgagctgcctgtgattgattatggcaagctgcgggagaccgtggagcaggagatccgggacatgggcctgcagagcacccccttcaccctgaccaaggtgttccagctgtatgagaccaagaacagccgccacagcaccatgattgtgggctgcaccggcagcggcaagacagcctcctggaggatcctgcaggccagcctgagcagcctgtgcagagctggggaccccaacttcaacatcgtgcgggagttccccctgaaccccaaggccctgagcctgggggagctgtatggagaatatgacctgagcaccaatgagtggacagatggcatcctgagctctgtgatgaggacagcctgtgctgatgagaagccagatgagaagtggatcctgtttgatggccctgtggacaccctgtggattgagaacatgaacagcgtgatggatgacaacaaggtgctgaccctcatcaacggggagcgcatcgccatgcctgagcaggtgtccctgctgtttgaggtggaggacctggccatggccagccctgccaccgtgagccgctgtggcatggtgtacacagattatgctgacctgggctggaagccctacgtgcagagctggctggagaagaggcccaaggccgaggtggagcccctgcagaggatgtttgagaagctgatcaacaagatgctggccttcaagaaggacaactgcaaggagctggtgcccctgcctgagtacagcggcatcaccagcctgtgcaagctgtacagcgccctggccaccccagaaaatggagtgaacccagcagatggagaaaattatgtgaccatggtggagatgacctttgtgttctccatgatctggagcgtgtgtgcctctgtggatgaggagggcaggaagagaattgacagctacctgcgggagattgagggcagcttccccaacaaggacacagtgtatgagtactttgtggaccccaagatccgctcctggaccagctttgaggacaagctgcccaagtcctggagataccccccaaatgcccccttctacaagatcatggtgcccaccgtggacacagtgcgctacaactacctggtgagcagcctggtggccaaccagaaccccatcctgctggtgggccctgtgggcaccgggaagaccagcatcgcccagagcgtgctgcagagcctgcccagcagccagtggagcgtgctggtggtgaacatgtctgcccagaccaccagcaacaacgtgcagagcatcatcgagagccgggtggagaagaggaccaagggcgtgtatgtgccctttggaggcaagtccatgatcaccttcatggatgacctgaacatgcctgccaaggacatgtttggcagccagccccccctggagctgatccggctgtggattgattatggcttctggtatgacaggaccaagcagaccatcaagtacatccgggagatgttcctgatggccgccatgggccccccaggcggcggccgcaccgtcatcagcccccggctgcggagccgcttcaacatcatcaacatgaccttccccaccaagagccagatcatccgcatcttcggcaccatgatcaaccagaagctgcaggactttgaggaggaggtgaagcccatcggaaatgtggtgacagaggccaccctggacatgtacaacacagtggtgcagcgcttcctgcccacccccaccaagatgcactacctgttcaacctgcgggacatcagcaaggtgttccagggcatgctgcgggccaacaaggacttccatgacaccaagagcagcatcacccggctgtggattcatgagtgcttccgggtcttcagtgaccggctggtggatgctgctgacacagaggccttcatgggcatcatcagtgacaagctgggcagcttctttgacctgaccttccaccacctgtgccccagcaagaggcctcccatctttggagacttcctgaaggagcccaaggtgtatgaggacctgacagacctgactgtgctgaagacagtgatggagacagccctgaatgagtacaacctgagccccagcgtggtgcccatgcagctggtgctcttccgggaggccatcgagcacatcaccagaattgtgcgggtgattggccagccccggggcaacatgctgctggtgggcattggaggcagcggccggcagagcctggcccggctggccagcagcatctgtgactacaccaccttccagatcgaggtgaccaagcactacaggaagcaggagttcagagatgacatcaagaggctgtaccggcaggccggcgtggagctgaagaccaccagcttcatctttgtggacacccagattgctgatgagagcttcctggaggacatcaacaacatcctgagcagtggagaggtgcccaacctgtacaagccagatgaatttgaggagatccagagccacatcatcgaccaggcccgggtggagcaggtgcctgagagcagtgacagcctgtttgcctacctgattgagcgggtgcagaacaacctgcacatcgtgctgtgcctgagccccatgggagaccccttcaggaactggatccggcagtacccagccctggtgaactgcaccaccatcaactggttcagcgagtggccccaggaggccctgctggaggtggccgagaagtgcctgattggagtggacctgggcacccaggagaacatccacaggaaggtggcccagatctttgtgaccatgcactggagcgtggcccagtacagccagaagatgctgctggagctgcggcggcacaactacgtgacccccaccaagtacctggagctgctgagcggctacaagaagctgctgggggagaagaggcaggagctgctggcccaggccaacaagctgaggacaggcctcttcaagattgatgagacccgggagaaggtgcaggtgatgagcctggagctggaggatgccaagaagaaggtggccgagttccagaagcagtgtgaggagtacctggtgatcatcgtgcagcagaagcgggaggctgatgagcagcagaaggccctggagagcctgaacaagaaggacattggagagatcaagagctatggccggcccccagcccaggtggagatcgtgatgcaggccgtgatgatcctgcggggaaatgagcccacctgggccgaggccaagaggcagctgggggagcagaacttcatcaagagcctcatcaactttgacaaggacaacatcagtgacaaggtgctgaagaagattggagcctactgtgcccagcctgacttccagcctgacatcatcggccgggtgtccctggccgccaagagcctgtgcatgtgggtgcgggccatggagctgtatggccgcctgtacagagtggtggagcccaagaggatccgcatgaatgctgccctggcccagctgcgggagaagcaggccgccctggccgaggcccaggagaagctgcgggaggtggccgagaagctggagatgctgaagaagcagtatgatgagaagctggcccagaaggaggagctgaggaagaagtctgaggagatggagctgaagctggagcgggccggcatgctggtgtctggcctggccggggagaaggcccgctgggaggagaccgtgcagggcctggaggaggacctgggctacctggtgggggactgcctgctggccgccgccttcctgagctacatgggccccttcctgaccaactacagagatgaaattgtgaaccagatctggattggcaagatctgggagctgcaggtgccctgcagccccagctttgccatcgacaacttcctgtgcaaccccaccaaggtgcgggactggaacatccagggcctgcccagtgatgccttcagcacagaaaatggcatcatcgtgacccggggcaaccgctgggccctgatgattgacccccaggcccaggccctgaagtggatcaagaacatggagggcggccagggcctgaagatcatcgacctgcagatgtctgactacctgcgcatcctggagcacgccatccacttcggctaccctgtgctgctgcagaatgtgcaggagtacctggaccccaccctgaaccccatgctgaacaagtctgtggccagaattggaggccgcctgctgatgagaattggagacaaggaggtggagtacaacaccaacttccgcttctacatcaccaccaagctgagcaacccccactacagccctgagaccagcgccaagaccaccatcgtgaactttgctgtgaaggagcagggcctggaggcccagctgctgggcatcgtggtgaggaaggagaggcctgagctggaggagcagaaggacagcctggtgatcaacattgctgctgggaagaggaagctgaaggagctggaggatgagatcctgcggctgctgaatgaggccaccggcagcctgctggatgatgtgcagctggtgaacaccctgcacaccagcaagatcacagccacagaggtgacagagcagctggagaccagcgagaccacagagatcaacacagacctggcccgggaggcctaccggccctgtgcccagagggccagcatcctcttctttgtgctgaatgacatgggctgcatcgaccccatgtaccagttcagcctggatgcctacatcagcctcttcatcctgagcattgacaagagccacaggagcaacaagctggaggacagaattgactacctgaatgactaccacacctatgctgtgtaccgctacacctgcaggaccctgtttgagcggcacaagctgctcttctccttccacatgtgtgccaagatcctggagaccagcggcaagctgaacatggatgagtacaacttcttcctgcggggcggcgtggtgctggaccgggagggccagatggacaacccctgcagctcctggctggctgatgcctactgggacaacatcacagagctggacaagctgaccaacttccacggcctgatgaacagctttgagcagtacccccgggactggcacctgtggtacaccaatgctgcccctgagaaggccatgctgcctggagagtgggagaatgcctgcaatgagatgcagaggatgctgattgtgcgcagcctgcggcaggacagagtggccttctgtgtgaccagcttcatcatcaccaacctgggcagccgcttcatcgagccccctgtgctgaacatgaagtctgtgctggaggacagcacccccaggagccccctggtgttcatcctgagccctggggtggaccccaccagcgccctgctgcagctggccgagcacatgggcatggcccagcgcttccacgccctgagcctgggccagggccaggcccccatcgccgcccggctgctgcgggagggcgtgacccagggccactgggtgttcctggccaactgccacctgagcctgtcctggatgcccaacctggacaagctggtggagcagctgcaggtggaggacccccaccccagcttccggctgtggctgagcagcatcccccacccagacttccccatcagcatcctgcaggtgtccatcaagatgaccacagagccccccaagggcctgaaggccaacatgacccggctgtaccagctgatgtctgagccccagttcagccgctgcagcaagccagccaagtacaagaagctgctcttcagcctgtgcttcttccacagcgtgctgctggagaggaagaagttcctgcagctgggctggaacatcatctacggcttcaatgacagcgactttgaggtgtctgagaacctgctgagcctgtacctggatgaatatgaggagaccccctgggatgccctgaagtacctgattgctggcatcaactacggcggccacgtgacagatgactgggaccggcggctgctgaccacctacatcaatgactacttctgtgaccagagcctgagcacccccttccaccggctgagcgccctggagacctacttcatccccaaggatggcagcctggccagctacaaggagtacatcagcctgctgcccggcatggaccccccagaggccttcggccagcaccccaatgctgatgtggccagccagatcacagaggcccagaccctgtttgacaccctgctgagcctgcagccccagatcacccccacccgggccggcggccagacccgggaggagaaggtgctggagctggccgcagatgtgaagcagaagatccctgagatgattgattatgagggcacccagaagctgctggccctggaccccagccccctgaatgtggtgctgctgcaggagatccagcgctacaacaccctgatgcagaccatcctcttcagcctgacagacctggagatccccagctgtgtgagccacaagtctgagcgggtggtgctggagctgtctgctgtgaagcacccccggcagtag

SEQ ID NO: 206300 - DNA, 13284 bp, Artificial Sequence
  derived and/or modified sequence
atgagcagcaaggccgagaagaagcagcggctgagcggccggggctcctcacaggccagctggtctggtcgggcaaccagggctgcagtcgccacacaggaacagggcaatgcgccggccgttagcgagcccgaattacaggctgaactcccaaaggaggagccggaaccccggctggagggaccacaggcccagtcggaggaaagcgtcgagccggaggctgatgtgaaaccgttgttcctttctagagctgccctgaccggactcgccgacgcagtgtggacacaagaacacgacgccatcctcgaacattttgcccaggatcctaccgaatcgatactaactatcttcattgacccttgttttggtcttaaactcgagcttggcatgccagtccaaacacagaaccaactagtgtactttattcggcaagctcctgtccctattacttgggaaaatttcgaagccaccgttcagttcggtacagtcaggggcccgtatattccagccttattgcggctcctcggaggcgtattcgccccccagatattcgcaaacacaggctggcccgagtccattagaaatcactttgcgagccacttgcacaagttcctcgcatgcctcactgacacccggtacaaacttgaagggcacaccgtcctctatatcccagcagaggccatgaatatgaaacctgagatggtcattaaggacaaagaactcgtccagcgcctggaaacatccatgattcactggaccaggcagataaaagagatgttgtccgcacaggagaccgtggagaccggggagaatctgggaccactggaggaaatcgaattttggagaaacaggtgcatggacctgtccggcatcagtaagcagctcgtaaaaaaaggcgtcaagcacgtggagagtattctgcatctcgcgaagagttcctacttggcaccatttatgaagctggcccaacagattcaggacgggtctcggcaagcccagagcaatctgactttcctgtctatcctcaaagagccttatcaggaactcgcgttcatgaagcccaaggatatatcctctaagttgcctaaattaataagtctgataagaattatatgggtgaatagtccgcattacaacacgagagagcgcttaacttctctttttcgcaaagtgtgtgactgccagtaccacttcgcccgatgggaggatggaaaacagggtcccctgccttgtttctttggggcccaggggccacaaattactcgaaacctcctcgaaattgaggacatctttcacaagaatttgcacacgcttagagccgtgagggggggaattctagacgtcaaaaacacttgctggcacgaagattataacaagttcagagccggcattaaagatctggaggttatgacacagaatctgattaccagcgcttttgaactggttcgggatgttcctcatggcgttttgcttctggatacttttcatcgcctggcctcacgggaggcgattaaacgcacctacgataagaaagcagtggacctgtatatgttatttaattctgagctagccctggtgaacagagaaaggaacaaaaaatggcccgacctggaaccatacgtcgctcagtattctgggaaggccagatgggtccacatcctccgaaggcggatcgatcgcgtgatgacgtgcctggccggagcacactttctcccacgaatcggaactggtaaagaatcggtgcacacctatcagcaaatggtgcaggccatcgacgagctcgttcgaaaaacattccaggaatggacctcgagtctcgataaagattgtatccgcaggctcgatactccactcttacgaatcagtcaggagaaggcgggcatgttagatgtgaactttgataagtccttgcttattttgtttgccgagattgactactgggagagactgctcttcgagactccacattatgttgtgaacgttgccgagcgtgcagaggaccttagaattcttagggaaaaccttctgctcgtggcaagagactacaaccgaatcatcgcgatgctgtctcctgacgagcaggcactctttaaagaaaggatcaggttattagacaaaaagatccatccaggactgaagaagcttcactgggcgctaaaaggagcaagcgcctttttcattactgaatgtaggattcatgccagtaaggtgcagatgattgttaatgagttcaaggcatccaccttgactatcggatggcgggcacaggaaatgtccgaaaaactgctcgttcggatttcggggaaacgtgtttaccgcgatctcgagtttgaagaagaccagagagaacatcgtgccgctgtgcagcagaagctgatgaacctccaccaagacgtagtgacaatcatgacgaattcgtacgaggtgtttaaaaacgacggtcccgagatccagcaacagtggatgctgtatatgatccggctggacaggatgatggaagacgcattacgcctgaacgtgaagtggagtctgctcgagttgtccaaagcaatcaacggcgatggcaaaacttcacccaatccgctatttcaggtactggttattcttaaaaatgacctccaggggtctgtggctcaagtggaatttagtcccaccctccagactctcgcgggggtcgtaaatgatatcggaaatcacttattttctactatttctgtgttttgccatctgcctgacatattgacaaaacgtaaactgcaccgggagcccatacagactgtcgtggagcaggatgaggatatcaagaagatccaaactcagattagttctggaatgaccaacaatgcatctctgttgcaaaactacctcaagacatgggacatgtacagggagatctgggagatcaacaaggactcttttatccacaggtatcagagacttaatcctcctgtcagctccttcgttgccgatatcgctaggtacactgaggtggcaaacaatgtccagaaagaagagacggtaacaaatatacagtttgtgctcctggactgttctcacctcaagttttctctggttcagcactgcaatgagtggcagaacaagtttgcaaccctgctgcgggaaatggcagcaggcaggctgctggagctccacacttatctgaaggaaaacgccgagaaaatctcccgccccccccagacgttagaggagctcggggtttccctccagctggttgacgcgctgaaacacgaccttgcaaacgtggagactcaaataccacccattcacgaacaattcgcaatacttgaaaagtacgaagtgccagtggaagactcagttcttgagatgttggactcattgaatggggaatgggtggtgtttcagcagaccctgctcgactccaaacagatgctgaaaaaacataaggagaagtttaaaaccggcttaattcacagcgctgatgacttcaagaagaaggcacataccctcctggaggacttcgagtttaaaggtcatttcactagtaacgttggctacatgagcgcactcgaccagatcacgcaggtgcgagccatgctgatggctatgcgagaagaagagaattccctccgggccaatctcgggatttttaagattgagcagcctcccagcaaggatctccagaatctggagaaggaactcgatgctcttcagcaaatttgggaaattgccagagactgggaggagaactggaacgagtggaagaccggtcgcttccttattctgcaaactgagactatggaaacaacagcccatgggttgttcagaagactgactaagttggccaaagagtacaaggataggaactgggaaattatagaaactactagaagtaaaattgaacagtttaaacgtactatgccattgatctccgacctgagaaatcccgctctccgcgagaggcactgggaccaggtaagagacgaaatccagagagaatttgaccaggagtccgaatcttttactctggagcagatcgttgagctaggcatggatcagcacgttgagaaaatcggcgagatttccgcgagcgctacgaaggagctggctattgaagtcgcccttcagaacattgccaaaacctgggatgtgacccaattggacatcgtgccttacaaggacaaagggcaccatcgattgcgcggaaccgaagaggtgttccaggccctcgaagataatcaagtcgcactttccacaatgaaggcttctcgtttcgtcaaagcatttgaaaaagacgtagaccactgggaaagatgcctatccctcattttggaggtcatcgagatgatcctcaccgtgcagagacaatggatgtacttggagaacatctttttaggcgaggatatcaggaaacagctgccgaatgagtctaccctgttcgaccaggtcaatagcaattggaaagccattatggacaggatgaacaaggacaataatgccctccgctctacccaccaccccggactgctcgacactttgattgaaatgaacaccatcctggaagatatacaaaagagtttagatatgtacttggaaaccaaacgccacatattccctcgattctactttttgagtaatgacgacctgctggaaatccttggacaaagtaggaatcccgaagccgtgcagccacatctcaagaagtgcttcgacaatatcaaattattgagaattcaaaaggtggggggccctagcagcaagtgggaagcagtcggaatgttctctggtgatggtgagtatatcgattttttgcacagtgtgtttctggaaggacccgtggaaagctggctaggcgacgtcgaacagacaatgcgcgtgaccctccgagatctcttgaggaactgtcatttggcccttagaaagtttctgaataagcgcgacaagtgggtgaaagaatgggcagggcaggtcgtgattacggccagccaaatccagtggactgccgatgtgacgaaatgtctgcttaccgcaaaagagcgcgccgataaaaagattcttaaagtgatgaagaaaaaccaggtttccatattgaacaagtacagcgaagccatccgggggaatctgacaaaaattatgagactgaagatcgttgccctagtaacaatcgaaattcatgcccgtgatgttttagaaaaactgtacaagtctggactgatggatgtaaattcattcgattggcttagccagctgaggttctattgggagaaggatctggatgactgcgtgattcggcagaccaacacccaattccagtataactacgagtacctgggcaacagtggacggctagtcatcaccccattgaccgacagatgttatatgacgcttaccaccgctctccaccttcaccgtggcggatcaccaaaagggccggcaggcacaggcaagacggagaccgtgaaagatctgggaaaagctcttgggatttacgtgattgtggtgaactgttcagaaggtttggactataaaagcatgggaagaatgtatagcggcctggctcagacgggagcttggggatgttttgacgagttcaaccgtattaatattgaggtgctcagcgttgtagcacaccaaatcctgtgtattctgtcggctttggcggcgggactgacccactttcacttcgatggatttgaaatcaacttggtgtggagctgcgggatcttcatcactatgaatccaggatacgctggccggacagagctgcctgagaacctgaagagtatgttcaggccaatcgcaatggtagttcccgattccacacttattgctgaaattatcctgttcggtgagggcttcggcaattgcaagattctcgccaagaaagtctacacactttattctctggctgttcaacaattatcgcgtcaagaccattatgacttcggcttacgcgccctgacttccctcctgaggtatgcgggcaagaaaagacgtctccagccagatctgactgatgaagaagtactcctgctcagtatgagagatatgaacatcgctaagctgacctccgtggatgctcccctcttcaatgctattgtgcaggacctctttccaaacattgagcttccagtgattgattatggaaaacttcgcgagaccgtggaacaggagataagggacatgggtctacaaagtacgcctttcacacttaccaaggtgtttcaattgtatgaaacaaagaactcacggcacagcacaatgatcgtgggctgcacgggcagcggcaaaacagcatcttggaggatcttacaagcaagtctctcaagcctgtgccgcgcaggggatccgaatttcaatattgtgagggaattcccccttaaccccaaagcgctgtcactgggagagttgtacggcgaatacgatctgtctactaacgagtggaccgacggaatcttatcgtctgtgatgaggaccgcctgcgccgacgaaaagccagatgaaaagtggatccttttcgatgggccagtcgacacattgtggattgagaacatgaactccgtcatggatgacaacaaagtacttacgctcattaatggcgaacgcatagctatgcccgagcaggtgtcacttctattcgaggttgaggacctcgctatggcatcccccgccacggtgtcacgctgtggtatggtctataccgattatgccgacctgggctggaaaccttatgtgcaaagctggctcgagaaaaggccaaaagcggaagtggagcccctgcagcggatgtttgagaagttaattaacaagatgttagccttcaagaaggataattgtaaagaactggttcctctcccagagtacagcggaatcactagcctttgtaagctgtacagcgcactcgcaactccagagaacggcgtgaatcccgctgacggggaaaattacgtcaccatggtcgaaatgacctttgtcttttccatgatctggtccgtgtgtgctagcgttgacgaagaaggcaggaaacgcatcgatagctatctgagggagattgagggatctttccccaataaggacacagtctacgaatattttgtggacccaaagattagatcgtggacatcattcgaggataaacttcccaaatcctggcgatatcctcctaacgcaccattctataagataatggtgccaactgttgataccgtgagatataattacttagtttcgtcgctggtggccaatcaaaatcctattttgctggtgggacctgtggggacggggaagacatcgatcgctcagagcgtgctgcaatctctgccttcttcccaatggtctgtgctggtagttaatatgagcgcacaaaccacctctaacaatgtgcagtccattatcgagtcaagagtcgaaaagcggactaaaggcgtgtacgttccgtttggcggcaaatcaatgattacctttatggacgacctaaatatgcccgccaaagacatgttcgggtctcagcccccactagagctcattcgactttggatcgactacggcttttggtatgataggactaagcaaactatcaagtatattagagagatgttcctgatggccgcgatggggccaccgggtggaggcagaactgtaatctccccccggctacgcagtcggtttaatataattaatatgacattccctaccaagtctcagattatcagaatctttggaaccatgatcaatcagaaactgcaagactttgaagaagaagttaagcccatcggcaacgtggtcaccgaggcaactctcgacatgtacaatactgtggtccagcgatttctgccaacacctacaaagatgcactatttgtttaatcttagagatatatcaaaagtattccaggggatgttacgcgctaataaggattttcatgatacgaagagttcaattacccgtttgtggatccatgagtgctttagagttttttcggataggcttgttgacgcagctgacaccgaggcctttatgggcattatctcggacaagctgggtagcttcttcgacctgacttttcaccatctgtgtcctagcaagcgccccccgatcttcggtgattttctgaaggagcctaaagtatacgaggaccttaccgaccttacggttctcaagaccgttatggaaaccgcactgaatgagtacaacttgagccctagcgtggttccaatgcagctagtgttattccgcgaagctatagaacacatcacgaggatcgtcagagtgataggacagccccgcggaaatatgctcctggtggggatcggtggaagcgggaggcagtcactcgcgcgtctggcttcaagcatttgtgattacacgacattccaaattgaggttacgaaacattaccggaagcaggagtttcgcgatgacataaagcgcttatatcggcaggcaggtgtcgaactgaagaccacaagcttcatattcgttgacactcaaatcgccgacgagagcttcctggaggatattaacaacatcctgtctagtggagaagtacctaacctgtataagcccgacgaatttgaagaaattcagagtcatatcatagatcaggctagggttgaacaagtgcctgagtcttccgacagcttgtttgcatatctgattgagagagtgcagaataatcttcacattgtgctgtgcctttctccaatgggggaccctttccgtaactggatccggcagtacccagccttggttaattgcacaaccattaactggttttccgagtggcctcaagaggccctgttagaggtagccgaaaaatgcttgatcggggtcgacctcgggacgcaggagaacattcataggaaggtggcccagatctttgtcactatgcactggagcgttgcccagtattcacaaaaaatgcttttagagctgaggcgtcacaactatgtgaccccgacaaagtacttggagctgctctccggatataagaagctcctgggcgagaaacggcaggagctacttgcacaggcgaacaagctcagaactggactgtttaaaatcgatgaaacccgagagaaagtgcaggtgatgagcctggagctcgaggatgccaaaaagaaggtagctgagtttcagaaacagtgtgaagaatatttagtcatcatagttcaacagaaaagagaggcagacgaacaacaaaaagctgtcaccgccaacagcgagaagattgctgttgaggagattaagtgccaagcgctagccgacaatgctcagaaagatctcgaggaagcactgccagccctggaggaagccatgcgggccctggagtctctgaacaagaaagatatcggcgagatcaaaagttacggtcggcctccagcgcaggtggaaattgtgatgcaggccgtgatgatcctgcggggaaatgagcctacatgggcagaagccaagaggcagctgggagaacagaatttcattaaatccctgatcaatttcgacaaggataatatttcagacaaggtcctcaagaaaattggtgcgtactgcgcccagcctgactttcaacctgacatcattggccgtgtatctttggccgctaagtccctgtgtatgtgggttcgggcaatggagctatacggccgtctgtaccgcgttgtcgagcccaaaaggatcaggatgaatgccgcactcgcccagcttagagagaagcaggcagccctggccgaggctcaggagaagctgcgggaagtggcggagaagctcgagatgctgaagaaacagtatgacgaaaagctcgctcagaaagaggaattaaggaagaaatctgaagagatggaattgaagctcgagagagccggaatgttggtgagcggacttgccggagaaaaggccaggtgggaggaaacagtccaagggctcgaagaggacttagggtacctggtgggagattgcctgttggccgctgcctttttaagctatatgggcccctttctcactaattacagggatgagatagtgaatcagatctggatcggtaagatctgggagctccaggtgccgtgctcgccctcctttgcgattgacaattttctgtgcaatcctactaaagtgcgcgactggaacatccaggggctgccaagcgatgcattctcaactgagaacgggatcatagtgaccagggggaaccgatgggcgctcatgatcgatcctcaggcgcaggcactcaaatggatcaagaacatggagggcgggcaggggctgaagatcattgacctgcagatgagtgattacctccggatcctggaacatgcaattcactttgggtacccggtgttgctccagaatgtgcaggaatatttagatcccaccctcaacccgatgctgaacaagagcgtggcccggattggcggcaggctgttaatgcggatcggtgataaggaagttgagtacaacaccaactttagattctacatcaccaccaaactctcaaaccctcattattctcccgagacaagtgcgaaaaccacgattgtgaactttgctgtgaaagaacagggactcgaggcccaattgctggggatcgttgtgaggaaagagagacccgagctggaggagcagaaggattctctggtcatcaatattgctgccgggaagcgaaagctgaaggaactagaagacgaaatcctccggctattgaatgaagcaacaggatccctactagacgatgtgcagctggtgaatacactccacacctcgaagatcacagccacagaggtgacagagcaacttgaaacctccgagaccaccgaaattaacactgatctggcccgggaagcatatagaccttgtgcacagagagcctcaattctgttcttcgtgttgaacgacatgggttgtatagaccccatgtatcaattttctctggatgcgtatatcagtctcttcatcctcagcatagataaatcccaccgttcaaataagcttgaggataggatcgactaccttaatgactatcatacctatgctgtgtaccgctatacatgccggaccctgttcgaaagacacaagctgcttttctcatttcacatgtgtgccaagattctagagacctctgggaagctgaacatggatgagtataacttctttctgaggggaggagtagtgctcgatcgagagggccagatggacaatccgtgcagttcctggctagccgacgcttactgggacaatatcaccgaacttgataagctgacaaattttcacgggttgatgaatagttttgagcaatatccaagagattggcatctgtggtacacaaatgcggcaccagaaaaggcgatgttaccaggagagtgggaaaatgcatgcaacgagatgcaacgcatgcttatagtacgcagccttaggcaggatcgcgtggctttctgtgtcacctctttcatcattactaacctgggaagtcgtttcatcgagcctcctgtgctaaacatgaagtcagtactggaggacagtactccaagaagcccccttgtgttcatactttcacccggggttgatcccacttctgccttgctccagctggcggaacatatgggcatggcccagcgctttcatgcgctgagtctgggccagggccaggctccaattgctgctcgcctcctgcgcgagggcgttacccaggggcactgggtgtttctcgctaactgtcacctgtctcttagttggatgccaaatcttgataaattagtcgagcagctgcaagtagaggacccccacccctcattccggctttggctcagctctatccctcatccagatttccccatcagtatcctgcaagtaagcatcaagatgaccacggagcccccgaagggcctgaaggcaaacatgacacgactctaccagctgatgtctgaaccacagttttctaggtgtagcaaacccgctaagtacaagaagttgttgttctcactgtgcttcttccatagcgtgctgttggagaggaagaaatttctgcagctcggatggaatattatttacggctttaacgacagtgatttcgaggtctctgagaatctgctttctctgtatctcgatgagtatgaagagaccccctgggacgctctgaagtatttgattgctggtataaattacggcggacatgtgacggacgactgggatcgcagactgctgaccacttatattaacgattacttttgtgaccagagtttatctaccccattccaccgactttctgccctggaaacatatttcatacccaaggacggaagtcttgccagctataaagaatacatctctctgctacccggtatggacccccccgaggcattcggccagcacccaaacgcagacgttgccagccagattaccgaagctcagacactctttgatactcttctgtccctacagccccaaatcaccccaactcgcgccggtggccaaacaagggaagaaaaagtgctagagctggccgccgatgtgaaacaaaaaattccagagatgatcgattacgagggcacacagaagcttctggctctggatcccagcccgttgaatgttgtgctgttacaggaaatacagcgctataacactcttatgcaaaccattttgttctccctgactgatctggaaaagggtattcagggactaatcgttatgagtactagtctcgaggaaatctttaactgtatttttgatgcacatgtgccaccactgtggggcaaggcttaccccagtcaaaaaccccttgctgcatggaccagggatctggctatgagagtggaacagttcgagctgtgggcttcccgggctcgcccgcccgtaattttttggctgtccggtttcacctttccgactggcttcctgactgccgttctgcagtcctccgcccgccagaataacgtcagtgttgattcactaagttgggaatttattgttagtacagttgacgactcaaatcttgtgtaccctccgaaggatggcgtgtgggtgcgcgggttatatctggaaggtgcagggtgggataggaaaaactcatgcttggtggaggcagaacccatgcagttagtctgtctcatgcccaccattcacttccgccctgcagagagcaggaagaaatctgcgaaaggaatgtactcctgcccctgctattattaccctaatagagctggctccagcgaccgggcgtcctttgtaattggtattgatctgaggagcggggcaatgacacctgaccattggatcaagagaggaacagctctgttgatgtccctggacagctag

SEQ ID NO: 206301 - DNA, 12591 bp, Artificial Sequence
  derived and/or modified sequence
atgagcagcaaggccgagaagaagcagcggctgagcggccggggcagctctcaggcctcttggtcggggagggcaaccagagccgcagtcgccacacaagaacagggcaacgcccccgctgtgtctgaacctgagcttcaggccgaactccctaaggaagaacccgagcctcgtttagaggggccacaagctcagagcgaagaatcggtcgagccggaggctgacgtcaaacccctcttcctttcccgggccgccttaaccggactggccgatgctgtgtggacacaggagcatgacgccattcttgagcacttcgctcaagacccgaccgagtctattttgacgattttcattgatccatgcttcgggctcaagctggaactaggaatgcccgtccagactcaaaaccagctggtgtattttataagacaggcccctgtgcccatcacctgggagaatttcgaggctactgtccaatttgggaccgtgcgcggcccatatattcctgctttattacggctgcttggcggcgtcttcgccccacaaattttcgccaataccggttggcctgaaagtatccggaaccacttcgcaagccatctccacaagtttctcgcttgtctgaccgataccagatacaagctggaaggccacaccgtgctttatatccccgccgaggcaatgaatatgaaacctgaaatggtgatcaaagataaggagcttgtgcaaaggctggagacttcgatgatccactggacaagacaaatcaaggagatgttgtccgcacaggagacagtcgagaccggagaaaacctgggacctctcgaagaaatcgaattttggcgcaataggtgtatggacctctctgggatctctaagcagttagttaagaagggcgtgaagcatgtcgagtccatattgcatttggctaaatcttcctatttggctccattcatgaagctggcccaacaaatccaggacggcagccgtcaggcccaatctaatctgacctttctgagcatactgaaggaaccatatcaagagctggctttcatgaagcccaaggatatctccagcaaactccctaaattaatttcacttatcagaattatttgggtcaactcgccgcattataatacacgcgagcggctgacctctcttttccggaaggtctgcgattgtcagtaccactttgccaggtgggaggacgggaagcaagggccgctgccctgtttttttggtgcccagggaccacagatcacacgcaacttgctcgagatcgaggacatctttcataaaaacttgcacaccttgagagccgtgcgcggtggcattctggatgtcaagaatacatgttggcacgaggattataataaatttagagccggcatcaaggacctggaggtgatgactcagaacctgatcacatctgccttcgagctcgtgcgcgacgttccccacggtgtcctattacttgatacttttcacagactggcatccagggaggctattaagcgtacgtatgacaaaaaagccgtggacctctacatgctgtttaactccgaactggcccttgtaaacagagagaggaacaagaagtggcctgatctggaaccatatgttgcccagtattccggcaaggcacgatgggtccacattctacgaaggcgaattgatcgggtcatgacttgcttggccggggcacactttttacctcggattggaaccggcaaagagtccgtccacacttatcaacaaatggttcaagcgatcgatgaattggtccggaaaacgtttcaagagtggaccagtagtttagacaaggattgtattcgacgcctcgacactcctttactgcggattagccaggaaaaggccgggatgctggacgtgaacttcgacaaatcattgcttatcttgttcgccgagattgattattgggagcgactgctgttcgagaccccacattacgttgtcaatgtggctgaaagggctgaagacctgcggatcctgagggaaaatcttttgctggtagctcgcgactacaatcggattatcgccatgttatctcccgacgagcaggctctgttcaaggagcggattcggcttctcgataaaaagattcacccgggtctcaaaaaactgcactgggcccttaaaggcgcttcggcgtttttcatcacagagtgccgaatacatgcaagcaaggttcagatgatagtcaacgaatttaaggcctctaccctgacgattgggtggcgggctcaggaaatgagcgagaaacttttggtaagaatcagcggcaagagggtgtaccgtgacctagaattcgaggaggatcaaagggaacatcgtgccgccgtgcaacagaagctgatgaatctgcaccaagacgtggttaccattatgaccaacagctacgaagtgtttaaaaatgatggcccagagattcagcagcagtggatgctgtacatgatcagacttgaccggatgatggaagatgccctccgcctaaacgtaaaatggtccttactggagctttccaaggcgataaatggggacggtaagacatcccctaatcccttgttccaagtcttagtaattctcaaaaacgatctccagggttccgtcgcccaagttgagttttcccctacattacagacgctcgccggcgtcgtgaatgacatagggaatcacctattctctacaatctctgttttttgccatcttcccgatatactcactaaacgcaagcttcatcgtgagccaatccagaccgtggttgaacaggacgaagatattaaaaagattcaaacccagatatcctctggaatgactaacaatgcctccctcctacagaattatctgaagacatgggacatgtacagagaaatctgggagatcaacaaggactcatttattcacagatatcagcggttgaacccacccgttagcagcttcgtggcagatatagcaaggtatacagaggtggcaaataacgtgcaaaaggaggagacagtcaccaatattcagtttgtccttctcgactgcagccatctcaagttttccttagtgcaacattgcaacgagtggcagaataagttcgctactctgctgcgcgagatggcggccggaagactcctggaattgcatacttacctgaaggaaaacgctgagaagatctccaggcctccacaaacactggaagagttaggcgtgtctcttcagctcgtggacgccctgaagcatgacttggccaacgtggagactcagataccccctatccacgagcagttcgcgatcctggaaaagtatgaagtaccagtggaggactcggtgctggagatgcttgacagcctcaacggggagtgggttgtctttcagcaaactctgcttgactctaagcagatgttgaaaaagcataaggagaagttcaagacggggttgatacactctgcagatgattttaagaagaaagcccataccctcttggaggactttgaattcaaaggccatttcacatcaaacgtgggctacatgagcgcgcttgatcaaatcactcaggtgagggccatgttaatggccatgcgagaggaagagaacagcctgcgggctaatctgggtattttcaaaatagagcagcctcctagcaaagacctgcagaatctagagaaagaactcgatgctctgcagcagatatgggagattgcaagagactgggaggagaattggaacgagtggaaaactggacgattcttgatactgcaaactgaaaccatggagactaccgcccacgggctgtttcgtcgtctgacaaaacttgctaaagaatataaagatcgcaattgggagataatcgagaccacaaggagcaagatcgagcagttcaagagaacaatgcctctcatctccgacctcaggaatccagctctgagagagcggcactgggatcaggtccgggacgaaattcagcgcgagttcgatcaggagtcagaatccttcacattggagcagattgtcgagctgggcatggaccagcacgtggaaaagatcggagaaattagcgcttcggctaccaaggagcttgcgatcgaggtcgcactgcaaaatatcgcgaaaacctgggacgttacacagctggacatcgtcccctacaaggacaagggtcaccaccgcttgcgagggactgaagaggtttttcaagcgctggaggacaaccaagttgctctgtctaccatgaaagcgtcccgatttgtaaaggcatttgaaaaagatgtggaccattgggaaagatgcctgtccctgatcctggaggtaatagagatgattttgaccgtgcagcgtcagtggatgtacctcgaaaatatctttctaggagaggacattaggaaacaactgccaaatgaatccacgctttttgatcaagtcaatagtaactggaaagcaatcatggaccgcatgaacaaagacaataatgctttacgctctacccatcatcctggccttctggacacactaatagagatgaacaccattctggaagatatacagaagagcttggatatgtatctcgagaccaagcgccacatattcccacggttctacttcctaagcaacgatgacttgctcgaaatactcgggcagagtcgcaaccctgaagccgttcaaccacatctgaaaaaatgttttgataacatcaagctcctgagaattcaaaaggtggggggccccagctctaaatgggaagccgttggtatgttctctggtgatggggaatacatcgacttcctgcactctgtgtttctggagggtccagttgagagttggcttggcgacgtggagcagacaatgcgggtcacccttagggacctgttgcgaaattgtcacttggccctgagaaaattcctgaacaagcgcgataaatgggtcaaggaatgggcaggtcaggtagtgatcacagcgtcacagatccagtggaccgcagacgtgactaagtgtctgctgacagccaaagaacgcgcagacaagaaaatcttgaaagttatgaagaaaaaccaggtctctatattaaacaagtattccgaggccatccgcggtaacctcacgaagatcatgcgcctgaaaattgtggccctcgttaccatcgaaatccacgcccgagatgtactggaaaagctgtataagagcggactaatggacgttaattccttcgactggttaagccaactgcggttttactgggagaaagacctggatgactgtgttatccggcaaactaatacccagttccagtacaactacgagtatctgggcaatagcggccggctcgttataacgcccctgaccgatcggtgctatatgaccctgactactgcattacatctgcaccgcggcggcagccctaagggcccagctggcaccggaaagacagagactgtcaaggaccttggcaaagcacttgggatttacgtgatcgtcgtcaactgctccgagggcctcgattacaagtccatgggtaggatgtactctgggctggcgcagacgggggcctgggggtgcttcgacgagtttaatcggattaacatcgaggttctgtctgtggtagcacaccagattctgtgcatcctctctgccttggctgcaggactcacccacttccacttcgacggcttcgagattaatctagtatggagctgcgggatattcattaccatgaatccgggctacgcaggacggaccgaattgcctgagaatttgaagtctatgttcagacccattgctatggtcgtccctgactcaaccctgatcgctgaaattatcctgtttggtgaaggctttgggaactgtaaaatccttgctaagaaggtttacaccctctactccctggccgtacagcagctgtcccgccaggatcattacgactttggtcttcgcgctttaacctcgctcttgaggtacgccgggaagaaacgtcgcttgcagccagacttgactgatgaggaagtcttgctcctgagcatgagggacatgaacatagctaagcttaccagtgtcgacgctccgttatttaacgctattgtgcaggacctcttccccaatatcgagctgcctgtgattgattatggcaaattgcgagagacagtggaacaagaaatccgagacatggggctacagtctacccctttcaccttgacgaaagtctttcagttgtatgagaccaagaacagccggcattccaccatgatagtgggctgtacaggctctggaaagaccgcatcctggaggattctgcaggcatccctcagtagcctgtgtcgggccggcgatcctaactttaacattgtgagagagttccctctaaacccgaaggcactgtcccttggggagctgtatggggagtatgacttgagcacaaacgagtggaccgacgggattctgtcctccgtcatgcgcaccgcatgcgcggacgaaaaacctgatgaaaagtggatattatttgacggccctgtagacacgctttggatcgaaaatatgaactcagtaatggatgacaacaaggttctgaccctaatcaacggagagcgtattgctatgcccgagcaggtaagcctgctcttcgaggtagaggatctggccatggcctcccctgcaaccgtgagcaggtgcggcatggtgtacaccgattatgccgacttggggtggaaaccctatgtccaatcatggctcgaaaaaaggccaaaggcggaggtggaaccgttgcaacgcatgtttgagaagctcatcaacaagatgctcgcattcaagaaagacaattgcaaggagctcgttccactgccagaatacagcggcatcacctcactgtgtaagttgtacagcgccctcgctactcccgagaacggggtgaacccggctgacggagaaaactatgtcactatggtcgagatgacctttgtcttttctatgatctggagtgtttgtgcctccgtggatgaggagggacggaagcggatcgactcttacttgcgggagatcgaaggctcatttcccaacaaggacacagtttacgagtacttcgtggatccgaagatccgcagctggacctctttcgaagacaaattacccaagtcttggcgctacccacctaatgccccattctataaaatcatggttccgaccgtggatacagtaagatacaactacttggtgtcttctctcgttgcgaatcaaaaccctattctgttggtgggacctgtcggcacaggaaaaacctctatcgctcagtcagtgctgcagagcctgccatcatcacaatggagcgtgctcgtggttaacatgtccgctcagaccacctcaaacaacgtgcaatctatcatagagagccgtgtcgagaagaggacaaaaggagtgtacgtgccgttcggggggaaaagcatgattaccttcatggatgatcttaacatgccagccaaagacatgtttggttcacagccccctctggagttaattcggctgtggattgactatggcttctggtacgatcgcacaaaacagacaattaaatacatccgggagatgtttctgatggcagcgatgggcccccccggcggcggacgcaccgtgatctcaccacggcttcgatccaggtttaatatcataaacatgaccttccctactaagtcccagataatccggattttcggcacgatgattaaccagaagcttcaggatttcgaggaggaggtcaaacccattggtaatgttgtgacagaggctaccctggatatgtataatacagtggtccagcgttttctaccaacgccaacaaaaatgcactatctgttcaatttgcgcgacatatctaaggtcttccaggggatgctgagagcaaacaaggacttccatgacacaaagagtagcatcacgaggctctggattcatgaatgctttcgtgtgttctccgatagactggtggatgcggcggacaccgaagcctttatgggcatcatatccgacaagcttggctccttttttgatttgacttttcaccacctgtgccccagcaagaggcctccaatttttggggatttcctcaaggaacctaaggtttatgaggatttaacagacctcaccgtgctaaagaccgtgatggagaccgccttgaacgagtataacctgtcaccaagtgtagtgcctatgcagctggtcctgttccgggaagcaattgagcacattacccgtatcgttcgcgttattggtcagccccggggcaacatgcttcttgtcgggattggtggatcaggccggcagtctcttgctaggctcgcttcctccatctgcgattataccacatttcagatagaagtcacaaaacactataggaaacaagaattccgggacgacatcaagcgactttatcgacaggctggggtcgagctgaagacgacctctttcatcttcgtggacacgcagatagctgacgagagctttttggaggacattaataacatcctgtccagtggagaagtgcctaacctctacaagccggacgaatttgaagaaattcaatctcatatcatagaccaggcgcgtgtggagcaggtgcccgagagcagcgattccctctttgcataccttatagagcgggtccagaacaacctgcatattgtgctgtgcctctcccctatgggagacccttttcgcaattggatccgtcagtatccggctttagtcaattgtacaactattaattggtttagcgagtggcctcaggaggctttactcgaagttgcagaaaaatgcctcataggagtggacttggggactcaggagaatatccacagaaaagtggcccagatctttgttactatgcattggagtgtcgcccagtattcacagaagatgctacttgagttacggaggcataattatgtcacacccactaagtacctagaactgttgtccggatacaaaaagctcctgggagagaagagacaggaattgctcgctcaagcgaacaagctcaggactggtctgttcaaaattgacgagactagggaaaaagttcaggtaatgtctctcgagctcgaggatgctaagaagaaagttgcagaattccagaagcagtgtgaagagtatctggtcatcattgtccagcagaagagggaagctgatgagcaacaaaaggctctcgaaagcctgaacaaaaaggacatcggcgagatcaaatcatatggacgtcccccagcccaggttgagatcgtcatgcaggccgtgatgatccttcgtggtaacgagcctacctgggcagaggccaagcgccaacttggtgagcagaacttcatcaagagtctcattaatttcgacaaggataacattagcgacaaggttcttaaaaagattggagcttactgcgcacaacccgacttccaacccgatatcatagggcgtgtctccctggcagctaagagcctgtgtatgtgggtccgggccatggagctgtacggtcgattataccgggttgtagagccaaaaaggatccgcatgaatgcagccctcgcccagctccgtgagaagcaggctgctcttgcggaagcacaggagaagctgcgggaggtggctgagaagctagaaatgctgaagaaacagtacgatgaaaagctggcacaaaaggaggaactgagaaaaaagtctgaagaaatggaactaaaactggagcgggcgggaatgctggtgtccggattggccggggaaaaggcccggtgggaagagactgtgcaaggcctcgaagaagaccttggctatctggttggcgattgcctgctggcagccgccttcctgtcatacatgggcccattcctgaccaattatagggatgaaatcgtaaaccagatctggattggaaagatctgggaactgcaggtcccttgctctcctagcttcgctattgacaatttcctgtgtaatcccactaaagtccgggattggaatattcagggactaccttctgacgcgttctctacagaaaacgggataattgttacacgggggaaccggtgggcccttatgattgatccacaggcccaggcccttaagtggataaagaacatggaaggaggccaggggctgaagataatcgatcttcagatgagcgattatctgagaattttggaacatgctattcatttcggctaccctgtgcttttgcagaacgtgcaggagtaccttgatcctactctgaaccccatgctgaataagtcggtcgcccggattggaggacggcttttgatgcggataggcgataaggaagtggagtataacaccaacttccggttctacattacgaccaaactgtccaacccccattattcccccgaaactagcgcaaaaacaactatcgtgaacttcgcagtgaaagagcagggactggaagcacagctcctagggatcgtggtgcgaaaagagagacccgaacttgaggagcaaaaggatagcctcgtgataaatatagcagccggtaagagaaagcttaaggaattagaggatgagatcctgcgactgcttaatgaggccacgggctcgctcctggatgatgttcagctagtgaatacattgcacacctccaagatcaccgccacagaggtgactgagcagctggaaacttctgaaaccaccgagatcaacactgaccttgcacgggaggcatacaggccttgcgcccaacgcgcaagcattcttttttttgttttaaatgacatggggtgcatcgatcctatgtaccagttttctctggacgcgtacatcagcctgttcattctcagcattgacaaaagccaccggtcaaacaagcttgaggatcggattgactacctaaacgattaccacacttatgccgtgtatcgctacacatgccgtacactgttcgagcgccacaagctcctgttctcatttcacatgtgtgcaaagattcttgagaccagcgggaagctcaacatggatgaatacaattttttccttcggggcggtgtggtgctcgatcgcgaggggcagatggataatccgtgtagcagctggctagccgacgcttattgggataacattacagagctggacaagctcaccaacttccacggtctcatgaacagcttcgagcagtacccacgggattggcatctttggtacacaaatgccgcaccagagaaagctatgctgccaggtgaatgggaaaatgcctgcaatgagatgcagagaatgctgatcgtacgttctttacggcaggaccgagtggccttctgtgtgacttctttcatcataacaaatttgggctcccgctttatcgaaccacctgtgctcaacatgaagtctgtgctggaggactctaccccgaggtccccattggtgtttatactgagcccaggggtagacccaacatctgctctgctgcagctcgctgagcatatgggaatggcccagcgctttcacgcactcagcctaggccaggggcaagcacccatagctgcaaggctgcttcgcgagggcgtcacccaaggccattgggtgttcttggcaaactgtcacctcagtctgagctggatgcccaacctcgataaactcgtggaacagctgcaggtggaggaccctcacccctcgtttcgcctctggctcagttccatccctcaccctgatttcccaatctcaatcctccaggtctccatcaagatgactactgagccccccaagggattgaaagcgaacatgaccaggttatatcagctgatgagcgagccacagttttcacggtgctcaaagcctgccaaatataagaaactcctgttctctctgtgtttttttcactccgttctgctggaacggaaaaaatttctgcagctaggatggaacatcatctacggattcaacgatagtgacttcgaggtttcagagaatctgctgagtctatatttagacgagtacgaggaaactccatgggatgctttgaagtacctgatagcgggaatcaactacgggggccatgtgactgatgactgggatagacgactgctgacaacctacattaacgattatttttgcgatcaaagcctctcaacgccattccacagactctcagccctggagacatacttcatccccaaggacggctctttagcttcttataaagaatatatctcactgctgcccggaatggacccccccgaagcctttggtcagcaccctaatgcggatgttgccagccagattaccgaagcacagactttatttgatacattgctgtcattgcagccacagattaccccaactagagcagggggtcaaacccgggaggagaaagtgctggagctggctgccgacgtgaaacagaagattcctgagatgatcgattacgaaggtacccagaaactgctggctctggacccctcacccctgaatgtagttctgctccaggagattcagcgctacaacaccttgatgcagacaattcttttctcccttaccgatctcgagatcccaagttgtgtctcccataaaagcgagcgcgtagtcttagagctttccgcagtgaagcatcccagacagtag

SEQ ID NO: 206302 - DNA, 13284 bp, Artificial Sequence
  derived and/or modified sequence
atgagcagcaaggccgagaagaagcagcggctgagcggccggggctcttcccaagcttcatggtcaggccgggccacacgggcggcagtggcaacccaagagcagggaaacgcgcccgccgtttcggagcctgagctgcaggctgaactgccaaaagaggaaccggaaccccgtttggagggtcctcaggcacagtctgaggaatccgtcgagccggaggctgatgtgaaacccctctttctttcaagagctgccctgactggtctggcggacgctgtgtggacccaggaacatgacgctatactggagcactttgctcaggaccctaccgaaagtatcctgactatatttattgacccttgtttcggactgaagctcgagcttggaatgccagtgcagacccagaatcagctggtttattttatccggcaggcccccgtccccatcacctgggagaacttcgaggcaactgtacagttcggcaccgtccggggaccatacattccagccttgctccgactgcttggcggagtcttcgcccctcagatatttgcgaatactggatggcctgagtctatccgcaatcacttcgcgagtcatctccacaagttcctggcatgcttgaccgataccagatataaactcgaggggcatacagtgctctacatacctgcagaggccatgaatatgaagccagaaatggtgataaaggataaagagctggtgcagcgccttgagacgagcatgattcattggacccgccagattaaagagatgctaagtgcccaagaaacagtggagactggtgaaaatttgggcccgctcgaggaaatagaattctggcgcaatcggtgcatggacctgtccggcatcagcaagcagctggtgaaaaaaggtgtgaaacacgttgagagtattctccatctggcaaaatcatcatatttagctccattcatgaagctcgcgcagcagatccaggatggaagcaggcaggctcagagcaatctcacttttttatccatcctcaaagaaccgtaccaggaattggcatttatgaaacctaaagacattagcagtaagttgcccaaactgatcagcctcataaggatcatctgggtcaacagtccgcattacaatactcgcgagagactcacatctctcttccgaaaagtgtgtgactgccagtaccactttgctaggtgggaagacggcaaacagggtcctctgccgtgtttttttggagctcaagggcctcagatcacacggaacctgctggagattgaggatatatttcacaagaacctacatacactgagggcagtaaggggaggtattctcgatgtgaagaatacctgctggcacgaggattacaacaagtttcgagcgggcatcaaggacctggaagtgatgactcagaacctcattactagcgctttcgagctggtgcgggatgtcccccacggagtcctgctgctggacacattccatcgcctggcaagcagggaggcgataaaacgcacatatgacaagaaagccgttgatctatacatgttgttcaattcagagttggcgctggtgaaccgagagcgaaataagaaatggcctgatcttgagccttacgtggctcaatatagcggaaaagcacggtgggtgcacattcttaggaggcgaattgacagagtgatgacttgtctggcaggcgcccatttcttgcctaggatcggcacgggcaaggaatccgtgcatacataccagcagatggtccaggccattgatgaattggttcgcaaaacctttcaggagtggaccagctctctggataaggattgcattcgtcgtttagacaccccacttttgcggatctcacaggaaaaagccgggatgctggacgtgaatttcgataagtcccttctgatcttatttgctgaaattgattactgggagcgacttctgttcgaaacccctcattacgtcgttaacgttgcagaaagggcagaagaccttagaattctgagagagaatctactgctggtagctcgggactacaacaggattatcgccatgctcagcccagacgagcaggccctctttaaggaaaggatccgcctgctggacaagaagatacaccccggacttaaaaagctccactgggccttgaagggcgcaagcgctttctttattacagagtgtcggatacatgcctcgaaggtgcagatgattgttaatgagtttaaagcatcgacgctaaccatcggatggcgagcccaggagatgtccgaaaagctgctagtgcgaatttccgggaaacgtgtctatagggatttagaattcgaagaagatcagcgagaacacagagccgccgtgcagcagaagctgatgaatctgcaccaggacgttgtgaccatcatgacgaattcttacgaggtgttcaaaaacgacgggccagagatccagcagcaatggatgttgtatatgatccgcctcgatcggatgatggaagacgcattgcgactgaacgttaagtggagcttgcttgaactgagcaaagcaatcaacggagatggtaaaacatccccaaacccactattccaggtcctggtaatccttaagaacgatttgcagggtagcgtggcccaagtggaattttcacctaccctgcagacgctcgcaggggttgtgaacgatattggaaaccacctgttttctacaatcagcgtcttttgccatttgcctgacatcctgactaagagaaaactgcacagagagccaattcaaactgtggttgaacaagatgaagacatcaaaaagatccaaacacagatctcatctggaatgaccaataacgcaagcctgctgcagaactatcttaagacctgggatatgtatcgggagatctgggaaataaacaaggactcttttatccacagataccaacgcttgaacccgcccgtctcttcatttgttgccgacatagccaggtatacagaggtggctaataacgtgcaaaaagaagagactgtgaccaacatccagttcgtgctgctggactgtagtcatttgaaattctcactggtccagcactgcaatgagtggcaaaataaattcgctactctgttgcgtgagatggctgctggacgtctgctggaactccacacatacctgaaggaaaacgcggaaaagatctctagaccaccccagactttggaggagctcggtgtcagcctgcagctggttgacgctcttaaacacgatcttgctaacgtggagactcaaatacctcctattcatgaacagttcgctattttggagaagtatgaagtgccagtagaggatagcgtgttggagatgctcgatagcctcaatggtgagtgggtggtattccaacagaccctcctggactctaagcagatgctgaaaaagcacaaagagaaattcaaaaccggtctgattcactcagccgatgattttaagaaaaaggctcatacattgttggaggacttcgagtttaagggccattttacaagcaacgttgggtatatgtctgcactcgatcaaatcactcaggtgcgggcaatgttaatggccatgcgcgaggaagagaattctctgagagccaacctggggatctttaaaattgagcagcctccctcaaaggatctccaaaatctcgagaaagagttggacgccctccagcagatttgggaaatcgctagagattgggaggaaaactggaatgagtggaagacaggacgctttctcattttacagaccgagactatggaaactactgcgcatggcctgttcagacgcctcacgaaactagctaaggagtataaggataggaattgggagatcattgaaacaactcggagcaaaattgagcagtttaaacggacaatgccgctgatttccgatctcagaaatcccgccctgagggaaagacactgggatcaggtgcgggacgaaatccagagggaattcgatcaggaaagcgagtcgtttacattagagcagatcgtcgagctcgggatggatcagcacgtggagaaaattggcgagattagcgccagcgccaccaaggagctggccatcgaggttgctctccaaaacatagccaagacttgggacgtgacacagctcgacatcgtcccttataaagacaaggggcaccatcggttgcgtggcacagaagaggtgtttcaggccctggaagacaatcaagttgctctctcaaccatgaaagcttctcgcttcgttaaagcatttgagaaagatgtggatcactgggagcggtgcctttccctaatactggaggttatagagatgatactaacagtgcagcggcagtggatgtatttagaaaacatcttccttggggaagatattcgcaaacagctacctaatgagtccacgctgttcgaccaggtgaattcgaactggaaggccatcatggatcgtatgaacaaggataataacgctctgaggagtacccaccacccaggcttgttggacaccttgattgagatgaatacgatcctggaagatatccagaaatcactggatatgtatctggagaccaagagacacatattccctaggttttacttcctcagcaatgatgatctcctggaaattttggggcaatcgaggaaccctgaggctgtacagcctcatttaaagaagtgcttcgacaatattaagcttcttcgcattcagaaggtaggtggaccgtcttccaaatgggaagccgtggggatgttctccggtgacggcgagtacattgatttcctgcacagcgtgtttctggaaggccctgtcgagtcatggctgggggacgtcgagcagaccatgagggttactctcagagacctgttgaggaattgccacctcgctctgaggaaatttcttaataagcgggacaaatgggtgaaggagtgggcagggcaggtggtgatcacagcgtcacagatccaatggacagctgatgtaactaagtgtttacttactgcgaaagagagagccgataagaaaatccttaaagtgatgaagaagaaccaagtctcaattctaaacaagtattccgaggccatccgtggaaatctgacaaagatcatgaggttgaagattgtcgccttggttacaattgaaatccatgccagagacgtcctggagaagctttataagagtggtttgatggatgtcaattcctttgactggctgagccagctccggttttactgggagaaagatctggacgactgcgtgattaggcagacgaacacgcagtttcagtacaattacgagtatttagggaactctggcagattggtaatcactcccctgaccgataggtgctacatgaccctaactacagctctgcacctgcatcgcggcgggagcccgaaaggcccagctggcacgggaaagacggagacagtgaaggatctgggaaaagcgctggggatatacgtgatcgtagtcaactgtagtgaggggcttgactacaagtctatggggcgtatgtactcaggcctggcccaaaccggcgcttggggctgttttgatgagttcaaccgcattaatatcgaagtccttagtgtggtcgcccatcagattctgtgtatcttgagtgcacttgccgccggccttacgcatttccacttcgatggatttgagataaacctcgtgtggtcctgcgggatttttattactatgaatcccggatatgccggacgaacagagctgccagagaacttaaagagtatgtttcgccctattgccatggtggtgcccgactcgactttaatcgctgaaatcattctgtttggagaaggctttggcaactgtaaaatcctagccaagaaggtgtatacactttacagtctagccgtgcagcagttatcaaggcaggaccactacgattttggcctgcgcgctctgaccagtctgcttcgttatgcaggaaaaaagagaagactgcagccagatttgaccgacgaagaagtgctgcttctgagcatgcgcgacatgaacatagcaaaactgacctctgttgacgcgcccttattcaacgctatcgtgcaagacctatttcccaacattgaactccctgtcattgactacggcaaactgcgggagaccgtggaacaggaaattcgcgatatgggcctccagagtactccattcactctgacaaaggtcttccaactctatgaaacaaagaactctcgccacagtaccatgattgtggggtgcaccggttctgggaagacagccagctggcgcattcttcaggcctctctgtcaagtctttgtagggccggagaccctaactttaacatcgttcgagaattccccctgaaccccaaagctttgtctctcggcgagctctatggagagtatgacttgtccacgaatgagtggactgacggcatcttgagtagtgtcatgaggactgcctgcgctgatgagaagcccgatgaaaaatggattctgttcgatgggcctgttgacaccctgtggatagagaacatgaacagcgtaatggatgataataaagtacttaccctcataaacggcgagaggatagccatgcccgagcaggtgagcctgctgttcgaggtggaggacttggccatggcatcacctgctaccgtgagcagatgtgggatggtgtacacagactatgccgacctgggttggaagccttacgtgcagtcgtggctggagaagcggccaaaagcagaggtcgaaccactacagcgcatgtttgaaaagctgattaataagatgttagcgttcaagaaggataattgcaaagagttggtaccattgccagagtattcaggcatcacaagcctgtgcaaactctattctgccctggccacaccggagaacggcgtaaaccccgctgacggggaaaattacgttactatggtggagatgacatttgtattcagcatgatttggagtgtgtgcgccagcgtggatgaggagggacgtaagcgaatcgatagctacctgagagagattgagggtagctttcccaacaaagatacagtttacgaatattttgtggatccgaaaattaggagctggacctcttttgaggataaactgccaaaatcatggagataccccccgaatgcaccattttacaagattatggtgcctacggttgatactgtcaggtataattatttagtatcatctttggtggctaatcagaaccctatccttcttgtcggacctgtgggaaccgggaagacctcgatcgctcagtctgttctccagtccctgccctcttcacagtggtccgttctggtggtcaatatgtccgctcagacaacttcaaataatgtgcaatcaatcatcgagagtagagtcgaaaaaaggacaaagggtgtctacgtaccattcgggggcaaaagtatgatcacatttatggatgacctgaacatgccagccaaagacatgtttgggagccagcccccgctggagctgatcaggctatggattgactacggattttggtacgaccggacaaaacaaactattaagtatattagagagatgttcctgatggcagccatgggtcctccgggaggggggaggacagtgatctcccctcgactacgcagtcggttcaacattataaatatgacattccccacaaagagccaaattatcagaattttcggtactatgatcaatcagaaactacaggacttcgaggaggaggttaaacctataggaaacgtcgtgaccgaggccaccctggatatgtataacactgtagttcagcgcttcctgccgactccaaccaagatgcactatctgtttaacctgcgggacatctcgaaggtgttccagggtatgctgcgagcgaataaagacttccatgatactaaaagtagcataacccgactgtggattcacgaatgtttccgtgtgttcagcgataggctggtcgacgctgccgacactgaagcttttatgggtatcattagcgataaactggggtccttcttcgacctgaccttccaccatctgtgtccttctaagagaccccccatcttcggagactttctgaaagagccaaaagtgtacgaggacctgaccgacctgacagttcttaagaccgtgatggaaaccgcgctgaatgagtacaacctgtctccttcagtggtcccgatgcagcttgtgctgtttagagaagcgatcgaacatattacccgaattgtgagagtcattggacagccccgtggaaacatgcttctagtgggaattggaggctctggacgccagtccctcgccaggctcgcatcctctatctgcgactacactaccttccagatcgaagttaccaagcattaccgcaagcaagaattcagggatgatattaaacgtctgtaccggcaagccggcgtggaactcaaaacaacaagtttcattttcgttgatacccaaatagccgacgagagctttttggaggacatcaacaatattctatctagtggtgaggtccccaacctgtataagccagacgagttcgaggagattcagtcccacataattgaccaggcccgcgtagaacaggtaccggaatccagcgactccttgtttgcctatctgatcgaaagagtccagaacaatttacacatcgtgctgtgtctgagcccaatgggagatcctttccggaattggattcgccagtacccagcattggttaattgcaccacaataaattggtttagcgaatggccgcaagaagctcttttggaggtggcagaaaaatgcctgatcggagttgacttgggaacacaagagaacattcaccgcaaggtagcccagatcttcgtcacaatgcactggagcgttgcccaatatagtcagaagatgctgctggagctgaggagacataactacgtgaccccaacgaagtatctcgagctgctcagcggctataaaaaacttctgggggagaaacggcaggaactgcttgcccaggctaataagcttcgcactggtctgtttaaaatcgacgaaacccgtgaaaaggtccaggtaatgtcactcgaactggaggacgcaaagaagaaggtggcggagtttcagaagcagtgcgaagaatacctggtgattattgtgcagcaaaaacgagaggcagatgaacagcagaaggcagtcaccgctaactctgagaaaattgcagtagaggagattaaatgccaggctcttgctgataacgcccagaaagacttagaggaagccctaccagcattagaggaggcgatgagagcccttgaaagtctgaacaagaaggatatcggcgaaattaagtcctatgggaggccaccagctcaggtcgagatagtaatgcaagccgtaatgatattacggggcaatgagcctacctgggctgaggccaaacggcagcttggagaacaaaatttcatcaagagcctcattaactttgacaaagacaatatcagcgacaaggtgttaaagaaaataggagcctattgtgcacagccagattttcagcctgatattatcggcagggtttctctcgccgccaaatctctgtgtatgtgggtgcgggctatggaactgtacggaagactctatagagtcgttgagccgaagcgtattagaatgaatgcggctctggcacagctccgtgagaaacaagccgctctcgctgaagctcaggaaaagctaagagaagtggctgaaaaattggagatgctgaagaagcagtatgatgagaagctggcccagaaagaggagttgcggaagaagtctgaagagatggaacttaagctcgagagggctgggatgttggtctcaggactggccggcgagaaggctaggtgggaagaaacggtccagggcctcgaagaagacctgggctacttggtgggcgattgtctgcttgcagccgcattcctcagttacatggggccctttctgaccaattacagagacgaaattgttaaccagatctggattgggaaaatctgggaactacaagtgccatgtagcccatcctttgccatcgataactttctgtgtaacccaaccaaagttagagattggaacattcaggggttaccgagcgacgccttctctacggagaacggaattattgttacacggggtaatcggtgggcactaatgatcgacccacaggcccaagcattaaagtggatcaagaacatggaagggggccaaggtctgaaaattattgatcttcagatgtctgactatttgcgcatcctggaacacgctattcatttcggataccccgttctcctccagaacgtgcaggagtatctggaccccaccttgaacccgatgctgaacaagtctgttgctcggatcggaggtcggttgctaatgagaattggagataaagaggtggagtacaacactaactttcgcttttacatcactaccaagctgagcaatccccactattcacccgaaactagcgctaagaccaccattgtgaatttcgcagtgaaagagcaaggactggaggcgcagcttctgggaatagtcgtgagaaaagagcgccctgagctggaagaacagaaagattctctggtcattaacatagccgctggcaaaaggaagctgaaagaactggaggacgaaatactgcgcttgctgaacgaggcgactggcagtcttttggacgatgtgcagctggttaacactctccacaccagtaagatcactgctactgaagtaaccgagcagctagaaacctctgagactacagagatcaacaccgacctggccagagaggcatatcgtccttgcgcacagagagcgtctattctgttttttgttttgaatgacatgggttgcatcgatccgatgtaccaattctccctggatgcgtatatctcactgtttattctgagtattgataaatctcatcgaagcaacaaacttgaagacagaatcgactacctaaacgattaccatacatatgccgtctacagatatacttgtagaaccctgttcgaaagacataaactgctcttctcgtttcacatgtgcgccaaaatcctggagacatccggtaagttaaacatggatgaatataacttctttctgagaggaggcgttgtgctggacagggagggtcagatggacaatccatgtagttcatggctggccgatgcatactgggataacatcactgaactggataagctgacaaacttccacgggcttatgaacagcttcgaacagtacccacgggactggcacctgtggtataccaacgccgcccctgagaaggccatgttaccaggcgaatgggagaatgcttgcaatgagatgcaacggatgctgattgtgcggagcctgagacaggaccgcgtggcattctgcgtgacaagcttcatcattacaaacctggggagtcgatttatagagcccccggtcctgaatatgaaaagcgtcctcgaagactccaccccgcgcagccccctggtctttatactgtcgcccggagtagatccaacatcagcgttactgcagctcgcagagcatatgggaatggctcagcgattccacgcactgagcctgggtcagggacaggcccctatcgccgcaaggttactgcgagagggcgtcacgcagggccactgggtctttctggccaattgtcacctaagtctgagctggatgcctaatctcgataaacttgtcgagcagttacaagttgaggaccctcacccttctttcaggctgtggctttcgtctatcccccaccctgattttcctatttcgattctccaagtttccataaaaatgacaacagaaccaccgaagggcctgaaggcgaatatgacccggttataccagctgatgtccgagcctcaattttcgagatgctccaaaccagctaagtataagaagctgctttttagcctctgcttcttccactcggtgttactggagcggaaaaagttcctgcagcttggctggaacatcatctacgggttcaatgatagtgatttcgaggtgagcgagaatttactcagtctttatctggacgagtatgaggaaaccccctgggacgcgttaaagtatcttatcgctggcatcaactatggtggacacgtgactgacgattgggatcgccgcctgctcactacttatataaacgattatttctgcgaccagtcactgagcacaccctttcacagactgtctgcactggaaacctacttcattccaaaggacggctcactggctagctacaaagagtacatatcactcctgcccggaatggaccctcccgaggctttcgggcagcatccgaatgccgatgtcgcttctcagatcaccgaagcacagaccctttttgataccctcttatctctacaacctcagattacccctacaagagcgggcggtcagaccagagaagagaaggtgctggaacttgccgctgacgtgaagcaaaagatccctgaaatgatagactacgaaggcacccaaaagctcctcgcccttgacccatcccctttaaatgtggttttgctacaggagattcaacggtacaataccctaatgcagacaattttgttttcgctgacagatctcgagaaaggtattcagggcttaattgtgatgtctacctccctggaagaaatctttaattgcatttttgatgcacacgtgccaccgctgtggggcaaggcgtaccccagtcagaagcctcttgcagcttggaccagggatctggccatgcgggtcgagcaatttgagctctgggcttcccgggcacgacctccagtcattttttggctgtctggcttcaccttccccactgggttcctaacagcggtcctccaaagtagtgcccgccaaaacaacgtgagcgttgatagcttgagctgggaattcatcgtttctaccgttgacgatagtaacctcgtgtatccgccaaaagacggggtgtgggtccgggggctgtacctggaaggcgccggttgggaccggaaaaacagctgtttggtagaagcagagccaatgcagctggtgtgtttgatgccaacgatacatttccgccctgccgagagtaggaagaaatcagccaaaggtatgtactcatgtccatgttactattatcctaaccgtgccggctcttccgaccgggccagctttgttattggcatcgacctgcgcagcggagccatgacccccgaccattggatcaagcgtgggactgcactactcatgagcctcgattcctag

SEQ ID NO: 206303 - DNA, 13284 bp, Artificial Sequence
  derived and/or modified sequence
atgtcttcaaaagccgaaaaaaaacaacggcttagtggacgcggatcaagccaagcgtcgtggtccggtagagcgacgcgggcagctgtggccacgcaggaacaagggaacgctcctgctgtttccgaaccagagctgcaggccgagctacccaaggaagaacccgaaccaagactggaaggcccacaagctcagagcgaggagagcgtggaacctgaggccgacgttaaacccctgttcttgtcccgcgctgccctaactgggctagccgacgccgtgtggactcaagagcacgacgcaatcctcgagcacttcgctcaggaccccactgagtccatcctcacaatctttatcgacccctgctttggccttaagctcgaacttgggatgcccgtgcagacccagaaccaactggtatacttcatccggcaggccccagtgcctatcacctgggagaatttcgaggccaccgtgcagttcggcactgtgagaggcccttacatccccgctctgctcagactgctggggggtgtctttgcgccacagatcttcgccaataccgggtggcccgaaagcatacggaaccattttgcctctcatcttcataagttcctggcatgcctgaccgatacacgatataaactcgaaggccacactgtgttgtacattcccgctgaggctatgaacatgaagcccgagatggtcattaaggacaaggaactcgtgcaacggctggagactagcatgatccactggacaagacagatcaaggagatgctttctgcccaggagacggttgagacaggcgagaacctgggtccactggaagagatcgaattctggcggaaccggtgcatggacctgtccgggatctccaaacagctcgtgaagaaaggcgttaagcatgtggagtccattctgcacctagccaaaagttcttatctagccccttttatgaagttagcacagcagatccaggacggttcccggcaggctcaaagcaacctgaccttccttagcatacttaaagaaccttaccaagagctggccttcatgaagccaaaggacatctcaagcaaattacccaagctcatctccctgattagaataatctgggttaattctccccattacaacacccgggaacgtctgacaagcctgtttaggaaagtctgcgactgccagtatcattttgccaggtgggaggacggcaaacagggaccccttccgtgtttcttcggtgcccaagggccacagatcaccagaaacttgttagaaattgaggacattttccataaaaaccttcataccctgcgtgccgttcgcggaggaattctggacgttaaaaacacatgctggcacgaagactataacaaattccgggctggaattaaggatctggaggtcatgacgcaaaacctaataacctctgcgtttgaactggttagggacgtcccccatggtgtgctcctgctcgatacctttcatcggctggcatctcgggaagctattaaaagaacttacgacaaaaaggccgtggatctatatatgctgttcaatagcgaactggcgttggtgaatagagaaaggaataagaaatggcccgacctggagccgtatgtcgcccagtactctggcaaagcaagatgggttcacatccttcgcagacgtatcgaccgcgtcatgacttgcctggccggtgcgcattttcttccgagaataggtaccggcaaagagagtgtacacacttatcaacagatggtccaagcgatagacgaacttgtccgtaaaaccttccaggaatggacctcgagccttgacaaagactgtattagacgactcgatactcctttgttaagaatcagccaagagaaggccggaatgctggacgtgaattttgacaaaagcttgctgatcttatttgcagagattgactactgggagcgcctcctcttcgaaactcctcactatgtggtgaatgttgcagagcgggctgaggatctaaggattctcagggagaacttactcctggtggctcgagattataacagaattatagcgatgctcagcccagacgagcaggccctgtttaaggagagaatcagacttcttgacaagaagatccacccgggacttaaaaaactccactgggccctgaagggtgcttccgcatttttcatcaccgaatgccgcatccacgcctccaaggtgcagatgatagtcaatgaattcaaggcctccacactcaccattggatggcgcgctcaagaaatgagcgagaagcttctagtgcggatctccggaaaaagagtttatagggatctcgaattcgaagaagaccagcgtgagcatagagccgcagtccagcagaagctgatgaacctgcaccaggatgtggtgaccattatgactaactcatacgaagtcttcaagaacgatggaccggaaatccagcagcaatggatgctgtatatgatcagactcgaccgcatgatggaggacgctctcagactgaacgtgaaatggtcgttgctggagctgagcaaggccatcaatggcgacgggaagacttcacctaaccctctttttcaggtgcttgtgatcctcaaaaacgatctccagggctccgtggctcaggtcgagttctctcccaccctgcaaacgctggctggggtagtgaatgatattgggaaccatttattttcaacaatcagcgtattctgccatctgccggacatcctcacaaaacgcaagctgcaccgcgagcccatacagactgtagtagaacaggacgaggacataaagaagattcagacccagatttctagtggcatgactaacaatgcatcgttactgcagaattatctcaagacctgggacatgtatcgcgagatctgggagatcaataaagattcatttattcacaggtaccaacgcctgaatcccccagtgtcgtcattcgttgccgacatcgcacggtatacggaggtcgccaataatgtgcagaaggaggagacggtcaccaacattcagttcgtgctactcgactgttctcatcttaaatttagtctggtccagcattgcaacgagtggcagaataagttcgctaccctcctacgcgaaatggccgcagggagactgcttgagctgcacacctatttaaaagagaatgccgaaaagatctcgcgaccacctcagacattagaagaactcggtgtgtcgctgcagttagtggatgcactgaaacatgacctcgccaatgtggagactcagattcccccaatacatgaacagtttgctattcttgagaagtatgaggttcctgtcgaagatagcgtgcttgaaatgttggactcattgaacggggagtgggttgtgtttcagcaaacactccttgatagcaaacagatgctgaagaagcacaaagagaaatttaaaacaggtctgattcacagtgcagatgattttaaaaagaaggcacatacactgttggaagacttcgagttcaaagggcacttcacctccaacgtcggatatatgtccgcccttgatcagattacgcaggtgagagccatgctgatggccatgcgagaagaagagaatagcctcagagcgaatctgggcatattcaaaatcgaacagccgcctagtaaggacctgcagaacctagaaaaagaactcgatgctctccaacagatatgggagatcgcccgtgattgggaggaaaactggaatgaatggaagaccggccgattcctgatccttcagaccgagaccatggagactaccgctcatggactcttcagaagactaacaaaactggccaaagaatataaggatcgcaattgggagatcattgaaacaacccgatctaagattgagcaattcaagcgcacaatgcctctgataagtgacctgcgcaaccctgccttaagggagcggcattgggatcaagtgcgcgacgagattcagagagagttcgaccaggagtccgagagtttcacactagagcaaattgtagaacttggtatggaccagcatgttgaaaagattggggaaattagtgccagcgccacaaaggaactcgctatcgaggtcgcacttcagaacatagcaaaaacctgggatgtaacccagcttgacattgtcccctacaaggataagggccatcaccggctccgcggaacagaagaggtgtttcaggccctggaggacaaccaagttgctctgagtaccatgaaagcatccaggttcgtgaaggcctttgaaaaagacgtggatcactgggagcgctgcctttcccttatcctcgaggtcatcgagatgattctgaccgtgcaacgtcagtggatgtatcttgagaatatctttttgggtgaggacatccgcaaacaactgcccaacgagtcaactctattcgaccaagttaattctaattggaaggcaatcatggatcgtatgaacaaagacaacaacgcgctcagatctacccaccatccgggtcttctggacactctcatcgagatgaatactatcctggaagacatccagaaatccctggacatgtacctggagaccaaacggcacatctttcctcgcttttatttcctcagcaatgacgacctcttggaaatcctaggtcagtctagaaatcctgaggccgttcagccacacctcaagaaatgctttgataatatcaaactcttgcgaatccagaaagtgggagggccatcttccaagtgggaggccgttggtatgttctccggcgacggcgagtatatcgattttcttcattcggttttcctcgaaggcccagtagagtcatggctgggcgatgtcgaacagaccatgcgtgtgactctgagagatctcctcaggaactgtcacctggctctacgcaaatttctgaacaagagggataaatgggtgaaggagtgggcaggtcaggtagtgattaccgcctctcagatccaatggactgctgacgttaccaagtgtctcctcaccgctaaggaaagggcagataagaagatcctgaaggtgatgaagaagaaccaggtaagcatacttaataagtatagcgaggctatccgcggaaatctcacgaagattatgcgcctgaagatcgtcgctctagtcaccatcgaaattcacgcaagagatgttttagagaaactctacaagtcgggcctgatggatgtgaatagttttgactggctctctcaactgcgtttctactgggaaaaggatctggatgactgtgttatccgccagacaaacactcagtttcagtacaattatgagtatttgggaaattcagggagactggtaatcacaccgctcacagacaggtgttatatgactctaaccacggctttacacctgcacagaggcggaagcccaaaaggccctgctggcacaggtaaaacagaaacagtaaaggatctcggaaaggcacttgggatttacgttattgttgtgaactgctccgagggattggattataagagcatggggagaatgtactccggcctggcccagactggcgcatggggatgcttcgacgaatttaatcgcataaacatcgaagtgcttagcgtggtggcgcatcaaattttatgcatcctttcagccctggctgccggactgacacactttcacttcgatgggtttgagatcaaccttgtgtggtcctgcggaattttcatcacgatgaatcccggatacgctggcagaacggaactacctgagaacctgaaatctatgtttaggcctattgctatggttgtgcctgacagcactctgatcgccgaaatcatactcttcggcgaggggtttggtaactgcaagatactcgcaaaaaaagtctatactttgtattccttggcagtgcagcagctcagtagacaggaccactatgactttggtctgcgggctctgacaagcctgctgaggtatgccggaaagaagagaagactgcagcctgacctcaccgacgaagaagtgcttcttctttccatgcgtgatatgaatatcgccaaactgacaagtgtcgatgcaccattgttcaacgcgattgtccaggacctctttccaaatattgagctgcccgtgatagattatgggaaactcagagaaaccgtcgaacaagaaatccgggatatgggattgcaatctacacccttcacactgaccaaagtttttcagctctacgagacgaaaaattcccggcatagtaccatgatagtcggctgcactggctctggcaagacagcgtcttggcgtatactccaggcctcactatcctctctgtgtagagctggcgatccaaacttcaatatagtacgtgaatttccactgaaccccaaggccttgtcactgggcgaactctacggcgaatacgatttgagcaccaatgagtggacagacgggattctgtccagcgttatgcgcacagcgtgcgccgacgagaagccagatgagaagtggatactgttcgacggccctgtggataccctgtggattgagaacatgaattccgtgatggacgataataaggtgttgacattgatcaacggcgaaagaattgccatgcccgaacaggtctccctgctgtttgaggtggaggacttagctatggcaagccccgctacagtgtcccgatgtgggatggtgtacaccgactacgctgacctaggctggaagccatacgttcagtcttggctggagaagcgaccaaaggcggaggtggagcctctgcagcgcatgttcgaaaaactcatcaacaaaatgctcgccttcaaaaaggacaactgcaaggagttagtgccgcttcccgagtactccggcatcacctccctgtgtaaactctacagcgctctcgccacaccagagaatggagtaaatcctgccgatggcgagaactatgttactatggtggagatgacttttgtgtttagcatgatttggagcgtctgcgcgagtgttgacgaagagggtcgaaagcgcattgatagctacctccgagagatcgagggctcatttcccaataaggacaccgtgtacgaatactttgtggatcccaagatccggtcatggacttcttttgaggacaaactccctaagagctggcggtaccctcccaacgccccattttataagatcatggtcccaactgtggacaccgtcaggtacaactatctggttagcagtcttgttgctaaccagaaccctattctgctggtgggacccgtaggtaccgggaaaaccagcattgcccaaagcgtactccagtcactaccatctagccaatggtctgtcctcgttgtgaatatgtcagcccaaaccaccagcaacaacgtgcaatcaatcatagagtccagagtggaaaagaggaccaaaggagtttatgtacccttcgggggaaagtctatgattacatttatggacgatttaaatatgcccgcaaaggatatgttcggctcccagcctccgctagaactgatccgcttgtggatcgactatggcttctggtatgataggaccaagcaaactattaaatatatcagggaaatgtttctcatggccgctatgggccctccgggaggcggacgcaccgtcatctcccccagactgcggagcagattcaacatcataaatatgaccttcccgaccaagtcacaaatcatcagaatattcggcactatgatcaaccagaaactccaggactttgaggaagaggttaagcccattggcaacgtcgtaactgaagccacccttgatatgtataataccgtggtgcagcggtttttgcctactcctacgaaaatgcattacctattcaatctgagagacatcagcaaagttttccagggcatgcttagagctaacaaagatttccatgatactaaatccagcattactcgcctgtggattcacgaatgcttccgggtgttcagcgaccgactggtggatgccgcagacactgaggcctttatggggatcattagcgacaaactcggttcgttctttgacctcacattccatcacctttgtccatcgaagagaccacccatatttggagatttcttgaaagagccaaaagtttacgaagatctgacagatttgaccgtcctgaagaccgtcatggaaaccgctctgaacgaatataatctgagcccatccgtggtccctatgcaactcgtgctttttagagaggcaatagagcatatcacgaggatcgtgagggttatagggcaacctcggggaaacatgcttcttgtcggtataggcggaagcggcaggcagagtctagctaggcttgcgagttcgatttgtgattataccacttttcagatcgaagtcaccaagcactaccgcaagcaggagttccgggacgacattaagagactgtatcgccaggccggagtcgaattaaagacaaccagtttcattttcgttgacacacagatcgccgacgagagctttctcgaggacattaataacatattgagctccggcgaggttcccaacctctacaagccagacgagttcgaagaaatccagagccatatcatcgatcaggctagggtggaacaagttcctgaaagctcagatagcctcttcgcctatcttatcgaacgggtgcagaacaacctgcacatcgttctgtgtctatcacccatgggtgacccttttcggaattggatcaggcagtatccagcactggtaaattgtacgacaatcaactggtttagcgaatggcctcaagaagcactgttagaggtggcggagaagtgccttattggtgtcgatcttggcactcaggaaaacattcatagaaaagtcgcacagattttcgtcaccatgcactggagcgtagcccaatactcccaaaagatgctgcttgagttgcgcaggcataactacgtcacaccgaccaagtatctggaactactgtctggatataagaaattgctgggcgaaaagcgtcaggagttactcgcccaggctaacaaactgcggacaggcctttttaaaattgatgaaacccgggagaaggtgcaggttatgtctttagagctggaggacgccaagaaaaaagtggcagagtttcagaagcagtgcgaggaatacctggtaatcattgtgcagcagaagagagaagccgatgaacagcagaaggccgtcactgccaattccgagaaaattgctgtcgaggaaattaagtgtcaggccctggccgacaacgcacagaaagacctcgaagaggctctgcctgccctagaagaggccatgagagctctcgagtccttgaataagaaggatatcggggagatcaagtcgtacgggaggccacctgctcaagtagaaatcgtgatgcaagctgtcatgattttgcgaggcaacgaaccgacatgggccgaggccaagcggcagctcggggagcagaattttatcaagtctctgattaacttcgataaagacaatataagcgacaaagtactgaagaagattggcgcttattgtgctcaaccagacttccaacctgatataataggtagggtatctcttgccgcaaaatcgctgtgtatgtgggtgagggccatggaactctatggcagactttaccgtgttgtagaacccaaacgcatccgtatgaacgcagctcttgcccagttaagagagaagcaggccgctttagccgaagcccaagaaaagttgagggaggtagccgagaaactcgagatgctgaagaaacagtatgacgagaaattagctcagaaagaggagctgaggaagaagtccgaggagatggagctgaagctcgaacgcgctggcatgttagtttcaggccttgccggagaaaaggcacgctgggaagagaccgtgcaaggcctagaggaggacctgggatacctggtgggtgactgtcttcttgccgctgcttttttgtcctacatgggaccattcttgactaattacagagacgagatcgtgaaccagatctggatcggaaagatctgggagctgcaggtgccgtgtagcccaagcttcgcaatcgacaatttcctctgcaacccgaccaaagttagggattggaacatacagggtttgccttctgatgccttctccaccgagaatggcatcattgtcaccagaggtaatcggtgggccttaatgatcgacccacaggcccaggctcttaaatggatcaagaacatggagggcggacaagggcttaagataattgaccttcagatgtctgattatctgcggattctggagcacgcaatccatttcggctatcctgtgttgctccagaacgtgcaagagtatcttgaccccacgctcaatcctatgctgaataaatcggtagccagaattggaggacgactgctgatgcggatcggcgacaaggaagttgaatacaacaccaattttcggttttacattaccaccaagctctctaatccccactactctcccgaaacgtcagccaaaacaactattgttaacttcgccgtgaaggaacaaggcctggaagcgcaattgttgggtatcgtcgtccgaaaggagcgtccagaattggaggagcagaaagattccctagtcattaatattgcagcaggcaagaggaagctcaaggagctggaggatgaaatcctgagactacttaacgaagccactggttccctattagatgacgtgcagttagttaatacattgcacacatcgaaaatcacagctacagaggtgactgaacaactggaaacatcggaaaccacggaaattaacactgacctggctcgggaggcatatagaccatgcgcccagagagccagcatcctgttcttcgtcttgaatgatatgggatgtatcgacccaatgtatcagttctctctggatgcatatatctcgctttttatcctcagcatcgacaaaagccatagatcgaacaaactggaggaccgaattgactacctcaacgactatcacacatatgctgtgtaccgatacacctgcagaacgctgtttgagagacataaactattgttttcctttcatatgtgcgcaaagatactggagacatcaggcaaattgaacatggatgaatataacttctttctgcgaggaggtgtggttctagaccgggagggccagatggataacccatgctcttcctggttggccgacgcatattgggacaatataacagagctagataaactcaccaacttccacggtctgatgaactcttttgagcaataccccagagattggcatttgtggtataccaacgccgctcctgaaaaagccatgttgcccggtgagtgggagaacgcctgtaatgagatgcagcgcatgctcatagttcgatcgctgcggcaagaccgagtcgcattttgcgtgacttccttcatcataactaacctgggatctcgcttcattgaacccccagttctgaatatgaagtctgtgttggaggattctaccccgagatctcccctcgtgtttatactttcccccggagtggatcccacgtcagctctcctgcaacttgcagagcatatgggaatggctcagagatttcatgctctgtccctggggcaggggcaggcaccaattgcggcacggctgcttcgagagggggtgactcaggggcattgggttttcctggcaaactgccacctctccctgagctggatgccaaatctagacaagctagtggaacagcttcaggttgaagacccccacccaagcttccgcctctggctgtcgtccatccctcatccagattttcctatctccattcttcaggtgagtattaaaatgaccacagaaccacccaaaggactgaaggctaatatgacccgcctgtatcaactgatgtcggagccacagttctcgaggtgtagcaagccagcgaaatataagaagcttctgttttccctgtgtttttttcactccgtgctgctggagcgaaaaaagttcctgcagcttggatggaacatcatctacggatttaatgattcagactttgaagtgtctgaaaatctgctgagcctgtatctagatgagtacgaggagacgccttgggacgctctcaagtacttaatcgcaggcatcaactatggtggtcacgtcactgacgattgggatcgaagacttctcacgacctacataaacgactatttttgcgaccagagcctgtctactcccttccataggctgtctgcactcgagacatattttatccctaaggacggctctctcgcgagctacaaggagtacatctccctgctgccaggaatggatccacccgaagccttcggccaacatcctaacgcagacgtcgcttcccagatcactgaagcccagaccctgtttgatactctgcttagcctgcagcctcaaattaccccaacccgggctggtggccaaaccagagaagagaaggttctggaactggcagcagatgtgaaacagaagatcccagaaatgatcgattacgaggggacccagaagttgctagcgctggatccttcacccctcaatgtggtgttactgcaggagattcagaggtataataccctgatgcaaactatcctcttttcactcactgacctcgagaagggaattcaaggcctcatcgtgatgagtacaagcttagaggaaatcttcaactgcattttcgatgcccacgtgccccctctctggggtaaagcgtatccaagtcagaaaccactcgctgcatggactcgcgacctagctatgagggtagagcagtttgagctctgggcaagcagggcccgtccccctgtcatcttctggctctcaggttttacattccccaccgggtttctcaccgccgtgctgcagagctccgcaaggcagaataatgtttcggtggactcactcagctgggagttcatagtgtcaacggtcgacgacagcaatctggtttatccgcctaaagatggcgtgtgggttaggggcctctatctcgagggcgctggctgggacaggaaaaattcatgtcttgtggaggctgagcctatgcagcttgtttgtctgatgccgactatccatttcaggcctgcagagtcccgcaagaaatctgcgaagggtatgtacagctgcccatgctactattatcccaaccgggctggtagctctgatcgtgctagcttcgtgatcggcatcgaccttagaagtggcgctatgacaccagatcattggattaagcgcggtacagcactcttgatgtccctggatagctac

SEQ ID NO: 206304 - DNA, 12591 bp, Artificial Sequence
  derived and/or modified sequence
atgagtagcaaagccgaaaaaaaacagagattgtccggcagaggatcctctcaggccagctggagcggacgggctacaagggccgcagtggcaactcaggagcaggggaatgccccagctgtgtccgaacctgaactacaagccgaactccctaaggaagagcctgagcctagactggagggcccacaagctcagagtgaagaatctgttgagccggaggccgacgtgaaaccactgtttctgagtagggcagccttgaccgggttggctgatgccgtgtggacccaggagcatgacgcaatcctggaacactttgctcaggaccccacagagtctatcctgaccatatttatcgatccctgctttggattaaagctagagctcggcatgccagtccagacccagaatcaactggtgtatttcattcgccaggccccagtgcccatcacttgggaaaatttcgaggcaactgtccaatttgggacggtcaggggtccttacatcccagcactgctgcggttgctgggcggtgtgttcgcacctcagatctttgccaatactggatggcctgaatctataagaaatcacttcgcgtcacacctgcacaaatttcttgcttgcctgactgacacgagatacaaactagagggccataccgtgttgtacattcctgctgaagccatgaacatgaagccggaaatggtgatcaaagataaggagctcgtccagagactcgaaacttctatgatccattggaccaggcaaattaaagaaatgttgagcgcccaggagacagtcgagacaggagagaatctcgggcctctggaagagattgagttctggaggaatcggtgtatggacctgagcggtattagcaagcagctagtgaagaagggagtgaaacatgtcgagagcatcttacatctcgcaaaaagtagttacttagcgccatttatgaagcttgcccagcagatccaagatgggagtaggcaggcacaatccaatctgacttttctgagtattctgaaggagccttatcaggagctggccttcatgaaaccaaaggatatctccagcaaactgcccaagctgattagcctaataagaattatttgggtcaattccccccactacaacacacgcgagcggctgaccagcctgttccggaaggtctgtgactgtcagtaccactttgctcggtgggaggatggtaagcagggccctttgccttgcttcttcggcgctcaggggcctcaaatcactcgtaatcttctggaaatcgaggacatttttcacaagaatcttcacacactccgggctgtccgcggaggcattttggacgtgaagaatacttgctggcatgaggactataacaaattcagggccggaattaaggatctcgaagtgatgacccagaatctgattacatccgcctttgagttggtgcgggatgttccccacggcgtgctcctgctcgacacattccatcgcctggcgtcaagggaggctattaaaaggacctatgacaagaaggccgtggacctgtacatgctgtttaactccgaactggccctcgtcaacagggaacgcaataaaaagtggccagatctcgaaccctacgtggctcagtacagcggtaaagctagatgggtgcatattctgaggaggcgaattgaccgggtgatgacctgtctggccggagcccatttccttcccaggattgggacagggaaggagtccgtacacacataccagcagatggttcaggctatcgatgaactggttcggaagacattccaggagtggacttctagtttggacaaagattgcattaggcgtctcgatactcctttgttgcgcatctctcaggagaaggcgggaatgctcgatgtgaactttgacaagagcctcttaattctattcgcggagatcgattactgggagcgcttactgttcgaaactcctcactacgtggtgaacgtggcggagcgagccgaggatctccgcatccttcgggagaacctgttattagtggctcgggactacaataggatcatagcgatgctgagcccggacgagcaagcactattcaaagagagaatcaggctactcgataaaaaaatccacccaggccttaaaaaactgcactgggcgctaaaaggggctagcgccttcttcataactgaatgccgaatccatgcctcaaaggtccagatgatcgtgaacgagttcaaggcgagtacgctcactatcgggtggagggcccaggagatgtctgaaaagctactggtcagaataagtggcaagcgcgtttaccgagatctggaatttgaggaggaccaacgagaacaccgcgcagctgtccagcaaaagctaatgaacctgcaccaagatgtggtcaccatcatgacgaactcctacgaggtgtttaaaaatgatggcccagagatccagcagcagtggatgctctatatgatccgcctcgataggatgatggaggatgctctaagactgaatgtaaagtggagtttgctagaacttagtaaggccatcaatggagacggcaagaccagtcccaaccctctcttccaggtcctagtcatcctgaaaaatgacttacaaggcagcgtggcgcaggtcgagttttccccaactctccagacattggccggagtggtcaatgacatcgggaaccatctctttagtacgatatccgtgttctgccatcttccagacattctcactaaaagaaaattgcacagagaacctattcagaccgtggttgaacaggatgaggacataaaaaaaattcaaacccaaatctccagcgggatgactaataacgcgagccttcttcagaactatctgaagacatgggatatgtatcgcgagatctgggagattaataaggatagtttcattcaccgatatcagcggctaaatccaccagtctccagtttcgtggctgatatcgctcgatacaccgaggtggccaataacgtgcagaaagaggaaactgtcacaaatatccaattcgtgctgctggattgctcccacctcaaattttctctggtgcagcactgtaacgagtggcaaaacaaatttgcaactctcttgcgggagatggctgccggacgattgctagagcttcacacatacttaaaggagaatgcggagaaaatctctagaccacctcagacactcgaggagttaggcgtctctctgcaattagtcgatgcattaaaacacgatctggcaaatgtcgaaacccaaattccaccgatccatgagcagttcgcgatcctcgagaaatatgaagtaccagtagaggactccgtgctcgagatgcttgattcactaaacggtgaatgggtggtctttcagcagactttgctcgactcaaagcaaatgcttaagaagcacaaggagaaattcaagactggcctgattcattctgcggatgattttaaaaagaaagcccatacgttgctagaagactttgagttcaaaggacatttcacctccaatgtcggctatatgagcgccctggatcaaatcacccaggtcagagccatgcttatggccatgcgggaggaggaaaattctctgagggccaacctggggatctttaagattgagcaacctccatcaaaggatctacaaaatctagagaaggaattagatgcactccagcaaatttgggaaattgctagagattgggaagagaactggaacgagtggaagaccggacgttttcttatcttgcagaccgagaccatggagaccactgctcatgggctcttccggcgactcacaaaactggctaaggaatataaggatagaaactgggagataatcgaaactacccggtccaagattgaacagttcaagaggaccatgccactgatcagcgacctccgcaatccagccctgagggagaggcactgggaccaggtgcgagatgaaatccagagggaatttgaccaggaaagcgagagttttacattggaacagattgtggaactgggtatggatcaacacgtggagaagattggtgaaatctccgcgtcagcaactaaggaactggctatcgaggtggccctgcagaatatcgccaagacgtgggatgtcactcagctggatatcgtaccctacaaagataagggacaccatcggctgagaggaaccgaggaagtttttcaggccttggaagacaaccaggtggcactctctaccatgaaggccagtcggtttgtgaaggccttcgagaaggacgtggaccattgggaacggtgcctgtccctcatcctggaagtgattgagatgattctgaccgtgcaacgacaatggatgtacttagagaacatttttctgggggaggacatacgcaaacagctgccgaacgaaagtaccctctttgatcaggtgaattctaactggaaggccattatggataggatgaacaaggacaataatgcgctcagaagtactcaccatccaggcttgttagacacactgatcgaaatgaatactattctggaggatatacaaaagtcgctggatatgtacttagagactaagaggcatattttcccgagattctattttctcagcaatgacgacctgctagagattctcgggcagagtcggaatccggaagctgtacagccccatctgaagaagtgcttcgacaatattaaactcctgagaattcagaaggtcggcggtccctcatctaagtgggaggcagtgggtatgttttcaggcgacggcgaatacattgacttcttacatagcgtcttccttgaaggacccgttgaatcctggctgggggatgtggagcagacaatgcgcgtgaccttgagggacctgttgagaaattgccacctggccctacgtaagtttctgaacaaacgggataagtgggttaaggagtgggcaggacaagtcgtgataacggcttctcaaatacagtggacagcggatgttacaaaatgcctgctgaccgccaaagagagggcagacaaaaagattctcaaggtgatgaagaaaaaccaggtctcaatcctcaataagtacagtgaagctattagaggaaacctcaccaaaattatgaggttaaaaatagtcgctctggtgaccatcgagatccatgctcgtgacgtactggagaagctgtataagagtggtttgatggacgtaaatagttttgattggttgtcccaattgagattttattgggagaaagacttggatgactgcgtgatcaggcagacaaacacccagttccaatacaactacgagtacttggggaattcaggcagactggtcataacacctctgaccgatcgttgttatatgactttgactacggctctgcacctccatcgagggggatcccccaaaggcccagctggcacaggaaagaccgagacagtcaaggacctcggaaaagcacttggtatctatgtcatagtcgtcaactgcagcgagggtctggattataaatcaatgggcaggatgtacagtgggttggctcagacaggcgcatgggggtgctttgacgaatttaaccggattaacatcgaagtgttaagtgtggtggcccaccagattctgtgcattctgtctgccctggctgcgggacttactcactttcatttcgacgggttcgagattaacctggtatggagttgtggtatatttattactatgaacccaggatatgccggtcgcacagagctccccgagaatctcaagtcaatgtttagacccatcgctatggtcgtccccgactccacactgattgcagaaatcatcctcttcggcgagggattcggaaactgcaaaatacttgctaaaaaagtctatacactctactctttggccgtacagcaactaagtcggcaggatcactatgatttcgggctccgagctttaacgtctctgctaagatacgcaggtaagaagaggcggctgcagcccgacctcacagatgaggaggtgcttcttctgtctatgagggatatgaacatcgcaaaattgacctctgtggacgctcccctgtttaacgcaattgtgcaggacttattccctaacattgagctgccagtgatcgattatggaaagctgcgggagactgtggagcaggagatccgcgacatgggcctacagtctacgcctttcactttgacaaaggtgtttcagctgtatgaaacaaaaaacagtagacactcaacgatgatcgtggggtgtacaggaagcgggaaaacggctagctggcgcatcctccaagcaagcctcagctcactgtgcagagcaggcgatcctaattttaacattgtgagagaattcccgctgaatccaaaggctctgagccttggagagctttatggagagtacgacctgtctaccaacgaatggacggatggcatcctctcatcagtgatgaggactgcctgtgcagatgagaagcccgatgagaagtggatacttttcgatggccctgtggataccctgtggatcgaaaatatgaatagtgttatggatgacaacaaggtgctgacgctcattaacggcgagcgcattgcaatgccagagcaagtgagcctgcttttcgaggtagaagatctggctatggcaagccctgcgaccgtttctcgttgcgggatggtgtacactgactacgccgatctgggctggaagccgtatgtgcaatcctggctggaaaagcgccctaaggctgaggtggaaccgctgcagaggatgttcgaaaagctcatcaacaaaatgttagcctttaaaaaagacaattgtaaagaattagtcccactcccagaatactccggcattacctctctgtgtaaactgtattctgctcttgctacaccagagaacggggtgaatccggctgatggcgaaaattacgtgaccatggtggagatgactttcgtcttttcaatgatatggagtgtgtgcgcttctgtagacgaggaggggaggaagcggatcgactcttatctgagggagatcgagggatcatttccaaataaggacacggtttacgaatatttcgttgacccaaaaatccgctcttggacaagcttcgaggataagttaccaaagtcttggaggtatccccctaatgctccattctataagattatggtgcctacagttgatactgtgaggtacaattacttggtgtcatctctggtggctaaccagaacccaatcctgcttgtgggccctgtgggcacaggaaaaactagtatcgcacagagtgtgcttcagtctctccccagttctcaatggagcgtgctggtggtcaatatgagtgcccagaccacttctaacaatgtccagagtatcatcgagtctagggtggaaaagcgtacaaagggtgtatatgtcccatttggcggaaagtccatgattacctttatggacgaccttaatatgcctgcgaaggatatgtttggaagccaacccccattggagcttatacgtctttggatcgactacgggttctggtacgatagaaccaagcaaaccataaagtacatcagagagatgttcttaatggcagcaatgggtccccctgggggaggacggacagtaatatcccctcgcctgcgctcccgattcaacattatcaatatgacattccccactaaatctcagatcattagaatctttggcacgatgattaatcaaaaattacaggacttcgaagaggaagtcaaaccgatcggaaacgtagtgaccgaagcaaccctggatatgtacaacacagtggttcaacgctttctgcccacccccacaaagatgcactacttattcaatttgcgcgatatatctaaggtcttccaaggtatgctgcgagccaacaaagatttccacgacacaaaaagctctattactcgattatggatacacgaatgcttccgggtcttttccgacagactggtggacgcagctgatacggaagcctttatgggaatcattagcgacaagttagggtcttttttcgatctgacgtttcaccacctctgcccctcaaagcgacctccaatttttggcgattttctgaaagagcccaaggtctacgaggatcttacagacttgactgtgctgaaaacagtgatggaaacagccttgaatgaatacaatctctctccttccgtggtgccaatgcaactcgtgctttttcgggaagccattgaacatataacccggattgtgcgcgtgataggccagcctcggggaaatatgctgctagttggaatcggcggatctggaagacagtctctcgctcgactggcctcttcaatttgcgactacaccactttccagattgaagtcaccaagcactatcggaaacaggagttccgagacgatatcaagcgtctctaccggcaagcaggcgtcgaactcaagactaccagctttatcttcgtagacacccagattgccgatgaatcattccttgaggatattaacaacatcctgtccagcggagaggttcccaacctttataagccggacgagttcgaggaaatccagtcccatattatcgatcaggctcgcgtggagcaagttcccgaatccagcgacagtctgtttgcatatctgatagagagagtgcaaaacaatctccatatcgtgctttgcttaagccctatgggtgatccttttcgcaactggattcggcagtatccagctctggttaactgcacaacaattaactggttttctgagtggccacaggaagccctgctggaggtggccgagaaatgtcttattggcgtggacctcggaacacaggaaaacatacaccgaaaagtcgcacagattttcgtcaccatgcactggagcgtagctcaatatagtcagaagatgctgctagaacttagacgacacaactacgttaccccaactaaatatctcgaacttctgtccggctacaagaagctgcttggcgaaaagaggcaggagttgctggctcaggcaaacaagctgcgtacgggcctgtttaaaattgatgagacgagggagaaagtccaggttatgagccttgaactagaggatgctaagaaaaaggtggcggaatttcagaagcagtgtgaggagtacctcgtgatcatcgtgcaacagaagagagaggcagatgagcagcagaaagccctggagtcattaaacaagaaagatattggggaaatcaaatcctacggccgaccacccgctcaggttgaaatagtgatgcaggctgtcatgattctccggggaaatgaacctacctgggccgaggctaaacgccagctgggagaacagaattttattaaaagtttaattaatttcgataaggataatattagcgacaaggtcctcaaaaagatcggcgcttactgtgcccagcccgacttccagccagacatcatcggtagagtatccctcgccgctaagtcgctgtgcatgtgggtgcgtgccatggaactgtacggaaggctgtaccgcgttgtagagccaaaaagaatccggatgaacgctgccctggcgcagttgcgcgaaaagcaggctgcactggccgaggctcaggagaaactgcgagaggttgctgagaagttggaaatgttaaaaaagcagtacgacgagaagttggctcagaaggaagaactgcgcaaaaaatccgaagaaatggaactcaagctggagagggccggaatgctggtctccggcctagccggtgaaaaagcacggtgggaagaaaccgtccagggcttggaagaggaccttggttatttagtcggggactgtctgcttgccgcagcatttttatcctatatgggaccctttttgacaaattacagagacgaaatcgttaatcaaatctggattggaaagatctgggagctgcaggtaccctgctcaccttcctttgcaatagacaacttcttgtgcaaccccactaaggtgagggactggaacattcagggcctccctagcgatgcattttctactgagaacggcatcatagtgacacgcggaaatcggtgggcgctcatgatcgatccgcaagctcaggcactcaagtggatcaaaaacatggaaggtgggcagggtctcaagattattgacctgcagatgtctgattacctcaggattctggagcatgcaatccacttcggatatccagtccttctgcagaatgtacaggaatacctcgatccgactcttaatccaatgctaaacaagtcagttgccaggattggaggaaggctgttgatgcgaattggggacaaagaagtggagtataacaccaactttaggttttacatcaccacaaaactctcaaatccgcattactctccagaaacttctgccaagaccacaatcgtgaatttcgccgtcaaggaacagggcctggaggcccagctgctgggcatcgtggttaggaaggagcggcctgaactggaggaacagaaagacagcctggtcataaacatcgcagccggtaaacgcaaactcaaggagcttgaagatgagatcttgcgcttgttgaacgaagctactgggtctctgcttgatgacgtgcaactggtgaataccctccacacctctaaaattaccgcgactgaagtgaccgagcaactcgagacatctgaaacaaccgagataaacacggatttggccagagaagcgtacagaccatgcgcccagcgcgcaagcattctgttctttgttctaaacgatatgggctgtattgacccaatgtatcagttcagcttagacgcatacatatcactgtttatcctgagcattgataagtcccatcgaagcaacaaactagaggatagaattgactacctgaacgactatcacacttacgctgtctaccgatatacttgcaggacactgtttgagcgacacaaactgctcttttcatttcacatgtgtgcgaaaattctcgagaccagtggaaaattaaatatggacgaatataattttttcctgcgaggcggtgtcgtgttggacagagagggacagatggataacccatgcagctcatggttggctgacgcctactgggataatataactgaacttgataaactcactaacttccatggactgatgaacagcttcgagcaataccccagggactggcatctgtggtatactaatgcagctcccgagaaagccatgcttcccggtgaatgggaaaacgcatgtaacgaaatgcagagaatgctgatcgtccggtccctacggcaggaccgggtagcattctgcgtaacatctttcattattaccaacttaggaagccggtttatcgaaccacctgttctcaatatgaagtcagtgctggaggactctacaccccgttcgcctctggtcttcatcttgtctcctggcgtggatcccacaagcgccctcttgcaactcgccgaacacatgggtatggcccagaggttccatgcgctatccctgggccagggtcaggcacctattgcagccagactcctccgcgaaggagttacgcagggccactgggttttcctggctaactgccacctcagcctgagttggatgcccaatctcgacaagctggtggaacagttgcaagtcgaagaccctcacccatccttccggctgtggctgtcaagtattccccacccggactttcctatctctatactacaggtctctatcaaaatgacgacggagccgcctaagggcctaaaagccaacatgactaggctgtaccagcttatgtcagagccacagttcagccggtgtagcaagccagccaagtataaaaagctgttattcagtctgtgttttttccattcagtcctcctggaaagaaagaagttcctacaattgggctggaacattatttacgggttcaacgactctgatttcgaggtgagcgaaaacctgctgtctctgtacctcgacgaatacgaagagacgccttgggatgccttaaagtacctgatcgcaggtattaattacgggggtcacgtcaccgacgactgggataggcgattgctgaccacctacatcaatgactatttttgtgatcaatcactgtccacacccttccaccggttgtctgctttggagacatacttcatccctaaggatggaagcctagcctcttataaggagtacatttctcttctgccaggtatggaccccccagaagccttcggacaacatcctaatgcggacgtggcctcacagattactgaggctcaaacactgtttgacaccctcctgtccctgcaaccacagataactcctacacgagctggtggccagacccgagaggagaaggttctggaattggcagcagatgtcaaacagaaaattccggagatgattgactatgaaggtacgcaaaagctactggcgctggatccttcaccactgaacgtcgtcctgttgcaagaaatacagagatacaacacgttgatgcagaccatcctgtttagcctgaccgacctggaaatcccttcatgtgtatcccataagtccgagcgagtggtactcgaattgtcggcagtcaaacaccctagacagtag

SEQ ID NO: 206305 - DNA, 13284 bp, Artificial Sequence
  derived and/or modified sequence
atgtctagcaaggccgagaaaaagcagcgactctctggccgagggagcagtcaggccagttggtccggacgggctactagagccgcagtggctacccaggaacaggggaacgctcctgctgtctctgagccagagctacaagctgaactaccaaaagaggagcccgagcccagactggaaggtccccaagcacagagcgaagaatctgtggagccagaggccgacgtaaaaccactgttcctaagtagagccgctctcacaggcctggcggatgctgtgtggacacaggagcacgatgccatacttgagcactttgcgcaagacccgaccgaatctattctgactatctttatagacccgtgttttggactaaagctcgaactgggaatgcccgtgcagacacaaaaccaactggtgtacttcataagacaggctccagtccctatcacgtgggaaaatttcgaagctaccgtccaattcgggacggtgcgcggaccatacataccagccctgctgcgacttctgggcggtgtttttgccccacagattttcgccaatactggctggcctgaatccatccgcaatcatttcgcgtcacatctccacaaatttctggcctgtctaaccgatacgcgctacaagttggaaggacacactgtgctgtacattccagcggaggccatgaatatgaagcctgagatggtgatcaaagataaagaactcgtccagaggctggagacttcaatgatccactggactcgacagataaaagaaatgctttcggcccaggagactgtggaaactggagaaaaccttggccctctcgaggagatcgagttttggcggaatcggtgtatggacctgagcggcatttctaaacaactggtgaagaaaggcgtgaaacacgtggagagtatcttgcatcttgctaaaagttcctatcttgcccctttcatgaagcttgcgcaacagattcaagatgggagcaggcaggcccaatcaaacctgaccttcttatccatcctgaaagaaccttatcaggagctagcattcatgaagcccaaggatatcagtagcaaactgccaaagctcatcagcctcataagaatcatctgggtgaactcaccccactacaacacccgggagcggctgacgagcctgtttcggaaagtctgtgactgccagtaccacttcgccagatgggaagacgggaagcagggccctctgccctgcttttttggagcccagggacctcagatcacaagaaatctcctagagatcgaggatatattccacaagaatctgcataccttacgagcagtgcgcggtgggattctggacgtgaagaatacttgttggcatgaggactacaacaagttccgagcaggaatcaaggacctggaagtgatgacacagaatctgataacctcggcttttgagctggtgagggatgtcccgcatggagtcctcctgctggatacttttcaccgcttagcctctcgagaggcgataaaacgaacatatgataagaaagcagtggacctttacatgcttttcaattctgagttggcactcgttaatagggagcgcaataagaagtggccggacctggaaccctatgttgcacagtactcagggaaagctagatgggtccacattctgagaaggagaatagatcgcgtcatgacttgccttgcgggtgcacactttctgccaaggattggtaccggaaaagaatcagtgcacacctaccagcagatggtacaggccatagatgaattagtgcggaagacatttcaagaatggacatcatcattggacaaggattgcatcagacgacttgatactcccctcttaagaatttcacaggaaaaggcgggtatgctcgatgttaattttgataagtccttactaattctgtttgctgagattgattattgggaacgtctgctttttgagacacctcactatgtcgtgaatgtagctgagagggccgaggatttgaggatcttgcgtgaaaacctcttattagtggccagggactacaataggattatagccatgctgtcccccgatgaacaagctctctttaaggaacgtatccgccttttggataaaaaaatacacccaggtcttaagaaactacattgggctttgaagggggcttcagcattcttcattactgagtgtaggatacacgcaagtaaagtgcaaatgatcgtaaacgaattcaaggctagtaccctcacaattggttggcgcgcacaggaaatgtctgagaagttgctggttcgtatatcagggaaaagagtgtatcgcgacttggagtttgaagaggatcagcgggagcatcgagccgcagtgcagcagaaactgatgaacttacatcaggacgtggtgacgatcatgaccaactcatacgaagtttttaagaacgacgggcctgagatccagcagcagtggatgctttatatgatccgactagacagaatgatggaagacgcactacggctcaacgtgaaatggtccctgctggagttgagcaaggccatcaacggcgacggaaagactagtccaaacccattgtttcaagtgcttgtgattctgaaaaatgacctccagggtagtgtggcacaggtggaattttcacccactttgcaaacactggccggagtggttaatgatatcggcaatcatctgttctctactatctctgtcttctgccatctacctgatatcttaactaaacgcaaactgcacagagaaccaatccaaacggtcgtggagcaggatgaggatatcaagaagatccagacccagatctccagcggtatgacaaacaacgcctcactgctgcagaactatctgaaaacctgggatatgtacagggagatctgggaaattaacaaggatagttttattcaccggtatcagagactcaaccccccagtgtcttcgttcgtggctgatattgcccgatacaccgaggtcgcgaataatgtccaaaaggaagagacagtaacaaatatacagtttgtgctgttggactgcagccacctcaagttcagcctggtccaacactgcaatgagtggcaaaataagttcgcgactctattgcgcgagatggccgctggcaggctgctggagctgcatacctaccttaaggaaaacgctgagaagatctctcggccacctcagacgctcgaagagctgggggtgtcgctgcagctagtggatgcactgaaacacgacctggccaatgtggagactcagatcccccctatccacgaacagtttgccattttagaaaaatacgaggtgcccgtggaagatagtgttctcgaaatgttggacagtctcaacggcgaatgggtggttttccaacagactcttctggactctaagcagatgttaaagaagcacaaggagaaatttaaaaccgggctgatacacagcgcggacgactttaaaaaaaaggcgcatacccttcttgaggattttgaattcaagggtcacttcacaagcaacgtgggatatatgtccgccctggaccagataactcaggttagagccatgttaatggcgatgagagaggaggagaattcacttcgagcaaatcttggcattttcaaaattgagcagcctccatcaaaggaccttcagaatttggaaaaggaattggacgcgctgcagcagatttgggagatagcaagagattgggaagaaaattggaacgagtggaaaacagggaggtttttgatccttcagaccgagactatggagaccactgcacatggcctgttcaggagacttactaaacttgctaaagagtacaaagaccgaaattgggagatcatagaaaccacccgatcaaagatcgaacagtttaagcgaaccatgccacttatatccgatctgcgtaatcctgccctacgcgaacgccactgggaccaggtgagagacgagattcaacgggagtttgatcaagagagcgagtctttcaccctggaacagattgtggagctgggcatggaccagcatgtggagaagatcggggaaatctctgcgtccgctactaaagagctggctatcgaggtggctctgcagaacatcgcaaagacctgggatgtgacccagctggacattgttccatacaaggacaaagggcaccaccgcctgcgaggtactgaagaagtattccaggccctggaggacaaccaggtcgccctatcgactatgaaggcctccagatttgtgaaggcatttgagaaggacgtggatcattgggaaaggtgtctgtcactcatcttagaggtgattgagatgattcttacagtgcagcgtcagtggatgtatttagaaaatatttttctgggagaagatatcaggaagcagcttcccaacgaaagcacgctcttcgaccaagtgaattcaaattggaaagcaataatggacagaatgaacaaagataacaacgctctgagatctacccatcatccagggctgctggacacactaattgaaatgaatactattctggaggatatccagaagagcctggatatgtatcttgaaacaaagagacatatctttccccgtttttacttcttgtctaatgacgatctgctagaaattcttggacagagcagaaaccccgaagctgtccagccacacctgaaaaagtgcttcgataacattaaactgctgcgtattcagaaagtgggtggacccagctctaagtgggaggctgtcggaatgttctccggcgacggcgagtacattgactttttgcattctgtgtttctggaaggtcccgtggagtcctggttgggcgacgttgagcaaaccatgagagtgacactccgcgacctgctgcgcaattgccacctcgcgctgagaaaattcctaaacaagcgcgataaatgggtgaaggaatgggctggacaggttgtgataaccgcatcacagatccagtggactgccgatgtgactaagtgtctgttgacggcaaaggagagggctgataaaaagatcctgaaggtcatgaagaaaaaccaggttagcattttgaacaagtactccgaagccatcaggggaaatctgacaaagattatgagactaaagatcgtcgcactggtgactattgagatacatgcgcgtgatgttttagagaagctgtacaaaagcggactcatggatgtgaattcattcgattggctgtcccaactccggttctactgggagaaggaccttgacgactgcgttatccgccagacaaatacccagtttcagtacaactacgaatacctcggtaattccggcaggttggtgataacgccactcacagatagatgctatatgactctcacaactgcgctgcacctccaccgcggaggaagtccaaagggacccgctgggaccgggaagactgagaccgtcaaggatctaggtaaggctctgggaatctatgttatcgtggttaactgttcagaggggctggattacaagtcaatgggcagaatgtactccggtctcgcgcagaccggtgcttggggatgctttgacgagttcaacagaatcaacatcgaggtactgagtgtggtggcgcaccagatcttgtgtattctgtccgctctcgctgctggccttacgcactttcattttgacggcttcgaaataaacttagtgtggtcatgcggtatctttattactatgaaccccggttatgcaggacggacagagctgcccgagaacctgaaatcgatgtttcgccctattgccatggttgtgccggatagtacacttatcgcagaaatcatcctgtttggagagggattcggcaactgcaaaattctggccaaaaaggtatatactctgtactcactggccgtacagcagctgagccgccaggatcactatgattttggcctcagggctctcacgtccctgttacgatatgccggtaagaagaggcggttgcagccagatctgactgacgaggaagtactgctactgtccatgagggacatgaatattgcaaaactgacaagcgtggacgcccctcttttcaatgccatcgtgcaggacctgttccccaatattgagctgcctgttattgactatgggaagctcagggagactgttgaacaggagattcgagatatgggcttgcagtctacacctttcaccctaactaaagttttccagctatacgagaccaaaaacagtcgacacagcactatgatagtggggtgtacaggctctgggaagactgcctcctggaggattctgcaggcttctctgagttccctctgtcgggctggcgacccaaatttcaacatagttagagaattccctcttaatcccaaggcactctctctgggtgaactgtatggcgagtatgatcttagcactaatgagtggacagacggcatcttgtcaagcgtgatgagaaccgcatgcgccgatgaaaaacccgatgagaaatggatcttgttcgacgggccagtggacaccctgtggatcgagaatatgaactcagtcatggacgacaacaaggtcttgactctgatcaacggcgagcggattgcgatgcctgagcaggtgtcgttgctctttgaagtcgaagatttggccatggccagcccggctactgtgtctcggtgcggcatggtgtatactgattacgctgacctgggatggaaaccctacgttcagagttggttagaaaagcggccaaaagcggaagtggaacctctgcaaaggatgtttgagaagctgataaacaagatgctcgcatttaagaaggataactgtaaggagttggtacccctcccagagtacagcggaattacttccctctgcaaactgtactctgccttggccactccggagaatggcgtcaatccggctgatggggagaattacgtgaccatggtggagatgacattcgtgtttagtatgatatggtctgtctgcgcgagtgtggacgaggagggacgaaaaaggatcgattcttaccttagagagattgaggggtcatttcctaataaggacaccgtgtatgagtatttcgtcgatccgaaaatcaggtcttggacgagctttgaggataaattaccaaagtcttggcgctatccgccaaatgcccctttttataagattatggtcccgaccgtcgatacagtgcgctacaactatctagttagcagtttggtcgccaaccagaatcctatcttactggtagggcctgtggggactggaaaaacgtctattgcacaaagtgtgctacagtctttgccttcctcacagtggagtgtactcgtggtgaatatgtccgcacagacgaccagcaataacgtgcagtctatcattgaatctagggtcgaaaagaggacaaaaggggtgtacgtaccattcggcggaaaaagtatgatcacctttatggatgaccttaacatgccagccaaagatatgtttggctcacagccccctctcgagctcatacgactgtggattgactatggtttttggtatgatcggaccaagcagaccatcaagtacatccgagaaatgtttctcatggcggcaatggggcctccgggaggaggcaggacagtgatttccccgcgtcttcgatcaaggttcaacattatcaatatgacttttccaacaaaatcgcagattattagaatctttggtaccatgatcaatcaaaagctgcaggattttgaggaggaagttaaacccatcgggaacgtagtgaccgaagccacactcgacatgtacaacactgtcgtgcagagatttctccctacgcctactaagatgcactacctatttaaccttagagacataagcaaggtcttccaagggatgctaagggccaacaaagacttccacgacaccaagagcagcatcacacgcctgtggatccatgagtgttttcgggtgttttccgatcgacttgtcgacgccgcagatacagaagcattcatggggattatatccgacaagctcggcagtttttttgatcttaccttccatcatctgtgtccctctaaacggccacctatatttggcgacttcctcaaggagcccaaggtgtatgaggacctgacagatctgacagtgctcaagacggtgatggagactgcactgaatgaatataatttgtccccgagcgtcgtgcctatgcagcttgttctctttagggaagccattgagcatatcactcgcattgtccgggtgatcggacagcctcgcggtaacatgttactggtgggcattggcggttccggaaggcaatctctcgcccgactggcctcgtcaatttgcgattataccacatttcagatcgaggtgacaaaacattataggaagcaggagttccgcgacgacatcaagagattatatagacaggctggcgtagaacttaagaccaccagtttcattttcgtggatacacagatcgctgacgaaagcttccttgaagatatcaacaacattctgtctagtggagaggtccccaatttgtacaagcctgacgagtttgaggagattcagtctcatatcatagaccaggctagggtcgagcaagtgcccgagtcttcggactctttattcgcctatctcattgaaagagtgcagaataacttacacattgttctttgcctgagtccaatgggtgacccattccggaattggataagacagtatcccgcacttgtaaattgtactaccatcaactggttctcagagtggcctcaggaagccttgctggaagtggcggagaagtgtcttatcggcgtggatctgggtactcaagagaacattcatcggaaagtagcccagatctttgtgacaatgcactggagcgtagctcagtattctcagaagatgctcctcgagctcagacgccacaactacgtcacacccaccaaatatctggaactgctcagtggctataaaaagcttctgggggaaaaacgacaggagctgctagcacaagcgaataagctcaggacagggctgttcaagattgatgaaactcgggaaaaggttcaggtgatgtcccttgaactggaggacgcaaagaagaaggttgcagaatttcagaaacagtgcgaagaataccttgtgatcatcgtgcagcagaagagagaggccgacgagcagcagaaggcagtcactgcgaactccgagaaaattgcagtagaagagatcaagtgccaggctctggccgacaatgctcagaaggatcttgaggaagccctcccagcgctggaagaagccatgcgggcactggaatccctcaataaaaaggatataggggagatcaaatcttacgggaggccccctgcacaggtggaaatcgttatgcaagccgtgatgattttgagaggcaatgagccaacctgggctgaagccaagaggcagctcggagaacagaatttcatcaagtcccttattaatttcgacaaggataatatctcagataaagtgctcaagaagatcggtgcgtactgtgctcagccagattttcagccagatattatcggccgtgtgagcttagccgcaaagtccctgtgtatgtgggtgcgcgctatggaactgtatgggcgactgtacagggtggtggagccaaaaaggattaggatgaacgccgctttggctcagctacgggaaaaacaagcagcactcgctgaggcacaggagaaattgcgagaggtcgccgagaagctggaaatgctgaagaagcagtacgacgagaagcttgcgcagaaagaagagctaagaaagaagagcgaggagatggagctgaaacttgaacgagccggtatgctcgtgtcaggactcgctggggagaaggccagatgggaggaaaccgtgcagggattagaagaggatttgggctatctagtgggagactgcctgctggccgctgctttcctttcatatatgggtccttttctgaccaactaccgcgatgagatcgtgaaccagatctggatcggcaaaatttgggagctacaagtgccttgcagtccctccttcgctatagacaacttcctctgtaatccaaccaaagtgagagactggaacattcagggccttccctccgatgcatttagcaccgagaacgggattatcgtcaccaggggcaacaggtgggctcttatgatcgacccccaggcccaggccttgaaatggataaaaaacatggagggagggcaaggactgaagattattgacctgcaaatgagcgattatctcagaatcttagaacacgcaattcatttcggatacccggtgctattacagaatgtccaggagtacctagatcccactcttaatcccatgcttaataagagcgttgcaaggattgggggtagactcttgatgcgcatcggggataaagaagtggagtacaacaccaattttaggttctatatcactacaaagctgtcaaatccccactatagtccggagactagcgctaaaaccaccatcgttaatttcgccgtgaaggagcagggtctggaagctcaactcttagggatcgtagtgcgcaaggagagacccgaactggaagaacagaaggacagcctggtcatcaacattgccgctggaaaaagaaaactaaaagaacttgaagatgagattcttcgacttctgaatgaggcaaccggctcccttctggacgatgttcaactggtcaacaccctacacacttcaaaaatcactgccacagaagtgaccgagcaactggaaacctctgaaactacagagatcaacactgatctggctcgcgaggcgtaccgcccttgcgcacagcgcgcatcaattctcttttttgtactgaatgatatgggatgcattgatcccatgtatcaatttagcctagacgcctatatttccctgttcatcctgtcgatagacaaatcgcaccgctcaaacaaactggaggaccgtatagactatttaaacgactatcacacatatgcggtgtatcgctacacctgtcgaactctattcgaacggcacaagctgttgttttctttccatatgtgtgccaaaatactcgagacttccggaaaactaaacatggatgagtataacttctttttaagaggcggtgttgttctggaccgagaggggcagatggacaatccatgtagttcctggctggctgatgcgtactgggacaacatcacggagctggataagctcaccaatttccacggcctgatgaattccttcgaacagtatccacgcgactggcacctgtggtacaccaacgccgctcccgagaaggctatgctgcccggtgagtgggaaaatgcttgtaatgagatgcagcggatgctaattgttaggtctctcagacaggacagagtagctttctgtgtgacctcattcatcatcacaaacctgggttcgagatttattgagccccctgtactaaacatgaagagcgtgcttgaggactctacacctaggtcccctctggtgtttattttgtcacctggggtggacccgacctccgccttgctccagctcgcagaacatatgggcatggcccaacggttccatgctctgtccctagggcaaggtcaggcgcctatcgccgcaagacttttgcgagagggggttacacagggtcattgggtgttccttgccaattgccacctctcactctcctggatgccgaatcttgataagctcgttgaacaactccaggtggaagatccacacccctcatttcgcctgtggctttcttcaatcccccaccctgatttcccaatctctattctacaggtgtccatcaagatgaccacggagccgccaaaaggactgaaagccaatatgacaaggttgtaccagctgatgagcgaaccccaattttcacggtgttcgaaacctgccaaatataaaaaacttttattctctctgtgtttcttccattcggtgctcttggagaggaagaagtttctccagctaggctggaacattatctacggatttaatgactctgatttcgaggtgtcggaaaacctcctgtccctgtacctcgatgaatatgaggaaacgccatgggatgccctgaaatacttaatcgctggcattaactacggtggccacgtgaccgatgattgggaccgccgtctcctgaccacttatattaatgattatttctgtgatcaaagcctctctacccctttccatcggctgtctgctctggaaacctatttcattcccaaagacgggagcctcgcgagttataaagagtatatttccctacttccaggtatggacccccctgaagcgtttgggcagcacccaaatgctgacgtggccagccagatcaccgaggcccaaaccctgttcgacactctgttaagtctgcagccgcagataacccctacccgtgctggaggccagacccgggaagaaaaggttctggaactggcagccgacgtgaagcagaagataccagaaatgatcgattatgaaggtacacagaagctgctggcactggatcctagccctttgaatgtcgtcctgttacaggaaatccaaaggtacaacactctgatgcaaacaattctattctcccttacagatttggagaaagggatccaggggctgatcgtgatgagcacctctctcgaggagatttttaactgcatctttgatgctcatgtgccccctctctggggtaaggcgtaccccagccaaaaaccactcgccgcatggacgcgggacctcgccatgagagtcgaacagttcgagctgtgggctagccgggcaagaccccctgtgatcttttggctcagtggctttacattccctaccggctttctgaccgcagtcttacagtccagcgctagacagaataacgtcagcgttgattccctgtcttgggagttcattgtcagcacagttgacgactcgaaccttgtgtacccaccgaaggacggcgtatgggtaagaggactgtacctggaaggcgctggctgggatcgcaaaaactcatgcctagtggaagcagaacccatgcagctggtatgcctcatgccaacaatccattttaggccagccgagtctcgcaaaaagtctgccaagggtatgtactcatgtccttgttattattaccctaatcgggctggaagtagtgatcgcgctagttttgtcatcggaatcgatctcaggtcaggggcaatgacacctgatcactggatcaaaagagggactgccttactgatgagtttggactcgtac

SEQ ID NO: 206306 - DNA, 13284 bp, Artificial Sequence
  derived and/or modified sequence
atgagcagcaaggccgagaagaagcagagactgagcggcagaggcagcagccaggccagctggagcggcagagccaccagagccgccgtggccacccaggagcagggcaacgcccccgccgtgagcgagcccgagctgcaggccgagctgcccaaggaggagcccgagcccagactggagggcccccaggcccagagcgaggagagcgtggagcccgaggccgacgtgaagcccctgttcctgagcagagccgccctgaccggcctggccgacgccgtgtggacccaggagcacgacgccatcctggagcacttcgcccaggaccccaccgagagcatcctgaccatcttcatcgacccctgcttcggcctgaagctggagctgggcatgcccgtgcagacccagaaccagctggtgtacttcatcagacaggcccccgtgcccatcacctgggagaacttcgaggccaccgtgcagttcggcaccgtgagaggcccctacatccccgccctgctgagactgctgggcggcgtgttcgccccccagatcttcgccaacaccggctggcccgagagcatcagaaaccacttcgccagccacctgcacaagttcctggcctgcctgaccgacaccagatacaagctggagggccacaccgtgctgtacatccccgccgaggccatgaacatgaagcccgagatggtgatcaaggacaaggagctggtgcagagactggagaccagcatgatccactggaccagacagatcaaggagatgctgagcgcccaggagaccgtggagaccggcgagaacctgggccccctggaggagatcgagttctggagaaacagatgcatggacctgagcggcatcagcaagcagctggtgaagaagggcgtgaagcacgtggagagcatcctgcacctggccaagagcagctacctggcccccttcatgaagctggcccagcagatccaggacggcagcagacaggcccagagcaacctgaccttcctgagcatcctgaaggagccctaccaggagctggccttcatgaagcccaaggacatcagcagcaagctgcccaagctgatcagcctgatcagaatcatctgggtgaacagcccccactacaacaccagagagagactgaccagcctgttcagaaaggtgtgcgactgccagtaccacttcgccagatgggaggacggcaagcagggccccctgccctgcttcttcggcgcccagggcccccagatcaccagaaacctgctggagatcgaggacatcttccacaagaacctgcacaccctgagagccgtgagaggcggcatcctggacgtgaagaacacctgctggcacgaggactacaacaagttcagagccggcatcaaggacctggaggtgatgacccagaacctgatcaccagcgccttcgagctggtgagagacgtgccccacggcgtgctgctgctggacaccttccacagactggccagcagagaggccatcaagagaacctacgacaagaaggccgtggacctgtacatgctgttcaacagcgagctggccctggtgaacagagagagaaacaagaagtggcccgacctggagccctacgtggcccagtacagcggcaaggccagatgggtgcacatcctgagaagaagaatcgacagagtgatgacctgcctggccggcgcccacttcctgcccagaatcggcaccggcaaggagagcgtgcacacctaccagcagatggtgcaggccatcgacgagctggtgagaaagaccttccaggagtggaccagcagcctggacaaggactgcatcagaagactggacacccccctgctgagaatcagccaggagaaggccggcatgctggacgtgaacttcgacaagagcctgctgatcctgttcgccgagatcgactactgggagagactgctgttcgagaccccccactacgtggtgaacgtggccgagagagccgaggacctgagaatcctgagagagaacctgctgctggtggccagagactacaacagaatcatcgccatgctgagccccgacgagcaggccctgttcaaggagagaatcagactgctggacaagaagatccaccccggcctgaagaagctgcactgggccctgaagggcgccagcgccttcttcatcaccgagtgcagaatccacgccagcaaggtgcagatgatcgtgaacgagttcaaggccagcaccctgaccatcggctggagagcccaggagatgagcgagaagctgctggtgagaatcagcggcaagagagtgtacagagacctggagttcgaggaggaccagagagagcacagagccgccgtgcagcagaagctgatgaacctgcaccaggacgtggtgaccatcatgaccaacagctacgaggtgttcaagaacgacggccccgagatccagcagcagtggatgctgtacatgatcagactggacagaatgatggaggacgccctgagactgaacgtgaagtggagcctgctggagctgagcaaggccatcaacggcgacggcaagaccagccccaaccccctgttccaggtgctggtgatcctgaagaacgacctgcagggcagcgtggcccaggtggagttcagccccaccctgcagaccctggccggcgtggtgaacgacatcggcaaccacctgttcagcaccatcagcgtgttctgccacctgcccgacatcctgaccaagagaaagctgcacagagagcccatccagaccgtggtggagcaggacgaggacatcaagaagatccagacccagatcagcagcggcatgaccaacaacgccagcctgctgcagaactacctgaagacctgggacatgtacagagagatctgggagatcaacaaggacagcttcatccacagataccagagactgaacccccccgtgagcagcttcgtggccgacatcgccagatacaccgaggtggccaacaacgtgcagaaggaggagaccgtgaccaacatccagttcgtgctgctggactgcagccacctgaagttcagcctggtgcagcactgcaacgagtggcagaacaagttcgccaccctgctgagagagatggccgccggcagactgctggagctgcacacctacctgaaggagaacgccgagaagatcagcagacccccccagaccctggaggagctgggcgtgagcctgcagctggtggacgccctgaagcacgacctggccaacgtggagacccagatcccccccatccacgagcagttcgccatcctggagaagtacgaggtgcccgtggaggacagcgtgctggagatgctggacagcctgaacggcgagtgggtggtgttccagcagaccctgctggacagcaagcagatgctgaagaagcacaaggagaagttcaagaccggcctgatccacagcgccgacgacttcaagaagaaggcccacaccctgctggaggacttcgagttcaagggccacttcaccagcaacgtgggctacatgagcgccctggaccagatcacccaggtgagagccatgctgatggccatgagagaggaggagaacagcctgagagccaacctgggcatcttcaagatcgagcagccccccagcaaggacctgcagaacctggagaaggagctggacgccctgcagcagatctgggagatcgccagagactgggaggagaactggaacgagtggaagaccggcagattcctgatcctgcagaccgagaccatggagaccaccgcccacggcctgttcagaagactgaccaagctggccaaggagtacaaggacagaaactgggagatcatcgagaccaccagaagcaagatcgagcagttcaagagaaccatgcccctgatcagcgacctgagaaaccccgccctgagagagagacactgggaccaggtgagagacgagatccagagagagttcgaccaggagagcgagagcttcaccctggagcagatcgtggagctgggcatggaccagcacgtggagaagatcggcgagatcagcgccagcgccaccaaggagctggccatcgaggtggccctgcagaacatcgccaagacctgggacgtgacccagctggacatcgtgccctacaaggacaagggccaccacagactgagaggcaccgaggaggtgttccaggccctggaggacaaccaggtggccctgagcaccatgaaggccagcagattcgtgaaggccttcgagaaggacgtggaccactgggagagatgcctgagcctgatcctggaggtgatcgagatgatcctgaccgtgcagagacagtggatgtacctggagaacatcttcctgggcgaggacatcagaaagcagctgcccaacgagagcaccctgttcgaccaggtgaacagcaactggaaggccatcatggacagaatgaacaaggacaacaacgccctgagaagcacccaccaccccggcctgctggacaccctgatcgagatgaacaccatcctggaggacatccagaagagcctggacatgtacctggagaccaagagacacatcttccccagattctacttcctgagcaacgacgacctgctggagatcctgggccagagcagaaaccccgaggccgtgcagccccacctgaagaagtgcttcgacaacatcaagctgctgagaatccagaaggtgggcggccccagcagcaagtgggaggccgtgggcatgttcagcggcgacggcgagtacatcgacttcctgcacagcgtgttcctggagggccccgtggagagctggctgggcgacgtggagcagaccatgagagtgaccctgagagacctgctgagaaactgccacctggccctgagaaagttcctgaacaagagagacaagtgggtgaaggagtgggccggccaggtggtgatcaccgccagccagatccagtggaccgccgacgtgaccaagtgcctgctgaccgccaaggagagagccgacaagaagatcctgaaggtgatgaagaagaaccaggtgagcatcctgaacaagtacagcgaggccatcagaggcaacctgaccaagatcatgagactgaagatcgtggccctggtgaccatcgagatccacgccagagacgtgctggagaagctgtacaagagcggcctgatggacgtgaacagcttcgactggctgagccagctgagattctactgggagaaggacctggacgactgcgtgatcagacagaccaacacccagttccagtacaactacgagtacctgggcaacagcggcagactggtgatcacccccctgaccgacagatgctacatgaccctgaccaccgccctgcacctgcacagaggcggcagccccaagggccccgccggcaccggcaagaccgagaccgtgaaggacctgggcaaggccctgggcatctacgtgatcgtggtgaactgcagcgagggcctggactacaagagcatgggcagaatgtacagcggcctggcccagaccggcgcctggggctgcttcgacgagttcaacagaatcaacatcgaggtgctgagcgtggtggcccaccagatcctgtgcatcctgagcgccctggccgccggcctgacccacttccacttcgacggcttcgagatcaacctggtgtggagctgcggcatcttcatcaccatgaaccccggctacgccggcagaaccgagctgcccgagaacctgaagagcatgttcagacccatcgccatggtggtgcccgacagcaccctgatcgccgagatcatcctgttcggcgagggcttcggcaactgcaagatcctggccaagaaggtgtacaccctgtacagcctggccgtgcagcagctgagcagacaggaccactacgacttcggcctgagagccctgaccagcctgctgagatacgccggcaagaagagaagactgcagcccgacctgaccgacgaggaggtgctgctgctgagcatgagagacatgaacatcgccaagctgaccagcgtggacgcccccctgttcaacgccatcgtgcaggacctgttccccaacatcgagctgcccgtgatcgactacggcaagctgagagagaccgtggagcaggagatcagagacatgggcctgcagagcacccccttcaccctgaccaaggtgttccagctgtacgagaccaagaacagcagacacagcaccatgatcgtgggctgcaccggcagcggcaagaccgccagctggagaatcctgcaggccagcctgagcagcctgtgcagagccggcgaccccaacttcaacatcgtgagagagttccccctgaaccccaaggccctgagcctgggcgagctgtacggcgagtacgacctgagcaccaacgagtggaccgacggcatcctgagcagcgtgatgagaaccgcctgcgccgacgagaagcccgacgagaagtggatcctgttcgacggccccgtggacaccctgtggatcgagaacatgaacagcgtgatggacgacaacaaggtgctgaccctgatcaacggcgagagaatcgccatgcccgagcaggtgagcctgctgttcgaggtggaggacctggccatggccagccccgccaccgtgagcagatgcggcatggtgtacaccgactacgccgacctgggctggaagccctacgtgcagagctggctggagaagagacccaaggccgaggtggagcccctgcagagaatgttcgagaagctgatcaacaagatgctggccttcaagaaggacaactgcaaggagctggtgcccctgcccgagtacagcggcatcaccagcctgtgcaagctgtacagcgccctggccacccccgagaacggcgtgaaccccgccgacggcgagaactacgtgaccatggtggagatgaccttcgtgttcagcatgatctggagcgtgtgcgccagcgtggacgaggagggcagaaagagaatcgacagctacctgagagagatcgagggcagcttccccaacaaggacaccgtgtacgagtacttcgtggaccccaagatcagaagctggaccagcttcgaggacaagctgcccaagagctggagatacccccccaacgcccccttctacaagatcatggtgcccaccgtggacaccgtgagatacaactacctggtgagcagcctggtggccaaccagaaccccatcctgctggtgggccccgtgggcaccggcaagaccagcatcgcccagagcgtgctgcagagcctgcccagcagccagtggagcgtgctggtggtgaacatgagcgcccagaccaccagcaacaacgtgcagagcatcatcgagagcagagtggagaagagaaccaagggcgtgtacgtgcccttcggcggcaagagcatgatcaccttcatggacgacctgaacatgcccgccaaggacatgttcggcagccagccccccctggagctgatcagactgtggatcgactacggcttctggtacgacagaaccaagcagaccatcaagtacatcagagagatgttcctgatggccgccatgggcccccccggcggcggcagaaccgtgatcagccccagactgagaagcagattcaacatcatcaacatgaccttccccaccaagagccagatcatcagaatcttcggcaccatgatcaaccagaagctgcaggacttcgaggaggaggtgaagcccatcggcaacgtggtgaccgaggccaccctggacatgtacaacaccgtggtgcagagattcctgcccacccccaccaagatgcactacctgttcaacctgagagacatcagcaaggtgttccagggcatgctgagagccaacaaggacttccacgacaccaagagcagcatcaccagactgtggatccacgagtgcttcagagtgttcagcgacagactggtggacgccgccgacaccgaggccttcatgggcatcatcagcgacaagctgggcagcttcttcgacctgaccttccaccacctgtgccccagcaagagaccccccatcttcggcgacttcctgaaggagcccaaggtgtacgaggacctgaccgacctgaccgtgctgaagaccgtgatggagaccgccctgaacgagtacaacctgagccccagcgtggtgcccatgcagctggtgctgttcagagaggccatcgagcacatcaccagaatcgtgagagtgatcggccagcccagaggcaacatgctgctggtgggcatcggcggcagcggcagacagagcctggccagactggccagcagcatctgcgactacaccaccttccagatcgaggtgaccaagcactacagaaagcaggagttcagagacgacatcaagagactgtacagacaggccggcgtggagctgaagaccaccagcttcatcttcgtggacacccagatcgccgacgagagcttcctggaggacatcaacaacatcctgagcagcggcgaggtgcccaacctgtacaagcccgacgagttcgaggagatccagagccacatcatcgaccaggccagagtggagcaggtgcccgagagcagcgacagcctgttcgcctacctgatcgagagagtgcagaacaacctgcacatcgtgctgtgcctgagccccatgggcgaccccttcagaaactggatcagacagtaccccgccctggtgaactgcaccaccatcaactggttcagcgagtggccccaggaggccctgctggaggtggccgagaagtgcctgatcggcgtggacctgggcacccaggagaacatccacagaaaggtggcccagatcttcgtgaccatgcactggagcgtggcccagtacagccagaagatgctgctggagctgagaagacacaactacgtgacccccaccaagtacctggagctgctgagcggctacaagaagctgctgggcgagaagagacaggagctgctggcccaggccaacaagctgagaaccggcctgttcaagatcgacgagaccagagagaaggtgcaggtgatgagcctggagctggaggacgccaagaagaaggtggccgagttccagaagcagtgcgaggagtacctggtgatcatcgtgcagcagaagagagaggccgacgagcagcagaaggccgtgaccgccaacagcgagaagatcgccgtggaggagatcaagtgccaggccctggccgacaacgcccagaaggacctggaggaggccctgcccgccctggaggaggccatgagagccctggagagcctgaacaagaaggacatcggcgagatcaagagctacggcagaccccccgcccaggtggagatcgtgatgcaggccgtgatgatcctgagaggcaacgagcccacctgggccgaggccaagagacagctgggcgagcagaacttcatcaagagcctgatcaacttcgacaaggacaacatcagcgacaaggtgctgaagaagatcggcgcctactgcgcccagcccgacttccagcccgacatcatcggcagagtgagcctggccgccaagagcctgtgcatgtgggtgagagccatggagctgtacggcagactgtacagagtggtggagcccaagagaatcagaatgaacgccgccctggcccagctgagagagaagcaggccgccctggccgaggcccaggagaagctgagagaggtggccgagaagctggagatgctgaagaagcagtacgacgagaagctggcccagaaggaggagctgagaaagaagagcgaggagatggagctgaagctggagagagccggcatgctggtgagcggcctggccggcgagaaggccagatgggaggagaccgtgcagggcctggaggaggacctgggctacctggtgggcgactgcctgctggccgccgccttcctgagctacatgggccccttcctgaccaactacagagacgagatcgtgaaccagatctggatcggcaagatctgggagctgcaggtgccctgcagccccagcttcgccatcgacaacttcctgtgcaaccccaccaaggtgagagactggaacatccagggcctgcccagcgacgccttcagcaccgagaacggcatcatcgtgaccagaggcaacagatgggccctgatgatcgacccccaggcccaggccctgaagtggatcaagaacatggagggcggccagggcctgaagatcatcgacctgcagatgagcgactacctgagaatcctggagcacgccatccacttcggctaccccgtgctgctgcagaacgtgcaggagtacctggaccccaccctgaaccccatgctgaacaagagcgtggccagaatcggcggcagactgctgatgagaatcggcgacaaggaggtggagtacaacaccaacttcagattctacatcaccaccaagctgagcaacccccactacagccccgagaccagcgccaagaccaccatcgtgaacttcgccgtgaaggagcagggcctggaggcccagctgctgggcatcgtggtgagaaaggagagacccgagctggaggagcagaaggacagcctggtgatcaacatcgccgccggcaagagaaagctgaaggagctggaggacgagatcctgagactgctgaacgaggccaccggcagcctgctggacgacgtgcagctggtgaacaccctgcacaccagcaagatcaccgccaccgaggtgaccgagcagctggagaccagcgagaccaccgagatcaacaccgacctggccagagaggcctacagaccctgcgcccagagagccagcatcctgttcttcgtgctgaacgacatgggctgcatcgaccccatgtaccagttcagcctggacgcctacatcagcctgttcatcctgagcatcgacaagagccacagaagcaacaagctggaggacagaatcgactacctgaacgactaccacacctacgccgtgtacagatacacctgcagaaccctgttcgagagacacaagctgctgttcagcttccacatgtgcgccaagatcctggagaccagcggcaagctgaacatggacgagtacaacttcttcctgagaggcggcgtggtgctggacagagagggccagatggacaacccctgcagcagctggctggccgacgcctactgggacaacatcaccgagctggacaagctgaccaacttccacggcctgatgaacagcttcgagcagtaccccagagactggcacctgtggtacaccaacgccgcccccgagaaggccatgctgcccggcgagtgggagaacgcctgcaacgagatgcagagaatgctgatcgtgagaagcctgagacaggacagagtggccttctgcgtgaccagcttcatcatcaccaacctgggcagcagattcatcgagccccccgtgctgaacatgaagagcgtgctggaggacagcacccccagaagccccctggtgttcatcctgagccccggcgtggaccccaccagcgccctgctgcagctggccgagcacatgggcatggcccagagattccacgccctgagcctgggccagggccaggcccccatcgccgccagactgctgagagagggcgtgacccagggccactgggtgttcctggccaactgccacctgagcctgagctggatgcccaacctggacaagctggtggagcagctgcaggtggaggacccccaccccagcttcagactgtggctgagcagcatcccccaccccgacttccccatcagcatcctgcaggtgagcatcaagatgaccaccgagccccccaagggcctgaaggccaacatgaccagactgtaccagctgatgagcgagccccagttcagcagatgcagcaagcccgccaagtacaagaagctgctgttcagcctgtgcttcttccacagcgtgctgctggagagaaagaagttcctgcagctgggctggaacatcatctacggcttcaacgacagcgacttcgaggtgagcgagaacctgctgagcctgtacctggacgagtacgaggagaccccctgggacgccctgaagtacctgatcgccggcatcaactacggcggccacgtgaccgacgactgggacagaagactgctgaccacctacatcaacgactacttctgcgaccagagcctgagcacccccttccacagactgagcgccctggagacctacttcatccccaaggacggcagcctggccagctacaaggagtacatcagcctgctgcccggcatggacccccccgaggccttcggccagcaccccaacgccgacgtggccagccagatcaccgaggcccagaccctgttcgacaccctgctgagcctgcagccccagatcacccccaccagagccggcggccagaccagagaggagaaggtgctggagctggccgccgacgtgaagcagaagatccccgagatgatcgactacgagggcacccagaagctgctggccctggaccccagccccctgaacgtggtgctgctgcaggagatccagagatacaacaccctgatgcagaccatcctgttcagcctgaccgacctggagaagggcatccagggcctgatcgtgatgagcaccagcctggaggagatcttcaactgcatcttcgacgcccacgtgccccccctgtggggcaaggcctaccccagccagaagcccctggccgcctggaccagagacctggccatgagagtggagcagttcgagctgtgggccagcagagccagaccccccgtgatcttctggctgagcggcttcaccttccccaccggcttcctgaccgccgtgctgcagagcagcgccagacagaacaacgtgagcgtggacagcctgagctgggagttcatcgtgagcaccgtggacgacagcaacctggtgtacccccccaaggacggcgtgtgggtgagaggcctgtacctggagggcgccggctgggacagaaagaacagctgcctggtggaggccgagcccatgcagctggtgtgcctgatgcccaccatccacttcagacccgccgagagcagaaagaagagcgccaagggcatgtacagctgcccctgctactactaccccaacagagccggcagcagcgacagagccagcttcgtgatcggcatcgacctgagaagcggcgccatgacccccgaccactggatcaagagaggcaccgccctgctgatgagcctggacagctag

SEQ ID NO: 206307 - DNA, 12591 bp, Artificial Sequence
  derived and/or modified sequence
atgagcagcaaggccgagaagaagcagagactgagcggcagaggcagcagccaggccagctggagcggcagagccaccagagccgccgtggccacccaggagcagggcaacgcccccgccgtgagcgagcccgagctgcaggccgagctgcccaaggaggagcccgagcccagactggagggcccccaggcccagagcgaggagagcgtggagcccgaggccgacgtgaagcccctgttcctgagcagagccgccctgaccggcctggccgacgccgtgtggacccaggagcacgacgccatcctggagcacttcgcccaggaccccaccgagagcatcctgaccatcttcatcgacccctgcttcggcctgaagctggagctgggcatgcccgtgcagacccagaaccagctggtgtacttcatcagacaggcccccgtgcccatcacctgggagaacttcgaggccaccgtgcagttcggcaccgtgagaggcccctacatccccgccctgctgagactgctgggcggcgtgttcgccccccagatcttcgccaacaccggctggcccgagagcatcagaaaccacttcgccagccacctgcacaagttcctggcctgcctgaccgacaccagatacaagctggagggccacaccgtgctgtacatccccgccgaggccatgaacatgaagcccgagatggtgatcaaggacaaggagctggtgcagagactggagaccagcatgatccactggaccagacagatcaaggagatgctgagcgcccaggagaccgtggagaccggcgagaacctgggccccctggaggagatcgagttctggagaaacagatgcatggacctgagcggcatcagcaagcagctggtgaagaagggcgtgaagcacgtggagagcatcctgcacctggccaagagcagctacctggcccccttcatgaagctggcccagcagatccaggacggcagcagacaggcccagagcaacctgaccttcctgagcatcctgaaggagccctaccaggagctggccttcatgaagcccaaggacatcagcagcaagctgcccaagctgatcagcctgatcagaatcatctgggtgaacagcccccactacaacaccagagagagactgaccagcctgttcagaaaggtgtgcgactgccagtaccacttcgccagatgggaggacggcaagcagggccccctgccctgcttcttcggcgcccagggcccccagatcaccagaaacctgctggagatcgaggacatcttccacaagaacctgcacaccctgagagccgtgagaggcggcatcctggacgtgaagaacacctgctggcacgaggactacaacaagttcagagccggcatcaaggacctggaggtgatgacccagaacctgatcaccagcgccttcgagctggtgagagacgtgccccacggcgtgctgctgctggacaccttccacagactggccagcagagaggccatcaagagaacctacgacaagaaggccgtggacctgtacatgctgttcaacagcgagctggccctggtgaacagagagagaaacaagaagtggcccgacctggagccctacgtggcccagtacagcggcaaggccagatgggtgcacatcctgagaagaagaatcgacagagtgatgacctgcctggccggcgcccacttcctgcccagaatcggcaccggcaaggagagcgtgcacacctaccagcagatggtgcaggccatcgacgagctggtgagaaagaccttccaggagtggaccagcagcctggacaaggactgcatcagaagactggacacccccctgctgagaatcagccaggagaaggccggcatgctggacgtgaacttcgacaagagcctgctgatcctgttcgccgagatcgactactgggagagactgctgttcgagaccccccactacgtggtgaacgtggccgagagagccgaggacctgagaatcctgagagagaacctgctgctggtggccagagactacaacagaatcatcgccatgctgagccccgacgagcaggccctgttcaaggagagaatcagactgctggacaagaagatccaccccggcctgaagaagctgcactgggccctgaagggcgccagcgccttcttcatcaccgagtgcagaatccacgccagcaaggtgcagatgatcgtgaacgagttcaaggccagcaccctgaccatcggctggagagcccaggagatgagcgagaagctgctggtgagaatcagcggcaagagagtgtacagagacctggagttcgaggaggaccagagagagcacagagccgccgtgcagcagaagctgatgaacctgcaccaggacgtggtgaccatcatgaccaacagctacgaggtgttcaagaacgacggccccgagatccagcagcagtggatgctgtacatgatcagactggacagaatgatggaggacgccctgagactgaacgtgaagtggagcctgctggagctgagcaaggccatcaacggcgacggcaagaccagccccaaccccctgttccaggtgctggtgatcctgaagaacgacctgcagggcagcgtggcccaggtggagttcagccccaccctgcagaccctggccggcgtggtgaacgacatcggcaaccacctgttcagcaccatcagcgtgttctgccacctgcccgacatcctgaccaagagaaagctgcacagagagcccatccagaccgtggtggagcaggacgaggacatcaagaagatccagacccagatcagcagcggcatgaccaacaacgccagcctgctgcagaactacctgaagacctgggacatgtacagagagatctgggagatcaacaaggacagcttcatccacagataccagagactgaacccccccgtgagcagcttcgtggccgacatcgccagatacaccgaggtggccaacaacgtgcagaaggaggagaccgtgaccaacatccagttcgtgctgctggactgcagccacctgaagttcagcctggtgcagcactgcaacgagtggcagaacaagttcgccaccctgctgagagagatggccgccggcagactgctggagctgcacacctacctgaaggagaacgccgagaagatcagcagacccccccagaccctggaggagctgggcgtgagcctgcagctggtggacgccctgaagcacgacctggccaacgtggagacccagatcccccccatccacgagcagttcgccatcctggagaagtacgaggtgcccgtggaggacagcgtgctggagatgctggacagcctgaacggcgagtgggtggtgttccagcagaccctgctggacagcaagcagatgctgaagaagcacaaggagaagttcaagaccggcctgatccacagcgccgacgacttcaagaagaaggcccacaccctgctggaggacttcgagttcaagggccacttcaccagcaacgtgggctacatgagcgccctggaccagatcacccaggtgagagccatgctgatggccatgagagaggaggagaacagcctgagagccaacctgggcatcttcaagatcgagcagccccccagcaaggacctgcagaacctggagaaggagctggacgccctgcagcagatctgggagatcgccagagactgggaggagaactggaacgagtggaagaccggcagattcctgatcctgcagaccgagaccatggagaccaccgcccacggcctgttcagaagactgaccaagctggccaaggagtacaaggacagaaactgggagatcatcgagaccaccagaagcaagatcgagcagttcaagagaaccatgcccctgatcagcgacctgagaaaccccgccctgagagagagacactgggaccaggtgagagacgagatccagagagagttcgaccaggagagcgagagcttcaccctggagcagatcgtggagctgggcatggaccagcacgtggagaagatcggcgagatcagcgccagcgccaccaaggagctggccatcgaggtggccctgcagaacatcgccaagacctgggacgtgacccagctggacatcgtgccctacaaggacaagggccaccacagactgagaggcaccgaggaggtgttccaggccctggaggacaaccaggtggccctgagcaccatgaaggccagcagattcgtgaaggccttcgagaaggacgtggaccactgggagagatgcctgagcctgatcctggaggtgatcgagatgatcctgaccgtgcagagacagtggatgtacctggagaacatcttcctgggcgaggacatcagaaagcagctgcccaacgagagcaccctgttcgaccaggtgaacagcaactggaaggccatcatggacagaatgaacaaggacaacaacgccctgagaagcacccaccaccccggcctgctggacaccctgatcgagatgaacaccatcctggaggacatccagaagagcctggacatgtacctggagaccaagagacacatcttccccagattctacttcctgagcaacgacgacctgctggagatcctgggccagagcagaaaccccgaggccgtgcagccccacctgaagaagtgcttcgacaacatcaagctgctgagaatccagaaggtgggcggccccagcagcaagtgggaggccgtgggcatgttcagcggcgacggcgagtacatcgacttcctgcacagcgtgttcctggagggccccgtggagagctggctgggcgacgtggagcagaccatgagagtgaccctgagagacctgctgagaaactgccacctggccctgagaaagttcctgaacaagagagacaagtgggtgaaggagtgggccggccaggtggtgatcaccgccagccagatccagtggaccgccgacgtgaccaagtgcctgctgaccgccaaggagagagccgacaagaagatcctgaaggtgatgaagaagaaccaggtgagcatcctgaacaagtacagcgaggccatcagaggcaacctgaccaagatcatgagactgaagatcgtggccctggtgaccatcgagatccacgccagagacgtgctggagaagctgtacaagagcggcctgatggacgtgaacagcttcgactggctgagccagctgagattctactgggagaaggacctggacgactgcgtgatcagacagaccaacacccagttccagtacaactacgagtacctgggcaacagcggcagactggtgatcacccccctgaccgacagatgctacatgaccctgaccaccgccctgcacctgcacagaggcggcagccccaagggccccgccggcaccggcaagaccgagaccgtgaaggacctgggcaaggccctgggcatctacgtgatcgtggtgaactgcagcgagggcctggactacaagagcatgggcagaatgtacagcggcctggcccagaccggcgcctggggctgcttcgacgagttcaacagaatcaacatcgaggtgctgagcgtggtggcccaccagatcctgtgcatcctgagcgccctggccgccggcctgacccacttccacttcgacggcttcgagatcaacctggtgtggagctgcggcatcttcatcaccatgaaccccggctacgccggcagaaccgagctgcccgagaacctgaagagcatgttcagacccatcgccatggtggtgcccgacagcaccctgatcgccgagatcatcctgttcggcgagggcttcggcaactgcaagatcctggccaagaaggtgtacaccctgtacagcctggccgtgcagcagctgagcagacaggaccactacgacttcggcctgagagccctgaccagcctgctgagatacgccggcaagaagagaagactgcagcccgacctgaccgacgaggaggtgctgctgctgagcatgagagacatgaacatcgccaagctgaccagcgtggacgcccccctgttcaacgccatcgtgcaggacctgttccccaacatcgagctgcccgtgatcgactacggcaagctgagagagaccgtggagcaggagatcagagacatgggcctgcagagcacccccttcaccctgaccaaggtgttccagctgtacgagaccaagaacagcagacacagcaccatgatcgtgggctgcaccggcagcggcaagaccgccagctggagaatcctgcaggccagcctgagcagcctgtgcagagccggcgaccccaacttcaacatcgtgagagagttccccctgaaccccaaggccctgagcctgggcgagctgtacggcgagtacgacctgagcaccaacgagtggaccgacggcatcctgagcagcgtgatgagaaccgcctgcgccgacgagaagcccgacgagaagtggatcctgttcgacggccccgtggacaccctgtggatcgagaacatgaacagcgtgatggacgacaacaaggtgctgaccctgatcaacggcgagagaatcgccatgcccgagcaggtgagcctgctgttcgaggtggaggacctggccatggccagccccgccaccgtgagcagatgcggcatggtgtacaccgactacgccgacctgggctggaagccctacgtgcagagctggctggagaagagacccaaggccgaggtggagcccctgcagagaatgttcgagaagctgatcaacaagatgctggccttcaagaaggacaactgcaaggagctggtgcccctgcccgagtacagcggcatcaccagcctgtgcaagctgtacagcgccctggccacccccgagaacggcgtgaaccccgccgacggcgagaactacgtgaccatggtggagatgaccttcgtgttcagcatgatctggagcgtgtgcgccagcgtggacgaggagggcagaaagagaatcgacagctacctgagagagatcgagggcagcttccccaacaaggacaccgtgtacgagtacttcgtggaccccaagatcagaagctggaccagcttcgaggacaagctgcccaagagctggagatacccccccaacgcccccttctacaagatcatggtgcccaccgtggacaccgtgagatacaactacctggtgagcagcctggtggccaaccagaaccccatcctgctggtgggccccgtgggcaccggcaagaccagcatcgcccagagcgtgctgcagagcctgcccagcagccagtggagcgtgctggtggtgaacatgagcgcccagaccaccagcaacaacgtgcagagcatcatcgagagcagagtggagaagagaaccaagggcgtgtacgtgcccttcggcggcaagagcatgatcaccttcatggacgacctgaacatgcccgccaaggacatgttcggcagccagccccccctggagctgatcagactgtggatcgactacggcttctggtacgacagaaccaagcagaccatcaagtacatcagagagatgttcctgatggccgccatgggcccccccggcggcggcagaaccgtgatcagccccagactgagaagcagattcaacatcatcaacatgaccttccccaccaagagccagatcatcagaatcttcggcaccatgatcaaccagaagctgcaggacttcgaggaggaggtgaagcccatcggcaacgtggtgaccgaggccaccctggacatgtacaacaccgtggtgcagagattcctgcccacccccaccaagatgcactacctgttcaacctgagagacatcagcaaggtgttccagggcatgctgagagccaacaaggacttccacgacaccaagagcagcatcaccagactgtggatccacgagtgcttcagagtgttcagcgacagactggtggacgccgccgacaccgaggccttcatgggcatcatcagcgacaagctgggcagcttcttcgacctgaccttccaccacctgtgccccagcaagagaccccccatcttcggcgacttcctgaaggagcccaaggtgtacgaggacctgaccgacctgaccgtgctgaagaccgtgatggagaccgccctgaacgagtacaacctgagccccagcgtggtgcccatgcagctggtgctgttcagagaggccatcgagcacatcaccagaatcgtgagagtgatcggccagcccagaggcaacatgctgctggtgggcatcggcggcagcggcagacagagcctggccagactggccagcagcatctgcgactacaccaccttccagatcgaggtgaccaagcactacagaaagcaggagttcagagacgacatcaagagactgtacagacaggccggcgtggagctgaagaccaccagcttcatcttcgtggacacccagatcgccgacgagagcttcctggaggacatcaacaacatcctgagcagcggcgaggtgcccaacctgtacaagcccgacgagttcgaggagatccagagccacatcatcgaccaggccagagtggagcaggtgcccgagagcagcgacagcctgttcgcctacctgatcgagagagtgcagaacaacctgcacatcgtgctgtgcctgagccccatgggcgaccccttcagaaactggatcagacagtaccccgccctggtgaactgcaccaccatcaactggttcagcgagtggccccaggaggccctgctggaggtggccgagaagtgcctgatcggcgtggacctgggcacccaggagaacatccacagaaaggtggcccagatcttcgtgaccatgcactggagcgtggcccagtacagccagaagatgctgctggagctgagaagacacaactacgtgacccccaccaagtacctggagctgctgagcggctacaagaagctgctgggcgagaagagacaggagctgctggcccaggccaacaagctgagaaccggcctgttcaagatcgacgagaccagagagaaggtgcaggtgatgagcctggagctggaggacgccaagaagaaggtggccgagttccagaagcagtgcgaggagtacctggtgatcatcgtgcagcagaagagagaggccgacgagcagcagaaggccctggagagcctgaacaagaaggacatcggcgagatcaagagctacggcagaccccccgcccaggtggagatcgtgatgcaggccgtgatgatcctgagaggcaacgagcccacctgggccgaggccaagagacagctgggcgagcagaacttcatcaagagcctgatcaacttcgacaaggacaacatcagcgacaaggtgctgaagaagatcggcgcctactgcgcccagcccgacttccagcccgacatcatcggcagagtgagcctggccgccaagagcctgtgcatgtgggtgagagccatggagctgtacggcagactgtacagagtggtggagcccaagagaatcagaatgaacgccgccctggcccagctgagagagaagcaggccgccctggccgaggcccaggagaagctgagagaggtggccgagaagctggagatgctgaagaagcagtacgacgagaagctggcccagaaggaggagctgagaaagaagagcgaggagatggagctgaagctggagagagccggcatgctggtgagcggcctggccggcgagaaggccagatgggaggagaccgtgcagggcctggaggaggacctgggctacctggtgggcgactgcctgctggccgccgccttcctgagctacatgggccccttcctgaccaactacagagacgagatcgtgaaccagatctggatcggcaagatctgggagctgcaggtgccctgcagccccagcttcgccatcgacaacttcctgtgcaaccccaccaaggtgagagactggaacatccagggcctgcccagcgacgccttcagcaccgagaacggcatcatcgtgaccagaggcaacagatgggccctgatgatcgacccccaggcccaggccctgaagtggatcaagaacatggagggcggccagggcctgaagatcatcgacctgcagatgagcgactacctgagaatcctggagcacgccatccacttcggctaccccgtgctgctgcagaacgtgcaggagtacctggaccccaccctgaaccccatgctgaacaagagcgtggccagaatcggcggcagactgctgatgagaatcggcgacaaggaggtggagtacaacaccaacttcagattctacatcaccaccaagctgagcaacccccactacagccccgagaccagcgccaagaccaccatcgtgaacttcgccgtgaaggagcagggcctggaggcccagctgctgggcatcgtggtgagaaaggagagacccgagctggaggagcagaaggacagcctggtgatcaacatcgccgccggcaagagaaagctgaaggagctggaggacgagatcctgagactgctgaacgaggccaccggcagcctgctggacgacgtgcagctggtgaacaccctgcacaccagcaagatcaccgccaccgaggtgaccgagcagctggagaccagcgagaccaccgagatcaacaccgacctggccagagaggcctacagaccctgcgcccagagagccagcatcctgttcttcgtgctgaacgacatgggctgcatcgaccccatgtaccagttcagcctggacgcctacatcagcctgttcatcctgagcatcgacaagagccacagaagcaacaagctggaggacagaatcgactacctgaacgactaccacacctacgccgtgtacagatacacctgcagaaccctgttcgagagacacaagctgctgttcagcttccacatgtgcgccaagatcctggagaccagcggcaagctgaacatggacgagtacaacttcttcctgagaggcggcgtggtgctggacagagagggccagatggacaacccctgcagcagctggctggccgacgcctactgggacaacatcaccgagctggacaagctgaccaacttccacggcctgatgaacagcttcgagcagtaccccagagactggcacctgtggtacaccaacgccgcccccgagaaggccatgctgcccggcgagtgggagaacgcctgcaacgagatgcagagaatgctgatcgtgagaagcctgagacaggacagagtggccttctgcgtgaccagcttcatcatcaccaacctgggcagcagattcatcgagccccccgtgctgaacatgaagagcgtgctggaggacagcacccccagaagccccctggtgttcatcctgagccccggcgtggaccccaccagcgccctgctgcagctggccgagcacatgggcatggcccagagattccacgccctgagcctgggccagggccaggcccccatcgccgccagactgctgagagagggcgtgacccagggccactgggtgttcctggccaactgccacctgagcctgagctggatgcccaacctggacaagctggtggagcagctgcaggtggaggacccccaccccagcttcagactgtggctgagcagcatcccccaccccgacttccccatcagcatcctgcaggtgagcatcaagatgaccaccgagccccccaagggcctgaaggccaacatgaccagactgtaccagctgatgagcgagccccagttcagcagatgcagcaagcccgccaagtacaagaagctgctgttcagcctgtgcttcttccacagcgtgctgctggagagaaagaagttcctgcagctgggctggaacatcatctacggcttcaacgacagcgacttcgaggtgagcgagaacctgctgagcctgtacctggacgagtacgaggagaccccctgggacgccctgaagtacctgatcgccggcatcaactacggcggccacgtgaccgacgactgggacagaagactgctgaccacctacatcaacgactacttctgcgaccagagcctgagcacccccttccacagactgagcgccctggagacctacttcatccccaaggacggcagcctggccagctacaaggagtacatcagcctgctgcccggcatggacccccccgaggccttcggccagcaccccaacgccgacgtggccagccagatcaccgaggcccagaccctgttcgacaccctgctgagcctgcagccccagatcacccccaccagagccggcggccagaccagagaggagaaggtgctggagctggccgccgacgtgaagcagaagatccccgagatgatcgactacgagggcacccagaagctgctggccctggaccccagccccctgaacgtggtgctgctgcaggagatccagagatacaacaccctgatgcagaccatcctgttcagcctgaccgacctggagatccccagctgcgtgagccacaagagcgagagagtggtgctggagctgagcgccgtgaagcaccccagacagtag

SEQ ID NO: 206308 - DNA, 14955 bp, Artificial Sequence
  derived and/or modified sequence
cttctacatcgcgaatatccctcgccggcctggcgcccggcgccatctgctggacccgttccggctggggcgcacagacctgggcgcggggtcgggcgattgggttctccctgccttttcaatgtcctgcggggcggtggctcactgtctctcgccccagcccttccagctgggtcctgacaccaggccccccgcacccttcggctcgccagatgtggctactttcctttagtcccggagccttcaagccctgggtccctgaggggtagacctgggcggggtggggccgcgaagcagggatccagggcgcctgcgcggaggaggcgggctccgaggggccgcacaccggccactcgcccctccctgcccggggttgccatggggacgcgtgcagacgccggcccgagagggctgcgaggggcaacttcttagagtggcccatcggtcggtctagggaggggagggtcagcgtggcaaggtgtgtgtcgggggcagagggaaggagggaaggagtgctggggagaaggggcagtagtgtcggggtaggaagggacagttgttggggagaagaggcagttgtggagggagagggagcaaggaatatttgtgtgggggagggggaggagaaggggcagttgtgacagctgggggggaagagccattctgaggggaaatttgcctgctggtaaccagtttaaggataccagctgctggtataaatactgctggataaatactgctggatttatactgcaggataaatactgctggcccctgcggtatttcctagtactagagtgagccccgacttagcagagcagttcctcctggggcctgcggtgtgggatcgcgtggtgaaccccacggtgcatgcgcctcaggctctagtttgaggcaggaaagcgcagcttgatgcttctctggagactgatggaggaagcctccttgctgtagttggttttattgatttgctggcctaacagaacgtttttccttggagcaaagtacaaatccttcaagtttgaaattcataacctgagatcaatgcctgtggcagcctgtggggatgaggaaggagagccacaggtgccgttaggctgcagcctaatgaaaagagagtgcccagcgcctcagactttgcgcctgggattctgagcacctgtccgagatccccgcttcctgccatcctacctttctgagagaggcaccactgtgaccttcctcgtgccccaattgctttttcctcatgacacaatttgaaatttatgattggatgacttttgtccttctttcttccaatctgttctcagggcattttgagtcaaataaatgatcctgactgatcttaaccattagcacagagttcctcagccaactctgctaagagacctcagtacacacaaaacagtgttcctgcccctcaggacttcaaagcgatagacccaggttttgcctgcacgatgtccagcaaagctgagaagaagcagcgattgagtggccgaggaagctcccaggcaagctggtcagggcgggccactcgggctgctgtggccacacaggagcaggggaatgccccggctgtcagtgagccagagctgcaggctgagctccccaaggaggagcctgagccacggttggagggacctcaagcacagagtgaagaatcagtggagcccgaggcagatgtgaagcccctcttcctttcccgagctgcgctgacaggactggcggatgcagtgtggacacaggagcatgatgccattctggaacactttgcccaggaccctacagaatccatcctcaccatcttcattgacccttgttttgggctgaagctagagctgggcatgcctgtacagacccagaaccagcttgtctacttcattcgccaagcaccagttcccatcacctgggagaacttcgaggcaactgtgcagtttgggacggtgcggggcccctatatcccggccctgcttcggctgctcggtggagtctttgcccctcagatctttgcaaacacaggctggcctgagagcattagaaatcattttgcttctcatctgcacaagttcttggcctgcctgacagacactcggtacaaactggaggggcacacggtcctctacatccctgcagaggccatgaacatgaagcctgagatggtgataaaggacaaagagctggtgcaacggctagagacctccatgatccactggacccggcagataaaggagatgctcagtgcccaggagactgtggagacaggagaaaatttaggtcctctggaggagattgagttctggcgcaaccgatgcatggacctgtctggcatcagtaagcagctggtgaagaagggagtgaagcacgttgaatccatcctgcaccttgccaagtcgtcctacttggcgccctttatgaaactggcacagcagatccaggatggctctcgtcaagcacagtcaaacctgacctttttgtcaatcctgaaggaaccttaccaggagttggctttcatgaagcccaaggacatctctagcaagctccctaagctgatcagtctcatccgcatcatctgggtcaactctccccactacaacactcgggagagactgacctcgctcttccgaaaggtatgtgactgtcagtatcacttcgcccgctgggaagatggcaagcagggtccccttccttgcttctttggtgcccaggggccacagataacacggaacttgctggagattgaggacatctttcataaaaatctgcacacgctgcgagccgttcgcgggggtatcctggatgtcaagaacacctgttggcatgaagactacaataagttccgtgccggaatcaaggacctggaggtgatgacccagaacctgatcacctcagccttcgagttggtgcgggacgtgccgcacggcgtgcttctgctggacaccttccacaggcttgcctcccgcgaggctatcaagcggacttatgacaagaaggcggtggatctctacatgctgttcaatagcgagctggccctggtgaaccgtgaacggaacaagaaatggccagacctggagccctacgtggcccagtattccggaaaggcgcgctgggtgcacatcctccggcgtcgcatcgacagagtcatgacctgccttgctggtgctcatttcctgccccgtattgggactggaaaggagagtgtgcacacctatcagcagatggtccaggccattgatgagctggttcgaaaaaccttccaagagtggacatcaagtctggacaaggattgcattcggcggttggataccccattgctgcgaatcagccaggagaaggcgggcatgctggatgtcaactttgacaagtcccttctgattctctttgcggaaattgactactgggagcggctgctgtttgagacgccccattacgtggtgaacgtagctgagcgagccgaggacctgcgcattctgcgtgaaaatctgctactcgttgctagagactacaataggattattgccatgctgtccccagatgagcaggccctattcaaagagcgtattcggctcctggataagaagatccacccgggactcaagaaactgcactgggccttgaagggggccagtgccttcttcatcacggagtgccgtatacatgccagcaaggtgcagatgattgtgaatgagttcaaggcatccactctgaccattggctggcgagcccaagagatgtcagagaagctgctggtacgcattagtggcaaacgggtatacagggacctggaatttgaagaggaccaaagagagcatcgggcagctgtacagcagaaattgatgaacctgcaccaggatgtggtgaccatcatgaccaactcctatgaggtcttcaagaatgatggtcctgagattcagcagcagtggatgctgtacatgattcggctggaccgcatgatggaggatgccctgcgcctgaatgtgaagtggtcactgctagaactatccaaggctatcaacggggatggaaagaccagcccaaacccactcttccaagtccttgtcattttgaagaatgatctgcaaggaagtgtggcacaggtggaattctcacccactctgcagactttggcaggtgtggtcaatgacattggcaaccacctcttttccaccatctctgtcttctgccacctccctgacattctcaccaagcgcaagttacatcgtgaacccatccaaacagttgtggagcaagatgaggacatcaagaagatccagacccaaatcagcagcggcatgactaacaacgcaagcctgctgcagaactacctcaagacctgggacatgtaccgggagatctgggagatcaacaaggactccttcattcatcgctaccagcgcctcaaccctcctgtctcttcttttgttgccgacattgcccgctacacggaagttgctaataacgtgcagaaggaggagacagtcaccaacatccagtttgtgctgctggactgttcgcacctcaagttctccctggtgcagcactgcaatgaatggcagaacaagttcgcgactctgctcagggagatggctgctgggcgcctcctggagctgcacacctacctgaaggagaacgcagagaaaatcagccgccctccgcagacactggaggaactgggggtcagcttgcagctcgtggatgccctgaagcacgacttggccaacgtggagactcagatccctcccatacacgagcaatttgccattcttgaaaagtacgaggtgccagtcgaggacagtgtcctggagatgctggacagtctcaacggggagtgggttgtcttccaacaaactctgctggacagtaagcaaatgctgaagaaacacaaggagaaattcaagacaggcctgatccactcggcagatgacttcaagaagaaagcacatacacttctggaagatttcgaattcaaaggccatttcaccagcaacgtgggatacatgtctgccttagaccagattacacaagtgcgggccatgctgatggccatgcgggaagaggaaaatagtctccgagccaacctgggcatcttcaagatcgagcagccaccctccaaggaccttcagaacctggagaaggagctcgatgccctccagcaaatctgggagatcgcacgagactgggaggagaactggaatgagtggaagactggccggttcctgatcctgcagacggaaaccatggagaccacggcccacgggctgtttcgtcgcctcacaaaattagccaaagagtataaggaccgaaactgggaaattattgaaaccactcgctcaaaaatagagcagttcaagaggaccatgcctctcatctcagacctgcggaaccctgcccttagagagaggcactgggaccaggtccgggatgagatccagcgggagtttgatcaggaatctgaaagcttcaccttggagcagattgtggagcttgggatggatcagcatgtggagaaaattggggagatctctgcttcagcaactaaagagctggctatagaagtggctttacaaaacattgccaagacctgggatgtgactcagctcgacatagtaccctacaaggataagggccatcatcggctcagaggtacagaagaagtattccaggcactggaagataaccaggtagctctgtctaccatgaaggcatcacgctttgtcaaggcctttgagaaggatgtggaccactgggaacgctgcctctccctcattttggaggttattgagatgattctcacagtgcagcgtcagtggatgtacttagagaatatcttcctaggagaagacatccgcaagcagctgcccaatgaatcgaccttatttgaccaggtcaacagcaactggaaagccatcatggacaggatgaacaaggacaacaatgctctccggagcacccatcacccaggcctcctggacacattgatagaaatgaatacaatcctggaagatattcagaaatctctggatatgtatttagagaccaagcgacatattttcccccgcttctacttcttgtccaatgatgacctgctggagattctgggccagtcccgaaacccagaggctgtgcagccacacctcaaaaaatgctttgacaacatcaagttgctgagaatccagaaggttggagggcccagcagcaaatgggaagctgtggggatgttctcgggcgacggcgagtacattgacttcctccactcagtatttttagaaggccctgtggagtcctggcttggcgatgtggaacagaccatgagggtgaccctgcgggaccttctccggaactgccacctggccctcaggaagttcctcaacaagagggacaaatgggtgaaggagtgggctggccaggtggtgatcactgccagtcagatccagtggacggctgatgtcaccaagtgcctgctgacagcgaaggagcgggcagacaagaaaatcctcaaggtcatgaagaagaaccaggtgtcaatcctgaataagtattcagaagccatcagggggaacttgaccaagatcatgcggcttaaaattgtggctctggtgacgatagaaattcatgcccgggatgtgttggagaagctttacaagagtggcctcatggatgtcaattcctttgactggctcagccaacttcggttctactgggagaaggatcttgatgactgtgtcatccgccagaccaacacgcaatttcagtataattatgagtacttgggtaactcgggccggctcgtcatcacccccctgacggacaggtgttacatgacactgaccacggcattgcacctgcaccgagggggctcccccaaaggccctgcaggcacaggcaagaccgagaccgtcaaggacctgggcaaggccctgggcatatatgtcattgtggtcaactgctctgagggcctggactacaagtccatgggccgaatgtactcaggtctggcccagactggagcttggggctgctttgatgagtttaaccgcatcaacatcgaggtgctgtcagtggtggcccaccagatcctgtgcatcctgtctgccctggctgccggcctcacccatttccattttgatggctttgaaataaatctggtgtggtcctgtgggatcttcattaccatgaatcctggctatgctggccgcacagagcttcccgaaaatcttaaatccatgttccgcccaattgccatggtggtgcctgactccaccctcattgcagaaatcattctctttggagagggctttggcaactgcaagattctggccaagaaggtgtacacactctactcactggctgtgcagcagctgtccagacaggaccactatgactttggcctgcgtgccctcacctcccttctgcgctatgctggcaagaagcgccgcctacagccggatctgactgatgaagaggttctgctgctctcaatgagagatatgaacatcgccaagctcacttcagttgatgcacccctgttcaatgccatcgtgcaagatctgtttcccaacattgagctgcctgtcattgactatggcaagctgcgggagaccgttgagcaggagattcgagacatgggcctgcaaagcacgccgttcaccctcaccaaggttttccagttgtatgaaaccaagaactcccgccactccaccatgatcgtgggctgcacgggcagcggcaagactgcctcatggcgcattctacaggcctccctgtcctctctgtgccgcgccggagaccctaacttcaacattgttagagagttccctttgaaccccaaggcattgtccctaggggaactgtatggggaatatgacctcagcaccaatgaatggacagatggcatcttgtccagtgtcatgcggacggcatgtgcagatgagaaacccgacgagaagtggatcctgttcgatggccccgtggacacactgtggatcgagaacatgaactccgtcatggacgataacaaggtgttgaccctcatcaacggcgagcgcatcgcgatgcccgagcaggtgtctctcctgtttgaagtggaggacctggcaatggcctctccggccactgtatcccgctgcgggatggtctacactgactacgctgacctgggctggaagccctatgttcagtcatggctggagaagaggccaaaggctgaggtggagccccttcaacgcatgttcgaaaagctcatcaacaagatgctggcctttaagaaggacaactgcaaggagctggtgcccctgcccgagtacagcggtatcacctccctctgcaagctgtactctgccctggccacgccagagaatggggtgaacccagctgacggcgagaactatgtcaccatggtagagatgacatttgtgttcagcatgatctggtctgtgtgtgcctctgtggatgaggagggccggaagaggatcgacagctacctccgagagatcgagggctcctttcccaataaggacacggtatatgagtattttgtggaccccaaaatacggagttggacatcatttgaggacaagctccctaagagttggcgctaccctccaaacgcccccttctataagatcatggtgcccaccgtcgacactgttcgctacaactacctggtgagcagcttggtggccaaccagaatcccattctgctggtgggtcccgtggggactgggaagacctccatcgcccagagcgttctgcagtccctgccctccagccagtggtcggtgctcgttgtcaacatgtccgcacagaccacatccaataacgtgcagagcatcattgagagcagggttgagaagcgaaccaagggtgtctacgtgccattcgggggcaaaagcatgatcacctttatggatgacctaaatatgcccgctaaggacatgtttgggtcccagccacccctggagctgatccgcctctggattgactatggcttctggtatgaccgtacgaagcagaccatcaagtacattcgagaaatgttcctgatggctgccatgggcccccctgggggtggacggactgtcatctccccaaggctacggagtcgcttcaacattatcaacatgaccttccccacaaagtcccagatcatccgcatattcggcaccatgatcaatcagaagcttcaggactttgaggaagaggtgaagcccattgggaacgtggtgacagaggccaccctggacatgtacaacaccgtggtacagcgcttcctgcccacgcccaccaagatgcattacctcttcaaccttcgagacatctccaaggtgttccagggcatgcttagagccaacaaggacttccatgataccaagtccagcatcacacggctctggatccatgaatgtttcagagtcttctctgaccggctggttgatgcggcagacacagaagccttcatgggcatcataagcgacaagctcggctccttctttgacctcacatttcatcatctctgtcccagcaagcgtcctcctatctttggggatttcctgaaggagcccaaggtgtatgaagacctcacggatctgacagtgctgaagacagtcatggagacagctctaaatgagtataacctgtcaccctctgtcgtgcccatgcagctagtgctcttccgagaggctattgaacacatcacacggatcgtgcgggtcattggacagcctcggggcaacatgctcctggtgggtatcgggggcagcggacgccagagtctggcccgcctggcttcatccatctgcgactacaccaccttccagatcgaggtcaccaaacattatcggaagcaggagttccgagatgatatcaagcgtctgtatcgccaggctggggtggagctcaagaccacgtccttcatttttgtggacacccaaatagctgatgagtccttcctagaggacatcaacaacatcctcagctcaggcgaggtgcccaatctctacaagcctgatgaatttgaagagatccagtcgcatatcatagaccaggcccgggtggagcaggtgcctgagtcatcggacagcctcttcgcctacctcattgaacgcgtgcagaacaacctgcacatcgtgctctgcctcagccccatgggggatcccttcaggaactggatccgccagtacccagccttggtgaactgcacaaccatcaactggttctcagagtggccccaagaggccctgctcgaggtggctgagaagtgcctcataggagtagacctgggaactcaggagaatatccacaggaaggtggcccagatctttgtcactatgcactggtcagtagctcagtattcccagaagatgctgttggaactgcggagacacaactatgtcacacccaccaaatacctggaactcctgtctggatataagaagttgctgggagaaaaacggcaggagctgctggcccaagccaataaactgcggacaggcttgttcaagatcgacgaaactagggaaaaggtgcaagtgatgtcgttggagctggaggatgccaagaagaaggtggctgagttccagaagcagtgtgaggagtacctggtcatcattgtgcagcagaagcgggaggcagatgagcagcagaaggccgtaacagccaacagtgaaaagattgcagttgaggaaatcaagtgtcaggcactggctgacaatgcccagaaagatctagaagaggcactgcccgccctggaagaggccatgcgggccctggagtctctgaacaagaaggatataggagagatcaagtcttatggacggcccccagcccaagtggagatagtgatgcaggcagttatgattcttcgaggcaacgagcccacatgggcagaggccaagaggcagctaggggaacagaacttcatcaagtcactgatcaactttgataaagacaatatctcagataaggttctgaagaagattggggcctactgcgcccagcctgacttccagcctgatatcatcggccgcgtctccctggctgccaagtccctctgcatgtgggtgcgggccatggagctgtatgggcggctatatcgggtggtggagcccaagcgaatccgaatgaacgctgccttggctcagcttcgggagaagcaagccgcgctcgctgaggcccaggagaagctgcgggaggtagctgagaaactggagatgctaaagaaacagtatgatgagaagctggcacagaaggaggagcttcgcaagaagtctgaagagatggagctgaagctggagcgagctgggatgctcgtgtcggggttggctggcgagaaggccagatgggaggagacagtccagggcctggaggaggacctgggctacctggtgggggactgtctcctggcagctgccttcctgtcctacatgggacccttcctgaccaactaccgggatgagattgtcaaccaaatctggatcgggaagatctgggagcttcaggttccttgctccccttctttcgccatcgataacttcctgtgcaatcctaccaaagtccgggactggaacatccaagggttgccctcagacgccttctccactgagaatggcatcatcgtcacccgaggcaacaggtgggcactgatgatcgaccctcaggcccaggccctgaaatggattaagaacatggaaggaggccagggcctgaagatcatcgacctgcagatgagcgattacctgcgaatcctagaacacgccattcactttggatacccggtgctacttcagaacgtgcaggaatatctggaccccacactgaaccccatgctcaacaaatctgtagcccgaatcggtggtcggctgttgatgcgcattggcgataaggaggtggaatataataccaatttccgtttctacatcaccaccaagctctccaacccccactacagcccagagacctcagccaagaccaccatcgtcaactttgctgttaaagaacagggcctggaggcccagctgctgggcattgtggtgcggaaggagcggcctgagctggaggagcagaaggactcactggtcatcaacatcgcggctggtaaaaggaagctcaaggagctggaggatgagatcctgcggctgctgaatgaggccaccggctccctgctggatgatgtgcagctggtgaacacgctgcatacctccaagatcacagccacagaggtgactgagcagctggagaccagtgagaccacagagatcaacactgacttggcgcgggaggcttaccgcccatgcgcccagcgggcatcaatcctgttcttcgtgctcaatgatatgggctgcatcgaccccatgtaccagttctcactggatgcctacatcagcctctttattctcagcattgacaaaagccaccgcagcaataagctggaggaccgcattgactacctgaatgactaccacacctacgctgtctacaggtacacctgccgtacccttttcgaacgccacaaactactattcagttttcatatgtgtgccaaaatcttggagacttctggcaagctcaacatggatgaatacaacttctttctacgtgggggtgtggtcttggatcgggagggccaaatggacaatccatgtagtagctggcttgcagatgcctactgggataacatcacagagctagacaaactgaccaacttccacggactcatgaactcctttgagcagtaccctcgtgactggcacctgtggtataccaatgctgccccggagaaggcgatgctgccaggtgagtgggaaaatgcctgcaatgaaatgcaacggatgctgatcgttcgctccctgcgccaggaccgcgtggccttctgcgtgacctccttcatcatcaccaaccttggctcccgcttcatcgagccgcctgtgctgaatatgaagtcggtgctggaggattcaaccccacgatccccactcgtgttcatcctgtcccctggtgtggaccccaccagtgccctgctgcagctggcagagcacatgggcatggcccagcgcttccacgccctgtccctgggccagggccaggcccccatcgctgctcggctcctccgagagggtgtgactcagggacactgggtgttcctggcaaactgccacctgtcactgtcttggatgcctaatctggacaagctggtggagcagctgcaggtggaggatcctcatccatccttccgcctctggctcagctccatcccccacccagacttccctatctcaatcttgcaggtcagcatcaagatgaccacagagccaccaaagggcctaaaggccaacatgacacgtctttaccaactgatgtcagaaccacagttttcccgctgctccaaacctgccaaatataagaagctgctgttttcactctgtttcttccactctgtgttacttgaacgcaaaaagttcctgcagcttggctggaacatcatctatggcttcaatgactccgactttgaggtgtcagaaaacttgctgagcctctatctcgatgagtacgaggagacaccttgggacgcacttaagtacctcattgccggcatcaactatggtggacatgtcacagatgactgggaccggcgcctgctgaccacctacatcaatgattatttctgtgaccagtctctatcaactcccttccaccggttgtcagcactggagacttatttcatccccaaggatggcagcctcgcttcttacaaggaatacatcagcttattgcctggcatggacccccctgaggcctttggccagcaccccaatgctgatgtggcctctcagatcactgaggcacaaaccctctttgatactttgctttccttgcaacctcagattacacccaccagggctggaggccagacccgggaagagaaggtccttgagttggccgctgatgtgaagcagaagatccctgaaatgatcgactatgaggggactcaaaaactgctagctctcgacccctcccccctcaatgtggtccttctgcaggagatccagagatacaacacactgatgcagaccatcctgttctcactgacagacctagagaaaggcatccagggtctcatcgtcatgtctacaagcctggaagagattttcaattgcatctttgatgcccatgttcctccgctctggggaaaggcatacccctcacaaaagccattggctgcctggacccgggacttggccatgcgtgtggagcagtttgagctgtgggccagccgggcccggcctcctgtgatcttctggttgtctggtttcacctttcccactggcttcctcactgctgtgctgcagtcttcagctcgccaaaacaacgtttcagtggacagcctctcctgggagtttatcgtttccactgtggatgacagcaacctagtgtatccccccaaggatggtgtctgggtccggggcctgtacctggaaggtgctggctgggaccggaagaactcctgcttggtggaggcagagcccatgcagcttgtctgcctcatgcccacgatccacttccggcctgcagagagccgcaagaagagcgccaagggcatgtactcctgcccctgctattactatcccaaccgggcaggcagctcagaccgagcctcctttgtcatcggcattgacctgcggtctggggccatgacacctgatcattggatcaagaggggcactgctctactcatgagcctggacagctgagacctcctcctcttctccgcttgagagagagggtcagggactccaggagctaagacagatgttgcacctaggactgaggccggacctcactcagactttgaccttggccgaatttgtgtgatgtggccctggagatacctagttgtgttagccataaaagtgaaagagttgtattggagctcagtgctgtaaaacacccgcgacaacaagc

SEQ ID NO: 206309 - DNA, 12602 bp, Artificial Sequence
  derived and/or modified sequence
gttttgcctgcacgatgtccagcaaagctgagaagaagcagcgattgagtggccgaggaagctcccaggcaagctggtcagggcgggccactcgggctgctgtggccacacaggagcaggggaatgccccggctgtcagtgagccagagctgcaggctgagctccccaaggaggagcctgagccacggttggagggacctcaagcacagagtgaagaatcagtggagcccgaggcagatgtgaagcccctcttcctttcccgagctgcgctgacaggactggcggatgcagtgtggacacaggagcatgatgccattctggaacactttgcccaggaccctacagaatccatcctcaccatcttcattgacccttgttttgggctgaagctagagctgggcatgcctgtacagacccagaaccagcttgtctacttcattcgccaagcaccagttcccatcacctgggagaacttcgaggcaactgtgcagtttgggacggtgcggggcccctatatcccggccctgcttcggctgctcggtggagtctttgcccctcagatctttgcaaacacaggctggcctgagagcattagaaatcattttgcttctcatctgcacaagttcttggcctgcctgacagacactcggtacaaactggaggggcacacggtcctctacatccctgcagaggccatgaacatgaagcctgagatggtgataaaggacaaagagctggtgcaacggctagagacctccatgatccactggacccggcagataaaggagatgctcagtgcccaggagactgtggagacaggagaaaatttaggtcctctggaggagattgagttctggcgcaaccgatgcatggacctgtctggcatcagtaagcagctggtgaagaagggagtgaagcacgttgaatccatcctgcaccttgccaagtcgtcctacttggcgccctttatgaaactggcacagcagatccaggatggctctcgtcaagcacagtcaaacctgacctttttgtcaatcctgaaggaaccttaccaggagttggctttcatgaagcccaaggacatctctagcaagctccctaagctgatcagtctcatccgcatcatctgggtcaactctccccactacaacactcgggagagactgacctcgctcttccgaaaggtatgtgactgtcagtatcacttcgcccgctgggaagatggcaagcagggtccccttccttgcttctttggtgcccaggggccacagataacacggaacttgctggagattgaggacatctttcataaaaatctgcacacgctgcgagccgttcgcgggggtatcctggatgtcaagaacacctgttggcatgaagactacaataagttccgtgccggaatcaaggacctggaggtgatgacccagaacctgatcacctcagccttcgagttggtgcgggacgtgccgcacggcgtgcttctgctggacaccttccacaggcttgcctcccgcgaggctatcaagcggacttatgacaagaaggcggtggatctctacatgctgttcaatagcgagctggccctggtgaaccgtgaacggaacaagaaatggccagacctggagccctacgtggcccagtattccggaaaggcgcgctgggtgcacatcctccggcgtcgcatcgacagagtcatgacctgccttgctggtgctcatttcctgccccgtattgggactggaaaggagagtgtgcacacctatcagcagatggtccaggccattgatgagctggttcgaaaaaccttccaagagtggacatcaagtctggacaaggattgcattcggcggttggataccccattgctgcgaatcagccaggagaaggcgggcatgctggatgtcaactttgacaagtcccttctgattctctttgcggaaattgactactgggagcggctgctgtttgagacgccccattacgtggtgaacgtagctgagcgagccgaggacctgcgcattctgcgtgaaaatctgctactcgttgctagagactacaataggattattgccatgctgtccccagatgagcaggccctattcaaagagcgtattcggctcctggataagaagatccacccgggactcaagaaactgcactgggccttgaagggggccagtgccttcttcatcacggagtgccgtatacatgccagcaaggtgcagatgattgtgaatgagttcaaggcatccactctgaccattggctggcgagcccaagagatgtcagagaagctgctggtacgcattagtggcaaacgggtatacagggacctggaatttgaagaggaccaaagagagcatcgggcagctgtacagcagaaattgatgaacctgcaccaggatgtggtgaccatcatgaccaactcctatgaggtcttcaagaatgatggtcctgagattcagcagcagtggatgctgtacatgattcggctggaccgcatgatggaggatgccctgcgcctgaatgtgaagtggtcactgctagaactatccaaggctatcaacggggatggaaagaccagcccaaacccactcttccaagtccttgtcattttgaagaatgatctgcaaggaagtgtggcacaggtggaattctcacccactctgcagactttggcaggtgtggtcaatgacattggcaaccacctcttttccaccatctctgtcttctgccacctccctgacattctcaccaagcgcaagttacatcgtgaacccatccaaacagttgtggagcaagatgaggacatcaagaagatccagacccaaatcagcagcggcatgactaacaacgcaagcctgctgcagaactacctcaagacctgggacatgtaccgggagatctgggagatcaacaaggactccttcattcatcgctaccagcgcctcaaccctcctgtctcttcttttgttgccgacattgcccgctacacggaagttgctaataacgtgcagaaggaggagacagtcaccaacatccagtttgtgctgctggactgttcgcacctcaagttctccctggtgcagcactgcaatgaatggcagaacaagttcgcgactctgctcagggagatggctgctgggcgcctcctggagctgcacacctacctgaaggagaacgcagagaaaatcagccgccctccgcagacactggaggaactgggggtcagcttgcagctcgtggatgccctgaagcacgacttggccaacgtggagactcagatccctcccatacacgagcaatttgccattcttgaaaagtacgaggtgccagtcgaggacagtgtcctggagatgctggacagtctcaacggggagtgggttgtcttccaacaaactctgctggacagtaagcaaatgctgaagaaacacaaggagaaattcaagacaggcctgatccactcggcagatgacttcaagaagaaagcacatacacttctggaagatttcgaattcaaaggccatttcaccagcaacgtgggatacatgtctgccttagaccagattacacaagtgcgggccatgctgatggccatgcgggaagaggaaaatagtctccgagccaacctgggcatcttcaagatcgagcagccaccctccaaggaccttcagaacctggagaaggagctcgatgccctccagcaaatctgggagatcgcacgagactgggaggagaactggaatgagtggaagactggccggttcctgatcctgcagacggaaaccatggagaccacggcccacgggctgtttcgtcgcctcacaaaattagccaaagagtataaggaccgaaactgggaaattattgaaaccactcgctcaaaaatagagcagttcaagaggaccatgcctctcatctcagacctgcggaaccctgcccttagagagaggcactgggaccaggtccgggatgagatccagcgggagtttgatcaggaatctgaaagcttcaccttggagcagattgtggagcttgggatggatcagcatgtggagaaaattggggagatctctgcttcagcaactaaagagctggctatagaagtggctttacaaaacattgccaagacctgggatgtgactcagctcgacatagtaccctacaaggataagggccatcatcggctcagaggtacagaagaagtattccaggcactggaagataaccaggtagctctgtctaccatgaaggcatcacgctttgtcaaggcctttgagaaggatgtggaccactgggaacgctgcctctccctcattttggaggttattgagatgattctcacagtgcagcgtcagtggatgtacttagagaatatcttcctaggagaagacatccgcaagcagctgcccaatgaatcgaccttatttgaccaggtcaacagcaactggaaagccatcatggacaggatgaacaaggacaacaatgctctccggagcacccatcacccaggcctcctggacacattgatagaaatgaatacaatcctggaagatattcagaaatctctggatatgtatttagagaccaagcgacatattttcccccgcttctacttcttgtccaatgatgacctgctggagattctgggccagtcccgaaacccagaggctgtgcagccacacctcaaaaaatgctttgacaacatcaagttgctgagaatccagaaggttggagggcccagcagcaaatgggaagctgtggggatgttctcgggcgacggcgagtacattgacttcctccactcagtatttttagaaggccctgtggagtcctggcttggcgatgtggaacagaccatgagggtgaccctgcgggaccttctccggaactgccacctggccctcaggaagttcctcaacaagagggacaaatgggtgaaggagtgggctggccaggtggtgatcactgccagtcagatccagtggacggctgatgtcaccaagtgcctgctgacagcgaaggagcgggcagacaagaaaatcctcaaggtcatgaagaagaaccaggtgtcaatcctgaataagtattcagaagccatcagggggaacttgaccaagatcatgcggcttaaaattgtggctctggtgacgatagaaattcatgcccgggatgtgttggagaagctttacaagagtggcctcatggatgtcaattcctttgactggctcagccaacttcggttctactgggagaaggatcttgatgactgtgtcatccgccagaccaacacgcaatttcagtataattatgagtacttgggtaactcgggccggctcgtcatcacccccctgacggacaggtgttacatgacactgaccacggcattgcacctgcaccgagggggctcccccaaaggccctgcaggcacaggcaagaccgagaccgtcaaggacctgggcaaggccctgggcatatatgtcattgtggtcaactgctctgagggcctggactacaagtccatgggccgaatgtactcaggtctggcccagactggagcttggggctgctttgatgagtttaaccgcatcaacatcgaggtgctgtcagtggtggcccaccagatcctgtgcatcctgtctgccctggctgccggcctcacccatttccattttgatggctttgaaataaatctggtgtggtcctgtgggatcttcattaccatgaatcctggctatgctggccgcacagagcttcccgaaaatcttaaatccatgttccgcccaattgccatggtggtgcctgactccaccctcattgcagaaatcattctctttggagagggctttggcaactgcaagattctggccaagaaggtgtacacactctactcactggctgtgcagcagctgtccagacaggaccactatgactttggcctgcgtgccctcacctcccttctgcgctatgctggcaagaagcgccgcctacagccggatctgactgatgaagaggttctgctgctctcaatgagagatatgaacatcgccaagctcacttcagttgatgcacccctgttcaatgccatcgtgcaagatctgtttcccaacattgagctgcctgtcattgactatggcaagctgcgggagaccgttgagcaggagattcgagacatgggcctgcaaagcacgccgttcaccctcaccaaggttttccagttgtatgaaaccaagaactcccgccactccaccatgatcgtgggctgcacgggcagcggcaagactgcctcatggcgcattctacaggcctccctgtcctctctgtgccgcgccggagaccctaacttcaacattgttagagagttccctttgaaccccaaggcattgtccctaggggaactgtatggggaatatgacctcagcaccaatgaatggacagatggcatcttgtccagtgtcatgcggacggcatgtgcagatgagaaacccgacgagaagtggatcctgttcgatggccccgtggacacactgtggatcgagaacatgaactccgtcatggacgataacaaggtgttgaccctcatcaacggcgagcgcatcgcgatgcccgagcaggtgtctctcctgtttgaagtggaggacctggcaatggcctctccggccactgtatcccgctgcgggatggtctacactgactacgctgacctgggctggaagccctatgttcagtcatggctggagaagaggccaaaggctgaggtggagccccttcaacgcatgttcgaaaagctcatcaacaagatgctggcctttaagaaggacaactgcaaggagctggtgcccctgcccgagtacagcggtatcacctccctctgcaagctgtactctgccctggccacgccagagaatggggtgaacccagctgacggcgagaactatgtcaccatggtagagatgacatttgtgttcagcatgatctggtctgtgtgtgcctctgtggatgaggagggccggaagaggatcgacagctacctccgagagatcgagggctcctttcccaataaggacacggtatatgagtattttgtggaccccaaaatacggagttggacatcatttgaggacaagctccctaagagttggcgctaccctccaaacgcccccttctataagatcatggtgcccaccgtcgacactgttcgctacaactacctggtgagcagcttggtggccaaccagaatcccattctgctggtgggtcccgtggggactgggaagacctccatcgcccagagcgttctgcagtccctgccctccagccagtggtcggtgctcgttgtcaacatgtccgcacagaccacatccaataacgtgcagagcatcattgagagcagggttgagaagcgaaccaagggtgtctacgtgccattcgggggcaaaagcatgatcacctttatggatgacctaaatatgcccgctaaggacatgtttgggtcccagccacccctggagctgatccgcctctggattgactatggcttctggtatgaccgtacgaagcagaccatcaagtacattcgagaaatgttcctgatggctgccatgggcccccctgggggtggacggactgtcatctccccaaggctacggagtcgcttcaacattatcaacatgaccttccccacaaagtcccagatcatccgcatattcggcaccatgatcaatcagaagcttcaggactttgaggaagaggtgaagcccattgggaacgtggtgacagaggccaccctggacatgtacaacaccgtggtacagcgcttcctgcccacgcccaccaagatgcattacctcttcaaccttcgagacatctccaaggtgttccagggcatgcttagagccaacaaggacttccatgataccaagtccagcatcacacggctctggatccatgaatgtttcagagtcttctctgaccggctggttgatgcggcagacacagaagccttcatgggcatcataagcgacaagctcggctccttctttgacctcacatttcatcatctctgtcccagcaagcgtcctcctatctttggggatttcctgaaggagcccaaggtgtatgaagacctcacggatctgacagtgctgaagacagtcatggagacagctctaaatgagtataacctgtcaccctctgtcgtgcccatgcagctagtgctcttccgagaggctattgaacacatcacacggatcgtgcgggtcattggacagcctcggggcaacatgctcctggtgggtatcgggggcagcggacgccagagtctggcccgcctggcttcatccatctgcgactacaccaccttccagatcgaggtcaccaaacattatcggaagcaggagttccgagatgatatcaagcgtctgtatcgccaggctggggtggagctcaagaccacgtccttcatttttgtggacacccaaatagctgatgagtccttcctagaggacatcaacaacatcctcagctcaggcgaggtgcccaatctctacaagcctgatgaatttgaagagatccagtcgcatatcatagaccaggcccgggtggagcaggtgcctgagtcatcggacagcctcttcgcctacctcattgaacgcgtgcagaacaacctgcacatcgtgctctgcctcagccccatgggggatcccttcaggaactggatccgccagtacccagccttggtgaactgcacaaccatcaactggttctcagagtggccccaagaggccctgctcgaggtggctgagaagtgcctcataggagtagacctgggaactcaggagaatatccacaggaaggtggcccagatctttgtcactatgcactggtcagtagctcagtattcccagaagatgctgttggaactgcggagacacaactatgtcacacccaccaaatacctggaactcctgtctggatataagaagttgctgggagaaaaacggcaggagctgctggcccaagccaataaactgcggacaggcttgttcaagatcgacgaaactagggaaaaggtgcaagtgatgtcgttggagctggaggatgccaagaagaaggtggctgagttccagaagcagtgtgaggagtacctggtcatcattgtgcagcagaagcgggaggcagatgagcagcagaaggccctggagtctctgaacaagaaggatataggagagatcaagtcttatggacggcccccagcccaagtggagatagtgatgcaggcagttatgattcttcgaggcaacgagcccacatgggcagaggccaagaggcagctaggggaacagaacttcatcaagtcactgatcaactttgataaagacaatatctcagataaggttctgaagaagattggggcctactgcgcccagcctgacttccagcctgatatcatcggccgcgtctccctggctgccaagtccctctgcatgtgggtgcgggccatggagctgtatgggcggctatatcgggtggtggagcccaagcgaatccgaatgaacgctgccttggctcagcttcgggagaagcaagccgcgctcgctgaggcccaggagaagctgcgggaggtagctgagaaactggagatgctaaagaaacagtatgatgagaagctggcacagaaggaggagcttcgcaagaagtctgaagagatggagctgaagctggagcgagctgggatgctcgtgtcggggttggctggcgagaaggccagatgggaggagacagtccagggcctggaggaggacctgggctacctggtgggggactgtctcctggcagctgccttcctgtcctacatgggacccttcctgaccaactaccgggatgagattgtcaaccaaatctggatcgggaagatctgggagcttcaggttccttgctccccttctttcgccatcgataacttcctgtgcaatcctaccaaagtccgggactggaacatccaagggttgccctcagacgccttctccactgagaatggcatcatcgtcacccgaggcaacaggtgggcactgatgatcgaccctcaggcccaggccctgaaatggattaagaacatggaaggaggccagggcctgaagatcatcgacctgcagatgagcgattacctgcgaatcctagaacacgccattcactttggatacccggtgctacttcagaacgtgcaggaatatctggaccccacactgaaccccatgctcaacaaatctgtagcccgaatcggtggtcggctgttgatgcgcattggcgataaggaggtggaatataataccaatttccgtttctacatcaccaccaagctctccaacccccactacagcccagagacctcagccaagaccaccatcgtcaactttgctgttaaagaacagggcctggaggcccagctgctgggcattgtggtgcggaaggagcggcctgagctggaggagcagaaggactcactggtcatcaacatcgcggctggtaaaaggaagctcaaggagctggaggatgagatcctgcggctgctgaatgaggccaccggctccctgctggatgatgtgcagctggtgaacacgctgcatacctccaagatcacagccacagaggtgactgagcagctggagaccagtgagaccacagagatcaacactgacttggcgcgggaggcttaccgcccatgcgcccagcgggcatcaatcctgttcttcgtgctcaatgatatgggctgcatcgaccccatgtaccagttctcactggatgcctacatcagcctctttattctcagcattgacaaaagccaccgcagcaataagctggaggaccgcattgactacctgaatgactaccacacctacgctgtctacaggtacacctgccgtacccttttcgaacgccacaaactactattcagttttcatatgtgtgccaaaatcttggagacttctggcaagctcaacatggatgaatacaacttctttctacgtgggggtgtggtcttggatcgggagggccaaatggacaatccatgtagtagctggcttgcagatgcctactgggataacatcacagagctagacaaactgaccaacttccacggactcatgaactcctttgagcagtaccctcgtgactggcacctgtggtataccaatgctgccccggagaaggcgatgctgccaggtgagtgggaaaatgcctgcaatgaaatgcaacggatgctgatcgttcgctccctgcgccaggaccgcgtggccttctgcgtgacctccttcatcatcaccaaccttggctcccgcttcatcgagccgcctgtgctgaatatgaagtcggtgctggaggattcaaccccacgatccccactcgtgttcatcctgtcccctggtgtggaccccaccagtgccctgctgcagctggcagagcacatgggcatggcccagcgcttccacgccctgtccctgggccagggccaggcccccatcgctgctcggctcctccgagagggtgtgactcagggacactgggtgttcctggcaaactgccacctgtcactgtcttggatgcctaatctggacaagctggtggagcagctgcaggtggaggatcctcatccatccttccgcctctggctcagctccatcccccacccagacttccctatctcaatcttgcaggtcagcatcaagatgaccacagagccaccaaagggcctaaaggccaacatgacacgtctttaccaactgatgtcagaaccacagttttcccgctgctccaaacctgccaaatataagaagctgctgttttcactctgtttcttccactctgtgttacttgaacgcaaaaagttcctgcagcttggctggaacatcatctatggcttcaatgactccgactttgaggtgtcagaaaacttgctgagcctctatctcgatgagtacgaggagacaccttgggacgcacttaagtacctcattgccggcatcaactatggtggacatgtcacagatgactgggaccggcgcctgctgaccacctacatcaatgattatttctgtgaccagtctctatcaactcccttccaccggttgtcagcactggagacttatttcatccccaaggatggcagcctcgcttcttacaaggaatacatcagcttattgcctggcatggacccccctgaggcctttggccagcaccccaatgctgatgtggcctctcagatcactgaggcacaaaccctctttgatactttgctttccttgcaacctcagattacacccaccagggctggaggccagacccgggaagagaaggtccttgagttggccgctgatgtgaagcagaagatccctgaaatgatcgactatgaggggactcaaaaactgctagctctcgacccctcccccctcaatgtggtccttctgcaggagatccagagatacaacacactgatgcagaccatcctgttctcactgacagacctagagatacctagttgtgttagccataaaagtgaaagagttgtattggagctcagtgctgtaaaacacccgcgacaa

SEQ ID NO: 206310 - DNA, 13505 bp, Artificial Sequence
  derived and/or modified sequence
gttttgcctgcacgatgtccagcaaagctgagaagaagcagcgattgagtggccgaggaagctcccaggcaagctggtcagggcgggccactcgggctgctgtggccacacaggagcaggggaatgccccggctgtcagtgagccagagctgcaggctgagctccccaaggaggagcctgagccacggttggagggacctcaagcacagagtgaagaatcagtggagcccgaggcagatgtgaagcccctcttcctttcccgagctgcgctgacaggactggcggatgcagtgtggacacaggagcatgatgccattctggaacactttgcccaggaccctacagaatccatcctcaccatcttcattgacccttgttttgggctgaagctagagctgggcatgcctgtacagacccagaaccagcttgtctacttcattcgccaagcaccagttcccatcacctgggagaacttcgaggcaactgtgcagtttgggacggtgcggggcccctatatcccggccctgcttcggctgctcggtggagtctttgcccctcagatctttgcaaacacaggctggcctgagagcattagaaatcattttgcttctcatctgcacaagttcttggcctgcctgacagacactcggtacaaactggaggggcacacggtcctctacatccctgcagaggccatgaacatgaagcctgagatggtgataaaggacaaagagctggtgcaacggctagagacctccatgatccactggacccggcagataaaggagatgctcagtgcccaggagactgtggagacaggagaaaatttaggtcctctggaggagattgagttctggcgcaaccgatgcatggacctgtctggcatcagtaagcagctggtgaagaagggagtgaagcacgttgaatccatcctgcaccttgccaagtcgtcctacttggcgccctttatgaaactggcacagcagatccaggatggctctcgtcaagcacagtcaaacctgacctttttgtcaatcctgaaggaaccttaccaggagttggctttcatgaagcccaaggacatctctagcaagctccctaagctgatcagtctcatccgcatcatctgggtcaactctccccactacaacactcgggagagactgacctcgctcttccgaaaggtatgtgactgtcagtatcacttcgcccgctgggaagatggcaagcagggtccccttccttgcttctttggtgcccaggggccacagataacacggaacttgctggagattgaggacatctttcataaaaatctgcacacgctgcgagccgttcgcgggggtatcctggatgtcaagaacacctgttggcatgaagactacaataagttccgtgccggaatcaaggacctggaggtgatgacccagaacctgatcacctcagccttcgagttggtgcgggacgtgccgcacggcgtgcttctgctggacaccttccacaggcttgcctcccgcgaggctatcaagcggacttatgacaagaaggcggtggatctctacatgctgttcaatagcgagctggccctggtgaaccgtgaacggaacaagaaatggccagacctggagccctacgtggcccagtattccggaaaggcgcgctgggtgcacatcctccggcgtcgcatcgacagagtcatgacctgccttgctggtgctcatttcctgccccgtattgggactggaaaggagagtgtgcacacctatcagcagatggtccaggccattgatgagctggttcgaaaaaccttccaagagtggacatcaagtctggacaaggattgcattcggcggttggataccccattgctgcgaatcagccaggagaaggcgggcatgctggatgtcaactttgacaagtcccttctgattctctttgcggaaattgactactgggagcggctgctgtttgagacgccccattacgtggtgaacgtagctgagcgagccgaggacctgcgcattctgcgtgaaaatctgctactcgttgctagagactacaataggattattgccatgctgtccccagatgagcaggccctattcaaagagcgtattcggctcctggataagaagatccacccgggactcaagaaactgcactgggccttgaagggggccagtgccttcttcatcacggagtgccgtatacatgccagcaaggtgcagatgattgtgaatgagttcaaggcatccactctgaccattggctggcgagcccaagagatgtcagagaagctgctggtacgcattagtggcaaacgggtatacagggacctggaatttgaagaggaccaaagagagcatcgggcagctgtacagcagaaattgatgaacctgcaccaggatgtggtgaccatcatgaccaactcctatgaggtcttcaagaatgatggtcctgagattcagcagcagtggatgctgtacatgattcggctggaccgcatgatggaggatgccctgcgcctgaatgtgaagtggtcactgctagaactatccaaggctatcaacggggatggaaagaccagcccaaacccactcttccaagtccttgtcattttgaagaatgatctgcaaggaagtgtggcacaggtggaattctcacccactctgcagactttggcaggtgtggtcaatgacattggcaaccacctcttttccaccatctctgtcttctgccacctccctgacattctcaccaagcgcaagttacatcgtgaacccatccaaacagttgtggagcaagatgaggacatcaagaagatccagacccaaatcagcagcggcatgactaacaacgcaagcctgctgcagaactacctcaagacctgggacatgtaccgggagatctgggagatcaacaaggactccttcattcatcgctaccagcgcctcaaccctcctgtctcttcttttgttgccgacattgcccgctacacggaagttgctaataacgtgcagaaggaggagacagtcaccaacatccagtttgtgctgctggactgttcgcacctcaagttctccctggtgcagcactgcaatgaatggcagaacaagttcgcgactctgctcagggagatggctgctgggcgcctcctggagctgcacacctacctgaaggagaacgcagagaaaatcagccgccctccgcagacactggaggaactgggggtcagcttgcagctcgtggatgccctgaagcacgacttggccaacgtggagactcagatccctcccatacacgagcaatttgccattcttgaaaagtacgaggtgccagtcgaggacagtgtcctggagatgctggacagtctcaacggggagtgggttgtcttccaacaaactctgctggacagtaagcaaatgctgaagaaacacaaggagaaattcaagacaggcctgatccactcggcagatgacttcaagaagaaagcacatacacttctggaagatttcgaattcaaaggccatttcaccagcaacgtgggatacatgtctgccttagaccagattacacaagtgcgggccatgctgatggccatgcgggaagaggaaaatagtctccgagccaacctgggcatcttcaagatcgagcagccaccctccaaggaccttcagaacctggagaaggagctcgatgccctccagcaaatctgggagatcgcacgagactgggaggagaactggaatgagtggaagactggccggttcctgatcctgcagacggaaaccatggagaccacggcccacgggctgtttcgtcgcctcacaaaattagccaaagagtataaggaccgaaactgggaaattattgaaaccactcgctcaaaaatagagcagttcaagaggaccatgcctctcatctcagacctgcggaaccctgcccttagagagaggcactgggaccaggtccgggatgagatccagcgggagtttgatcaggaatctgaaagcttcaccttggagcagattgtggagcttgggatggatcagcatgtggagaaaattggggagatctctgcttcagcaactaaagagctggctatagaagtggctttacaaaacattgccaagacctgggatgtgactcagctcgacatagtaccctacaaggataagggccatcatcggctcagaggtacagaagaagtattccaggcactggaagataaccaggtagctctgtctaccatgaaggcatcacgctttgtcaaggcctttgagaaggatgtggaccactgggaacgctgcctctccctcattttggaggttattgagatgattctcacagtgcagcgtcagtggatgtacttagagaatatcttcctaggagaagacatccgcaagcagctgcccaatgaatcgaccttatttgaccaggtcaacagcaactggaaagccatcatggacaggatgaacaaggacaacaatgctctccggagcacccatcacccaggcctcctggacacattgatagaaatgaatacaatcctggaagatattcagaaatctctggatatgtatttagagaccaagcgacatattttcccccgcttctacttcttgtccaatgatgacctgctggagattctgggccagtcccgaaacccagaggctgtgcagccacacctcaaaaaatgctttgacaacatcaagttgctgagaatccagaaggttggagggcccagcagcaaatgggaagctgtggggatgttctcgggcgacggcgagtacattgacttcctccactcagtatttttagaaggccctgtggagtcctggcttggcgatgtggaacagaccatgagggtgaccctgcgggaccttctccggaactgccacctggccctcaggaagttcctcaacaagagggacaaatgggtgaaggagtgggctggccaggtggtgatcactgccagtcagatccagtggacggctgatgtcaccaagtgcctgctgacagcgaaggagcgggcagacaagaaaatcctcaaggtcatgaagaagaaccaggtgtcaatcctgaataagtattcagaagccatcagggggaacttgaccaagatcatgcggcttaaaattgtggctctggtgacgatagaaattcatgcccgggatgtgttggagaagctttacaagagtggcctcatggatgtcaattcctttgactggctcagccaacttcggttctactgggagaaggatcttgatgactgtgtcatccgccagaccaacacgcaatttcagtataattatgagtacttgggtaactcgggccggctcgtcatcacccccctgacggacaggtgttacatgacactgaccacggcattgcacctgcaccgagggggctcccccaaaggccctgcaggcacaggcaagaccgagaccgtcaaggacctgggcaaggccctgggcatatatgtcattgtggtcaactgctctgagggcctggactacaagtccatgggccgaatgtactcaggtctggcccagactggagcttggggctgctttgatgagtttaaccgcatcaacatcgaggtgctgtcagtggtggcccaccagatcctgtgcatcctgtctgccctggctgccggcctcacccatttccattttgatggctttgaaataaatctggtgtggtcctgtgggatcttcattaccatgaatcctggctatgctggccgcacagagcttcccgaaaatcttaaatccatgttccgcccaattgccatggtggtgcctgactccaccctcattgcagaaatcattctctttggagagggctttggcaactgcaagattctggccaagaaggtgtacacactctactcactggctgtgcagcagctgtccagacaggaccactatgactttggcctgcgtgccctcacctcccttctgcgctatgctggcaagaagcgccgcctacagccggatctgactgatgaagaggttctgctgctctcaatgagagatatgaacatcgccaagctcacttcagttgatgcacccctgttcaatgccatcgtgcaagatctgtttcccaacattgagctgcctgtcattgactatggcaagctgcgggagaccgttgagcaggagattcgagacatgggcctgcaaagcacgccgttcaccctcaccaaggttttccagttgtatgaaaccaagaactcccgccactccaccatgatcgtgggctgcacgggcagcggcaagactgcctcatggcgcattctacaggcctccctgtcctctctgtgccgcgccggagaccctaacttcaacattgttagagagttccctttgaaccccaaggcattgtccctaggggaactgtatggggaatatgacctcagcaccaatgaatggacagatggcatcttgtccagtgtcatgcggacggcatgtgcagatgagaaacccgacgagaagtggatcctgttcgatggccccgtggacacactgtggatcgagaacatgaactccgtcatggacgataacaaggtgttgaccctcatcaacggcgagcgcatcgcgatgcccgagcaggtgtctctcctgtttgaagtggaggacctggcaatggcctctccggccactgtatcccgctgcgggatggtctacactgactacgctgacctgggctggaagccctatgttcagtcatggctggagaagaggccaaaggctgaggtggagccccttcaacgcatgttcgaaaagctcatcaacaagatgctggcctttaagaaggacaactgcaaggagctggtgcccctgcccgagtacagcggtatcacctccctctgcaagctgtactctgccctggccacgccagagaatggggtgaacccagctgacggcgagaactatgtcaccatggtagagatgacatttgtgttcagcatgatctggtctgtgtgtgcctctgtggatgaggagggccggaagaggatcgacagctacctccgagagatcgagggctcctttcccaataaggacacggtatatgagtattttgtggaccccaaaatacggagttggacatcatttgaggacaagctccctaagagttggcgctaccctccaaacgcccccttctataagatcatggtgcccaccgtcgacactgttcgctacaactacctggtgagcagcttggtggccaaccagaatcccattctgctggtgggtcccgtggggactgggaagacctccatcgcccagagcgttctgcagtccctgccctccagccagtggtcggtgctcgttgtcaacatgtccgcacagaccacatccaataacgtgcagagcatcattgagagcagggttgagaagcgaaccaagggtgtctacgtgccattcgggggcaaaagcatgatcacctttatggatgacctaaatatgcccgctaaggacatgtttgggtcccagccacccctggagctgatccgcctctggattgactatggcttctggtatgaccgtacgaagcagaccatcaagtacattcgagaaatgttcctgatggctgccatgggcccccctgggggtggacggactgtcatctccccaaggctacggagtcgcttcaacattatcaacatgaccttccccacaaagtcccagatcatccgcatattcggcaccatgatcaatcagaagcttcaggactttgaggaagaggtgaagcccattgggaacgtggtgacagaggccaccctggacatgtacaacaccgtggtacagcgcttcctgcccacgcccaccaagatgcattacctcttcaaccttcgagacatctccaaggtgttccagggcatgcttagagccaacaaggacttccatgataccaagtccagcatcacacggctctggatccatgaatgtttcagagtcttctctgaccggctggttgatgcggcagacacagaagccttcatgggcatcataagcgacaagctcggctccttctttgacctcacatttcatcatctctgtcccagcaagcgtcctcctatctttggggatttcctgaaggagcccaaggtgtatgaagacctcacggatctgacagtgctgaagacagtcatggagacagctctaaatgagtataacctgtcaccctctgtcgtgcccatgcagctagtgctcttccgagaggctattgaacacatcacacggatcgtgcgggtcattggacagcctcggggcaacatgctcctggtgggtatcgggggcagcggacgccagagtctggcccgcctggcttcatccatctgcgactacaccaccttccagatcgaggtcaccaaacattatcggaagcaggagttccgagatgatatcaagcgtctgtatcgccaggctggggtggagctcaagaccacgtccttcatttttgtggacacccaaatagctgatgagtccttcctagaggacatcaacaacatcctcagctcaggcgaggtgcccaatctctacaagcctgatgaatttgaagagatccagtcgcatatcatagaccaggcccgggtggagcaggtgcctgagtcatcggacagcctcttcgcctacctcattgaacgcgtgcagaacaacctgcacatcgtgctctgcctcagccccatgggggatcccttcaggaactggatccgccagtacccagccttggtgaactgcacaaccatcaactggttctcagagtggccccaagaggccctgctcgaggtggctgagaagtgcctcataggagtagacctgggaactcaggagaatatccacaggaaggtggcccagatctttgtcactatgcactggtcagtagctcagtattcccagaagatgctgttggaactgcggagacacaactatgtcacacccaccaaatacctggaactcctgtctggatataagaagttgctgggagaaaaacggcaggagctgctggcccaagccaataaactgcggacaggcttgttcaagatcgacgaaactagggaaaaggtgcaagtgatgtcgttggagctggaggatgccaagaagaaggtggctgagttccagaagcagtgtgaggagtacctggtcatcattgtgcagcagaagcgggaggcagatgagcagcagaaggccgtaacagccaacagtgaaaagattgcagttgaggaaatcaagtgtcaggcactggctgacaatgcccagaaagatctagaagaggcactgcccgccctggaagaggccatgcgggccctggagtctctgaacaagaaggatataggagagatcaagtcttatggacggcccccagcccaagtggagatagtgatgcaggcagttatgattcttcgaggcaacgagcccacatgggcagaggccaagaggcagctaggggaacagaacttcatcaagtcactgatcaactttgataaagacaatatctcagataaggttctgaagaagattggggcctactgcgcccagcctgacttccagcctgatatcatcggccgcgtctccctggctgccaagtccctctgcatgtgggtgcgggccatggagctgtatgggcggctatatcgggtggtggagcccaagcgaatccgaatgaacgctgccttggctcagcttcgggagaagcaagccgcgctcgctgaggcccaggagaagctgcgggaggtagctgagaaactggagatgctaaagaaacagtatgatgagaagctggcacagaaggaggagcttcgcaagaagtctgaagagatggagctgaagctggagcgagctgggatgctcgtgtcggggttggctggcgagaaggccagatgggaggagacagtccagggcctggaggaggacctgggctacctggtgggggactgtctcctggcagctgccttcctgtcctacatgggacccttcctgaccaactaccgggatgagattgtcaaccaaatctggatcgggaagatctgggagcttcaggttccttgctccccttctttcgccatcgataacttcctgtgcaatcctaccaaagtccgggactggaacatccaagggttgccctcagacgccttctccactgagaatggcatcatcgtcacccgaggcaacaggtgggcactgatgatcgaccctcaggcccaggccctgaaatggattaagaacatggaaggaggccagggcctgaagatcatcgacctgcagatgagcgattacctgcgaatcctagaacacgccattcactttggatacccggtgctacttcagaacgtgcaggaatatctggaccccacactgaaccccatgctcaacaaatctgtagcccgaatcggtggtcggctgttgatgcgcattggcgataaggaggtggaatataataccaatttccgtttctacatcaccaccaagctctccaacccccactacagcccagagacctcagccaagaccaccatcgtcaactttgctgttaaagaacagggcctggaggcccagctgctgggcattgtggtgcggaaggagcggcctgagctggaggagcagaaggactcactggtcatcaacatcgcggctggtaaaaggaagctcaaggagctggaggatgagatcctgcggctgctgaatgaggccaccggctccctgctggatgatgtgcagctggtgaacacgctgcatacctccaagatcacagccacagaggtgactgagcagctggagaccagtgagaccacagagatcaacactgacttggcgcgggaggcttaccgcccatgcgcccagcgggcatcaatcctgttcttcgtgctcaatgatatgggctgcatcgaccccatgtaccagttctcactggatgcctacatcagcctctttattctcagcattgacaaaagccaccgcagcaataagctggaggaccgcattgactacctgaatgactaccacacctacgctgtctacaggtacacctgccgtacccttttcgaacgccacaaactactattcagttttcatatgtgtgccaaaatcttggagacttctggcaagctcaacatggatgaatacaacttctttctacgtgggggtgtggtcttggatcgggagggccaaatggacaatccatgtagtagctggcttgcagatgcctactgggataacatcacagagctagacaaactgaccaacttccacggactcatgaactcctttgagcagtaccctcgtgactggcacctgtggtataccaatgctgccccggagaaggcgatgctgccaggtgagtgggaaaatgcctgcaatgaaatgcaacggatgctgatcgttcgctccctgcgccaggaccgcgtggccttctgcgtgacctccttcatcatcaccaaccttggctcccgcttcatcgagccgcctgtgctgaatatgaagtcggtgctggaggattcaaccccacgatccccactcgtgttcatcctgtcccctggtgtggaccccaccagtgccctgctgcagctggcagagcacatgggcatggcccagcgcttccacgccctgtccctgggccagggccaggcccccatcgctgctcggctcctccgagagggtgtgactcagggacactgggtgttcctggcaaactgccacctgtcactgtcttggatgcctaatctggacaagctggtggagcagctgcaggtggaggatcctcatccatccttccgcctctggctcagctccatcccccacccagacttccctatctcaatcttgcaggtcagcatcaagatgaccacagagccaccaaagggcctaaaggccaacatgacacgtctttaccaactgatgtcagaaccacagttttcccgctgctccaaacctgccaaatataagaagctgctgttttcactctgtttcttccactctgtgttacttgaacgcaaaaagttcctgcagcttggctggaacatcatctatggcttcaatgactccgactttgaggtgtcagaaaacttgctgagcctctatctcgatgagtacgaggagacaccttgggacgcacttaagtacctcattgccggcatcaactatggtggacatgtcacagatgactgggaccggcgcctgctgaccacctacatcaatgattatttctgtgaccagtctctatcaactcccttccaccggttgtcagcactggagacttatttcatccccaaggatggcagcctcgcttcttacaaggaatacatcagcttattgcctggcatggacccccctgaggcctttggccagcaccccaatgctgatgtggcctctcagatcactgaggcacaaaccctctttgatactttgctttccttgcaacctcagattacacccaccagggctggaggccagacccgggaagagaaggtccttgagttggccgctgatgtgaagcagaagatccctgaaatgatcgactatgaggggactcaaaaactgctagctctcgacccctcccccctcaatgtggtccttctgcaggagatccagagatacaacacactgatgcagaccatcctgttctcactgacagacctagagaaaggcatccagggtctcatcgtcatgtctacaagcctggaagagattttcaattgcatctttgatgcccatgttcctccgctctggggaaaggcatacccctcacaaaagccattggctgcctggacccgggacttggccatgcgtgtggagcagtttgagctgtgggccagccgggcccggcctcctgtgatcttctggttgtctggtttcacctttcccactggcttcctcactgctgtgctgcagtcttcagctcgccaaaacaacgtttcagtggacagcctctcctgggagtttatcgtttccactgtggatgacagcaacctagtgtatccccccaaggatggtgtctgggtccggggcctgtacctggaaggtgctggctgggaccggaagaactcctgcttggtggaggcagagcccatgcagcttgtctgcctcatgcccacgatccacttccggcctgcagagagccgcaagaagagcgccaagggcatgtactcctgcccctgctattactatcccaaccgggcaggcagctcagaccgagcctcctttgtcatcggcattgacctgcggtctggggccatgacacctgatcattggatcaagaggggcactgctctactcatgagcctggacagctgagacctcctcctcttctccgcttgagagagagggtcagggactccaggagctaagacagatgttgcacctaggactgaggccggacctcactcagactttgaccttggccgaatttgtgtgatgtggccctggagatacctagttgtgttagccataaaagtgaaagagttgtattggagctcagtgctgtaaaacacccgcgacaac

SEQ ID NO: 206311 - protein, 1284 aa, Artificial Sequence
  derived and/or modified sequence
MSSGDPAHLGLCLWLWLGATLGREQVQASGLLRLAVLPEDRLQMKWRESEGSGLGYLVQVKPMAGDSEQEVILTTKTPKATVGGLSPSKGYTLQIFELTGSGRFLLARREFVIEDLKSSSLDRSSQRPLGSGAPEPTPSHTGSPDPEQASEPQVAFTPSQDPRTPAGPQFRCLPPVPADMVFLVDGSWSIGHSHFQQVKDFLASVIAPFEIGPDKVQVGLTQYSGDAQTEWDLNSLSTKEQVLAAVRRLRYKGGNTFTGLALTHVLGQNLQPAAGLRPEAAKVVILVTDGKSQDDVHTAARVLKDLGVNVFAVGVKNADEAELRLLASPPRDITVHSVLDFLQLGALAGLLSRLICQRLQGGSPRQGPAAAPALDTLPAPTSLVLSQVTSSSIRLSWTPAPRHPLKYLIVWRASRGGTPREVVVEGPAASTELHNLASRTEYLVSVFPIYEGGVGEGLRGLVTTAPLPPPRALTLAAVTPRTVHLTWQPSAGATHYLVRCSPASPKGEEEEREVQVGRPEVLLDGLEPGRDYEVSVQSLRGPEGSEARGIRARTPTLAPPRHLGFSDVSHDAARVFWEGAPRPVRLVRVTYVSSEGGHSGQTEAPGNATSATLGPLSSSTTYTVRVTCLYPGGGSSTLTGRVTTKKAPSPSQLSMTELPGDAVQLAWVAAAPSGVLVYQITWTPLGEGKAHEISVPGNLGTAVLPGLGRHTEYDVTILAYYRDGARSDPVSLRYTPSTVSRSPPSNLALASETPDSLQVSWTPPLGRVLHYWLTYAPASGLGPEKSVSVPGARSHVTLPDLQAATKYRVLVSAIYAAGRSEAVSATGQTACPALRPDGSLPGFDLMVAFSLVEKAYASIRGVAMEPSAFGGTPTFTLFKDAQLTRRVSDVYPAPLPPEHTIVFLVRLLPETPREAFALWQMTAEDFQPLLGVLLDAGKKSLTYFHRDPRAALQEATFDPQEVRKIFFGSFHKVHVAVGRSKVRLYVDCRKVAERPLGEMGSPPAAGFVTLGRLAKARGPRSSSAAFQLQMLQIVCSDTWADEDRCCELPASRDGETCPAFVSACSCSSETPGPPGPQGPPGLPGRNGTPGEQGFPGPRGPPGVKGEKGDHGLPGLQGHPGHQGIPGRVGLQGPKGMRGLEGTAGLPGPPGPRGFQGMAGARGTSGERGPPGTVGPTGLPGPKGERGEKGEPQSLATLYQLVSQASHVSKFDSFHENTRPPMPILEQKLEPGTEPLGSPGTRSKALVPGEWGRGGRHLEGRGEPGAVGQMGSPGQQGASTQGLWE

SEQ ID NO: 206312 - DNA, 3855 bp, Artificial Sequence
  derived and/or modified sequence
atgagcagcggcgaccccgcccacctgggcctgtgcctgtggctgtggctgggcgccaccctgggcagagagcaggtgcaggccagcggcctgctgagactggccgtgctgcccgaggacagactgcagatgaagtggagagagagcgagggcagcggcctgggctacctggtgcaggtgaagcccatggccggcgacagcgagcaggaggtgatcctgaccaccaagacccccaaggccaccgtgggcggcctgagccccagcaagggctacaccctgcagatcttcgagctgaccggcagcggcagattcctgctggccagaagagagttcgtgatcgaggacctgaagagcagcagcctggacagaagcagccagagacccctgggcagcggcgcccccgagcccacccccagccacaccggcagccccgaccccgagcaggccagcgagccccaggtggccttcacccccagccaggaccccagaacccccgccggcccccagttcagatgcctgccccccgtgcccgccgacatggtgttcctggtggacggcagctggagcatcggccacagccacttccagcaggtgaaggacttcctggccagcgtgatcgcccccttcgagatcggccccgacaaggtgcaggtgggcctgacccagtacagcggcgacgcccagaccgagtgggacctgaacagcctgagcaccaaggagcaggtgctggccgccgtgagaagactgagatacaagggcggcaacaccttcaccggcctggccctgacccacgtgctgggccagaacctgcagcccgccgccggcctgagacccgaggccgccaaggtggtgatcctggtgaccgacggcaagagccaggacgacgtgcacaccgccgccagagtgctgaaggacctgggcgtgaacgtgttcgccgtgggcgtgaagaacgccgacgaggccgagctgagactgctggccagcccccccagagacatcaccgtgcacagcgtgctggacttcctgcagctgggcgccctggccggcctgctgagcagactgatctgccagagactgcagggcggcagccccagacagggccccgccgccgcccccgccctggacaccctgcccgcccccaccagcctggtgctgagccaggtgaccagcagcagcatcagactgagctggacccccgcccccagacaccccctgaagtacctgatcgtgtggagagccagcagaggcggcacccccagagaggtggtggtggagggccccgccgccagcaccgagctgcacaacctggccagcagaaccgagtacctggtgagcgtgttccccatctacgagggcggcgtgggcgagggcctgagaggcctggtgaccaccgcccccctgcccccccccagagccctgaccctggccgccgtgacccccagaaccgtgcacctgacctggcagcccagcgccggcgccacccactacctggtgagatgcagccccgccagccccaagggcgaggaggaggagagagaggtgcaggtgggcagacccgaggtgctgctggacggcctggagcccggcagagactacgaggtgagcgtgcagagcctgagaggccccgagggcagcgaggccagaggcatcagagccagaacccccaccctggccccccccagacacctgggcttcagcgacgtgagccacgacgccgccagagtgttctgggagggcgcccccagacccgtgagactggtgagagtgacctacgtgagcagcgagggcggccacagcggccagaccgaggcccccggcaacgccaccagcgccaccctgggccccctgagcagcagcaccacctacaccgtgagagtgacctgcctgtaccccggcggcggcagcagcaccctgaccggcagagtgaccaccaagaaggcccccagccccagccagctgagcatgaccgagctgcccggcgacgccgtgcagctggcctgggtggccgccgcccccagcggcgtgctggtgtaccagatcacctggacccccctgggcgagggcaaggcccacgagatcagcgtgcccggcaacctgggcaccgccgtgctgcccggcctgggcagacacaccgagtacgacgtgaccatcctggcctactacagagacggcgccagaagcgaccccgtgagcctgagatacacccccagcaccgtgagcagaagcccccccagcaacctggccctggccagcgagacccccgacagcctgcaggtgagctggaccccccccctgggcagagtgctgcactactggctgacctacgcccccgccagcggcctgggccccgagaagagcgtgagcgtgcccggcgccagaagccacgtgaccctgcccgacctgcaggccgccaccaagtacagagtgctggtgagcgccatctacgccgccggcagaagcgaggccgtgagcgccaccggccagaccgcctgccccgccctgagacccgacggcagcctgcccggcttcgacctgatggtggccttcagcctggtggagaaggcctacgccagcatcagaggcgtggccatggagcccagcgccttcggcggcacccccaccttcaccctgttcaaggacgcccagctgaccagaagagtgagcgacgtgtaccccgcccccctgccccccgagcacaccatcgtgttcctggtgagactgctgcccgagacccccagagaggccttcgccctgtggcagatgaccgccgaggacttccagcccctgctgggcgtgctgctggacgccggcaagaagagcctgacctacttccacagagaccccagagccgccctgcaggaggccaccttcgacccccaggaggtgagaaagatcttcttcggcagcttccacaaggtgcacgtggccgtgggcagaagcaaggtgagactgtacgtggactgcagaaaggtggccgagagacccctgggcgagatgggcagcccccccgccgccggcttcgtgaccctgggcagactggccaaggccagaggccccagaagcagcagcgccgccttccagctgcagatgctgcagatcgtgtgcagcgacacctgggccgacgaggacagatgctgcgagctgcccgccagcagagacggcgagacctgccccgccttcgtgagcgcctgcagctgcagcagcgagacccccggcccccccggcccccagggcccccccggcctgcccggcagaaacggcacccccggcgagcagggcttccccggccccagaggcccccccggcgtgaagggcgagaagggcgaccacggcctgcccggcctgcagggccaccccggccaccagggcatccccggcagagtgggcctgcagggccccaagggcatgagaggcctggagggcaccgccggcctgcccggcccccccggccccagaggcttccagggcatggccggcgccagaggcaccagcggcgagagaggcccccccggcaccgtgggccccaccggcctgcccggccccaagggcgagagaggcgagaagggcgagccccagagcctggccaccctgtaccagctggtgagccaggccagccacgtgagcaagttcgacagcttccacgagaacaccagaccccccatgcccatcctggagcagaagctggagcccggcaccgagcccctgggcagccccggcaccagaagcaaggccctggtgcccggcgagtggggcagaggcggcagacacctggagggcagaggcgagcccggcgccgtgggccagatgggcagccccggccagcagggcgccagcacccagggcctgtgggagtag

SEQ ID NO: 206313 - DNA, 3855 bp, Artificial Sequence
  derived and/or modified sequence
atgtcctcaggcgatcccgcgcacttggggctgtgcctgtggctgtggttgggcgccaccctgggtagggagcaggttcaagcttctgggctcctccggcttgcggtcctccctgaagataggttgcagatgaaatggagagagtccgagggaagtgggttgggctaccttgtgcaggtcaagcctatggccggtgattcggagcaggaagttatccttacgaccaagacccctaaggcgactgttggcggtttgtctcctagtaaaggatacacattacagatctttgagttgacaggctccggccgcttcctcttggctagaagagagttcgtgatcgaggacctcaagtcttcctcactagatcggtctagccagcggccacttggctctggcgcccctgagcctacaccctctcacaccggatcaccggatccggaacaggcaagcgagccccaggtcgcctttaccccctctcaagatccaagaacacccgccggcccacagttccgatgcctccccccagtgcctgcggacatggttttccttgttgacggatcgtggtcaattggacacagccattttcagcaggtcaaggacttcctcgcctcagtgatcgctccatttgaaattggaccagataaggtacaggttgggttaacacagtacagtggcgatgctcagacggagtgggacctgaattccttgtcgaccaaagagcaggtgttagccgctgtgagacggctccgttacaaagggggcaataccttcactggtttagcactcacacacgtcttaggccagaacttgcagcctgcggcaggcctgagaccggaggctgccaaggttgtaatactcgtcaccgatggcaagtcacaggacgatgtgcacacagcagcccgggttctaaaagatctaggggtaaatgtgtttgctgttggtgtgaagaacgctgatgaagccgagctaagattactcgcctccccccctagggatatcaccgtgcatagcgtcctcgatttccttcagttgggcgcgcttgcaggattgctgtctcggctgatctgtcaaaggcttcaggggggcagtccccgacagggcccggccgcagcccctgcactcgacaccctgccagccccaactagtctagtgctgtctcaggtaacatcatcatctattaggctatcttggacccctgctcctcggcatcctctgaagtatttgattgtgtggcgagctagtcggggaggcacgccaagggaagttgtggtggagggccccgcggcttctaccgagctccacaatctggccagtcgtacagaatatctggtaagcgtttttccaatctatgaagggggagtgggtgaaggactcagggggctggtcaccactgctcccctgccaccgccgcgggctctcaccctcgcagccgttacaccaagaactgtccacctgacttggcagccgagcgcaggagccactcactatctagtgcgatgcagccctgctagtccaaagggcgaagaagaggaacgggaagtccaggtgggccgacccgaggtgcttctggatggcctggaacctggcagagactacgaggtgtctgtccagtctcttaggggtcccgagggatctgaggcgaggggaatccgcgctcgaactcctacccttgcacccccgcggcacttaggcttcagcgatgttagtcacgacgcagcacgtgtgttttgggagggcgctccgcgacccgtccgcctggttcgggtgacctatgtgtcaagcgagggcggacacagtggacaaaccgaggcgccgggcaacgcaacaagcgcaaccctgggccccctctctagttccactacatatacagtgcgggttacctgcctgtatcctggaggtgggagctccaccctgaccggccgggtcaccacaaagaaagccccgtcacctagccaattatctatgactgagttgccaggtgatgcagtccagcttgcgtgggtcgcagccgcccccagcggcgtgcttgtctaccagatcacctggaccccactgggcgaggggaaggctcacgagatcagcgtgccaggaaacctaggaacagccgtgctccctggcctggggagacacactgagtatgacgtcactatactagcatattaccgcgatggggcgcggagcgatccggtgtcactccgttacacccccagcacggtttcacggtcaccgcccagtaatttggcactcgcatcagagacccctgatagcctgcaagtaagctggactcccccactgggccgagtgctgcactattggttaacctacgcaccagcttctggtctggggcctgagaaatctgtgtccgttcccggagcacgatcccacgtcacactgcccgatcttcaggcagctactaagtaccgagtgctggtttctgcaatttatgcggccggacggagcgaagcagttagcgctacagggcagacggcttgccccgctcttagacctgacggcagcctgcctggatttgacctgatggtcgcattctccctcgttgaaaaagcctacgcatctatcagaggagttgctatggagccaagtgcctttggaggcacgccaacatttacccttttcaaggacgctcaactgacccgcagagtctccgatgtttacccagctccacttccccccgagcataccatagttttccttgtccgcttgctgcctgagaccccccgtgaggcttttgccctgtggcagatgaccgccgaggactttcagcccttgcttggcgtattactggacgccggcaagaagagcctcacatatttccacagagacccccgggcagcgctccaggaggctactttcgacccacaggaggtacgaaagattttcttcggaagtttccacaaggttcacgtggctgtgggtcgttccaaagtaagactttatgttgactgcaggaaagtggccgagaggccgttaggagaaatgggcagcccgcccgccgcaggcttcgtcacgctgggacggctggccaaagcaaggggaccgcggagctcctctgcagcattccagttgcagatgctgcagattgtgtgctcggacacgtgggctgacgaggatcgctgttgcgaactgccagcaagtcgagatggcgaaacctgcccagcctttgtatcagcatgcagctgctctagtgagacgcctggtcctccaggtcctcaggggcctcccggcctaccaggccgcaacgggacacccggggagcaggggtttcctggccccaggggacctcccggagtcaagggcgagaagggcgaccacggtttacccgggctgcaggggcatcctggtcatcaaggaatccctggaagggtgggactgcaaggtccaaagggaatgcgtggcctggagggcacagcaggactgccgggaccaccaggacctcggggttttcagggcatggccggagcaagaggcacatccggcgagcgtggtcccccagggacggttggtcctacaggcctcccgggtccaaaaggtgagcgtggagaaaagggggagccacagagccttgcaaccctctaccagctcgtatctcaggctagccacgtgtcgaagtttgacagtttccacgagaatactagaccccccatgcctatcctcgagcagaagctcgagcccggtactgagcctctgggaagcccgggtacccgaagtaaagccctggtccccggcgagtgggggaggggcggtcgtcacctcgagggacggggcgagcccggtgctgtggggcagatgggatcaccaggccagcagggagccagcactcagggtctgtgggagtag

SEQ ID NO: 206314 - DNA, 3855 bp, Artificial Sequence
  derived and/or modified sequence
atgagcagcggggaccctgcccacctgggcctgtgcctgtggctgtggctgggcgccaccctgggccgggagcaggtgcaggccagcggcctgctgcggctggccgtgctgcctgaagatcggctgcagatgaagtggagggagagcgagggcagcggcctgggctacctggtgcaggtgaagcccatggccggggacagcgagcaggaggtgatcctgaccaccaagacccccaaggccaccgtgggcggcctgagccccagcaagggctacaccctgcagatctttgagctgactggaagtggccgcttcctgctggcccggcgggagtttgtgattgaggacctgaagagcagcagcctggacaggagcagccagaggcccctgggcagcggggcccctgagcccacccccagccacacaggcagcccagaccctgagcaggccagcgagccccaggtggccttcacccccagccaggaccccaggaccccagctggcccccagttccgctgcctgccccctgtgcctgctgacatggtgttcctggtggatggctcctggagcatcggccacagccacttccagcaggtgaaggacttcctggccagcgtcatcgccccctttgaaattggaccagacaaggtgcaggtgggcctgacccagtacagcggagatgcccagacagagtgggacctgaacagcctgagcaccaaggagcaggtgctggccgctgtgcggcggctgcgctacaagggcggcaacaccttcaccggcctggccctgacccacgtgctgggccagaacctgcagcctgctgctggcctgcggcctgaggccgccaaggtggtgatcctggtgacagatggcaagagccaggatgatgtgcacacagctgcccgggtgctgaaggacctgggcgtgaatgtgtttgctgtgggcgtgaagaatgctgatgaagctgagctgcggctgctggccagccccccccgggacatcaccgtgcacagcgtgctggacttcctgcagctgggcgccctggccggcctgctgagccgcctcatctgccagaggctgcagggcggcagcccccggcagggccctgctgctgccccagccctggacaccctgcctgcccccaccagcctggtgctgagccaggtgaccagcagcagcatccggctgtcctggaccccagcccccaggcaccccctgaagtacctgattgtgtggagggccagccggggcggcaccccccgggaggtggtggtggagggccctgctgccagcacagagctgcacaacctggccagcaggacagagtacctggtgtctgtgttccccatctatgagggcggcgtgggggagggcctgcggggcctggtgaccacagcccccctgcccccaccccgggccctgaccctggccgctgtgacccccaggacagtgcacctgacctggcagcccagcgctggggccacccactacctggtgcgctgcagccctgccagccccaagggggaggaggaggagcgggaggtgcaggtgggccggcctgaggtgctgctggatggcctggagcccggccgggactatgaggtgtctgtgcagagcctgcggggccctgagggcagcgaggcccggggcatccgggcccggacccccaccctggccccacccaggcacctgggcttcagtgatgtgtcccatgatgctgcccgggtcttctgggagggcgcccccaggcctgtgcggctggtgcgggtgacctacgtgagcagcgagggcggccacagcggccagacagaggcccctggaaatgccaccagcgccaccctgggccccctgagcagcagcaccacctacacagtgcgggtgacctgcctgtacccaggcggcggcagcagcaccctgaccggccgggtgaccaccaagaaggcccccagccccagccagctgtccatgacagagctgcctggagatgctgtgcagctggcctgggtggccgccgcccccagcggcgtgctggtgtaccagatcacctggacccccctgggggagggcaaggcccacgagatctctgtgcccggcaacctgggcacagctgtgctgcccggcctgggccgccacacagaatatgatgtgaccatcctggcctactacagagatggagcccggagtgaccctgtgtccctgcgctacacccccagcacagtgagccgcagcccccccagcaacctggccctggccagcgagaccccagacagcctgcaggtgtcctggaccccacccctgggccgggtgctgcactactggctgacctacgccccagccagcggcctgggccctgagaagtctgtgtctgtgcctggggcccggagccacgtgaccctgcctgacctgcaggccgccaccaagtacagagtgctggtgtctgccatctatgctgctggccgctctgaggccgtgtctgccaccggccagacagcctgcccagccctgcggccagatggcagcctgcccggctttgacctgatggtggccttcagcctggtggagaaggcctatgccagcatccggggcgtggccatggagcccagcgcctttggaggcacccccaccttcaccctcttcaaggatgcccagctgaccaggagagtgtctgatgtgtacccagcccccctgcccccagagcacaccatcgtgttcctggtgcggctgctgcctgagaccccccgggaggcctttgccctgtggcagatgacagctgaggacttccagcccctgctgggcgtgctgctggatgctgggaagaagagcctgacctacttccaccgggacccccgggccgccctgcaggaggccacctttgacccccaggaggtgaggaagatcttcttcggcagcttccacaaggtgcacgtggccgtgggccgcagcaaggtgcggctgtatgtggactgcaggaaggtggccgagcggcccctgggggagatgggcagccccccagctgctggctttgtgaccctgggccgcctggccaaggcccggggccccaggagcagcagcgctgccttccagctgcagatgctgcagatcgtgtgcagcgacacctgggcagatgaggaccgctgctgtgagctgcctgccagcagagatggagagacctgcccagcctttgtgtctgcctgcagctgcagcagcgagaccccaggccccccaggcccccagggccccccaggcctgcctggaagaaatggcaccccaggagagcagggcttccctggcccccggggccccccaggagtgaagggggagaagggggaccacggcctgcccggcctgcagggccaccctggccaccagggcatccctggccgggtgggcctgcagggccccaagggcatgaggggcctggagggcacagctggcctgcccggccccccaggcccccggggcttccagggcatggccggggcccggggcaccagcggggagcggggccccccaggcaccgtgggccccaccggcctgcccggccccaagggggagcggggggagaagggggagccccagagcctggccaccctgtaccagctggtgtcccaggccagccacgtgtccaagtttgacagcttccacgagaacaccaggcctcccatgcccatcctggagcagaagctggagcccggcacagagcccctgggcagccctggcaccaggagcaaggccctggtgcctggagagtggggccggggcggccgccacctggagggccgcggggagcctggagctgtgggccagatgggcagccctggccagcagggcgccagcacccagggcctgtgggagtag

SEQ ID NO: 206315 - DNA, 3855 bp, Artificial Sequence
  derived and/or modified sequence
atgagcagcggcgaccccgcccacctgggcctgtgcctgtggctgtggttgggagccaccctcggccgggagcaagtgcaggcgtctggtctactgaggttggccgtactcccagaggatcgactacaaatgaagtggcgcgaatcagagggttccgggcttgggtatttagtgcaagtgaagccaatggctggagattctgagcaggaagtgatcctaaccaccaagacacctaaggctaccgtgggtggtctgagcccttccaaaggatacactctccaaatattcgagctgacaggatccggacgcttcctgttagccagacgcgagtttgtaatcgaagatctgaaatcatcaagtctggatcgttccagtcagcggcctctgggatccggcgcccctgagcctacgccttctcacactgggtcccctgacccagaacaagcgagcgagccacaagttgcctttacaccctctcaggaccctaggacgccagccggtccacagttccgctgtcttcctccagtgccagctgacatggtttttctcgtagatggatcctggtccattggccacagtcactttcaacaagtgaaagactttttggccagcgtcatcgcaccgtttgagatcgggccagacaaggtacaggttggattaacccagtattccggggacgcccagactgagtgggatctgaactctttgagtacaaaggaacaggtgctggccgcagtgcgtaggttgagatacaaaggcgggaatacgtttacaggcctggcactcactcatgttctcgggcagaacctccagcccgccgccggcctccggcccgaggctgcaaaagttgtgatcctcgtaactgacggaaaatctcaggacgatgtgcacacagccgctcgcgtgttgaaggatctcggagtcaatgttttcgcagtcggagtgaagaacgccgatgaggcagagctgcgcttactcgctagccctccacgcgacattacggttcacagcgttctcgactttcttcaactgggggcacttgcgggcctcctcagcaggcttatctgtcagagactccagggcggatctcctcggcagggccctgccgcagcacctgctttagacacactacctgctccaacaagcctggtcctatcacaggtaacgtcctcttccatccgccttagttggacccccgcccccagacatccgctaaaatatttaattgtttggagagcctcccgcggtgggacacccagagaagtagtcgtagaagggcctgctgcttctaccgaactgcacaacttggcatcgcgcactgagtacctggtgtctgtgttcccgatctatgagggcggtgtgggggagggcttgagaggactggtcaccaccgcgcccttgccccctccacgggccctcacactggccgccgtcacaccaagaactgtgcatttgacctggcagccatccgcgggggccactcactacctcgtgcggtgctcacctgcctcccccaagggcgaggaggaggagcgggaggtccaagtaggtcggccggaagtgctgctggatggattagaacccggcagagattacgaggtgagcgtgcagagtctcagaggccccgagggcagcgaagccaggggcatcagggcgaggactccaacacttgctccccctcgacatttgggcttttctgacgtcagccacgacgccgccagggtgttctgggagggagctcctagacctgtgaggctggtacgcgtcacttacgtctcgtctgagggcggtcactcaggccagacagaagcaccaggcaatgccacctccgcaaccctgggacccctatctagttcgactacatacacggttcgggtgacctgcctctaccccggcggaggttcctcaacgcttacagggagagttaccactaaaaaggcgccatcccccagtcagctaagcatgaccgaacttccaggtgacgcagttcaactcgcatgggtggcagcggccccttctggggtcttagtttaccagattacatggacccctctgggtgaggggaaagcacatgaaatcagcgttccaggaaacctgggaacggccgttttgccgggcctggggaggcatacggaatatgacgtcacaatccttgcatattaccgcgacggagctagatcagatcccgtatctctgaggtacacaccaagcacggtatctagaagccccccttccaatttagccctggcaagtgaaacccccgactcgctacaagtgtcgtggactccacctttgggccgcgtgctccactactggctgacctacgcgccagctagcggcttgggacccgaaaaatctgttagtgtgcccggagcaagatcacacgtaacactgcctgatctgcaggccgccacaaagtaccgcgtgttagtctccgcaatttatgccgccgggcgctccgaagctgtcagtgccacaggccaaacagcctgtcccgcactgcgtcccgacggcagcctccctgggttcgatctgatggtggccttttccttagtggagaaagcctacgcgtccattagaggagtggccatggagcctagcgcattcggcgggacgcccactttcaccctgtttaaggacgctcagttgactagacgggtgagtgacgtttatccagccccgcttccccccgaacatacaattgtgttcctcgtaaggttactgcccgagacccccagggaggcattcgccctgtggcaaatgacagccgaggacttccagccgctgctgggcgtgctcctggatgctgggaagaagtctctgacatattttcaccgcgacccacgggcagctctccaggaggccacattcgacccccaggaagtccggaagatcttctttgggagcttccacaaagtacatgtggctgtgggccggtctaaagtgcgactttatgttgattgtaggaaggtcgcagagcgaccactgggggagatggggtcaccgcctgctgcaggctttgtgaccctgggcagacttgctaaagcccgtggacctcggtcttctagtgccgcttttcagttgcagatgctccaaatcgtctgcagtgatacatgggccgatgaagatcggtgctgcgagctgccggcatctcgcgacggagaaacctgtcctgcattcgtgtccgcttgttcctgttctagcgagactcctggccctcctggtcctcaaggtccccctggcctgcccggtaggaacggcacgccgggcgaacagggatttcctggaccacgggggccgcccggggtcaaaggagagaagggagaccatgggttgcccggcctccagggtcacccaggacaccagggcattccgggccgtgttggtctgcaaggacctaagggaatgcggggacttgagggaacagccggtctgcccgggccacccggccccagggggttccagggtatggccggggcgaggggcacttctggcgagcgggggccgccgggaaccgtgggacctaccggactgcccgggccaaaaggagagcgcggtgaaaagggggagcctcagtctttggctacgttatatcagctggtttcacaggcttcacatgtttccaaatttgattcttttcacgagaacactcggccgcctatgcccatcctcgagcagaagcttgagccagggaccgagcctctgggcagccccggtacgcgtagcaaagcgttagtgcccggagagtgggggcgggggggtcgacacttggagggccgtggtgaacccggcgcagtgggtcagatggggtctcctggacagcagggggcaagtacccagggattatgggaatag

SEQ ID NO: 206316 - DNA, 4172 bp, Artificial Sequence
  derived and/or modified sequence
ataagctccagccttcctgtggccacagcaggaccagagtggaccagcacaccccaggagagaggactggggtcccaggagtaggaggagcccgagcaccatgagctccggagaccctgcacacctcggcctctgcctctggctgtggctgggcgccaccctgggaagagagcaagttcaagcaagcggtctcctgaggctggctgtgctgcctgaggaccggctgcagatgaagtggagagagtcggaggggagcggcctcggctacctggtgcaggtgaagcccatggcaggggactcggaacaggaggtgatactgaccaccaagacccctaaggccacagtggggggcctgagcccctccaagggctacaccttgcagatcttcgagctcactggctctgggcgcttcctgctagctcggagggagtttgtgattgaggatctgaagagtagctccctggacaggagcagccagaggcccctcggctctggagccccggagcccaccccctcccacacggggagcccagaccctgagcaggcttctgagccccaagttgccttcacaccaagccaggatccgcgcactcctgccggcccccagttccgctgcctgccccccgtgcctgctgacatggtcttcctggtggacgggtcctggagcattggccacagtcacttccagcaggtcaaggacttcctggccagtgtcatcgcaccctttgaaatcgggccggataaggtccaagtaggcctgactcagtacagcggggatgctcagactgagtgggacctgaactccctcagcaccaaggaacaggtgctggcagctgtgcgccgcctccgctacaagggggggaacacgttcacaggccttgccctgacccacgtgctggggcagaacctgcagccggcggctggcctccgtccagaggcagccaaggtggtgattctggtgacggacggcaagtcccaggacgatgtgcacactgctgcccgtgtcctcaaggacctgggcgtgaacgtcttcgctgtgggtgtgaagaacgccgatgaggctgagctgaggctcctggcgtccccgccgagggacatcaccgtccacagcgtgctggacttcctgcagctcggcgcgctggctggcctgctcagccgtctcatctgccagaggctccagggtgggagcccgcggcagggcccagcagcggctccagccctggacaccctccctgcccccaccagcctggtcctgagccaggtgacctcctccagcatccgcctgtcctggactccagccccccggcaccccctcaagtatctgatcgtttggcgagcctctagaggtggcacccccagggaggtggtggtggagggacccgccgcctccacggagctgcacaacctggcctcccgcacagagtacctggtctccgtgttccccatctatgagggcggggttggcgaaggcctgcggggcctggtgaccacagcacctctgcctccgccccgggcgctgaccctggccgcagtgacgcccagaaccgtccacctcacctggcagccctcggccggggccacccactacctggtgcgatgttctcctgcttcccccaagggtgaagaggaggagcgagaggtgcaggtcgggcggcccgaggtgctgctggatggcctggaacctggcagggactatgaggtctcggtgcagagcctgcgaggccctgagggcagcgaggcccggggcatccgtgccaggacccccaccctggcccccccgagacacctgggcttctcagacgtgagccacgacgcggcacgagtgttctgggagggtgccccgaggcctgtgcgcctggtcagggtcacctatgtgtccagcgagggtggacactcggggcagacagaggctcctgggaacgccacctcggccacgctggggcctctctcttcctccaccacctacactgtccgtgtcacctgcctctaccctgggggtggctcctctacgctgactggccgggtgaccaccaagaaagctcccagcccaagccagctgtccatgacggagctgccaggggatgcagtccagctggcgtgggtggccgcagccccgtctggcgtgcttgtctaccagatcacgtggacgcccctgggagaggggaaggctcacgagatctctgtcccagggaacctcggcacggccgtcctgcctggcctagggaggcacacagagtacgacgtcaccatcttggcctactacagggacggggcccgcagtgaccctgtgtccctccgctataccccctccacggtgagcaggagcccaccctccaacctggccctggcctcggagacccccgacagcctgcaggtcagctggacgcccccgcttggccgcgtgctccattactggctcacctacgcccccgcctctggcttgggacccgagaaatccgtctctgtgccaggagccaggagccacgtgacactgcccgacctgcaggcagccacgaagtacagggtcctggtctcagctatctatgcagcaggcaggagtgaggctgtgtctgccacgggccagacagcctgcccagccctccgccctgacggctccctcccagggtttgacctgatggtggccttcagcctggtggaaaaggcttatgcgtccatccggggcgtggccatggagccctctgccttcggtgggaccccgaccttcacgctcttcaaggacgcccagctgacaagacgggtcagtgacgtctacccagcccccctacctccagagcacaccatcgtcttccttgtgcgcctacttcccgagacaccccgtgaggccttcgcgctgtggcagatgacagccgaggacttccagcccctccttggggttctgctggatgccgggaagaagtccctgacctacttccaccgtgaccccagggctgccttgcaggaggccaccttcgacccgcaggaagtgaggaagattttcttcgggagcttccacaaggtgcacgtggctgtgggccgctccaaggtcaggctctatgtggactgccggaaggtggctgagcggccccttggggagatgggcagcccacccgctgcgggcttcgtcacgctggggaggctggccaaggccaggggcccccggagcagttcggccgcgtttcagctccagatgctgcagatcgtgtgcagtgacacctgggccgatgaggaccggtgctgtgagctccctgcctcgagggatggagagacctgccccgccttcgtgtctgcctgttcctgttcctcagagacccctgggcccccaggacctcaaggacccccaggcctccctgggaggaatggcaccccaggagagcagggcttcccagggcccaggggtccaccaggggtcaaaggagagaagggagaccatgggcttccaggcttgcagggccaccccggccaccagggcatccccgggagagttggcctccagggaccaaagggaatgagaggcctggagggaactgctggcctgcctggaccccctggccccagggggttccagggcatggcaggggccaggggcactagtggagagcgaggacctccagggaccgtggggcccacaggactgccagggcccaaaggggaacgaggagagaagggcgagccgcagtcccttgccaccctctaccagcttgtgagccaggcctcacacgtgtcaaagttcgactccttccacgagaacaccaggccccccatgcccatcttggagcagaagctggagccgggcactgagcccctggggtcccctggcacccgcagcaaggccctggttcctggagaatgggggcgtggtggccgccaccttgagggcagaggggagcctggagctgttggtcagatgggcagccctgggcagcagggggctagcacccagggcctctgggagtgacaggacattttctgcactgccccgaggaacgctgagccttcctccctgggtttgtctggacaccgagagcgaccacatcctggagaagccaggagaaaagctcaggaagagcctgcaggtggaaggagagggaagcagcggcctcggccaaggcccaccccatactcttggctctgtagcatttccaagttcagataaacccctgagtgctcaccca

SEQ ID NO: 206317 - DNA, 3855 bp, Artificial Sequence
  derived and/or modified sequence
atgtctagcggggaccccgctcatcttggcctgtgcctttggctgtggttgggcgcaacacttgggagggagcaggtccaagcttcgggcttacttcgcctggccgtgctgcctgaggatcggttgcagatgaaatggcgtgaatccgaggggagcggcctcggctacctcgtgcaggtgaagccaatggcaggcgatagcgaacaggaagtaatcttaaccaccaaaacccctaaggcaacagtcggcggactaagcccgagcaaaggttacacgctccaaatcttcgaattaactggatcgggtcggtttcttctggccagaagagaatttgttattgaagacctgaaatctagctccctggatcggtcctctcagcggccactgggatccggtgcccctgaacccacaccttctcacaccggttcacctgaccctgaacaagcatccgagccccaggttgctttcactccaagtcaagacccacgcacacccgcagggccacagttcagatgtcttcctcccgtacctgctgatatggtgtttctcgtggacgggagctggtcgatcggccacagccacttccagcaggtgaaagactttctcgccagcgttatcgccccattcgagataggcccagacaaggtccaggtgggcctgacacagtactccggcgatgcccagaccgagtgggaccttaattcactttctaccaaagagcaggtgcttgctgccgttcgtagactgaggtataagggcggtaatacattcaccggcctggctctcacacatgtattagggcaaaatctgcaacccgcagccggactgcggcctgaagcagctaaagttgtaattttggtgacagatggaaagagtcaagacgatgtgcacactgctgccagggtcctgaaagacttgggcgtgaatgtctttgccgtgggagtcaagaatgctgatgaggctgaattgagactcttggcaagccctcctagggatatcacggtccatagtgtccttgacttccttcaactaggcgctctggccggtcttctgagcaggcttatctgtcagagactccagggaggtagcccgaggcagggcccagcggctgcccctgcgctcgacaccctccctgcccctacgagcttggtcctcagccaggttacctcttcctcaatacgattgagctggactcctgctccacggcacccactcaaatatctgattgtgtggcgggcaagtagagggggaacgcctagggaggtggtagtagagggaccagcagcctctactgaactccacaacttggccagtcgtacagaatacctggtgtccgtgttcccaatctacgaaggcggtgttggcgagggtttaagaggcctggtcactaccgcaccactgccgccacctagagccctcaccctcgctgcggtgactcctcggactgttcacctaacgtggcaaccctctgcaggggcaacacattacctggtcagatgtagccccgctagccccaaaggagaggaggaggagcgggaggtgcaagttgggcgaccagaggtgctcctcgacggtctggagcccggaagagactacgaagtctccgtgcagtcgctgcgtggccctgaggggagtgaggcacggggtattagggcaaggactcctacattggctccgcctcggcacttggggtttagcgacgtctctcacgatgcggcacgggtgttttgggaaggagcaccgagacctgtgcgcttagtgcgggtcacctatgtgtcaagcgagggcggacactccgggcagacagaggcacctggcaacgccacttcagcaactttggggccactatcttctagtaccacttataccgttcgagtgacttgtctgtatcctgggggtggctccagcaccctgactggtcgggtgacaactaagaaagccccttcgccaagccagcttagtatgaccgagctccctggggacgctgttcagctggcttgggtcgccgcagcccctagtggtgtcctggtgtaccagatcacctggacgcccctcggtgaaggtaaggcgcacgagatctcagtgccaggcaatctaggtaccgccgtcctgcctggtctgggacggcatacagagtatgacgtcacaattctggcttactatagagatggtgctagatccgacccagtctcgttgaggtataccccctcaacggtctcccgttcacctccttcaaatttagcgctggctagcgaaactccggatagccttcaggtgtcctggacgcctcctctcggcagagtgttgcattattggttgacgtacgctcccgcatccgggctggggccagagaagagcgtgtccgtccctggggctagatcgcacgtaaccttaccagacttacaggctgctaccaagtacagggtgttagtgtccgccatctatgctgccggacgcagcgaagctgtatccgctaccgggcagactgcctgcccagctctcaggcccgatgggtccctccctggttttgacctgatggtggccttttctctggtcgaaaaggcttatgctagtatccggggagtggccatggagccctccgcctttggcggaaccccaaccttcacactcttcaaagatgcacaacttaccagaagagtgtctgacgtgtaccccgctcccttaccaccagaacatacgattgtgttcctggtccgactgcttcctgagaccccccgagaggctttcgcactgtggcagatgactgccgaggattttcagcccctacttggcgttctcttagacgcgggtaaaaaatctttgacctatttccaccgtgacccccgagcagctcttcaggaggccacttttgaccctcaggaagtgaggaaaatattcttcgggtcctttcacaaagtgcacgtggcagtcggacgcagcaaagttcgtttgtatgttgactgcaggaaagtggcagagcggcctctcggtgagatgggttccccccctgctgccggatttgtgactctaggcaggctcgccaaagcaagagggcctcgcagctcctcagccgcttttcaactgcagatgttgcagatcgtgtgtagtgacacctgggcagacgaggatcggtgctgcgaattgcctgcctctagagacggtgagacatgtcctgccttcgtttccgcctgctcctgcagcagcgaaaccccgggacctccaggccctcaggggccaccgggactccccggaagaaacggaacccctggcgagcaggggtttccaggccctaggggcccaccaggtgtgaaaggagaaaagggggatcacgggctgccaggactgcaaggccatcccggacaccaagggatcccagggagggtcggattacagggtcctaaggggatgcgcggactggaaggcaccgccggactgccagggcctccaggtcccaggggttttcagggtatggccggagctaggggcacttcaggggagaggggccctcctggaaccgtcggccctactggcctccctgggccaaagggagaacgtggggagaagggagaaccccagtccctggcaacattgtaccaacttgtgtcgcaggcatcccacgtttctaagtttgacagtttccatgaaaacaccagacccccaatgcccattttggaacagaagctcgaacctgggactgagcccttaggttcaccaggcactagaagcaaggcactggtccctggcgaatggggaagagggggtaggcatttagaaggtcggggagaacccggagctgtgggacaaatgggatctcctggccagcagggcgcaagtacccagggtctttgggagtag

SEQ ID NO: 206318 - DNA, 3855 bp, Artificial Sequence
  derived and/or modified sequence
atgtcgagcggtgatccagctcaccttggtctttgcctgtggctgtggctcggcgccactcttgggagagagcaggtccaggctagcgggttactccggctggcagtgctgcccgaggatagactgcagatgaagtggagagaatccgaggggagcgggctcggctacttagttcaggtgaaaccgatggctggagatagtgagcaggaagtaattttaacgacgaaaacacccaaggcgactgtaggaggactctctccgtctaaagggtataccctgcaaatctttgagctgaccgggagcggacggtttctgttggccaggcgcgagtttgtgattgaagatttgaagagctcctcccttgaccgctccagccagcgcccacttggatcaggggcacccgagcccaccccatcgcatacaggatcgcctgacccagaacaggccagcgaaccccaggttgcgtttactccatcacaggacccacggacgccagcaggaccacaatttcgttgcctgccccctgtcccagcggacatggtgtttctcgttgatggcagctggtcaattggccattctcattttcagcaggtcaaagatttccttgcatcagtaatagcaccgttcgagattggtcccgataaagttcaagtgggccttacccaatactccggcgacgcgcaaacggaatgggatctgaactcactatctacaaaagagcaggtactggccgccgtgcggaggcttcgctacaaaggtggcaacaccttcacgggtcttgcactgacgcatgtcctcggacagaacctgcagcctgccgccgggctgcgccccgaggccgccaaagtggtgatcctggttaccgacgggaagtcacaggatgacgtgcacacagccgcacgggtgttgaaggatttaggagtcaacgtattcgcagtaggggtcaagaacgcggatgaggccgagttaaggcttctggcctcaccccctcgtgatataacggttcactctgtgttggatttcttgcagctcggtgcactggccggactgctgtcgagacttatttgtcagcggctccagggaggctcccctagacagggtccagctgcggcacctgctctggatacactgccagcacccacttctctcgtccttagccaggttacctcttcttccatcagactgagctggacccccgcaccccgtcatccactcaagtacctgatcgtttggagagccagccgtggtggcactccgcgcgaggtggtggtggaaggacctgccgcttcaaccgaactgcataatctcgcctcacggactgagtaccttgtctcggtgtttcctatatatgaaggtggtgtaggggaagggctgaggggactagtgaccacggccccccttccacccccccgggccttgacgctagcagccgtcacaccccgaaccgtccacctgacctggcagccctctgctggcgccacgcattacttggtgagatgtagcccagccagtcccaagggggaggaagaggaacgcgaggtccaggtcgggagacctgaagtgctgctggacggcttagaacctgggagggactatgaagtgagcgtccaaagcctgcgcggccccgaaggctctgaggctcgaggcatcagagcaaggacacccacgttggcacccccacgacacctgggattttccgacgtgagtcatgatgcagccagggtgttttgggaaggcgcacctcgccccgtacgactagtgcgagtcacgtacgtcagttctgaaggcggccactctggtcagaccgaggcccctggaaacgccacctcagccaccctgggacctctatcttcctcaacgacttacacagtaagggtgacgtgcctctatcccggagggggtagcagcaccctcacaggtcgggtaaccaccaaaaaggcacctagcccaagccagctctccatgacagaacttcctggcgacgcagtccagctagcttgggtagcggcagctccaagtggcgtcctcgtctatcagatcacgtggacgcccctcggagaagggaaagctcacgagataagcgtccctgggaacctgggtaccgcagtgctgcctggactcggacgccatactgaatacgacgtgaccattcttgcctactacagagatggcgctagaagcgatcccgtctccctgcgatatactcccagcaccgtgtcaaggtctccccccagcaatctggcgctcgcttctgaaaccccggactccctgcaggtttcctggacacctccattaggaagagttctgcattactggctgacatatgctccagcaagcggacttggccccgaaaagagcgtatccgtgcctggagcccgcagtcatgtgacattgcccgacctccaggccgcaacgaaataccgagtgctggtttcagcaatctacgctgccggacggagcgaagccgttagcgcgactggacagacagcctgccccgccctaagacccgatgggagtcttcctggctttgatctaatggtggctttttcattagtggagaaagcttatgcgtctattaggggagtggccatggagccgtccgccttcgggggaacacccacgtttactctctttaaagacgcccagctgacgcgtcgggtgagcgacgtgtatccagccccgcttcctccagagcacactatagtcttcctcgtccgcctgttacctgaaactcccagggaggcatttgcactgtggcagatgactgctgaggacttccagccattattgggtgtcctcctcgatgcaggcaaaaaaagtctgacctatttccaccgcgatccaagggcagcccttcaagaagcaaccttcgacccccaggaagtgcggaaaatatttttcgggtcctttcacaaggtgcacgtagcagtcggcaggtctaaagtgagattatacgtggattgcagaaaggtagcagagagaccgctgggcgaaatgggttccccgcccgccgccgggttcgttacgctggggcgccttgccaaagctaggggaccccggagctctagtgcagcattccagttgcagatgctgcaaatcgtatgttccgacacttgggccgacgaagacagatgttgcgagctacccgcttcccgagacggcgagacatgccccgccttcgtgtcggcttgctcttgctccagtgaaactccgggtccgcccgggcctcaggggccacctggtttgccgggacggaatggcacacccggggagcagggctttcccgggccaagagggccccccggggttaaaggggaaaagggagatcatggactgccaggcctccaaggtcaccccggacaccaaggcatccccggccgtgtgggtctgcaagggcctaaaggcatgagaggtctcgagggcaccgccggccttcccggtcctcctggccccaggggattccaagggatggctggcgctaggggtacctctggagagagaggtcccccaggaactgtcggccctactggcctacccgggcccaaaggggaacgcggagagaagggcgagccgcaatcacttgccacactatatcagctcgtgagccaagctagccacgtgagcaagtttgattcctttcacgagaacactagaccacccatgccaatattggagcagaaacttgaaccgggcacagaacctttaggtagcccaggtacccgcagcaaagccctggtgccgggagaatggggaaggggaggcaggcatctggagggtcgcggggaacctggcgctgtcggtcagatgggtagtcctggtcagcagggggcatcaacacagggactctgggagtag

SEQ ID NO: 206319 - DNA, 3855 bp, Artificial Sequence
  derived and/or modified sequence
atgtcatccggagatccggcacatttgggtctatgtctgtggctttggttaggcgctacattaggacgggagcaggtacaagcatcaggcctgttaaggttggccgttttacccgaggaccgactgcagatgaaatggcgggaatccgagggatccgggttaggatatctggtccaggtcaaacccatggctggagactctgaacaggaggtcattctcacgacaaagactcctaaggctacagttggcggactgtccccctccaaaggctatactcttcagatatttgagctgaccggatctggacgatttttactggcacgccgggaatttgtgatagaagacctgaaatcctcatccctagatagatctagccagcggcctctcggtagtggagctcctgaacccactcctagccacacgggctctccagacccagagcaagccagcgagccacaggtggcctttaccccctcacaggacccacgtactcccgctgggccccagttcagatgcctgcctcccgtgcctgccgatatggtcttcctcgtagacggatcatggtctattgggcactcacattttcaacaagtaaaagacttccttgcttcagtcatcgcaccatttgagatagggcccgataaggtgcaagtaggcctaacgcagtatagtggtgatgcccagaccgaatgggacctgaactctctttctactaaagaacaggttcttgctgcagttaggcgcctccggtataagggtggaaatacatttacggggttagctctcactcatgtgctcggtcagaatcttcagccagctgccggactgcggcccgaggccgcgaaagtggtcattttagttacggacgggaaatcacaggatgatgtgcatacagccgcccgtgtactcaaagaccttggcgtgaatgtgtttgcagtcggagtgaagaacgccgacgaagctgagctcaggctgctggcctcacctccccgggacatcactgttcactctgtactggattttttgcagctgggcgccctggcaggactcctaagtaggttgatttgtcaacggctccaggggggaagcccaagacaggggcccgcagccgcccctgcattagataccttgcccgccccaacttcccttgttttatcacaggttacaagttccagcatcaggctttcatggacaccagccccgagacaccccctgaaatacctgattgtgtggagagccagtaggggtgggacccctagggaggttgtcgttgaaggacccgccgcttctaccgagctccacaacttggccagtagaactgaatatcttgtaagcgtgttccccatttacgagggcggcgttggcgaaggtcttcgcggcttagtcaccaccgccccccttccacccccccgagcactgacattggcagctgtgactccgagaaccgttcatcttacctggcagcctagtgccggcgccactcactatctggtacgctgctccccagccagtcccaaaggagaagaagaggaacgtgaagtccaggtcggcagaccagaggtgttgttggacggacttgagccaggtagggattacgaagtaagcgtacagagtctcagaggaccggaaggtagtgaggccaggggaatccgagcacgcacgcccaccctggcgcctcctcgccatctcggcttttcagacgtgagccacgacgcggcccgggttttctgggaaggcgcaccccggccagtgcggctcgttcgtgttacttatgtttcatcagagggtgggcacagtggacagactgaagcccctgggaacgccacaagcgccactctaggacccctgagctcatccacaacctacaccgtgcgcgtgacttgcctgtaccctggtggaggatcttcaactttgaccggacgagtcactaccaagaaagcaccttcaccgtcgcagctttcaatgaccgagttgccaggcgacgccgtccagttagcctgggtggctgccgctccttccggggttttagtataccagattacttggacaccactgggagaaggcaaggctcacgaaatctcagtacccggcaacttggggacggccgttctgcccggcctggggcgccacactgagtacgacgtgactatccttgcctactatcgggatggcgccaggtcagaccccgtttccttaagatacacaccttccaccgtctcccgctctcctccatctaatctagccttagcgagcgaaacgcccgactccctgcaggtgtcttggactccgcccttaggacgagtgctgcactactggctcacatatgcaccagcatcaggcctgggccctgaaaagtccgtgtccgtaccgggagcaagaagccatgtgacgttgcccgatctccaggccgccactaagtatagagtcctcgttagcgccatttatgccgcaggaaggtcagaggcagtgagcgccactggtcaaacggcatgccccgccttacgacccgatggctcattaccaggtttcgatttaatggtcgcattctccctcgtggagaaggcatatgccagcattaggggggtggcaatggaaccatctgcgttcggaggaacccccacattcaccctgttcaaggatgcacagctgactcgacgagtgtctgacgtatatcctgcgcctctgccaccagaacatacgatagtcttcctcgtccgcctgttacctgaaactcccagggaggcatttgcactgtggcagatgactgctgaggacttccagccattattgggtgtcctcctcgatgcaggcaaaaaaagtctgacctatttccaccgcgatccaagggcagcccttcaagaagcaaccttcgacccccaggaagtgcggaaaatatttttcgggtcctttcacaaggtgcacgtagcagtcggcaggtctaaagtgagattatacgtggattgcagaaaggtagcagagagaccgctgggcgaaatgggttcaccacccgccgccggttttgtgaccctaggcagattggcaaaagcccgaggccctagatccagttccgctgctttccagctgcagatgctacagattgtgtgctctgatacttgggccgatgaggacagatgttgtgaacttcctgccagccgcgacggagaaacttgcccagcttttgtatctgcttgctcctgttcatctgaaacccccggaccgcctgggccccagggtccccccggtttacctggcagaaacgggacgcctggcgagcaaggttttcccggcccacgaggacctcccggggtcaaaggagagaagggggatcacggactgcctggattgcaaggacacccaggccaccaagggattccaggcagagtcggtttgcagggtccaaagggaatgaggggactggaaggcacagccgggctgccagggccacccggtccaagaggattccagggcatggctggagctcggggaacatcaggagagagggggccgcccggcaccgtaggcccaacagggcttccaggtcctaagggcgagaggggggagaaaggagagcctcaaagtctggccactctttaccaactggtgagccaagctagccacgtgagcaagtttgattcctttcacgagaacactagaccacccatgccaatattggagcagaaacttgaaccgggcacagaacctttaggtagcccaggtacccgcagcaaagccctggtgccgggagaatggggaaggggaggcaggcatctggagggtcgcggggaacctggcgctgtcggtcagatgggtagtcctggtcagcagggggcatcaacacagggactctgggagtag

SEQ ID NO: 206320 - RNA, 3855 nt, Artificial Sequence
  derived and/or modified sequence
augucgagcggugauccagcucaccuuggucuuugccuguggcuguggcucggcgccacucuugggagagagcagguccaggcuagcggguuacuccggcuggcagugcugcccgaggauagacugcagaugaaguggagagaauccgaggggagcgggcucggcuacuuaguucaggugaaaccgauggcuggagauagugagcaggaaguaauuuuaacgacgaaaacacccaaggcgacuguaggaggacucucuccgucuaaaggguauacccugcaaaucuuugagcugaccgggagcggacgguuucuguuggccaggcgcgaguuugugauugaagauuugaagagcuccucccuugaccgcuccagccagcgcccacuuggaucaggggcacccgagcccaccccaucgcauacaggaucgccugacccagaacaggccagcgaaccccagguugcguuuacuccaucacaggacccacggacgccagcaggaccacaauuucguugccugcccccugucccagcggacaugguguuucucguugauggcagcuggucaauuggccauucucauuuucagcaggucaaagauuuccuugcaucaguaauagcaccguucgagauuggucccgauaaaguucaagugggccuuacccaauacuccggcgacgcgcaaacggaaugggaucugaacucacuaucuacaaaagagcagguacuggccgccgugcggaggcuucgcuacaaagguggcaacaccuucacgggucuugcacugacgcauguccucggacagaaccugcagccugccgccgggcugcgccccgaggccgccaaaguggugauccugguuaccgacgggaagucacaggaugacgugcacacagccgcacggguguugaaggauuuaggagucaacguauucgcaguaggggucaagaacgcggaugaggccgaguuaaggcuucuggccucacccccucgugauauaacgguucacucuguguuggauuucuugcagcucggugcacuggccggacugcugucgagacuuauuugucagcggcuccagggaggcuccccuagacaggguccagcugcggcaccugcucuggauacacugccagcacccacuucucucguccuuagccagguuaccucuucuuccaucagacugagcuggacccccgcaccccgucauccacucaaguaccugaucguuuggagagccagccgugguggcacuccgcgcgagguggugguggaaggaccugccgcuucaaccgaacugcauaaucucgccucacggacugaguaccuugucucgguguuuccuauauaugaaggugguguaggggaagggcugaggggacuagugaccacggccccccuuccacccccccgggccuugacgcuagcagccgucacaccccgaaccguccaccugaccuggcagcccucugcuggcgccacgcauuacuuggugagauguagcccagccagucccaagggggaggaagaggaacgcgagguccaggucgggagaccugaagugcugcuggacggcuuagaaccugggagggacuaugaagugagcguccaaagccugcgcggccccgaaggcucugaggcucgaggcaucagagcaaggacacccacguuggcacccccacgacaccugggauuuuccgacgugagucaugaugcagccaggguguuuugggaaggcgcaccucgccccguacgacuagugcgagucacguacgucaguucugaaggcggccacucuggucagaccgaggccccuggaaacgccaccucagccacccugggaccucuaucuuccucaacgacuuacacaguaagggugacgugccucuaucccggaggggguagcagcacccucacaggucggguaaccaccaaaaaggcaccuagcccaagccagcucuccaugacagaacuuccuggcgacgcaguccagcuagcuuggguagcggcagcuccaaguggcguccucgucuaucagaucacguggacgccccucggagaagggaaagcucacgagauaagcgucccugggaaccuggguaccgcagugcugccuggacucggacgccauacugaauacgacgugaccauucuugccuacuacagagauggcgcuagaagcgaucccgucucccugcgauauacucccagcaccgugucaaggucuccccccagcaaucuggcgcucgcuucugaaaccccggacucccugcagguuuccuggacaccuccauuaggaagaguucugcauuacuggcugacauaugcuccagcaagcggacuuggccccgaaaagagcguauccgugccuggagcccgcagucaugugacauugcccgaccuccaggccgcaacgaaauaccgagugcugguuucagcaaucuacgcugccggacggagcgaagccguuagcgcgacuggacagacagccugccccgcccuaagacccgaugggagucuuccuggcuuugaucuaaugguggcuuuuucauuaguggagaaagcuuaugcgucuauuaggggaguggccauggagccguccgccuucgggggaacacccacguuuacucucuuuaaagacgcccagcugacgcgucgggugagcgacguguauccagccccgcuuccuccagagcacacuauagucuuccucguccgccuguuaccugaaacucccagggaggcauuugcacuguggcagaugacugcugaggacuuccagccauuauuggguguccuccucgaugcaggcaaaaaaagucugaccuauuuccaccgcgauccaagggcagcccuucaagaagcaaccuucgacccccaggaagugcggaaaauauuuuucggguccuuucacaaggugcacguagcagucggcaggucuaaagugagauuauacguggauugcagaaagguagcagagagaccgcugggcgaaauggguuccccgcccgccgccggguucguuacgcuggggcgccuugccaaagcuaggggaccccggagcucuagugcagcauuccaguugcagaugcugcaaaucguauguuccgacacuugggccgacgaagacagauguugcgagcuacccgcuucccgagacggcgagacaugccccgccuucgugucggcuugcucuugcuccagugaaacuccggguccgcccgggccucaggggccaccugguuugccgggacggaauggcacacccggggagcagggcuuucccgggccaagagggccccccgggguuaaaggggaaaagggagaucauggacugccaggccuccaaggucaccccggacaccaaggcauccccggccgugugggucugcaagggccuaaaggcaugagaggucucgagggcaccgccggccuucccgguccuccuggccccaggggauuccaagggauggcuggcgcuagggguaccucuggagagagaggucccccaggaacugucggcccuacuggccuacccgggcccaaaggggaacgcggagagaagggcgagccgcaaucacuugccacacuauaucagcucgugagccaagcuagccacgugagcaaguuugauuccuuucacgagaacacuagaccacccaugccaauauuggagcagaaacuugaaccgggcacagaaccuuuagguagcccagguacccgcagcaaagcccuggugccgggagaauggggaaggggaggcaggcaucuggagggucgcggggaaccuggcgcugucggucagauggguaguccuggucagcagggggcaucaacacagggacucugggaguag

SEQ ID NO: 206321 - RNA, 3855 nt, Artificial Sequence
  derived and/or modified sequence
augucauccggagauccggcacauuugggucuaugucuguggcuuugguuaggcgcuacauuaggacgggagcagguacaagcaucaggccuguuaagguuggccguuuuacccgaggaccgacugcagaugaaauggcgggaauccgagggauccggguuaggauaucugguccaggucaaacccauggcuggagacucugaacaggaggucauucucacgacaaagacuccuaaggcuacaguuggcggacugucccccuccaaaggcuauacucuucagauauuugagcugaccggaucuggacgauuuuuacuggcacgccgggaauuugugauagaagaccugaaauccucaucccuagauagaucuagccagcggccucucgguaguggagcuccugaacccacuccuagccacacgggcucuccagacccagagcaagccagcgagccacagguggccuuuacccccucacaggacccacguacucccgcugggccccaguucagaugccugccucccgugccugccgauauggucuuccucguagacggaucauggucuauugggcacucacauuuucaacaaguaaaagacuuccuugcuucagucaucgcaccauuugagauagggcccgauaaggugcaaguaggccuaacgcaguauaguggugaugcccagaccgaaugggaccugaacucucuuucuacuaaagaacagguucuugcugcaguuaggcgccuccgguauaaggguggaaauacauuuacgggguuagcucucacucaugugcucggucagaaucuucagccagcugccggacugcggcccgaggccgcgaaaguggucauuuuaguuacggacgggaaaucacaggaugaugugcauacagccgcccguguacucaaagaccuuggcgugaauguguuugcagucggagugaagaacgccgacgaagcugagcucaggcugcuggccucaccuccccgggacaucacuguucacucuguacuggauuuuuugcagcugggcgcccuggcaggacuccuaaguagguugauuugucaacggcuccaggggggaagcccaagacaggggcccgcagccgccccugcauuagauaccuugcccgccccaacuucccuuguuuuaucacagguuacaaguuccagcaucaggcuuucauggacaccagccccgagacacccccugaaauaccugauuguguggagagccaguaggggugggaccccuagggagguugucguugaaggacccgccgcuucuaccgagcuccacaacuuggccaguagaacugaauaucuuguaagcguguuccccauuuacgagggcggcguuggcgaaggucuucgcggcuuagucaccaccgccccccuuccacccccccgagcacugacauuggcagcugugacuccgagaaccguucaucuuaccuggcagccuagugccggcgccacucacuaucugguacgcugcuccccagccagucccaaaggagaagaagaggaacgugaaguccaggucggcagaccagagguguuguuggacggacuugagccagguagggauuacgaaguaagcguacagagucucagaggaccggaagguagugaggccaggggaauccgagcacgcacgcccacccuggcgccuccucgccaucucggcuuuucagacgugagccacgacgcggcccggguuuucugggaaggcgcaccccggccagugcggcucguucguguuacuuauguuucaucagagggugggcacaguggacagacugaagccccugggaacgccacaagcgccacucuaggaccccugagcucauccacaaccuacaccgugcgcgugacuugccuguacccugguggaggaucuucaacuuugaccggacgagucacuaccaagaaagcaccuucaccgucgcagcuuucaaugaccgaguugccaggcgacgccguccaguuagccuggguggcugccgcuccuuccgggguuuuaguauaccagauuacuuggacaccacugggagaaggcaaggcucacgaaaucucaguacccggcaacuuggggacggccguucugcccggccuggggcgccacacugaguacgacgugacuauccuugccuacuaucgggauggcgccaggucagaccccguuuccuuaagauacacaccuuccaccgucucccgcucuccuccaucuaaucuagccuuagcgagcgaaacgcccgacucccugcaggugucuuggacuccgcccuuaggacgagugcugcacuacuggcucacauaugcaccagcaucaggccugggcccugaaaaguccguguccguaccgggagcaagaagccaugugacguugcccgaucuccaggccgccacuaaguauagaguccucguuagcgccauuuaugccgcaggaaggucagaggcagugagcgccacuggucaaacggcaugccccgccuuacgacccgauggcucauuaccagguuucgauuuaauggucgcauucucccucguggagaaggcauaugccagcauuagggggguggcaauggaaccaucugcguucggaggaacccccacauucacccuguucaaggaugcacagcugacucgacgagugucugacguauauccugcgccucugccaccagaacauacgauagucuuccucguccgccuguuaccugaaacucccagggaggcauuugcacuguggcagaugacugcugaggacuuccagccauuauuggguguccuccucgaugcaggcaaaaaaagucugaccuauuuccaccgcgauccaagggcagcccuucaagaagcaaccuucgacccccaggaagugcggaaaauauuuuucggguccuuucacaaggugcacguagcagucggcaggucuaaagugagauuauacguggauugcagaaagguagcagagagaccgcugggcgaaauggguucaccacccgccgccgguuuugugacccuaggcagauuggcaaaagcccgaggcccuagauccaguuccgcugcuuuccagcugcagaugcuacagauugugugcucugauacuugggccgaugaggacagauguugugaacuuccugccagccgcgacggagaaacuugcccagcuuuuguaucugcuugcuccuguucaucugaaacccccggaccgccugggccccaggguccccccgguuuaccuggcagaaacgggacgccuggcgagcaagguuuucccggcccacgaggaccucccggggucaaaggagagaagggggaucacggacugccuggauugcaaggacacccaggccaccaagggauuccaggcagagucgguuugcaggguccaaagggaaugaggggacuggaaggcacagccgggcugccagggccacccgguccaagaggauuccagggcauggcuggagcucggggaacaucaggagagagggggccgcccggcaccguaggcccaacagggcuuccagguccuaagggcgagaggggggagaaaggagagccucaaagucuggccacucuuuaccaacuggugagccaagcuagccacgugagcaaguuugauuccuuucacgagaacacuagaccacccaugccaauauuggagcagaaacuugaaccgggcacagaaccuuuagguagcccagguacccgcagcaaagcccuggugccgggagaauggggaaggggaggcaggcaucuggagggucgcggggaaccuggcgcugucggucagauggguaguccuggucagcagggggcaucaacacagggacucugggaguag

SEQ ID NO: 206322 - protein, 1983 aa, Artificial Sequence
  derived and/or modified sequence
MSGNKRGSRASCPHRGAECLLPWAALNLQGFQLLLLHPSATAMMDVSELGESARYLRQGYQEMTKVHTIPWDGKKRVWVPDEQDAYVEAEVKSEATGGRVTVETKDQKVLMVREAELQPMNPPRFDLLEDMAMMTHLNEASVLHNLRQRYARWMIYTYSGLFCVTINPYKWLPVYTASVVAAYKGKRRSDSPPHIYAVADNAYNDMLRNRDNQSMLITGESGAGKTVNTKRVIQYFAIVAALGDGPGKKAQFLATKTGGTLEDQIIEANPAMEAFGNAKTLRNDNSSRFGKFIRIHFGPSGKLASADIDSYLLEKSRVIFQLPGERSYHVYYQILSGRKPELQDMLLLSMNPYDYHFCSQGVITVDNMNDGEELIATDHAMDILGFSVDEKCACYKIVGALLHFGNMKFKQKQREEQAEADGTESADKAAYLMGVSSGDLLKGLLHPRVRVGNEYVTKGQSVEQVVFAVGALAKATYDRLFRWLVSRINQTLDTKLPRQFFIGVLDIAGFEIFEFNSFEQLCINFTNEKLQQFFNQHMFVLEQEEYKREGIDWVFIDFGLDLQPCIDLIEKPLGILSILEEECMFPKASDASFRAKLYDNHAGKSPNFQQPRPDKKRKYQAHFEVVHYAGVVPYSIVGWLEKNKDPLNETVVPIFQKSQNRLLATLYENYAGSCSTEPPKSGVKEKRKKAASFQTVSQLHKENLNKLMTNLRATQPHFVRCIVPNENKTPGVMDAFLVLHQLRCNGVLEGIRICRQGFPNRLLYTDFRQRYRILNPSAIPDDTFMDSRKATEKLLGSLDLDHTQYQFGHTKVFFKAGLLGVLEELRDQRLAKVLTLLQARSRGRLMRLEYQRLLGGRDALFTIQWNIRAFNAVKNWSWMKLFFKMKPLLRSAQAEEELAALRAELRGLRGALAAAEAKRQELEETHVSITQEKNDLALQLQAEQDNLADAEERCHLLIKSKVQLEGKVKELSERLEDEEEVNADLAARRRKLEDECTELKKDIDDLKLTLAKAEKEKQATENKVKNLTEEMAALDESVARLTKEKKALQEAHQQALGDLQAEEDRVSALTKAKLRLEQQVEDLECSLEQEKKLRMDTERAKRKLEGDLKLTQESVADAAQDKQQLEEKLKKKDSELSQLSLRVEDEQLLGAQMQKKIKELQARAEELEEELEAERAARARVEKQRAEAARELEELSERLEEAGGASAGQREGCRKREAELGRLRRELEEAALRHEATVAALRRKQAEGAAELGEQVDSLQRVRQKLEKEKSELRMEVDDLAANVETLTRAKASAEKLCRTYEDQLSEAKIKVEELQRQLADASTQRGRLQTESGELSRLLEEKECLISQLSRGKALAAQSLEELRRQLEEESKAKSALAHAVQALRHDCDLLREQHEEEAEAQAELQRLLSKANAEVAQWRSKYEADAIQRTEELEEAKKKLALRLQEAEEGVEAANAKCSSLEKAKLRLQTESEDVTLELERATSAAAALDKKQRHLERALEERRRQEEEMQRELEAAQRESRGLGTELFRLRHGHEEALEALETLKRENKNLQEEISDLTDQVSLSGKSIQELEKTKKALEGEKSEIQAALEEAEGALELEETKTLRIQLELSQVKAEVDRKLAEKDEECANLRRNHQRAVESLQASLDAETRARNEALRLKKKMEGDLNDLELQLGHATRQATEAQAATRLMQAQLKEEQAGRDEEQRLAAELHEQAQALERRASLLAAELEELRAALEQGERSRRLAEQELLEATERLNLLHSQNTGLLNQKKKLEADLAQLSGEVEEAAQERREAEEKAKKAITDAAMMAEELKKEQDTSAHLERMKKTLEQTVRELQARLEEAEQAALRGGKKQVQKLEAKVRELEAELDAEQKKHAEALKGVRKHERRVKELAYQAEEDRKNLARMQDLVDKLQSKVKSYKRQFEEAEQQANTNLAKYRKAQHELDDAEERADMAETQANKLRARTRDALGPKHKE

SEQ ID NO: 206323 - protein, 143 aa, Artificial Sequence
  derived and/or modified sequence
VRELEAELDAEQKKHAEALKGVRKHERRVKELAYQVGDRVSLGSGPGAGPAQASPESPLPAQAEEDRKNLARMQDLVDKLQSKVKSYKRQFEEAEQQANTNLAKYRKAQHELDDAEERADMAETQANKLRARTRDALGPKHKE

SEQ ID NO: 206324 - DNA, 5952 bp, Artificial Sequence
  derived and/or modified sequence
atgagtggtaacaaacgaggaagccgggccagctgccctcatcgcggggcggaatgtctcctgccttgggcagcccttaatctgcagggatttcagttgctgctattacacccaagcgctacagcaatgatggatgtgtctgaattgggcgaaagcgcgagatacttgcggcagggctatcaggaaatgactaaggtccatacaattccctgggacggcaagaagagggtgtgggttccagatgagcaagacgcatacgtagaggccgaggttaagtctgaggcaaccggaggccgggtgactgtagagacaaaggaccagaaggttctcatggtacgagaagccgagctccagccaatgaacccacctcgctttgatctgctcgaagatatggcgatgatgacacatctgaacgaggcgtccgtactgcacaatctcagacagcggtatgcccgatggatgatctatacttacagcggactgttttgcgtgaccatcaacccctacaagtggctaccggtgtatacagcatccgtggtggctgcttacaagggcaagcgcaggtcagattcccccccacatatttacgctgtggccgataatgcttataacgatatgctgagaaaccgggataaccagagcatgttgatcactggcgagtcaggagctgggaaaacagtcaacaccaagagggtcattcaatatttcgcaattgtcgccgcattgggggacggacctggaaagaaagcccagttcctggctaccaagactggcggcacactggaggaccagataatcgaggcaaaccctgccatggaggccttcggtaacgccaaaaccctcaggaatgataacagcagccgttttggaaagtttattcggatacacttcgggccatccgggaagctggcctccgcagatatcgactcatatcttctcgagaagtcaagagtgatcttccagctgccaggcgaaaggagctaccacgtgtactatcagattctctccggccggaagcctgagctacaggatatgctcttgttatctatgaacccgtacgactaccacttttgtagtcagggggtcatcactgtcgataacatgaacgatggtgaagaactgatcgccactgaccacgcaatggatatcctgggtttctctgtcgacgagaagtgtgcatgctacaagatcgtgggagccctcttgcatttcggtaacatgaagtttaagcaaaagcagcgagaagagcaggcagaagccgacggtacagaatcagccgataaggccgcatatctcatgggggtctccagcggagatttattaaaaggcctgctgcaccctcgagtgcgggtcggaaacgagtacgtcacaaaaggccaaagtgtggagcaggtcgttttcgctgttggcgctctggccaaggcaacatacgaccgcctgttccgctggctggtctctcggataaaccaaactctcgacacaaagctaccgcgccagttcttcatcggagtcctggacatcgccggcttcgagatatttgaattcaattcgttcgaacaactctgtatcaacttcactaacgagaaattacagcagttttttaaccagcacatgtttgtccttgaacaagaggaatacaagagggagggcatcgattgggtgtttattgattttggcctggatcttcagccctgtattgaccttatagaaaagcccctgggtatcctgtcaatcttggaggaagaatgtatgttccccaaggcgtcagatgcatcctttcgtgctaaattatacgacaaccatgccggtaaatcgcctaacttccaacagcctcgtccagacaagaagaggaaatatcaagcccatttcgaggtggtccattatgcaggtgtcgtcccttatagcattgtgggctggcttgagaaaaacaaggaccccttgaacgagaccgtggttcccatattccagaaaagtcagaaccgcctgctcgctaccctgtatgagaactatgctggttcttgtagtactgagcctcccaagagtggcgtcaaagaaaagagaaagaaggccgctagtttccagaccgtatcccagctgcacaaagaaaatttgaataagctaatgaccaatctgagagcaacacaaccccattttgtgcgttgtattgtaccaaatgaaaacaaaacgcccggcgtcatggacgctttcctcgtgctgcaccagcttaggtgtaacggggtgctggagggtataagaatctgcaggcaaggattcccaaacagattgctctacaccgacttccgacagcgttaccgaatcctgaatccttcagcaatccctgacgatactttcatggatagtcgtaaagctacagagaagcttctgggcagtctcgatctggaccacactcagtaccagttcggacataccaaagtgttcttcaaggcaggcctgttgggggtgctcgaggagctcagagatcaacgcctcgctaaagtgctgacactcttgcaggcgcgttcacgggggagattgatgaggctggagtatcaaaggttactaggaggaagggatgcactgttcaccattcagtggaatatccgtgctttcaatgcggtcaaaaactggtcctggatgaaactttttttcaaaatgaagcccctccttcggtccgcacaggcggaggaagagttagctgccctgcgtgccgagctccggggcctgcgaggagcccttgccgccgcggaagctaagcgtcaggaactggaagagacccatgtctccattacccaggagaagaacgacctggcacttcagctacaggcagagcaggataatttggctgacgcagaagagcggtgccacctattaatcaaatcgaaggtgcagctagaaggcaaggtgaaagagctgtccgagcgcctcgaagatgaagaagaggttaacgcagaccttgccgcacgtcgaaggaagttggaagatgagtgcaccgagttaaagaaggacatcgatgatttaaaactgacgctcgcgaaggcagagaaagaaaaacaagccactgagaataaagtgaaaaatttgaccgaggagatggccgcactggacgaaagcgtggcccgcctcactaaagagaaaaaggcactccaggaggcccaccaacaggctcttggcgatctgcaggcggaagaggatagggtgagcgcgctcacaaaggcgaagcttagactggagcagcaggttgaggatttggagtgctctttggaacaagagaaaaagctcagaatggacacagagcgagccaagaggaagcttgagggcgatcttaagctgactcaggagagtgtcgcagatgcagcgcaagataaacaacagttagaggagaaattaaaaaagaaggattctgagctctcccagctgagcctgagggtcgaagacgagcagctgctgggtgctcagatgcaaaagaaaattaaggagctccaggcacgcgcagaggaactcgaggaggaactggaggctgaacgggccgccagagctagagtagagaagcagagagcggaagctgcacgagagctggaggagctgagcgagcgactggaggaagctggaggcgcttccgcagggcagcgggagggctgtcgcaagagggaagccgagctcgggagactgcgacgggagctggaggaggcagccctgcgccacgaggcaaccgtggctgctctcaggcgcaaacaggccgagggcgcggccgagctgggggagcaggtggacagcctgcagagggtgcggcagaagttggaaaaggaaaaaagtgagctcaggatggaggtcgacgacctggccgcaaatgttgagaccctgactcgcgcaaaagcaagtgctgaaaagctatgccgcacgtacgaggaccagttgtccgaggcaaagatcaaggtggaagaactgcaacgccagctggctgatgctagtactcagaggggacggttgcagactgagtctggagaactgtcaaggcttttagaggagaaagaatgtctaatttctcagctgtcccgtggcaaagcgctcgctgcccagtctctggaggagctgaggcgacagctggaagaagagtctaaggccaagtccgccctcgcgcacgccgttcaggccctccgacatgattgtgatttactgcgagagcagcacgaggaggaagctgaagcacaggctgagttacagcgtctgctctcaaaggcgaacgctgaggtggcccagtggaggagcaaatacgaggcggacgcgatccagcgcaccgaggagcttgaagaagccaagaaaaagctggccctccgcctccaggaggccgaggagggggtagaagccgccaatgccaaatgctcatctctcgagaaagcaaagctaagactccagacagagagcgaggacgtgaccctggaacttgagcgcgcgacatcagccgctgccgctctcgataaaaagcagagacatctggagagagccttggaggagaggcgcaggcaggaagaagaaatgcagcgcgagctggaggccgcacagcgagaatcaaggggcttaggtactgagctattcaggctccgacacgggcatgaggaggcactggaggccttagagactctaaagcgggaaaacaagaatttgcaggaagaaatctctgatctcaccgaccaagttagtctgtcaggcaagtctatacaggagctagagaagaccaaaaaggccctggagggggaaaaaagcgaaattcaggccgcgctggaagaggccgaaggcgcccttgagctcgaggagactaaaaccttgcggatccagctggaactttctcaggtaaaagctgaggtggataggaagctggcggagaaggacgaggagtgcgctaacttaagacgcaatcatcagcgggcagttgaaagcctgcaagcaagcctggatgctgagacacgcgcacgaaacgaggccctccggcttaagaaaaagatggagggcgatctcaatgatttagaactacagctcggccacgccacacgtcaagcaaccgaagcccaggccgccaccagattaatgcaggctcagttaaaagaggagcaggccgggagagatgaggaacagcggctggcagcggaactccatgaacaagcgcaggccttggaaaggagggccagtctgctcgcagctgagctggaagaactgcgcgccgccctcgagcagggcgagagaagccggagattagcagagcaggaactgctggaagctacagaaagattgaacttgctgcactcccagaataccggacttctgaaccaaaagaagaaactcgaagccgaccttgctcaactgtcaggagaggtagaagaggccgcccaggaacggcgtgaagcggaggagaaagccaaaaaagcgatcaccgatgccgccatgatggctgaggagctaaagaaggagcaggacacctcagcccatctcgaaagaatgaagaaaacgttggagcagaccgtccgagaacttcaggccaggctggaggaagctgaacaggctgcgttacggggcggaaagaagcaggtccagaagcttgaagcaaaggtgagggaactggaggcagaactggatgcagaacaaaagaaacatgccgaagcactgaaaggcgtccggaaacacgagcgacgtgttaaggagctcgcttatcaggctgaggaagatcgtaaaaacctggcacgcatgcaggacctggtagacaagttgcagtccaaggtgaagagttacaagcggcaatttgaagaggctgagcagcaggctaataccaatctggccaaatatcgcaaagcacaacacgaactggatgatgctgaggagagggcagacatggcggaaacccaggctaataaactgcgagcacgaaccagggacgctctaggacctaagcataaggaatag

SEQ ID NO: 206325 - DNA, 5952 bp, Artificial Sequence
  derived and/or modified sequence
atgagcggcaacaagaggggcagccgggccagctgcccccacagaggagctgagtgcctgctgccctgggccgccctgaacctgcagggcttccagctgctgctgctgcaccccagcgccacagccatgatggatgtgtctgagctgggggagagcgcccgctacctgcggcagggctaccaggagatgaccaaggtgcacaccatcccctgggatggcaagaagagggtgtgggtgcctgatgagcaggatgcctacgtggaggccgaggtgaagtctgaggccaccggcggccgggtgacagtggagaccaaggaccagaaggtgctgatggtgcgggaggccgagctgcagcccatgaacccccccaggtttgacctgctggaggacatggccatgatgacccacctgaatgaggcctctgtgctgcacaacctgcggcagagatatgcccgctggatgatctacacctacagcggcctcttctgtgtgaccatcaacccctacaagtggctgcctgtgtacacagcctctgtggtggccgcctacaagggcaagagaagaagtgacagccccccccacatctatgctgtggccgacaatgcctacaatgacatgctgaggaacagagacaaccagagcatgctgatcaccggggagagcggggccggcaagacagtgaacaccaagagggtcatccagtactttgccatcgtggccgccctgggagatggccctgggaagaaggcccagttcctggccaccaagacaggaggcaccctggaggaccagatcatcgaggccaacccagccatggaggcctttggaaatgccaagaccctgagaaatgacaacagcagcagatttgggaagttcatccgcatccacttcggccccagcggcaagctggccagcgctgacatcgacagctacctgctggagaagagcagggtcatcttccagctgcctggagagaggagctaccacgtgtactaccagatcctgagcggcaggaagccagagctgcaggacatgctgctgctgtccatgaacccctatgactaccacttctgcagccagggcgtcatcaccgtggacaacatgaatgatggagaggagctgattgccacagaccacgccatggacatcctgggcttctctgtggatgagaagtgtgcctgctacaagatcgtgggcgccctgctgcacttcggcaacatgaagttcaagcagaagcagcgggaggagcaggccgaggctgatggaacagaatctgctgacaaggccgcctacctgatgggcgtgtcctctggggacctgctgaagggcctgctgcacccccgggtgcgggtgggcaatgaatatgtgaccaagggccagagcgtggagcaggtggtgtttgctgtgggcgccctggccaaggccacctatgacaggctcttccgctggctggtgagccgcatcaaccagaccctggacaccaagctgccccggcagttcttcatcggcgtgctggacattgctggctttgagatctttgagttcaacagctttgagcagctgtgcatcaacttcaccaatgagaagctgcagcagttcttcaaccagcacatgtttgtgctggagcaggaggagtacaagcgggagggcatcgactgggtgttcatcgactttggcctggacctgcagccctgcatcgacctgattgagaagcccctgggcatcctgagcatcctggaggaggagtgcatgttccccaaggccagtgatgccagcttccgggccaagctgtatgacaaccacgccggcaagagccccaacttccagcagcccaggccagacaagaagaggaagtaccaggcccactttgaggtggtgcactacgccggcgtggtgccctacagcatcgtgggctggctggagaagaacaaggaccccctgaatgagaccgtggtgcccatcttccagaagagccagaaccggctgctggccaccctgtatgagaactatgccggcagctgcagcacagagccccccaagtctggagtgaaggagaagaggaagaaggccgccagcttccagacagtgtcccagctgcacaaggagaacctgaacaagctgatgaccaacctgcgggccacccagccccactttgtgcgctgcatcgtgcccaatgaaaacaagaccccaggagtgatggatgccttcctggtgctgcaccagctgcgctgcaatggagtgctggagggcatccgcatctgccggcagggcttccccaaccggctgctgtacacagacttccggcagcgctaccgcatcctgaaccccagcgccatcccagatgacaccttcatggacagcaggaaggccacagagaagctgctgggcagcctggacctggaccacacccagtaccagtttggccacaccaaggtgttcttcaaggccggcctgctgggcgtgctggaggagctgcgggaccagaggctggccaaggtgctgaccctgctgcaggcccggagccggggccgcctgatgaggctggagtaccagaggctgctgggcggcagagatgccctcttcaccatccagtggaacatccgggccttcaatgctgtgaagaactggagctggatgaagctgttcttcaagatgaagcccctgctgcggagcgcccaggccgaggaggagctggccgccctgcgggcagagctgcggggcctgcggggggccctggccgctgctgaggccaagaggcaggagctggaggagacccacgtgtccatcacccaggagaagaatgacctggccctgcagctgcaggccgagcaggacaacctggctgatgctgaggagcgctgccacctgctgatcaagagcaaggtgcagctggagggcaaggtgaaggagctgtctgagcggctggaggatgaggaggaggtgaatgctgacctggccgcccggcggaggaagctggaggatgaatgtacagagctgaagaaggacattgatgacctgaagctgaccctggccaaggccgagaaggagaagcaggccacagagaacaaggtgaagaacctgacagaggagatggccgccctggatgaatctgtggcccggctgaccaaggagaagaaggccctgcaggaggcccaccagcaggccctgggggacctgcaggccgaggaggacagagtgtctgccctgaccaaggccaagctgcggctggagcagcaggtggaggacctggagtgcagcctggagcaggagaagaagctgaggatggacacagagcgggccaagaggaagctggagggggacctgaagctgacccaggagagcgtggctgatgctgcccaggacaagcagcagctggaggagaagctgaagaagaaggacagcgagctgagccagctgagcctgcgggtggaggatgagcagctgctgggcgcccagatgcagaagaagatcaaggagctgcaggcccgggcagaggagctggaggaggagctggaggccgagcgggccgcccgggcccgggtggagaagcagagagctgaggccgcccgggagctggaggagctgtctgagcggctggaggaggccggcggggccagcgctggccagcgggagggctgcaggaagcgggaggccgagctgggccgcctgcggcgggagctggaggaggccgccctgcggcatgaggccaccgtggccgccctgcggaggaagcaggccgagggcgctgctgagctgggggagcaggtggacagcctgcagagggtgcggcagaagctggagaaggagaagtctgagctgaggatggaggtggatgacctggccgccaacgtggagaccctgacccgggccaaggccagcgctgagaagctgtgcaggacctatgaggaccagctgtctgaggccaagatcaaggtggaggagctgcagaggcagctggctgatgccagcacccagaggggccgcctgcagacagaaagtggagagctgagccggctgctggaggagaaggagtgcctgatcagccagctgagccggggcaaggccctggccgcccagagcctggaggagctgcggcggcagctggaggaggagagcaaggccaagagcgccctggcccatgctgtgcaggccctgcggcatgactgtgacctgctgcgggagcagcacgaggaggaggccgaggcccaggccgagctgcagaggctgctgagcaaggccaatgctgaggtggcccagtggaggagcaaatatgaagcagatgccatccagaggacagaggagctggaggaggccaagaagaagctggccctgcggctgcaggaggccgaggagggcgtggaggccgccaatgccaagtgcagcagcctggagaaggccaagctgcggctgcagacagaaagtgaagatgtgaccctggagctggagcgggccaccagcgctgctgctgccctggacaagaagcagaggcacctggagcgggccctggaggagcggcggcggcaggaggaggagatgcagcgggagctggaggccgcccagcgggagagccggggcctgggcacagagctgttccggctgcggcacggccacgaggaggccctggaggccctggagaccctgaagcgggagaacaagaacctgcaggaggagatcagtgacctgacagaccaggtgtccctgagcggcaagagcatccaggagctggagaagaccaagaaggccctggagggggagaagtctgagatccaggccgccctggaggaggccgagggcgccctggagctggaggagaccaagaccctgcgcatccagctggagctgagccaggtgaaggccgaggtggacaggaagctggccgagaaggatgaagaatgtgccaacctgcggaggaaccaccagagagctgtggagagcctgcaggccagcctggatgctgagacccgggccagaaatgaggccctgcggctgaagaagaagatggagggggacctgaatgacctggagctgcagctgggccacgccacccggcaggccacagaggcccaggccgccacccggctgatgcaggcccagctgaaggaggagcaggccggcagagatgaggagcagaggctggccgctgagctgcacgagcaggcccaggccctggagcggcgggccagcctgctggccgctgagctggaggagctgcgggccgccctggagcagggcgagaggagccggcggctggccgagcaggagctgctggaggccacagagcggctgaacctgctgcacagccagaacacaggcctgctgaaccagaagaagaagctggaggccgacctggcccagctgtctggagaggtggaggaggccgcccaggagcggcgggaggccgaggagaaggccaagaaggccatcacagatgctgccatgatggccgaggagctgaagaaggagcaggacaccagcgcccacctggagaggatgaagaagaccctggagcagacagtgcgggagctgcaggcccggctggaggaggccgagcaggccgccctgcggggcggcaagaagcaggtgcagaagctggaggccaaggtgcgggagctggaggccgagctggatgctgagcagaagaagcatgctgaggccctgaagggcgtgaggaagcatgagcggcgggtgaaggagctggcctaccaggccgaggaggacaggaagaacctggccaggatgcaggacctggtggacaagctgcagagcaaggtgaagagctacaagaggcagtttgaggaggccgagcagcaggccaacaccaacctggccaagtacaggaaggcccagcacgagctggatgatgctgaggagagagctgacatggccgagacccaggccaacaagctgcgggcccggaccagagatgccctgggccccaagcacaaggagtag

SEQ ID NO: 206326 - DNA, 5952 bp, Artificial Sequence
  derived and/or modified sequence
atgagcggcaacaagcggggcagccgggccagctgcccccaccggggcgcggagtgtttactaccttgggcagccctgaatctgcagggcttccaactgttgctcctccacccatcagccacagccatgatggacgtgtcagaattgggcgagtccgctagatacttaaggcagggatatcaagagatgaccaaagtgcacactattccttgggacggcaagaagagggtttgggtgcctgacgaacaggatgcctatgtagaggcagaagtgaagagcgaagccaccgggggccgggtaacagttgagaccaaagatcagaaggtgcttatggttcgggaggctgagctccaacccatgaatccacctaggttcgaccttcttgaagatatggccatgatgacgcatctgaacgaggcttctgtgctgcacaacttgcgccaacgatatgcccgatggatgatctatacgtacagtgggctgttctgtgtcaccattaacccttacaagtggcttcccgtctataccgcgagcgtggtcgccgcttataaaggtaaaaggagaagcgactctcccccccacatttacgccgttgctgacaacgcctataacgatatgcttagaaatagagataatcagtctatgctgattaccggggaatcaggtgcaggcaaaacggtaaataccaagagggtgatccagtacttcgcaatagtcgccgcattgggcgacggtccgggaaaaaaagcacagtttctggctaccaagacaggcggtactctggaagaccagattatcgaggctaaccccgccatggaagctttcgggaatgctaagactctccggaacgacaatagcagtcgcttcggtaagtttatccgcatccatttcgggcccagcggcaagctcgcgtcggccgatatcgacagctacctcctagagaagtcacgtgttatcttccagctgcccggcgaaaggagctatcacgtgtattaccaaattctgtccggacgtaaacccgagcttcaggatatgctactgctctccatgaatccttacgattatcatttttgctcccagggagttattaccgtcgataacatgaacgacggagaagagctcatcgcaacggatcatgccatggatattctcgggttttcagtagacgagaaatgtgcctgctataaaattgtgggagctctgctccattttgggaacatgaagttcaaacagaaacagcgggaagaacaggctgaagccgacggaactgagtctgctgataaagccgcatacctcatgggcgtatcatccggggacctcctgaaaggcttgttgcatcccagagtgagggtaggtaatgaatatgtgactaagggtcaaagcgttgagcaggttgtgttcgcggtgggggccttggcaaaagcaacatatgacagacttttccggtggttggtgagccgcattaaccagactttagataccaagctccctagacagtttttcatcggcgtcctcgatatagctggatttgaaatattcgagtttaatagttttgagcaactctgcatcaatttcaccaatgagaagctgcagcagttctttaatcagcacatgtttgtgctggaacaggaggaatacaaacgggagggcattgattgggtattcatagacttcggcttagatctgcagccttgcattgatctgatcgaaaagccgttaggaattttaagtatcctggaggaagaatgtatgttccctaaggcctcggacgctagcttcagggcaaaactttacgataatcacgccgggaagtccccaaacttccaacaacctcgacctgacaagaagagaaagtatcaggcacattttgaagttgtgcattatgccggagttgtcccctatagcatcgtgggttggctggaaaagaataaagaccctctgaacgaaacggtggtgccaatcttccagaagagtcagaatcggttgttggccacgctttacgaaaactacgctggcagctgtagcaccgaaccaccaaaatctggagtgaaggagaagagaaaaaaagccgcgtcctttcagacagtgagtcagttgcacaaggagaatcttaataaactcatgacgaatctgcgagccacccagcctcatttcgtgaggtgcattgtgccaaacgagaacaagacccccggagtgatggacgcgttcctggtgctgcaccaactgcggtgtaacggggtcctggaaggtattaggatatgcagacaggggtttccgaatcgcctactgtacacagacttccgacagcgatacagaatactcaatccctcagctatcccagacgacacctttatggatagcagaaaggccactgaaaagttgcttgggagtctggacttggaccacactcaataccagttcggtcatacgaaggtttttttcaaagcaggcttgttgggggttctggaagagctccgagaccaaaggctggcaaaggtgctcaccctcttacaagcccgttctcgcggccgccttatgcgccttgagtatcagagattgctgggcggtagggacgccttatttacaatccagtggaatatccgcgcgtttaacgctgtcaaaaactggtcctggatgaagttgtttttcaaaatgaagccactacttcgtagtgcacaggccgaagaggagctggccgccttgagagctgagttaaggggattgcgcggtgctctcgcagcggccgaggctaagaggcaggaactcgaggaaacccacgtgtcaatcacacaggagaagaacgacctggccctgcagcttcaggctgaacaggataatctcgctgacgcggaggagcgctgccacctgctgataaaaagcaaagtacagctggagggaaaagtgaaggagctgtccgagcgcctcgaggatgaagaggaagtgaacgccgaccttgctgcacgccggcgaaaactggaggacgagtgtaccgaattgaaaaaagatatcgatgatctcaaattgaccctggccaaagctgagaaggagaaacaggccacagagaacaaagtcaagaacctgactgaagagatggcggctctggatgagtctgtcgcccgcctcacaaaggagaagaaggccctacaggaggcccaccagcaggctctgggagatcttcaggctgaggaggatcgtgtgtcagctctgacaaaggctaagctgagactggagcagcaggtggaggacttggagtgcagcctggagcaggagaagaagcttaggatggacaccgaacgggccaaaaggaagctggagggcgacctgaagctgacccaggagtcagttgccgacgccgcccaggacaagcaacagttggaagaaaagctgaagaagaaggacagcgagcttagtcagctgagcttgagagtggaggacgagcagctgcttggcgcccagatgcagaagaaaattaaagaactgcaggcccgcgctgaggaattggaggaggagctcgaggctgaaagagctgcccgggctcgagtggaaaaacagcgagcagaggcagcccgtgagctggaggagcttagcgagcgactggaggaggctgggggcgcttctgccgggcagagggagggatgccgcaaaagggaggccgaactcggaaggctgcggcgggagctggaggaggccgctctacggcacgaggccactgttgccgccttacggcgcaaacaggccgagggcgcagctgaattgggcgagcaggtcgactccctgcagagggtgcggcagaagcttgagaaggaaaagtctgaactgcgaatggaggtcgacgatttggcagccaatgtggagactctcacccgcgccaaggctagcgcagaaaaattgtgtcgaacatatgaggatcagctttcagaggccaagataaaagtggaagaactacagcggcagttagcagacgcttctactcagcggggaaggctccaaaccgaatcgggcgagctctcaaggctgctggaggagaaagagtgcctaatttcacaactgtccaggggaaaagctctggcagctcagtcactggaggagttgaggcggcagctggaggaggagtctaaggctaagtctgctttggcccatgctgtgcaggctcttcgccacgactgcgacctgctgcgcgagcagcacgaggaggaggcagaggctcaggccgagttgcagcgcttgctgagtaaagctaacgctgaggtagcacagtggaggtctaagtacgaagccgatgcaattcaaagaaccgaggaactggaagaagccaagaagaagttagccctgcgactccaggaggccgaggaaggtgtcgaagcagccaacgcaaagtgttcaagtctggaaaaagccaaattaaggttgcagaccgagtccgaagatgtgacactggagcttgagagggccacttcggctgcagcggccctggacaaaaaacagcgacatcttgagcgcgcactggaggagaggcgcagacaggaggaagagatgcaacgggagctggaggccgcccagagagaatcccggggcctcggtacagagctgttcaggcttagacacgggcatgaggaagcactggaggcactcgagaccctcaaacgcgagaacaagaacttgcaggaggagattagtgatctgaccgaccaagtgagcctgagcggcaagagtatccaggagctggaaaagaccaaaaaagccctcgaaggcgaaaaaagtgagatccaggcggctcttgaagaggccgaaggtgccctggagctagaggagaccaagaccctgaggatacagctcgagttatcacaggtcaaagctgaagtagacagaaaactggcagagaaagacgaagaatgcgcgaacctcaggagaaatcatcagcgtgccgtggagagtctacaggcaagtctcgacgctgaaaccagggcccgaaatgaagccctccgactgaagaagaagatggagggtgacctgaatgatcttgagctccagctcggccacgccactcggcaagctaccgaggcacaggccgctactcgcttaatgcaggcacaactcaaggaagaacaggccgggagggatgaagagcagcggttggcagccgagcttcacgagcaggcacaggccctcgagcggcgggcttcgctactggccgccgaactcgaagaactgcgcgctgccttggagcaaggagagcgaagcagacgattagccgagcaagaactgcttgaggctacagaacggctgaatctgctccactcccagaacacgggcctgctgaatcaaaagaagaagctcgaggccgatttggcgcagttgagcggggaggtcgaggaagccgcccaggagaggagagaagcagaggaaaaagcaaaaaaggctatcacagatgcagctatgatggctgaagagctaaagaaggaacaggacacctctgctcacctggagagaatgaagaaaacccttgaacagaccgttagagaactgcaggcccgcctggaagaggccgaacaggctgcacttagagggggaaagaagcaagtgcaaaagctggaggccaaagttcgggagctggaagccgagttagatgcagaacagaaaaaacacgcagaagccctcaaaggcgtgagaaaacatgagcgccgcgttaaagagctggcttatcaggccgaggaggatcgaaagaacctcgctcgtatgcaagatctggttgacaagttgcagtctaaggtgaagagctataagaggcagttcgaggaagcagagcaacaggccaacacaaatctggccaagtataggaaggctcagcatgagttagacgatgctgaggagcgagctgatatggctgagacacaggccaacaaactacgtgcccgcactagggacgccctgggtccaaaacataaggagtag

SEQ ID NO: 206327 - DNA, 5952 bp, Artificial Sequence
  derived and/or modified sequence
atgagtgggaataaacgagggtctagagcatcttgtcctcaccggggagctgagtgtctgctgccatgggccgctttaaaccttcaggggttccagttgctattacttcaccccagcgcaacagccatgatggacgtgtccgaactgggagagagcgcaagatatttacggcagggctaccaagagatgactaaggtgcacacaatcccatgggatggaaaaaagcgcgtgtgggtcccggacgagcaggacgcctacgtagaggcggaggtgaaatcagaagccacagggggacgcgtgaccgtggaaacaaaggatcagaaggttctgatggttcgggaggctgagcttcagcccatgaatccaccacgattcgacctgcttgaagatatggcaatgatgactcacttgaacgaggcctccgtgctgcataatttgagacagcgctacgcaagatggatgatctatacatatagcggtcttttctgcgtcaccatcaacccctataaatggttacccgtctacaccgcctcagtcgtggcagcatataaggggaagcgtaggtcggactcaccccctcatatttacgcagtggccgataacgcctacaacgatatgcttcgcaatagggataatcagagcatgcttataactggcgaaagtggcgctggtaaaaccgttaacactaaacgggtcatccagtactttgcaatagtggctgccctgggggacggccctggcaagaaagctcaattcctcgccaccaaaaccggcggtacccttgaagaccagataatcgaggcaaacccagctatggaagcctttggcaacgctaaaaccctccgaaatgataacagcagtcgcttcggaaaattcatccggatacattttggccctagtgggaagctggcctctgctgacatcgattcctatttgttggagaagtcccgagtgattttccaattacctggcgagcggtcatatcatgtgtactatcaaatactgtctgggagaaagccggagctacaggatatgttgctgctgtctatgaacccctacgactaccatttttgtagtcaaggagtgattaccgttgacaacatgaacgatggcgaggagctcatagccacagaccacgccatggatatactcggcttcagtgtggatgagaaatgcgcctgttacaaaattgtcggtgctcttctacatttcggaaatatgaaatttaaacaaaaacagagggaagaacaggccgaggccgatgggaccgaaagtgctgacaaggccgcatacctcatgggagtgtccagcggtgatttgttaaagggactgctgcatccgagagtgagggtcggtaacgagtacgtcaccaagggacagtctgtcgagcaggtggttttcgcagtcggagccctggcaaaggctacctatgataggctctttcggtggctagtgagccgaattaatcaaaccctggacacaaaattaccgagacaattctttattggcgtgttggatatcgcagggttcgagatcttcgaattcaatagctttgaacaactgtgcattaatttcaccaacgagaagttgcagcagttttttaatcagcacatgtttgttctagaacaagaggagtataagagggagggaatagactgggtttttatcgacttcggattggatttgcaaccatgcattgacttaattgagaaacccctgggcatcctcagcatccttgaagaggagtgtatgtttccaaaagcgtcagacgccagctttcgagcaaaactgtatgacaatcacgcaggcaagtcgcctaactttcagcaacccaggccggataaaaaaagaaaataccaggcccatttcgaagttgtgcactatgccggtgtggtgccttactcaatcgttggatggttggagaagaacaaagatcctctgaatgagactgtggtgcccatctttcagaaatcgcagaatcgcctgttagcaactctatacgaaaactatgcaggttcatgtagcactgagccccctaaaagcggggtgaaagagaagaggaagaaagccgcaagctttcagacagtcagtcaactccataaagaaaatctcaataaactgatgactaatttacgtgcaacccagccacacttcgtgagatgtattgttccaaacgagaacaagactccaggcgttatggatgcctttctagtcctccaccagctgagatgcaatggtgtgttggaaggcatacgaatctgcaggcagggctttccaaataggctactgtataccgacttccgacagagatatagaattctgaatccctccgccatcccggatgatacgttcatggactcccgcaaagcaacagagaagctgcttggttcattagacttggatcacacccaatatcaattcgggcacaccaaggtttttttcaaggccggactgctaggcgttctagaagaattaagagaccagcgcctggcgaaggtactgaccctcttgcaggcgaggtccaggggacgcctgatgcggctggagtaccagagactcttgggagggagggacgctctcttcaccatccaatggaacattagggccttcaacgccgttaaaaattggtcttggatgaaactgtttttcaaaatgaagcccttactaaggagcgcccaagctgaggaggaactcgcagctctgagagccgaactgagaggcttacgaggtgcgctcgccgcagctgaggccaaacgccaggagctggaggagacacatgtgtccataacccaggagaaaaacgatctggctcttcaattgcaggccgagcaggataatctggctgacgctgaggaacgttgccacctcctgattaagagcaaggtccaactggagggtaaggtgaaagagctgagcgagagattggaggacgaggaggaggtgaatgcggacctggccgctcgtagaagaaagctggaagatgagtgtacagaacttaagaaggatatcgatgacctaaaactgacacttgccaaagccgaaaaggagaaacaggcaacggaaaataaggtaaaaaatctgacggaggaaatggccgcactggacgagagcgttgctagactgacaaaggagaagaaagcactgcaagaggcacaccaacaggcactcggcgacctgcaggccgaagaggatcgcgtgtctgcgctcacaaaggccaagcttcgtctggagcagcaggtggaggatcttgagtgttcactcgaacaggagaagaagctgaggatggacaccgagagggcaaaaagaaaattggagggcgatctgaagttgacccaagagagtgtggctgatgccgcacaggataaacaacagttagaagagaagctgaagaaaaaagattcagagctgtcccagctctccctcagggtggaagacgaacaactgctaggagcccagatgcaaaagaagattaaggaactgcaggctcgagccgaggaactggaggaagagctcgaggcagagagggctgctcgtgccagagtggagaaacagcgcgctgaggccgcacgagaactcgaggaactgtccgaacgcctggaggaagcagggggagccagtgcagggcaacgcgagggatgcagaaaacgcgaagccgaacttggcaggctgaggcgcgagttagaggaagctgcactaagacacgaagcaacggtggcagccttgaggcggaagcaagctgagggggctgccgagctgggcgagcaggtcgattccttgcagcgggttcgccagaagttagaaaaagaaaagagcgaacttcgcatggaggtcgatgacttggctgcgaatgtcgaaactctcacccgtgcgaaagccagcgcagagaaactgtgtcgaacatacgaagaccagctcagtgaagccaaaatcaaagtagaggagcttcagcgacagttggccgacgcgtcgacccagagagggagattgcagactgagtctggagaactctcccgcctcctggaagagaaagaatgtctcatttcgcagctgtcgcggggtaaggctctggctgcccagtccctcgaggagctgaggaggcagttggaagaggagtccaaagccaagagcgctctcgcacacgccgttcaggcactgaggcacgactgcgacctcctgcgcgaacagcacgaggaggaggccgaggcccaggcagagctgcagagactgctcagcaaggccaatgccgaagtcgcacagtggaggtctaagtatgaagccgatgcaattcagcgaacagaggaactggaggaggccaaaaagaagttagctctgaggctgcaggaggctgaggaaggtgtggaagccgcaaatgccaagtgcagtagtcttgagaaagccaagctacgcttgcagacagagtctgaggatgtgaccttggagcttgagcgggctacaagcgctgccgcagccttagataagaaacaacgacatctcgagagagcgctggaagaacgacggcgacaggaggaggagatgcagcgcgagctggaagctgcacagcgggagtccagaggactgggaacagaactattccgcctgaggcacggacacgaggaggccctggaagccctcgagaccctgaagcgagagaacaagaatctgcaggaagagatctcagacctgactgaccaagtctctctttccggcaaatcaatccaggaacttgaaaagactaaaaaagcactcgaaggggagaagagcgagatacaggccgctctggaggaagcggaaggcgctctggagctcgaggagaccaagaccctgcgaatccaactggaactctcccaggtaaaagccgaggtggatcggaagcttgctgaaaaggacgaggaatgtgccaacctgagaaggaaccatcaacgtgccgttgagtcccttcaggcatcactggacgccgagacaagagcccgaaacgaggccctaaggctgaagaagaaaatggagggcgatcttaatgaccttgaattgcaactgggacatgccacacggcaggctacagaggcgcaggccgctactaggctcatgcaagcacaactgaaagaagagcaggccggtcgcgacgaagagcagcgcctggctgcagagcttcatgaacaggctcaggctctggagcggagagccagtttgctggccgcagaactagaggaattaagggccgctctcgaacagggagagagatcacgcagattagcagaacaggagctgctggaagccaccgaacggttgaacctcctgcacagccagaataccgggctgctgaaccaaaaaaaaaaattagaggccgatctggcgcagctcagcggagaggtggaagaagccgcacaggaacgacgcgaagcggaagagaaagctaaaaaggccatcactgacgccgctatgatggccgaggagctgaaaaaggaacaggatacgagtgcacatctagagcgtatgaaaaagacactcgaacagaccgtcagggagttacaagcacggctggaagaggccgagcaagccgcactgcgcggaggcaaaaagcaggtccagaaacttgaagctaaagttcgcgaactcgaggctgagctcgatgccgagcagaagaaacatgccgaggctctgaagggcgtccgcaaacacgaacgaagggtgaaagagctggcctaccaggccgaggaggatcgcaagaacctcgcacggatgcaagatctggtcgataagctccagtcaaaggtgaaatcatataaacgtcagtttgaagaggcggagcagcaagctaatacaaacttggcaaaataccggaaggctcagcacgagctcgacgatgctgaggagagggccgacatggcagagacccaagcaaataagctgcgggctagaactcgggatgccttaggtcctaagcataaagagtaa

SEQ ID NO: 206328 - DNA, 681 bp, Artificial Sequence
  derived and/or modified sequence
gtacgggagctggaggctgagcttgatgcagagcagaagaagcacgccgaggcccttaagggcgtgcgcaagcatgagcgccgtgtcaaggagctcgcataccaggtgggcgacagggtctccctggggagtggccctggagctggcccagcccaagcaagccctgagtcccccttgcccgcccaggccgaggaggacaggaagaacctggctcgcatgcaggacctggtggacaagctgcagagcaaggtcaagagctacaagcgccagtttgaggaggcggagcagcaggccaacaccaacctggccaagtatcgcaaggcccagcacgagctggatgatgcggaggagcgggcagacatggcggaaacccaggccaacaagctgcgggcacggacccgggacgccctgggccccaagcacaaggagtgacggcctgaccccctgggctctaaagaggaatgtctgctgttgcacatctggctgaggccacctgccccgatcctgccatctctgcatcgccccctgctgccttcagccttccctgggccctgaataaacaccacagccagtttccttctcattcttttctttggggttcaggaggaaaaacacagtcctagggacaaaagccaggtccacagcagtcatttttaaaataaagttatttaatagtctcca

SEQ ID NO: 206329 - DNA, 6293 bp, Artificial Sequence
  derived and/or modified sequence
tggggttttgatgtgttgcccaggctggtcttgaactcctgagcttaagtgatgtgtccgcctgggcctcccaaagtgctggaattacagacatgagtggcaataaaaggggtagcagagcttcctgccctcaccgtggtgccgagtgcctgctgccttgggccgccttgaacctccagggtttccagctcctcctccttcaccccagtgccactgccatgatggatgtgagtgaacttggggagtctgcccgctacctccgccagggctaccaggagatgacgaaggtgcacactatcccatgggacgggaagaagcgagtctgggtgcctgatgaacaggacgcctacgtggaggccgaggtcaagtcggaggctaccgggggcagagtcaccgtggagaccaaagaccagaaggtgctgatggtgcgtgaagccgagctgcagcccatgaacccgcctcgcttcgacttactggaggacatggccatgatgacgcacctgaacgaggcctctgtgctgcacaacctgcgccagcgctatgcccgctggatgatctatacctactcaggcctcttctgtgtcaccatcaacccctacaaatggctcccagtctatacggcctccgtagtggctgcttacaagggaaagcgccgctcagattccccgccccatatatatgcggtggcggacaacgcctacaacgacatgctgcgcaaccgagacaaccagtccatgctgatcaccggagagtcgggggccggtaagacggttaacaccaagcgggtcattcagtactttgccatcgtcgctgccctgggagacgggccgggcaagaaggcccaatttctggcaacaaagacggggggcacccttgaggatcaaatcatcgaggccaaccctgccatggaggcctttggcaacgccaagaccctgaggaatgataactcctcccgctttggcaagttcatccgcattcactttggtccctctgggaagctggcatccgcggatattgacagctatctcctggagaagtcgcgggtgatcttccagttgcctggtgagcgcagctaccatgtctactaccagatcctctcagggaggaagccagagctgcaggacatgctgcttctgtctatgaacccctatgactaccacttctgcagccagggcgtcatcaccgtggacaacatgaatgatggggaggagctcatcgccaccgaccatgccatggacatcctaggcttcagcgtggatgagaaatgtgcctgctataagatcgtgggcgccctcctgcactttggcaacatgaagttcaagcagaagcagcgggaggagcaggcggaggccgatggcactgagagtgctgacaaggctgcctacctgatgggggtcagcagtggggacctcctcaaaggccttttgcacccccgggtgcgtgtagggaacgagtacgtgaccaagggccagagtgtggagcaggtggtgtttgctgtgggggctctggccaaggccacctatgaccggctgttcaggtggctggtgtctcggatcaaccagaccctggacacaaagctgccccggcagttcttcatcggggttctggacatcgctgggtttgagatctttgagttcaacagcttcgaacagctgtgcatcaacttcaccaatgagaaattgcagcagttcttcaaccagcacatgtttgtgctggagcaggaggagtacaagcgggagggcatcgactgggtcttcatcgacttcggccttgacctgcagccttgcatcgacctcatcgagaagccactgggcatcctgtccatcctggaggaggaatgcatgttccccaaggcctcagacgccagcttccgggccaagctctacgacaaccacgcggggaagtcacccaatttccagcagcctcggcctgacaagaagcgcaagtaccaggcccacttcgaggtggtccactacgcaggcgtggtgccttacagcattgtgggctggctggagaaaaacaaggatcccctgaatgagaccgtggtccccatcttccagaagtcacagaataggctcctggcgactctctatgagaattatgcgggctcctgctccactgagccccccaagtctggggtgaaagagaagcgtaagaaggcagcatcgttccagacggtgtcccagctgcacaaggagaacctcaacaagctgatgaccaacctgcgggccacacagccccacttcgtccgctgcattgtccccaacgagaacaaaaccccaggggtcatggatgccttcttggtgctacaccagctgcgctgcaatggggtcctggaggggatccggatctgccgccaagggttccccaacaggttgctctacaccgacttccggcagcggtaccgtatcctgaaccccagtgccatcccggatgacaccttcatggacagcaggaaggccacagagaaactgctgggctcgctggacttggatcacacccagtaccagtttggccacaccaaggtgttcttcaaggctgggcttctaggcgtcctggaagagctccgtgaccagcgcctggccaaggtgctgacgctgctgcaggcgcggagccgtggccgcctcatgcgccttgagtaccagcgcctgctgggaggcagggatgcgctgttcaccatccagtggaacatccgtgccttcaatgccgtcaagaactggtcatggatgaagctctttttcaagatgaagccgctgctgcgctcggcgcaggctgaggaggagctggcggccctgcgggcagagctgcgggggttgcgaggggcgctggctgcggccgaggccaagcgccaggaactggaggagacgcacgtcagcatcacccaggagaagaatgacctggccctgcagctgcaggctgagcaggacaacctggcagatgccgaggagcgctgccacttgctgatcaagtccaaggtgcagctggaggggaaggtgaaggagctgagtgagcggctggaggatgaggaggaggtgaacgctgacctggccgcccgccggcgcaagctggaggacgagtgcacggagctcaagaaggacattgatgacctgaagctgacactggccaaagctgagaaggagaagcaagccactgagaacaaggtgaagaacctgacggaagagatggctgcgctggacgagtcagtggcccggctgaccaaggagaagaaggcgttgcaggaggcccaccaacaggccctgggtgacctgcaggccgaggaggaccgtgtgagcgcgctgaccaaggccaagctccggctggagcaacaggtggaggacctggaatgctccctggagcaggagaagaagctgcgcatggacacggagcgggccaagcgcaagctggagggtgacctgaagctgacgcaggagtcggtggctgatgctgctcaagacaagcagcagctggaggagaagctcaagaagaaggactccgagctgagccagctgagcctgcgggtggaagacgagcagctcttgggggcccagatgcagaagaagatcaaggagctgcaggctcgggcggaggagctggaagaggagctggaggcagagcgggcagcccgggcccgcgtggagaagcagcgtgcagaggcggcgcgggagctggaggagctgagcgagcggctggaggaggcaggcggcgcatccgcggggcagcgcgagggctgccgcaagcgggaggcggagctggggaggctgcggcgggagctggaggaggcggcgctgcggcacgaggccacagtggcggcactgcggcgcaagcaggcggagggcgcggcggagctgggggagcaggtggacagcctgcagcgggtgcggcagaagctggagaaggagaagagtgagctgcgcatggaggtggacgacctggctgccaacgtggagactctgacccgcgccaaggccagtgcagagaagctgtgccggacctatgaggatcagctaagcgaggccaagatcaaggtggaggagctgcagcggcagctggcggacgcaagcacgcagcgtgggcgactacagacggaaagcggggagctgagtcgcctgctagaggagaaggagtgtctgatcagtcagctgagccgtggaaaggccctggccgcccaaagcctggaagagttgcggcgccagctagaggaggaaagcaaggccaagagtgccctggcccacgccgtgcaggctctgcggcacgactgtgacctcctgcgggagcaacacgaggaggaggctgaggcccaggctgagctgcagcggctgctgtccaaggccaatgccgaggtggcccagtggaggagcaagtacgaagcagatgccatccagaggaccgaggagctggaggaggccaaaaaaaagctggcactgcggctgcaggaggcagaggagggcgtggaggctgccaacgccaagtgctcatcgttggagaaggccaagctgcggctacagacagagtcagaggatgtaaccctggagctggagcgggcgacctcagcagctgctgcgctggacaagaagcagcggcacttggaacgggcactggaggaacggcggcggcaggaggaggagatgcagcgggagctggaggcggcacagagggagtcccgtggcctgggcaccgagctcttccggctgcggcacggccacgaggaggcacttgaagccctggagacgctcaagcgggagaacaagaacctgcaggaggagatcagcgacctcacagaccaggtgagtctcagtgggaagagcatccaggaactggagaaaaccaagaaggcgctggaaggcgagaagagtgagatccaggctgcactggaggaggcagagggggccctggagctggaggagaccaagacgctgcggatccagctggagctctcccaggtcaaagcagaagtggaccggaagctggcagagaaagacgaggagtgcgctaacctgaggcgcaaccaccagcgagctgtggagtccctgcaggcctccctggatgcagagacacgggcccgcaatgaggcgctgcggctcaagaagaagatggagggtgacctcaacgacctggagctgcagctgggccatgccacccgtcaggccacagaggcccaggctgccacgcggctgatgcaggcacagctcaaggaggagcaggcagggcgggacgaggagcagcggctggcagctgagctccacgagcaggcgcaggctctggagcgccgggcctcgctgctggctgcggagctggaggagctgcgggctgccctggagcagggcgagcgcagccggcgactggcagagcaggagcttttggaggccaccgagcgcctcaaccttctgcattcgcagaacacaggcctcctaaaccagaagaagaagctggaggcggacttggcccagctgagcggggaggtggaggaggctgcacaggagaggcgggaggctgaggagaaggccaaaaaggccatcactgatgcggccatgatggccgaggagctgaagaaggagcaggacacaagtgcacacctggaacggatgaagaagacgctggagcagacggtgcgcgagctccaggcccgccttgaggaggcagaacaggccgccctccgtggcgggaagaagcaggtgcagaagctggaggccaaggtacgggagctggaggctgagcttgatgcagagcagaagaagcacgccgaggcccttaagggcgtgcgcaagcatgagcgccgtgtcaaggagctcgcataccaggccgaggaggacaggaagaacctggctcgcatgcaggacctggtggacaagctgcagagcaaggtcaagagctacaagcgccagtttgaggaggcggagcagcaggccaacaccaacctggccaagtatcgcaaggcccagcacgagctggatgatgcggaggagcgggcagacatggcggaaacccaggccaacaagctgcgggcacggacccgggacgccctgggccccaagcacaaggagtgacggcctgaccccctgggctctaaagaggaatgtctgctgttgcacatctggctgaggccacctgccccgatcctgccatctctgcatcgccccctgctgccttcagccttccctgggccctgaataaacaccacagccagtttccttctcattcttttctttggggttcaggaggaaaaacacagtcctagggacaaaagccaggtccacagcagtcatttttaaaataaagttatttaatagtctcca

SEQ ID NO: 206330 - DNA, 5952 bp, Artificial Sequence
  derived and/or modified sequence
atgagcggcaacaagagaggcagcagagccagctgcccccacagaggcgccgagtgcctgctgccctgggccgccctgaacctgcagggcttccagctgctgctgctgcaccccagcgccaccgccatgatggacgtgagcgagctgggcgagagcgccagatacctgagacagggctaccaggagatgaccaaggtgcacaccatcccctgggacggcaagaagagagtgtgggtgcccgacgagcaggacgcctacgtggaggccgaggtgaagagcgaggccaccggcggcagagtgaccgtggagaccaaggaccagaaggtgctgatggtgagagaggccgagctgcagcccatgaacccccccagattcgacctgctggaggacatggccatgatgacccacctgaacgaggccagcgtgctgcacaacctgagacagagatacgccagatggatgatctacacctacagcggcctgttctgcgtgaccatcaacccctacaagtggctgcccgtgtacaccgccagcgtggtggccgcctacaagggcaagagaagaagcgacagccccccccacatctacgccgtggccgacaacgcctacaacgacatgctgagaaacagagacaaccagagcatgctgatcaccggcgagagcggcgccggcaagaccgtgaacaccaagagagtgatccagtacttcgccatcgtggccgccctgggcgacggccccggcaagaaggcccagttcctggccaccaagaccggcggcaccctggaggaccagatcatcgaggccaaccccgccatggaggccttcggcaacgccaagaccctgagaaacgacaacagcagcagattcggcaagttcatcagaatccacttcggccccagcggcaagctggccagcgccgacatcgacagctacctgctggagaagagcagagtgatcttccagctgcccggcgagagaagctaccacgtgtactaccagatcctgagcggcagaaagcccgagctgcaggacatgctgctgctgagcatgaacccctacgactaccacttctgcagccagggcgtgatcaccgtggacaacatgaacgacggcgaggagctgatcgccaccgaccacgccatggacatcctgggcttcagcgtggacgagaagtgcgcctgctacaagatcgtgggcgccctgctgcacttcggcaacatgaagttcaagcagaagcagagagaggagcaggccgaggccgacggcaccgagagcgccgacaaggccgcctacctgatgggcgtgagcagcggcgacctgctgaagggcctgctgcaccccagagtgagagtgggcaacgagtacgtgaccaagggccagagcgtggagcaggtggtgttcgccgtgggcgccctggccaaggccacctacgacagactgttcagatggctggtgagcagaatcaaccagaccctggacaccaagctgcccagacagttcttcatcggcgtgctggacatcgccggcttcgagatcttcgagttcaacagcttcgagcagctgtgcatcaacttcaccaacgagaagctgcagcagttcttcaaccagcacatgttcgtgctggagcaggaggagtacaagagagagggcatcgactgggtgttcatcgacttcggcctggacctgcagccctgcatcgacctgatcgagaagcccctgggcatcctgagcatcctggaggaggagtgcatgttccccaaggccagcgacgccagcttcagagccaagctgtacgacaaccacgccggcaagagccccaacttccagcagcccagacccgacaagaagagaaagtaccaggcccacttcgaggtggtgcactacgccggcgtggtgccctacagcatcgtgggctggctggagaagaacaaggaccccctgaacgagaccgtggtgcccatcttccagaagagccagaacagactgctggccaccctgtacgagaactacgccggcagctgcagcaccgagccccccaagagcggcgtgaaggagaagagaaagaaggccgccagcttccagaccgtgagccagctgcacaaggagaacctgaacaagctgatgaccaacctgagagccacccagccccacttcgtgagatgcatcgtgcccaacgagaacaagacccccggcgtgatggacgccttcctggtgctgcaccagctgagatgcaacggcgtgctggagggcatcagaatctgcagacagggcttccccaacagactgctgtacaccgacttcagacagagatacagaatcctgaaccccagcgccatccccgacgacaccttcatggacagcagaaaggccaccgagaagctgctgggcagcctggacctggaccacacccagtaccagttcggccacaccaaggtgttcttcaaggccggcctgctgggcgtgctggaggagctgagagaccagagactggccaaggtgctgaccctgctgcaggccagaagcagaggcagactgatgagactggagtaccagagactgctgggcggcagagacgccctgttcaccatccagtggaacatcagagccttcaacgccgtgaagaactggagctggatgaagctgttcttcaagatgaagcccctgctgagaagcgcccaggccgaggaggagctggccgccctgagagccgagctgagaggcctgagaggcgccctggccgccgccgaggccaagagacaggagctggaggagacccacgtgagcatcacccaggagaagaacgacctggccctgcagctgcaggccgagcaggacaacctggccgacgccgaggagagatgccacctgctgatcaagagcaaggtgcagctggagggcaaggtgaaggagctgagcgagagactggaggacgaggaggaggtgaacgccgacctggccgccagaagaagaaagctggaggacgagtgcaccgagctgaagaaggacatcgacgacctgaagctgaccctggccaaggccgagaaggagaagcaggccaccgagaacaaggtgaagaacctgaccgaggagatggccgccctggacgagagcgtggccagactgaccaaggagaagaaggccctgcaggaggcccaccagcaggccctgggcgacctgcaggccgaggaggacagagtgagcgccctgaccaaggccaagctgagactggagcagcaggtggaggacctggagtgcagcctggagcaggagaagaagctgagaatggacaccgagagagccaagagaaagctggagggcgacctgaagctgacccaggagagcgtggccgacgccgcccaggacaagcagcagctggaggagaagctgaagaagaaggacagcgagctgagccagctgagcctgagagtggaggacgagcagctgctgggcgcccagatgcagaagaagatcaaggagctgcaggccagagccgaggagctggaggaggagctggaggccgagagagccgccagagccagagtggagaagcagagagccgaggccgccagagagctggaggagctgagcgagagactggaggaggccggcggcgccagcgccggccagagagagggctgcagaaagagagaggccgagctgggcagactgagaagagagctggaggaggccgccctgagacacgaggccaccgtggccgccctgagaagaaagcaggccgagggcgccgccgagctgggcgagcaggtggacagcctgcagagagtgagacagaagctggagaaggagaagagcgagctgagaatggaggtggacgacctggccgccaacgtggagaccctgaccagagccaaggccagcgccgagaagctgtgcagaacctacgaggaccagctgagcgaggccaagatcaaggtggaggagctgcagagacagctggccgacgccagcacccagagaggcagactgcagaccgagagcggcgagctgagcagactgctggaggagaaggagtgcctgatcagccagctgagcagaggcaaggccctggccgcccagagcctggaggagctgagaagacagctggaggaggagagcaaggccaagagcgccctggcccacgccgtgcaggccctgagacacgactgcgacctgctgagagagcagcacgaggaggaggccgaggcccaggccgagctgcagagactgctgagcaaggccaacgccgaggtggcccagtggagaagcaagtacgaggccgacgccatccagagaaccgaggagctggaggaggccaagaagaagctggccctgagactgcaggaggccgaggagggcgtggaggccgccaacgccaagtgcagcagcctggagaaggccaagctgagactgcagaccgagagcgaggacgtgaccctggagctggagagagccaccagcgccgccgccgccctggacaagaagcagagacacctggagagagccctggaggagagaagaagacaggaggaggagatgcagagagagctggaggccgcccagagagagagcagaggcctgggcaccgagctgttcagactgagacacggccacgaggaggccctggaggccctggagaccctgaagagagagaacaagaacctgcaggaggagatcagcgacctgaccgaccaggtgagcctgagcggcaagagcatccaggagctggagaagaccaagaaggccctggagggcgagaagagcgagatccaggccgccctggaggaggccgagggcgccctggagctggaggagaccaagaccctgagaatccagctggagctgagccaggtgaaggccgaggtggacagaaagctggccgagaaggacgaggagtgcgccaacctgagaagaaaccaccagagagccgtggagagcctgcaggccagcctggacgccgagaccagagccagaaacgaggccctgagactgaagaagaagatggagggcgacctgaacgacctggagctgcagctgggccacgccaccagacaggccaccgaggcccaggccgccaccagactgatgcaggcccagctgaaggaggagcaggccggcagagacgaggagcagagactggccgccgagctgcacgagcaggcccaggccctggagagaagagccagcctgctggccgccgagctggaggagctgagagccgccctggagcagggcgagagaagcagaagactggccgagcaggagctgctggaggccaccgagagactgaacctgctgcacagccagaacaccggcctgctgaaccagaagaagaagctggaggccgacctggcccagctgagcggcgaggtggaggaggccgcccaggagagaagagaggccgaggagaaggccaagaaggccatcaccgacgccgccatgatggccgaggagctgaagaaggagcaggacaccagcgcccacctggagagaatgaagaagaccctggagcagaccgtgagagagctgcaggccagactggaggaggccgagcaggccgccctgagaggcggcaagaagcaggtgcagaagctggaggccaaggtgagagagctggaggccgagctggacgccgagcagaagaagcacgccgaggccctgaagggcgtgagaaagcacgagagaagagtgaaggagctggcctaccaggccgaggaggacagaaagaacctggccagaatgcaggacctggtggacaagctgcagagcaaggtgaagagctacaagagacagttcgaggaggccgagcagcaggccaacaccaacctggccaagtacagaaaggcccagcacgagctggacgacgccgaggagagagccgacatggccgagacccaggccaacaagctgagagccagaaccagagacgccctgggccccaagcacaaggagtag

SEQ ID NO: 206331 - protein, 1077 aa, Artificial Sequence
  derived and/or modified sequence
MTAELQQDDAAGAADGHGSSCQMLLNQLREITGIQDPSFLHEALKASNGDITQAVSLLTDERVKEPSQDTVATEPSEVEGSAANKEVLAKVIDLTHDNKDDLQAAIALSLLESPKIQADGRDLNRMHEATSAETKRSKRKRCEVWGENPNPNDWRRVDGWPVGLKNVGNTCWFSAVIQSLFQLPEFRRLVLSYSLPQNVLENCRSHTEKRNIMFMQELQYLFALMMGSNRKFVDPSAALDLLKGAFRSSEEQQQDVSEFTHKLLDWLEDAFQLAVNVNSPRNKSENPMVQLFYGTFLTEGVREGKPFCNNETFGQYPLQVNGYRNLDECLEGAMVEGDVELLPSDHSVKYGQERWFTKLPPVLTFELSRFEFNQSLGQPEKIHNKLEFPQIIYMDRYMYRSKELIRNKRECIRKLKEEIKILQQKLERYVKYGSGPARFPLPDMLKYVIEFASTKPASESCPPESDTHMTLPLSSVHCSVSDQTSKESTSTESSSQDVESTFSSPEDSLPKSKPLTSSRSSMEMPSQPAPRTVTDEEINFVKTCLQRWRSEIEQDIQDLKTCIASTTQTIEQMYCDPLLRQVPYRLHAVLVHEGQANAGHYWAYIYNQPRQSWLKYNDISVTESSWEEVERDSYGGLRNVSAYCLMYINDKLPYFNAEAAPTESDQMSEVEALSVELKHYIQEDNWRFEQEVEEWEEEQSCKIPQMESSTNSSSQDYSTSQEPSVASSHGVRCLSSEHAVIVKEQTAQAIANTARAYEKSGVEAALSEVMLSPAMQGVILAIAKARQTFDRDGSEAGLIKAFHEEYSRLYQLAKETPTSHSDPRLQHVLVYFFQNEAPKRVVERTLLEQFADKNLSYDERSISIMKVAQAKLKEIGPDDMNMEEYKKWHEDYSLFRKVSVYLLTGLELYQKGKYQEALSYLVYAYQSNAALLMKGPRRGVKESVIALYRRKCLLELNAKAASLFETNDDHSVTEGINVMNELIIPCIHLIINNDISKDDLDAIEVMRNHWCSYLGQDIAENLQLCLGEFLPRLLDPSAEIIVLKEPPTIRPNSPYDLCSRFAAVMESIQGVSTVTVK

SEQ ID NO: 206332 - DNA, 3234 bp, Artificial Sequence
  derived and/or modified sequence
atgaccgccgagctgcagcaggacgacgccgccggcgccgccgacggccacggcagcagctgccagatgctgctgaaccagctgagagagatcaccggcatccaggaccccagcttcctgcacgaggccctgaaggccagcaacggcgacatcacccaggccgtgagcctgctgaccgacgagagagtgaaggagcccagccaggacaccgtggccaccgagcccagcgaggtggagggcagcgccgccaacaaggaggtgctggccaaggtgatcgacctgacccacgacaacaaggacgacctgcaggccgccatcgccctgagcctgctggagagccccaagatccaggccgacggcagagacctgaacagaatgcacgaggccaccagcgccgagaccaagagaagcaagagaaagagatgcgaggtgtggggcgagaaccccaaccccaacgactggagaagagtggacggctggcccgtgggcctgaagaacgtgggcaacacctgctggttcagcgccgtgatccagagcctgttccagctgcccgagttcagaagactggtgctgagctacagcctgccccagaacgtgctggagaactgcagaagccacaccgagaagagaaacatcatgttcatgcaggagctgcagtacctgttcgccctgatgatgggcagcaacagaaagttcgtggaccccagcgccgccctggacctgctgaagggcgccttcagaagcagcgaggagcagcagcaggacgtgagcgagttcacccacaagctgctggactggctggaggacgccttccagctggccgtgaacgtgaacagccccagaaacaagagcgagaaccccatggtgcagctgttctacggcaccttcctgaccgagggcgtgagagagggcaagcccttctgcaacaacgagaccttcggccagtaccccctgcaggtgaacggctacagaaacctggacgagtgcctggagggcgccatggtggagggcgacgtggagctgctgcccagcgaccacagcgtgaagtacggccaggagagatggttcaccaagctgccccccgtgctgaccttcgagctgagcagattcgagttcaaccagagcctgggccagcccgagaagatccacaacaagctggagttcccccagatcatctacatggacagatacatgtacagaagcaaggagctgatcagaaacaagagagagtgcatcagaaagctgaaggaggagatcaagatcctgcagcagaagctggagagatacgtgaagtacggcagcggccccgccagattccccctgcccgacatgctgaagtacgtgatcgagttcgccagcaccaagcccgccagcgagagctgcccccccgagagcgacacccacatgaccctgcccctgagcagcgtgcactgcagcgtgagcgaccagaccagcaaggagagcaccagcaccgagagcagcagccaggacgtggagagcaccttcagcagccccgaggacagcctgcccaagagcaagcccctgaccagcagcagaagcagcatggagatgcccagccagcccgcccccagaaccgtgaccgacgaggagatcaacttcgtgaagacctgcctgcagagatggagaagcgagatcgagcaggacatccaggacctgaagacctgcatcgccagcaccacccagaccatcgagcagatgtactgcgaccccctgctgagacaggtgccctacagactgcacgccgtgctggtgcacgagggccaggccaacgccggccactactgggcctacatctacaaccagcccagacagagctggctgaagtacaacgacatcagcgtgaccgagagcagctgggaggaggtggagagagacagctacggcggcctgagaaacgtgagcgcctactgcctgatgtacatcaacgacaagctgccctacttcaacgccgaggccgcccccaccgagagcgaccagatgagcgaggtggaggccctgagcgtggagctgaagcactacatccaggaggacaactggagattcgagcaggaggtggaggagtgggaggaggagcagagctgcaagatcccccagatggagagcagcaccaacagcagcagccaggactacagcaccagccaggagcccagcgtggccagcagccacggcgtgagatgcctgagcagcgagcacgccgtgatcgtgaaggagcagaccgcccaggccatcgccaacaccgccagagcctacgagaagagcggcgtggaggccgccctgagcgaggtgatgctgagccccgccatgcagggcgtgatcctggccatcgccaaggccagacagaccttcgacagagacggcagcgaggccggcctgatcaaggccttccacgaggagtacagcagactgtaccagctggccaaggagacccccaccagccacagcgaccccagactgcagcacgtgctggtgtacttcttccagaacgaggcccccaagagagtggtggagagaaccctgctggagcagttcgccgacaagaacctgagctacgacgagagaagcatcagcatcatgaaggtggcccaggccaagctgaaggagatcggccccgacgacatgaacatggaggagtacaagaagtggcacgaggactacagcctgttcagaaaggtgagcgtgtacctgctgaccggcctggagctgtaccagaagggcaagtaccaggaggccctgagctacctggtgtacgcctaccagagcaacgccgccctgctgatgaagggccccagaagaggcgtgaaggagagcgtgatcgccctgtacagaagaaagtgcctgctggagctgaacgccaaggccgccagcctgttcgagaccaacgacgaccacagcgtgaccgagggcatcaacgtgatgaacgagctgatcatcccctgcatccacctgatcatcaacaacgacatcagcaaggacgacctggacgccatcgaggtgatgagaaaccactggtgcagctacctgggccaggacatcgccgagaacctgcagctgtgcctgggcgagttcctgcccagactgctggaccccagcgccgagatcatcgtgctgaaggagccccccaccatcagacccaacagcccctacgacctgtgcagcagattcgccgccgtgatggagagcatccagggcgtgagcaccgtgaccgtgaagtag

SEQ ID NO: 206333 - DNA, 3234 bp, Artificial Sequence
  derived and/or modified sequence
atgacagcagaattacaacaagacgacgcagctggcgcagcagacggtcacgggtcgagttgccaaatgctccttaatcagttgcgggagatcacaggaattcaagatccaagtttcctccacgaggctttgaaagcctcaaatggcgacatcacccaagctgtgagtctcttgactgatgaaagggtgaaggaacctagccaagatactgtagccacagagccttcagaggttgagggctcggccgccaacaaagaggttttggccaaggtgattgacctgactcacgataataaggacgacctccaggctgcgatcgcattatcactgctagaatcccctaagatccaagctgacgggagggacctgaacagaatgcatgaagccacctcggccgagacaaaacggtccaagcgtaaacgatgtgaggtgtggggagagaaccctaatccaaacgactggcggcgtgtcgatggctggcctgtcggactaaagaacgtaggcaacacatgctggtttagcgccgtgatccagtccttatttcagctgcccgaatttcgccgactcgtgttaagttattctttaccacagaatgtgttggaaaactgcaggtcccatacggaaaaacgcaacatcatgttcatgcaggagctccagtatctatttgctctcatgatgggatccaataggaagtttgttgacccctctgcagcactcgacctcctcaagggggcatttaggagttccgaggagcaacagcaagacgtgtcagagttcacccataagcttttggactggctggaggatgcgtttcagttggcggtaaacgtcaactctccgcggaataagtcagaaaatcctatggtgcaactattttatggaaccttcctgactgagggtgtgcgggaagggaagccgttctgtaataacgaaacgttcgggcagtatcctttgcaggtgaacgggtaccgtaatctggacgagtgcctggagggcgctatggtggagggcgacgttgaactgttgccatctgatcactcagtgaaatatggtcaggagcgttggttcaccaaattgccccctgtcttgacattcgaactgtcccgatttgagtttaatcagagcctaggacagccagagaagatccacaacaaactagaatttccccagattatttatatggatagatatatgtaccgctcaaaggaactcatcagaaataaacgcgaatgcataaggaagctgaaagaggaaattaaaatcctccaacagaaactagagcggtatgttaaatacggcagcggcccagcgagattcccattgccagatatgctgaaatacgtgatagaattcgcttctacaaaacccgccagcgaatcctgcccccctgagtccgacacccatatgactctgcctttaagtagtgttcactgctctgtttcagatcagaccagtaaggaatccacaagcacagaaagctcatctcaggacgtggagtcaaccttttcttcacctgaggactctctgcctaagtcaaaacctcttaccagctctagatcatctatggagatgccctcccaacctgcaccacggaccgtgactgacgaggaaatcaacttcgtgaagacttgtctccagcgctggcgttccgagattgaacaggacatccaagatctgaaaacttgcatcgcgagtaccactcaaaccattgagcagatgtactgtgacccactacttaggcaggtcccctatcgccttcacgctgtactggtgcacgaaggacaagctaacgccggtcattactgggcctatatatataatcagcctaggcaatcctggcttaaatataacgacatctcggtaactgagagctcatgggaggaggtcgaacgggactcttatggcggcctgcgcaacgtgtctgcatactgtcttatgtacattaacgataaactgccctattttaacgccgaggcagcaccaactgagtcagaccagatgagcgaggtggaagccctctccgtggaactcaagcactacatccaggaggataactggaggtttgagcaagaagtggaagaatgggaggaagaacaatcatgcaagattccccagatggagagcagtaccaactcatcttcacaggattattcgacgtcacaagaaccttccgtggcatcctcacatggggtcagatgcctgtccagcgaacatgctgtgatcgtgaaagagcagacagcgcaagcaattgctaacaccgcccgggcgtatgagaaaagcggcgtggaggcagccctgagcgaagttatgctctccccagcaatgcaaggcgttatactggcaatagcgaaagccaggcaaacattcgatcgagacggcagcgaagctggcctcatcaaggcgttccacgaggagtacagtcggctgtaccagctcgctaaggagacaccgacatctcattcagacccacggctccaacatgtactggtatatttctttcagaacgaagccccgaagcgggtcgtggaacggacgcttttggagcagtttgctgataaaaatctgtcatacgatgaacgatctatctccattatgaaagtggcacaggcaaaactgaaggagatcggcccggatgatatgaatatggaagaatacaaaaaatggcacgaagattacagtctgtttcggaaggtttccgtctacctgctgactgggctcgagctttaccaaaaggggaagtaccaggaagctttaagctatctagtgtacgcatatcagtccaatgctgccttgttgatgaagggacctaggcgcggcgtaaaagaaagtgttatcgctctgtatcgcagaaagtgcctgcttgaactaaacgcgaaggcagctagcctttttgagaccaacgacgaccacagcgtgactgaggggatcaatgtgatgaacgagctgattattccgtgtatccacctgataataaacaatgatatttctaaggacgacttggacgcgatcgaggtgatgcggaatcactggtgttcgtatttggggcaggatattgcagagaacctccaattatgcctgggcgagtttctgccaagactgctcgatccctccgcggagataatcgttctcaaggagccacctacaattaggcctaattcaccctacgatctgtgctctaggtttgctgccgtgatggaaagcatccagggcgtatccaccgtgactgtcaagtag

SEQ ID NO: 206334 - DNA, 3234 bp, Artificial Sequence
  derived and/or modified sequence
atgacagctgagctgcagcaggatgatgctgctggagctgctgatggccacggcagcagctgccagatgctgctgaaccagctgcgggagatcaccggcatccaggaccccagcttcctgcacgaggccctgaaggccagcaatggagacatcacccaggccgtgtccctgctgacagatgagcgggtgaaggagcccagccaggacacagtggccacagagcccagcgaggtggagggcagcgctgccaacaaggaggtgctggccaaggtgattgacctgacccatgacaacaaggatgacctgcaggccgccatcgccctgagcctgctggagagccccaagatccaggctgatggccgggacctgaacaggatgcatgaggccaccagcgctgagaccaagaggagcaagaggaagagatgtgaggtgtggggcgagaaccccaaccccaatgactggaggagagtggatggctggcctgtgggcctgaagaatgtgggcaacacctgctggttctctgctgtgatccagagcctcttccagctgcctgagttccggcggctggtgctgagctacagcctgccccagaatgtgctggagaactgccgcagccacacagagaagaggaacatcatgttcatgcaggagctgcagtacctgtttgccctgatgatgggcagcaacaggaagtttgtggaccccagcgctgccctggacctgctgaagggggccttccgcagcagcgaggagcagcagcaggatgtgtctgagttcacccacaagctgctggactggctggaggatgccttccagctggccgtgaatgtgaacagccccaggaacaagtctgagaaccccatggtgcagctgttctacggcaccttcctgacagagggcgtgcgggagggcaagcccttctgcaacaatgagaccttcggccagtaccccctgcaggtgaatggctacagaaacctggatgagtgcctggagggcgccatggtggagggagatgtggagctgctgcccagcgaccacagcgtgaagtatggccaggagcgctggttcaccaagctgccccctgtgctgacctttgagctgagcagatttgagttcaaccagagcctgggccagcctgagaagatccacaacaagctggagttcccccagatcatctacatggaccgctacatgtaccgcagcaaggagctgatccggaacaagcgggagtgcatcaggaagctgaaggaggagatcaagatcctgcagcagaagctggagagatatgtgaagtatggcagcggccctgcccgcttccccctgcctgacatgctgaagtatgtgattgaatttgccagcaccaagccagccagcgagagctgccccccagagagtgacacccacatgaccctgcccctgagctctgtgcactgcagcgtgtctgaccagaccagcaaggagagcaccagcacagagagcagcagccaggatgtggagagcaccttcagcagccctgaggacagcctgcccaagagcaagcccctgaccagcagccgcagctccatggagatgcccagccagcctgcccccaggacagtgacagatgaggagatcaactttgtgaagacctgcctgcagcgctggaggagtgaaattgagcaggacatccaggacctgaagacctgcatcgccagcaccacccagaccatcgagcagatgtactgtgaccccctgctgcggcaggtgccctaccgcctgcatgctgtgctggtgcatgagggccaggccaatgccggccactactgggcctacatctacaaccagccccggcagagctggctgaagtacaatgacatctctgtgacagagagctcctgggaggaggtggagcgggacagctatggaggcctgagaaatgtgtctgcctactgcctgatgtacatcaatgacaagctgccctacttcaatgctgaggccgcccccacagaaagtgaccagatgtctgaggtggaggccctgtctgtggagctgaagcactacatccaggaggacaactggaggtttgagcaggaggtggaggagtgggaggaggagcagagctgcaagatcccccagatggagagcagcaccaacagcagcagccaggactacagcaccagccaggagcccagcgtggccagcagccatggagtgcgctgcctgagcagcgagcacgctgtgattgtgaaggagcagacagcccaggccatcgccaacacagcccgggcctatgagaagagcggcgtggaggccgccctgtctgaggtgatgctgagccctgccatgcagggcgtcatcctggccatcgccaaggcccggcagacctttgacagagatggcagcgaggccggcctcatcaaggccttccacgaggagtacagccggctgtaccagctggccaaggagacccccaccagccacagcgacccccggctgcagcacgtgctggtgtacttcttccagaatgaggcccccaagagggtggtggagaggaccctgctggagcagtttgctgacaagaacctgtcctatgatgagaggagcatcagcatcatgaaggtggcccaggccaagctgaaggagattggaccagatgacatgaacatggaggagtacaagaagtggcatgaggactacagcctcttcaggaaggtgtctgtgtacctgctgaccggcctggagctgtaccagaagggcaagtaccaggaggccctgagctacctggtgtatgcctaccagagcaatgctgccctgctgatgaagggccccaggagaggagtgaaggagagcgtgattgccctgtacagaaggaagtgcctgctggagctgaatgccaaggccgccagcctgtttgagaccaatgatgaccacagcgtgacagagggcatcaacgtgatgaatgagctgatcatcccctgcatccacctgatcatcaacaatgacatcagcaaggatgacctggatgccatcgaggtgatgaggaaccactggtgcagctacctgggccaggacattgctgagaacctgcagctgtgcctgggggagttcctgccccggctgctggaccccagcgctgagatcatcgtgctgaaggagccccccaccatccggcccaacagcccctatgacctgtgcagcagatttgctgctgtgatggagagcatccagggcgtgtccacagtgacagtgaagtag

SEQ ID NO: 206335 - DNA, 3234 bp, Artificial Sequence
  derived and/or modified sequence
atgaccgccgagctgcagcaggacgacgccgccggcgccgccgacggtcacggaagttcatgtcagatgctacttaaccagcttagagagatcactggtattcaggatccatctttcttgcacgaggctctgaaggcgtccaatggggacattactcaggccgtcagtttgttgaccgatgaacgggtgaaggaaccaagtcaagacaccgtcgccacagagcccagtgaggtggaaggttcagctgcaaataaggaagtgttagcgaaagtgatcgacctgacccatgataacaaagacgacctgcaggccgctatcgctttaagcttgctcgaaagccctaagatccaggcggacggccgggatttaaatcgcatgcacgaagctacaagcgccgaaacaaagcggagcaaacgcaaacgatgcgaagtctggggcgagaatcccaaccctaacgattggaggcgcgtagacggctggcccgtcgggttgaagaacgtaggcaacacttgctggttcagtgcagtgatacaatccctattccaactacctgagtttcgacggttagttctgagttatagccttccacagaacgtcctcgagaactgtcggtcgcacactgaaaaacgaaatatcatgttcatgcaggaacttcagtatctctttgccctcatgatgggatccaatcgcaagtttgtggatccctctgcagctctggatctcctgaaaggtgcatttcggtcttccgaggagcagcaacaggatgtgtccgagtttacccataaattgctggactggttggaggatgcgtttcaactggcggtgaacgtcaacagccctagaaataaaagtgaaaatcctatggtgcagcttttttacgggacattccttacagaaggagttcgcgaaggtaagccattctgcaacaacgagacattcggacagtatccccttcaagttaacgggtacaggaatctggacgagtgcctcgagggggccatggtcgagggcgacgtggagctcctccccagtgatcatagcgtgaaatatgggcaggaaagatggtttaccaagctgccgccagttctcacgttcgaattgagtaggtttgaattcaaccagtcgctaggtcaacccgaaaagattcataacaaactcgaatttccccagatcatttatatggataggtacatgtatcgctcaaaggagcttattaggaataaaagagaatgtattaggaaactcaaagaagaaatcaagatcctccagcagaagttagaaagatatgtaaaatatgggagcgggcctgcccgttttcctttaccagacatgttaaaatatgtaatcgagtttgcatctaccaaaccagcatctgagagctgccctcctgagtctgacacccacatgactctgcctctgtcttctgtgcactgtagcgtaagcgatcagacctctaaagaaagtacatccaccgaaagtagtagccaggacgtggagtccaccttttcgtcgcctgaagacagcctgccaaagtcaaaaccattgactagttctagaagcagcatggaaatgccctctcaacccgcgccccgcactgtgacagacgaggagatcaacttcgtgaagacctgtctgcagcggtggcgctctgagatcgaacaggatatccaggatctgaaaacatgtatcgcctccaccactcagacaattgagcaaatgtattgcgaccccttgctgcgtcaggtaccataccgcctgcatgcagtcctcgttcacgaaggtcaggcgaacgccggacattactgggcctacatctataaccagcctcgacagagttggcttaagtataacgacatctccgttacagagtctagttgggaagaagtggaacgcgatagttacggcgggttgcggaacgtgtctgcctattgtttgatgtacatcaacgataaactgccttattttaatgccgaagcagctccaaccgaatcggatcaaatgagcgaagtcgaggcgctgtctgtggagctgaagcactatatccaggaggacaattggagatttgagcaagaagtagaggagtgggaagaggagcagagctgcaaaatcccccagatggaaagctctacgaacagctcatctcaggactactctacatcacaggagcctagcgtagcttcctcacacggtgtgcgatgtttgtcttcagaacacgccgtgatagtgaaggaacagactgcccaggcaattgccaacacagcccgagcatacgagaagtccggagttgaggcggccctttctgaagtgatgctgagcccggcgatgcagggcgtaattctcgccattgctaaagccagacaaactttcgaccgtgatggttctgaggctggcctgatcaaagcctttcacgaagaatactcgaggctttaccagctcgccaaagagacgcctacctcccattctgatccccgcctgcagcatgtactggtgtatttcttccagaatgaggcaccgaagcgcgttgtcgagaggactttattggaacagtttgccgataagaatctgtcttatgatgagcggtcaatctctataatgaaggtggcgcaggccaaattaaaggagatagggccagacgacatgaacatggaggaatataagaagtggcacgaagactattctctctttcgaaaggtctccgtgtacctgctcaccggtctggagctctaccagaaaggaaaatatcaggaggctctcagttacttggtgtatgcttatcaatcaaatgctgctctgctgatgaaaggaccgaggaggggcgtgaaagagagcgtaatagcactctatagaaggaaatgccttttagaacttaacgccaaggctgcgagtttatttgaaactaatgacgatcacagcgtgacggagggcattaacgtgatgaacgaacttatcattccctgcatccatctgataattaacaacgatatcagtaaagatgacctcgatgccatagaggtgatgcggaatcactggtgctcatatcttggtcaggatatcgccgaaaatctccaactttgcttgggagagtttctcccgcgcctgctcgacccttctgccgagattatcgttctgaaagagcccccaaccatcaggcccaatagcccttatgatctgtgttcccgctttgcagctgtcatggaatcgatccagggcgtgtccaccgtcaccgtcaagtag

SEQ ID NO: 206336 - DNA, 3234 bp, Artificial Sequence
  derived and/or modified sequence
atgacagccgagctccagcaggacgatgccgctggggctgccgacggtcacggaagtagctgccaaatgctgctgaatcaactccgcgaaatcactggcatacaggacccatctttcttgcatgaagctctgaaagcttctaatggagacatcacacaggccgtgtcactgctgacggacgagagagtgaaggaaccatctcaagataccgtggctactgaaccctccgaggttgagggaagtgctgcgaacaaagaggtgcttgcaaaagtgatcgatttaacccacgacaataaagatgatctacaagcagctatcgcactttccctcctggagtccccaaagatccaggccgatgggcgagatctgaatcgcatgcacgaggccacttccgctgaaacaaagcggtcgaagaggaaacggtgcgaggtatggggggaaaacccaaaccctaacgactggagacgagttgatggatggcccgttggactgaagaacgttggcaacacctgttggttctccgcagtcatccagtcattgttccagctgcctgaatttcggagactggtgctctcatactctctcccccagaatgtgctggagaattgtaggtcacataccgaaaagaggaacatcatgtttatgcaggaattgcagtacctatttgccctgatgatgggtagtaacagaaaattcgtcgatccctccgccgctctggacctgctcaagggcgcattccgcagttccgaggagcaacagcaggatgtctcagagttcacacacaaacttttggattggctggaggatgcattccagctggccgtgaatgttaattctcctcgcaacaagtccgaaaatccaatggtccagttgttctatggaacgttcttgaccgaaggcgtgcgggaaggcaaaccgttttgcaataacgagacatttggtcaataccctctgcaagtgaatgggtacagaaatctggatgagtgcctggaaggcgctatggtcgaaggtgatgtagagctgttacctagtgaccatagcgtgaagtacggacaggaacgttggtttacgaagctgcctccagtgctgaccttcgagttgtcaagattcgagtttaatcagtccctggggcagcccgaaaaaatacacaacaagttggaattccctcaaattatctacatggacaggtatatgtacagatcgaaagagctgattaggaacaaacgcgaatgtatcagaaagctgaaagaagaaatcaaaatcttgcagcagaagctcgaaagatatgtgaagtacggtagcggccctgcacggttccccttgccagatatgctcaaatacgtgatagaatttgctagcactaagcctgcttccgagtcttgtccacctgaatccgatacccacatgacacttcctctttcctccgtacattgctcggtgagtgaccagaccagcaaggaatccacctcgactgaatcgagcagccaggatgtggagtcgacctttagctcacccgaggactccctgcctaagtcaaagccccttacgtccagtcgcagcagcatggagatgcctagccaaccagcgccaagaaccgtcacggacgaggaaattaatttcgtaaagacatgcctgcagagatggaggagcgagattgaacaggatatccaggatctcaaaacatgcatcgctagtacgacgcaaacaattgagcagatgtattgcgatcccttgctgaggcaagtcccataccgcctgcacgccgtactggttcacgaagggcaggccaatgctgggcactactgggcctatatctacaaccagccacggcaatcgtggctgaaatacaatgacatatctgtaaccgaatcatcatgggaggaagtggagagagactcctacgggggactacgcaacgttagcgcatactgtttgatgtacattaacgacaagctcccctatttcaatgccgaggcagcaccaaccgagtccgaccagatgagcgaagtggaggccctctcagtggaacttaaacactacatccaggaggacaactggcggttcgagcaggaagtggaagagtgggaagaagaacagtcctgcaagatccctcaaatggagtcaagcaccaactcaagctctcaagactactcaactagccaggaaccgagcgtggctagcagtcacggggttcgatgtcttagttctgagcacgcagttatagtgaaagaacagacagctcaagcaatcgccaatactgccagagcatacgagaagagcggggtggaagccgcacttagcgaggtcatgctctcaccagcaatgcagggggtcatcctggcaattgccaaggctcggcaaacttttgaccgggatggatccgaggctgggttgatcaaagctttccatgaagaatacagccggctgtatcagttggcaaaagaaacaccgacctcccacagcgacccccgactgcagcacgtcctcgtctatttcttccagaacgaggctccaaaaagagtagtcgaacgcaccttacttgagcaatttgctgataagaacttaagttacgacgagagaagtatatccataatgaaggtggctcaagcaaagttgaaagagattggacccgatgatatgaatatggaggaatataagaagtggcatgaagattacagcctgttccggaaggtttcagtgtatctgctgacggggctggaactatatcagaagggaaagtaccaggaagctctttcttatttggtgtatgcttaccaatcaaacgcagcgctgctgatgaagggaccgaggcgcggtgtgaaagagagcgtcatcgccctctaccggagaaaatgccttctggagctgaatgcgaaggctgcgagtcttttcgagaccaacgacgatcattctgtcacagagggcatcaatgtaatgaacgaactcatcataccatgtatccacctcatcattaacaatgatatcagcaaggacgacctggatgcaatcgaggtgatgcgcaatcattggtgttcctacctgggacaggacattgcagagaacctacagttatgtcttggcgagttcttgccccgtctgttggatccttccgccgagatcattgtactgaaggagcctccgaccatacgtccaaactcaccctatgacctgtgttctcgttttgccgcagtcatggagagtattcagggcgtgagtaccgtaaccgttaagtag

SEQ ID NO: 206337 - DNA, 3234 bp, Artificial Sequence
  derived and/or modified sequence
atgaccgccgaactgcaacaggacgacgctgctggcgccgccgatggacatgggtcaagttgtcaaatgttgcttaatcagcttagagaaatcactgggatacaggacccttcatttctgcatgaggcccttaaggcttccaatggcgacattacccaagctgtctctttattaacggatgaaagggtcaaggaacccagccaagacacagtggccaccgagccctcagaggtcgagggctctgcagctaataaggaagtattggccaaagtgattgatttgacccacgacaataaagacgatttgcaagctgctattgccctcagtttactggagagtcctaaaattcaggccgacgggcgagatttaaacaggatgcacgaagctacctctgctgagacaaagcgttccaagcgcaagagatgcgaagtgtggggggaaaaccccaatccaaacgactggcgtcgggtggatggctggccagtggggttaaagaatgtaggcaacacatgttggtttagtgcagtcattcagtccctgttccaactcccagagttccgtcggctcgttctatcctacagccttccccaaaacgtgctagagaactgtcggagtcacactgagaagagaaacataatgtttatgcaggagctgcaatacctgtttgcattaatgatgggctccaatagaaagttcgtagacccctctgccgctctcgatctcctgaaaggagcgttccgtagttccgaagagcaacaacaggatgtctcagagtttacacataaattactcgactggctggaggatgcctttcagctggcagttaatgtgaacagccctaggaacaagagcgagaaccccatggtgcaactgttctacggcacattccttaccgagggtgtgcgagagggcaaaccattttgtaataatgagaccttcggacaataccccctacaagttaatggatatcggaacctggatgaatgtcttgaaggggcgatggtggagggcgacgtggaactgctacccagcgatcattccgtgaaatacggccaggaaaggtggttcacaaaacttccaccggtgttgacattcgagctctctcggttcgagttcaaccaatcgctcggacagcctgagaagattcataataagttagaatttccccaaatcatttatatggaccgctatatgtacagaagcaaggaactgatccgtaacaaacgcgaatgtatccgtaaactcaaggaagagattaagatcctccaacagaagttggagaggtacgtgaaatatggctcgggcccagccagattcccactgccagatatgctgaaatatgtcattgagttcgcaagcaccaaaccagcaagtgagtcgtgcccacccgagtctgatacccacatgactttgccactgagctcagtgcattgcagtgtgtctgaccagacttctaaagaatcaaccagcacagaatcctctagccaggatgtagaatctacgtttagttcacctgaggactcattaccaaaatctaagcctcttacatcctccaggagttctatggagatgccttcccagccggcaccgcgcaccgtcaccgacgaagagataaatttcgtgaaaacgtgcctacaacggtggcggtccgagatcgagcaggacattcaggacctaaagacgtgtatcgcaagcacaacccagactatagaacagatgtattgtgaccctttactgcggcaggttccttacagattgcatgccgttctggtgcatgagggtcaggcaaacgcaggacattattgggcctatatatataaccagccacgccagtcatggctgaagtacaatgacatctcggtgaccgagtcaagttgggaagaggtagagcgggatagctatggcgggctccgcaacgtctccgcttactgcctgatgtacatcaacgacaagctcccatactttaatgcggaggctgctcccaccgagagtgaccagatgagtgaggttgaggccttatctgttgaactcaagcattacatccaagaggacaactggcgtttcgaacaggaggtcgaagagtgggaagaggaacagtcctgtaaaattccgcagatggagtcctccacaaattcatcttcacaagattactccacctcgcaggagccctccgtcgctagttcacatggggtcaggtgcctgtccagtgaacacgccgtaatagtgaaggaacagaccgcgcaggcgatcgccaacacggctagagcttacgaaaaatctggtgtcgaggccgcgctcagcgaggtcatgctgtcacctgctatgcagggggtcatccttgccatagccaaagcacgccagactttcgacagggatgggtctgaagcgggccttatcaaagcatttcacgaagaatatagtaggttatatcagcttgccaaagaaacacccacctctcatagcgacccccgcttacagcacgttttggtgtatttcttccaaaacgaggccccgaagcgggttgtcgagcgcaccctactagaacagttcgcagacaaaaacctttcctacgacgagaggtcaataagtatcatgaaagtcgctcaagcaaaactgaaagaaatcgggccggacgacatgaacatggaagagtataaaaaatggcacgaagattattctctcttccggaaagtgagcgtttatctcctgactggcctggaactctatcagaagggcaaataccaggaagctctgtcctatctagtgtacgcttaccagtctaacgccgccctgctgatgaaaggaccccggaggggtgttaaagaatcagttatcgcgctgtaccgacgcaaatgtctgctggagctcaacgctaaggcagccagcctcttcgagacaaatgatgaccatagtgttacggaaggaatcaatgttatgaatgaactgataataccttgtatccacctgatcatcaataacgacattagcaaagatgaccttgacgccatagaggtaatgcgcaaccattggtgttcttacctggggcaggacattgcagaaaatctccagctgtgcctgggtgaattccttcccaggctgttggatccctctgccgagatcatcgtcctcaaggaaccgcccacgatcaggcctaattccccttacgacctttgtagccgctttgctgccgtcatggagagcatacagggggtctccaccgtcaccgtcaaatag

SEQ ID NO: 206338 - DNA, 3234 bp, Artificial Sequence
  derived and/or modified sequence
atgaccgccgagctgcagcaggatgacgcagcaggcgccgccgatggacatggcagctcctgccaaatgctgctgaaccaactgagggagatcacaggtattcaggacccatcattcctccatgaagcactgaaagccagcaatggggatatcacacaggccgtatctttgctaacagatgaaagagtcaaggagccttcccaggacacagttgctaccgaaccaagtgaagtcgaggggtctgccgccaacaaggaggtcctcgccaaggttatcgatctcactcacgataataaggacgacctgcaagccgctattgccttatccctgctggaaagcccaaagattcaagccgacggccgagaccttaaccgtatgcacgaggccacatctgctgaaactaaacgatcaaagagaaagagatgcgaagtatggggtgagaaccccaatccaaacgattggagacgagtcgacgggtggcctgtcgggctgaagaatgttggcaacacttgctggttctcggctgtgatccaatctctattccaactacctgagttccggcgcctggtactgagttattcactcccgcagaatgtgctggagaattgtagaagccataccgagaaacgtaatattatgttcatgcaggagcttcaatacctgttcgctctcatgatgggtagcaatcggaaatttgtcgacccttccgcagccttggatctgttaaaaggagccttcagaagtagcgaggaacagcagcaggacgtctctgaatttacacacaagctactggactggctggaagacgctttccaactggccgtcaatgttaacagcccccgcaacaaatcagaaaaccccatggtgcagctgttttacgggactttcttgaccgagggggtgcgcgaaggaaaaccattttgtaacaatgagaccttcggccagtatcctctacaagttaacgggtatcgaaatctggacgagtgtctggaaggggccatggttgaaggcgatgtcgaactgctgccatccgaccactccgtgaaatacggccaggagcgttggttcacgaaactgccaccagtgttaacttttgagctctccagattcgagtttaatcaaagtcttggtcaaccagaaaagattcacaacaagcttgagttcccccaaatcatctacatggacaggtatatgtatcgatcaaaggaactgattagaaataagagagagtgcatcagaaaactcaaggaagaaattaagatcctccaacagaagctcgagcggtatgtaaaatacggaagtggtccggcacggttcccactacccgatatgctgaagtatgtgatcgagtttgcaagcaccaaaccagcctctgaatcttgtcctccggagtccgatacccatatgaccctgccattaagttccgtgcattgttctgtttccgaccaaacttcaaaggagtcaacctccaccgaatctagttcgcaagatgtggaaagtacgttttcttcacctgaggattctctccctaaatccaagcctctgacatctagccgctcaagtatggagatgcctagccagccagctcctagaaccgtcaccgacgaagagataaactttgtgaaaacgtgcctgcaacgatggcggagtgaaatcgagcaggatatccaggacctcaaaacttgtatcgcatccaccacccagacaatcgaacaaatgtactgcgatccccttctgaggcaagtcccatacagattgcacgctgtgctggtccatgagggtcaggctaatgcaggacattactgggcatatatatataatcagccccgtcaaagctggttaaagtacaatgacattagtgtgaccgaatcatcttgggaggaagtggaacgggattcatacggagggttacgtaacgttagcgcctattgcttgatgtacatcaacgataaactgccctattttaatgccgaggcggcccctacagaaagtgaccagatgtcagaggtcgaagctctgtccgtggagttaaagcactacattcaggaggataactggaggttcgaacaggaggtggaagaatgggaggaagagcagtcatgtaaaattcctcagatggaaagtagcaccaacagttcaagtcaggactatagcacttcccaggagccttctgtagcctcttctcacggcgtacggtgtctttcaagcgaacacgctgttatagtaaaagagcaaaccgcccaggccatcgcaaacactgctcgcgcatacgagaaatccggggtagaggctgccctaagcgaagtcatgctttctcctgccatgcagggagttattttagcaattgcgaaggcaagacagacctttgatcgggatggttcggaagccgggttgataaaggcatttcatgaggaatactcccggctataccaactcgcaaaggaaacacccaccagccacagcgaccccagactccaacacgtattagtctacttttttcagaacgaggcgcccaagcgtgtggtagaacgtaccttactagaacaatttgctgacaagaatttgagctacgacgagcggtccatcagcattatgaaagttgcacaggccaagctgaaagagataggtcctgacgatatgaacatggaagaatataaaaaatggcacgaagactactcattgttccgaaaagtgagtgtctacctgctgacaggactcgaactttatcaaaaggggaaataccaggaggctctcagttatctcgtgtatgcttaccaatctaacgcagctctgttgatgaagggccctaggagaggcgtgaaagaatccgtaatcgctctctatcgtaggaaatgcctgcttgaattgaacgccaaagcagcttcactgttcgaaacaaacgacgaccacagtgtgacggaagggataaatgtaatgaatgaacttattattccctgtattcatctgatcattaataatgacatttcaaaggacgacctcgacgcaatagaggtaatgagaaaccattggtgttcatatttgggccaggatatcgccgaaaaccttcagctttgtttgggcgaatttctgccaaggctgcttgatccatcagcggaaataatagttcttaaagagcctcccaccattcgtcctaatagcccttacgatttatgttcccgattcgccgcggtcatggaaagcatccagggggtctccacagtgactgtcaagtag

SEQ ID NO: 206339 - DNA, 4669 bp, Artificial Sequence
  derived and/or modified sequence
agtcctgagaggctgggccggcggcggctgcggcgggagaccggtgacccgcggctgggcgcctcggccatgactgcggagctgcagcaggacgacgcggccggcgcggcagacggccacggctcgagctgccaaatgctgttaaatcaactgagagaaatcacaggcattcaggacccttcctttctccatgaagctctgaaggccagtaatggtgacattactcaggcagtcagccttctcactgatgagagagttaaggagcccagtcaagacactgttgctacagaaccatctgaagtagaggggagtgctgccaacaaggaagtattagcaaaagttatagaccttactcatgataacaaagatgatcttcaggctgccattgctttgagtctactggagtctcccaaaattcaagctgatggaagagatcttaacaggatgcatgaagcaacctctgcagaaactaaacgctcaaagagaaaacgctgtgaagtctggggagaaaaccccaatcccaatgactggaggagagttgatggttggccagttgggctgaaaaatgttggcaatacatgttggtttagtgctgttattcagtctctctttcaattgcctgaatttcgaagacttgttctcagttatagtctgccacaaaatgtacttgaaaattgtcgaagtcatacagaaaagagaaatatcatgtttatgcaagagcttcagtatttgtttgctctaatgatgggatcaaatagaaaatttgtagacccgtctgcagccctggatctattaaagggagcattccgatcatctgaggaacagcagcaagatgtgagtgaattcacacacaagctcctggattggctagaggacgcattccagctagctgttaatgttaacagtcccaggaacaaatctgaaaatccaatggtgcagctgttctatggtactttcctgactgaaggggttcgtgaaggaaaacccttttgtaacaatgagaccttcggccagtatcctcttcaggtaaacggttatcgcaacttagacgagtgtttggaaggggccatggtggagggtgatgttgagcttcttccctccgatcactcggtgaagtatggacaagagcgttggtttacaaagctacctccagtgttgacctttgaactctcaagatttgagtttaatcagtcccttgggcagccagagaaaattcacaataagctggaatttcctcagattatttatatggacaggtacatgtacaggagcaaggagcttattcgaaataagagagagtgtattcgaaagttgaaggaggaaataaaaattctgcagcaaaaattggaaaggtatgtgaaatatggctcaggcccagctcggttcccgctcccggacatgctgaaatatgttattgaatttgctagtacaaaacctgcctcagaaagctgtccacctgaaagtgacacacatatgacattaccactttcttcagtgcactgctcggtttctgaccagacatccaaggaaagtacaagtacagaaagctcttctcaggatgttgaaagtaccttttcttctcctgaagattctttacccaagtctaaaccactgacatcttctcggtcttccatggaaatgccttcacagccagctccacgaacagtcacagatgaggagataaattttgttaagacctgtcttcagagatggaggagtgagattgaacaagatatacaagatttaaagacttgtattgcaagtactactcagactattgaacagatgtactgcgatcctctccttcgtcaggtgccttatcgcttgcatgcagttcttgttcatgaaggacaagcaaatgctggacactattgggcctatatctataatcaaccccgacagagctggctcaagtacaatgacatctctgttactgaatcttcctgggaagaagttgaaagagattcctatggaggcctgagaaatgttagtgcttactgtctgatgtacattaatgacaaactaccctacttcaatgcagaggcagccccaactgaatcagatcaaatgtcagaagtggaagccctatctgtggaactcaagcattacattcaggaggataactggcggtttgagcaggaagtagaggagtgggaagaagagcagtcttgcaaaatccctcaaatggagtcctccaccaactcctcatcacaggactactctacatcacaagagccttcagtagcctcttctcatggggttcgctgcttgtcgtctgagcatgctgtgattgtaaaggagcaaactgcccaggctattgcaaacacagcccgtgcctatgagaagagcggtgtagaagcggcactgagtgaggtgatgctgagccctgccatgcaaggggtcatcctggccatagctaaagcccgtcagacctttgaccgagatgggtctgaagcagggctgattaaggcattccatgaagaatactccaggctctatcagcttgccaaagagacccccacctctcacagtgatcctcgacttcagcatgtccttgtctactttttccaaaatgaagcacccaaaagggtagtagaacgaacccttctggaacagtttgcagataaaaatcttagctatgatgaaagatcaatcagcattatgaaggtggctcaagcgaaactgaaggaaattggtccagatgacatgaatatggaagagtacaagaagtggcatgaagattatagtttgttccgaaaagtgtctgtgtatctcctaacaggcctagaactctatcaaaaaggaaagtaccaagaggcactttcctacctggtatatgcctaccagagcaatgctgccctgctgatgaaggggccccgccggggggtcaaagaatccgtgattgctttataccgaagaaaatgccttctggagctgaatgccaaagcagcttctctttttgaaacaaatgatgatcactccgtaactgagggcattaatgtgatgaatgaactgatcatcccctgcattcaccttatcattaataatgacatttccaaggatgatctggatgccattgaggtcatgagaaaccattggtgctcttaccttgggcaagatattgcagaaaatctgcagctgtgcctaggggagtttctacccagacttctagatccttctgcagaaatcatcgtcttgaaagagcctccaacaattcgacccaattctccctatgacctatgtagccgatttgcagctgtcatggagtcaattcagggagtttcaactgtgacagtgaaataagctcccacatgttcaaggcccattctggttcctggctgcctgcctcttgcacagaagttcgttgtcatagtgctcaccttgggaaaaggattaggtgggcacataagattccgatcagaccccaaccatgctgcatgtgtaaagaaggattgaaaataaaattgcactttttaggtacaaaatcataaaagctgtttcactagaaaaggcagaaagcagtgtattaaggtgttgaattacgccagaagacctgaaatgccttgtacctacaacaatgcttaggcttttctaagcctcttgccacttttaaaattatccttcaggcataaatatttttgacagcagaatagaagaatgattcatgagaacctgaaccagatgaacagctactagttattttatcaaatacagatgacatttaaaaattcttaactacaagagattagaaatataaaccttgcctggctcttgccaggagataacaaaatgggttgctgatgaactgcacccttttacatgtgggtagaatataagctcacatggcagtgagatgttgaaaagtcaaaagagacctgtctctctcctttcttttctatctttaaaccagaaaacctcatactcagtcctcagtgaaagaaagtaaagtattaaggactttagacagaagagcattgtgtaacttgactgaagatcatccattaatagttattaggcatttaggtaaaattttctaatacctaaaaattgtcaaaaacagtcaatagggctactgctggcccaaagaccatttaggtccacctcctcttttttgctctttttttttttctgtgacagtttcactgtgtcgcccaggctggcgttcagtggtgcaatctcagctcactgcaaactctgtctcctgggctcaagtgattctcgtgcctcagcctcccgaatagctggaattacgggcatgcaccaccacacctggctaatttttgtatttttaatagagatggggtttcaccatattggccaggctgatctctaactcctggcctcaagtgatctatctgcctccctcagcctcccaaagtctgggattgcagacaagtcatcgtacccggccttcttttttgcccttaaaagtaagggatgtgggtttgtacaaaaaaaaaaaaaaaaaaaaaaaaaccagcatacatatgcaaaactatatatatatgtatatgtagagaaaaatacttcccattgatcatttttaaaaggcttctgattggatattgtgttttaaccaaattttaaagattaatggaatcatgaaagggaaaaaaattgatacaactatgcagattttataaatgtgcaataaaagtatttgttttac

SEQ ID NO: 206340 - protein, 704 aa, Artificial Sequence
  derived and/or modified sequence
MWEKMETKTIVYDLDTSGGLMEQIQALLAPPKTDEAEKRSRKPEKEPRRSGRATNHDSCDSCKEGGDLLCCDHCPAAFHLQCCNPPLSEEMLPPGEWMCHRCTVRRKKREQKKELGHVNGLVDKSGKRTTSPSSDTDLLDRSASKTELKAIAHARILERRASRPGTPTSSASTETPTSEQNDVDEDIIDVDEEPVAAEPDYVQPQLRRPFELLIAAAMERNPTQFQLPNELTCTTALPGSSKRRRKEETTGKNVKKTQHELDHNGLVPLPVKVCFTCNRSCRVAPLIQCDYCPLLFHMDCLEPPLTAMPLGRWMCPNHIEHVVLNQKNMTLSNRCQVFDRFQDTVSQHVVKVDFLNRIHKKHPPNRRVLQSVKRRSLKVPDAIKSQYQFPPPLIAPAAIRDGELICNGIPEESQMHLLNSEHLATQAEQQEWLCSVVALQCSILKHLSAKQMPSHWDSEQTEKADIKPVIVTDSSVTTSLQTADKTPTPSHYPLSCPSGISTQNSLSCSPPHQSPALEDIGCSSCAEKSKKTPCGTANGPVNTEVKANGPHLYSSPTDSTDPRRLPGANTPLPGLSHRQGWPRPLTPPAAGGLQNHTVGIIVKTENATGPSSCPQRSLVPVPSLPPSIPSSCASIENTSTLQRKTVQSQIGPPLTDSRPLGSPPNATRVLTPPQAAGDGILATTANQRFSSPAPSSGECCSALG

SEQ ID NO: 206341 - DNA, 2115 bp, Artificial Sequence
  derived and/or modified sequence
atgtgggagaaaatggagaccaagactatagtgtacgatctggacacgtcaggaggactgatggagcagatccaggccctgctcgctcctcctaagactgacgaagctgagaaacgcagtaggaagcctgagaaagagcccaggcgctctggaagagcaacgaaccacgactcctgcgactcctgcaaagagggcggcgacctgctgtgttgcgaccattgtccggcagccttccatctccagtgttgcaatccacctctgagcgaggaaatgcttcctcctggcgaatggatgtgccacaggtgcactgtgaggaggaagaaacgcgaacagaagaaggagctgggacatgttaacggcctggtagataaatctgggaaacgcaccaccagtccctcttcggatactgatctgctagaccggtctgcttctaagacagaattgaaggctatcgcacacgccaggattttggaacgtagggcgagcaggcccggcacgcccacttcctcagccagcacggagacgcctaccagcgaacagaatgacgtggatgaggatataattgacgtggatgaggaacccgtcgctgctgaacctgactacgtccagcctcagctgagaagaccattcgagctgctgatcgccgctgccatggagagaaaccccacccagtttcagctacctaacgaactgacatgtactactgcactccctggaagttcaaagcgtagaaggaaggaagaaactaccgggaaaaacgtgaagaaaactcagcacgagctggaccacaatgggctggtgccactgccagttaaagtttgcttcacatgcaacaggtcttgtagagtggcccctctcattcagtgcgactattgccccctcttgtttcatatggattgcctcgaacctcccctcacagccatgccactgggccggtggatgtgtcccaaccatatcgaacatgtggtgttgaaccagaagaatatgactttgtctaatcggtgccaagtgttcgaccgatttcaggacaccgtgtctcaacatgtcgtcaaggtggacttcctgaacagaattcataaaaaacaccctcctaacaggcgcgtgctgcagtccgtcaaaagaaggagtctgaaggttcctgacgcaatcaaatcccagtatcaattcccacccccactgattgctcctgccgctattcgggacggcgaactgatttgtaatggaatcccagaagagtcccagatgcacttgttgaactcagagcatctggcaacacaggccgagcaacaggaatggctgtgtagcgttgtagctcttcagtgttccatcctgaaacatctgagtgccaaacagatgccctcccattgggacagcgagcagactgagaaagccgatatcaaacccgttattgtgacagattcttctgtaaccacgtcactgcaaactgcagacaagacaccgaccccatcccattatccgctctcctgtccatcaggaatttcaactcagaattcgttgtcctgttcaccgcctcaccagtcaccagccctcgaggacatagggtgtagcagttgcgcggagaagagtaagaagaccccatgcggtaccgccaatggccccgtgaatacggaggtcaaggctaatggaccccatctgtactcaagtcccacagactctaccgatccacgaaggcttcccggagctaacacacccctaccagggctcagccataggcagggctggcctcgcccactcacgccacctgctgccggcggtcttcaaaatcacacagtgggcatcatagtcaaaacggagaacgctacagggccatccagctgtccccagcgctcccttgtccccgtcccatccctgcctccaagcattcccagttcatgcgccagcattgaaaatactagcactctgcagcgcaagactgtgcagagccaaattgggccaccactgacagatagccgtccactggggtcgcctcctaacgctacaagagtactcacgcccccgcaggccgccggagacggaattttggctactacagccaatcagagattcagtagccccgcgccctcctcaggcgagtgctgtagcgctctggggtag

SEQ ID NO: 206342 - DNA, 2957 bp, Artificial Sequence
  derived and/or modified sequence
cgggtggctttgcgggcgctcgcggtaagtttgcgccaagtgcgcggcagccgggacgcagacggcggcggcggcgagaggcggagcccggggaccaccccccatcaccctccccccagtcacctcacgtaccacaacctcacgtaacctctcaccccccctccgatacccccagccccgggatggcagcgcccgccagccttcccggccggaccggctgtcgccagtgccggctttagcctgtgggactaggccccgccgaggcctgacccccggagccgggacccactgtgcagccagcagccgggccgggactgaggggccgctcccccctcgcggcccgtcgggaggacgctgtcgtcccggggactgggggccggggggtgggggggagccagggcgaggaagtcgggacccgtattgggaaaaaagcggggccggggtcaggagcgccccctcccctcacctcccccctccccccggggttgggggggccggagcagagagcacccagcccgggaggtggatgaatgtgggagaaaatggagaccaagacgatcgtgtacgacttggacacatcaggggggctgatggagcaaatccaagctctgctggctccccccaagacggacgaggcagaaaagcgcagtcggaagcctgagaaggagccccggagaagcggcagggccaccaaccacgacagctgcgatagctgcaaggaaggtggagatctcctgtgctgcgaccactgcccggctgccttccacctccagtgctgtaaccctccactgagtgaagaaatgttgcctcctggagagtggatgtgtcaccggtgcactgttcgccgaaagaaacgagagcagaaaaaggagctgggtcatgtcaatggactggtggacaaatctggcaaacggactacatcccccagcagtgacactgacttgttggacagatcggccagcaaaactgaactaaaggccattgcccatgcccggatcctggaaaggagagccagcaggcctggcacacccacatccagcgccagcacagagactcccacctctgagcagaatgatgtcgacgaagacatcattgacgtggatgaggaaccagtagcagcggagccagactatgtgcagccccagctgaggcggccctttgagctgctgattgctgccgccatggagcggaaccccacccaatttcagttgcccaatgaactgacttgtaccactgcactaccaggttctagcaagaggagaagaaaggaggaaaccacagggaaaaatgttaagaagacacagcatgaattagatcacaatggtctcgttcccttacccgtcaaagtctgcttcacgtgtaacaggagttgccgtgtggctcctctcatccagtgtgactattgccctctcctgtttcacatggattgcctcgagccgccgctcactgccatgcccctgggcagatggatgtgtccgaatcacatcgaacatgtggtgctgaaccagaagaatatgacactgagcaatcggtgccaggtgtttgatcgtttccaggacaccgtttcgcagcatgtcgtcaaagtggacttcctgaaccgaatccacaagaagcacccccctaaccggcgtgtgctccagtcggtcaaaagaagaagcttgaaggttcctgatgctataaaatctcagtaccagtttccaccccctctcattgcacccgcggccattcgggacggggagctgatctgcaatgggatccctgaggaatcacagatgcaccttttgaactctgagcacttagccacccaagcagagcagcaagagtggctctgtagtgttgttgcgctccagtgcagcatattgaaacatttatctgctaagcagatgccttcgcattgggactctgaacagacagagaaggctgatattaagcctgttattgtgactgacagctcagtcaccacctccctgcaaacagctgacaagacacctacaccttcccactaccccttgtcctgcccctcagggattagcacccagaattccctgagctgctctccaccccaccagtccccagccctagaggacatcggctgcagttcttgtgcggaaaaatccaagaaaaccccttgtgggactgccaatgggccagtgaacacagaggtgaaagctaatggcccacacctctacagcagccctactgattccacggacccccggcgacttccaggcgctaacaccccactaccaggcctctcacaccggcaaggctggccccggcccctcacgccaccagcggctgggggccttcagaaccacaccgtcggcatcattgtgaagacagagaatgccactggccccagctcttgcccccagaggagtttggttcctgtcccaagcctgcccccttccattcccagctcttgtgccagcatcgagaacaccagcactttgcaaagaaagactgtccaatcacagataggacctccgttgacagattcaaggccactgggctcacccccaaacgccacccgggtgctcactcccccgcaagcagcaggagatggtatcttggccacaacagccaaccaacgattcagctcaccagcgccatcgtcaggtgagtgctgctcagccttgggttgatttggaataattttatgctctttctggcaaataagattctaaaagcacttatatccctgtgaatacttcagaggactttggcctttgtattgtttgtcttactctcatttccgtaatagaagaggaagcacatgttaacttgtcccgtttataaatgggactgcttaggctctgaaagcttcagtgatttccttaaaatgacctactgagtcagtggcaggattggaaccacagcccaggtctcctgactccatcccataccttccaggcctaggcctctgcctgttttgttctgtcaccttaaaagaaggc

SEQ ID NO: 206343 - DNA, 2115 bp, Artificial Sequence
  derived and/or modified sequence
atgtgggagaagatggagaccaagaccatcgtgtatgacctggacaccagcggcggcctgatggagcagatccaggccctgctggccccacccaagacagatgaggccgagaagaggagcaggaagccagagaaggagccccggcgcagcggccgggccaccaaccacgacagctgtgacagctgcaaggagggcggggacctgctgtgctgtgaccactgcccagctgccttccacctgcagtgctgcaacccccccctgtctgaggagatgctgcccccaggagagtggatgtgccaccgctgcaccgtgcggaggaagaagcgggagcagaagaaggagctgggccacgtgaatggcctggtggacaagagcggcaagaggaccaccagccccagcagtgacacagacctgctggacagaagtgccagcaagacagagctgaaggccatcgcccacgcccgcatcctggagcggcgggccagccggcccggcacccccaccagcagcgccagcacagagacccccaccagcgagcagaatgatgtggatgaggacatcattgatgtggatgaggagcctgtggccgctgagccagactatgtgcagccccagctgcggcggccctttgagctgctgattgctgctgccatggagaggaaccccacccagttccagctgcccaatgagctgacctgcaccacagccctgcccggcagcagcaagagaagaaggaaggaggagaccaccgggaagaatgtgaagaagacccagcacgagctggaccacaacggcctggtgcccctgcctgtgaaggtgtgcttcacctgcaacagaagctgccgggtggcccccctcatccagtgtgactactgccccctgctcttccacatggactgcctggagccccccctgacagccatgcccctgggccgctggatgtgccccaaccacattgaacatgtggtgctgaaccagaagaacatgaccctgagcaaccgctgccaggtgtttgaccgcttccaggacacagtgtcccagcacgtggtgaaggtggacttcctgaaccgcatccacaagaagcacccccccaacagaagagtgctgcagagcgtgaagaggaggagcctgaaggtgcctgatgccatcaagagccagtaccagttccccccacccctcatcgccccagctgccatcagagatggagagctgatctgcaatggcatccctgaggagagccagatgcacctgctgaacagcgagcacctggccacccaggccgagcagcaggagtggctgtgcagcgtggtggccctgcagtgcagcatcctgaagcacctgagcgccaagcagatgcccagccactgggacagcgagcagacagagaaggctgacatcaagcctgtgattgtgacagacagctctgtgaccaccagcctgcagacagctgacaagacccccacccccagccactaccccctgagctgccccagcggcatcagcacccagaacagcctgagctgcagccccccccaccagagccctgccctggaggacatcggctgcagcagctgtgccgagaagagcaagaagaccccctgtggcacagccaacggccctgtgaacacagaggtgaaggccaacggcccccacctgtacagcagccccacagacagcacagacccccggcggctgcccggggccaacacccccctgcccggcctgagccaccggcagggctggccccggcccctgaccccacctgctgctgggggcctgcagaaccacacagtgggcatcatcgtgaagacagaaaatgccaccggccccagcagctgcccccagaggagcctggtgcctgtgcccagcctgcccccatccatccccagcagctgtgccagcattgagaacaccagcaccctgcagaggaagacagtgcagagccagatcggcccccccctgacagacagccggcccctgggcagccccccaaatgccaccagggtgctgaccccaccccaggccgctggagatggcatcctggccaccacagccaaccagcgcttcagcagccctgcccccagcagcggggagtgctgcagcgccctgggctag

SEQ ID NO: 206344 - DNA, 2115 bp, Artificial Sequence
  derived and/or modified sequence
atgtgggagaagatggagaccaagaccatcgtgtacgacctggacacctctggcggtctgatggagcagatccaagctcttctggcaccgcccaagactgatgaggctgagaagcgctcaaggaaacctgagaaagagccacgaaggtccggcagagcaaccaaccacgacagctgtgattcttgtaaggaagggggggacctgctgtgttgtgaccactgcccagcagcattccacctgcagtgctgtaacccccccctgtccgaggagatgcttccacccggcgaatggatgtgccaccggtgtacagtgcggcgcaagaaacgtgagcagaagaaagaattggggcatgtgaatgggctggtcgacaaatctggtaagcggactacatccccttcttctgacacagatctgctggaccgcagcgcctctaagaccgagcttaaggcaatcgcacacgccaggatactcgagcgacgcgctagccgtcccgggacaccaacatcctcagcgtctaccgagacccccaccagtgagcagaacgatgtggatgaggatatcattgacgtggacgaggaacctgtggcagcagaacctgattacgtgcaacctcaactgagacggccttttgaactactgattgcagcagccatggagagaaaccccacccagttccagctccctaacgagcttacctgtactactgcactgccagggagcagtaaacgcagaagaaaggaagaaactaccggcaaaaacgtgaagaagactcagcacgaattggaccacaacggtctggtgcctttacctgtgaaggtctgtttcacatgtaataggtcctgtagagtggccccccttatccaatgtgattactgtccgttattatttcacatggattgtctggaacctccccttacagcaatgcccttagggaggtggatgtgcccaaatcacatagagcatgtcgtgctcaaccagaagaacatgactttgtctaatcggtgtcaggtgttcgacagattccaagacacagtttcccagcacgtcgtgaaagtggatttcttgaatagaattcataagaaacaccccccgaatcgccgcgtgctgcaatctgtgaagagacgcagcctcaaggtccctgacgctattaaatcacaataccagttcccacctcccttgattgctccagctgccatcagggatggagagctgatttgcaacgggattccagaggagtcacagatgcacttgcttaattccgaacatctggcaacacaggccgagcagcaggaatggctctgctcagtagtagccctccagtgttccatcctcaaacacctgagtgccaagcagatgcccagccattgggactcagaacagactgagaaagctgatataaagccagtaattgtcaccgatagctccgtgacgacatcactacagacggcagataagacaccaactccatcccattatcccctctcctgtcccagcggcatctccactcaaaactccctgtcatgcagcccaccccaccagagccctgccttagaagacattgggtgcagttcttgcgctgagaagtccaaaaagaccccatgtgggactgctaatggccccgtcaataccgaggtgaaggccaatggcccacacctgtattctagccccacagacagcacagaccctcgcagacttccgggggccaatacacccctgccaggcctgtcccatagacagggctggcccagacctcttacaccccctgctgcaggcggattgcagaaccacactgtcggaatcatcgtcaagactgaaaatgcaaccgggccctcttcttgtcctcaaagaagcctggtccctgttccatcgctgcctcctagtattccatccagttgtgcaagtatcgaaaatacatcaaccctgcaaaggaagaccgtccaatcccagatcggtcccccgttgaccgattccagacccctggggtccccacctaacgccaccagagtcttgacacctcctcaggcagccggagatggaattctggccacaacggcaaaccaaagattttcttcacctgcgccatcctccggagaatgttgcagtgctttaggatag

SEQ ID NO: 206345 - DNA, 2115 bp, Artificial Sequence
  derived and/or modified sequence
atgtgggagaagatggaaaccaaaactattgtttatgatcttgacactagcggcggtctgatggaacagatccaggccctcctcgcccctcctaagaccgatgaggccgagaaacggtccagaaagcccgagaaggagcctcggagaagcggacgtgctaccaatcatgactcctgcgattcctgtaaagaaggtggggaccttctctgttgcgaccactgccccgctgcgtttcacctgcagtgctgtaacccaccacttagtgaagagatgttgcctcctggtgagtggatgtgccacaggtgcaccgtgcgcaggaaaaaacgtgaacaaaaaaaggagctggggcacgtgaacggcttggtcgataagtctgggaagcgcaccaccagtccatcctctgacaccgatctgctggacaggtccgctagcaagaccgaactcaaggctatcgcacatgcccgtatactggagcgacgcgcatctaggcctggtacgcctaccagtagcgcctctactgagacccccaccagcgagcaaaatgacgtcgatgaagatatcattgatgtcgacgaggagcctgtggccgctgaacctgactacgtacagcctcagctcagacgaccttttgagctgctgattgccgcagcaatggagaggaatcccacacagttccagctgccaaacgagctgacctgcacaaccgccctgcccggttcaagtaaacggaggaggaaagaagaaaccacgggcaagaatgtcaagaagacgcaacacgaactagaccacaatgggttagtgcctttgccggtcaaggtctgttttacctgcaacagaagttgccgcgtagcaccattgatacagtgtgattattgccccctgctgttccatatggactgcttggaacctcccctaaccgccatgccactcggtcgctggatgtgtccgaatcatattgagcacgtggtcctgaaccagaaaaacatgactctctcgaaccgttgccaggtatttgatagattccaggacacggttagccaacatgtcgtgaaggttgattttttgaacagaatccataaaaaacatccgccaaacaggcgggtacttcaatcggttaagcggaggtctctgaaggtgccagatgctattaagagccagtatcagttcccacccccactgatagcccctgcagcgataagagacggcgagctgatttgcaatggcatccccgaggaatcacagatgcatttgctgaactcagagcaccttgcaacacaggccgagcagcaagaatggctctgcagtgtagtggcgctgcaatgttccattctgaagcatctctcagccaaacaaatgccaagccattgggattcagaacagaccgagaaggctgatatcaagcctgtgatcgtgaccgactctagcgtgacaacatctctgcagaccgccgacaaaaccccaaccccatcgcactaccctttgagttgtcccagcggaatcagtactcagaactccctgagctgctcaccccctcaccaatcccccgctttagaggatatcggttgctcatcatgcgcggagaagagcaagaaaacaccttgtggtactgctaacgggccagtgaataccgaggtcaaagcaaacggtccacatctgtactcttccccgacagatagtaccgatccacggagactaccaggagcaaatacgcccttacctggactgagccacagacagggctggccacggcctctgaccccaccagctgccggaggtctccagaatcatactgtaggcataatcgtaaaaacagaaaatgccacagggcctagttcttgcccccagcgtagcctggttccagttccctctttgccccctagcatccccagctcttgtgcttctatagagaataccagcactctccagagaaagaccgtgcagtcacagatcggaccacccttaacggattcgagaccccttggctctcccccaaatgctactcgagtgttgactcctccgcaggccgctggagacggcatccttgctacaacagcaaatcaacgcttcagcagtcccgcaccatcttccggtgagtgctgttccgcgctcggttag

SEQ ID NO: 206346 - DNA, 2115 bp, Artificial Sequence
  derived and/or modified sequence
atgtgggagaagatggagaccaagaccatcgtgtacgacctggacaccagcggcggcctgatggagcagatccaggccctgctggccccccccaagaccgacgaggccgagaagagaagcagaaagcccgagaaggagcccagaagaagcggcagagccaccaaccacgacagctgcgacagctgcaaggagggcggcgacctgctgtgctgcgaccactgccccgccgccttccacctgcagtgctgcaacccccccctgagcgaggagatgctgccccccggcgagtggatgtgccacagatgcaccgtgagaagaaagaagagagagcagaagaaggagctgggccacgtgaacggcctggtggacaagagcggcaagagaaccaccagccccagcagcgacaccgacctgctggacagaagcgccagcaagaccgagctgaaggccatcgcccacgccagaatcctggagagaagagccagcagacccggcacccccaccagcagcgccagcaccgagacccccaccagcgagcagaacgacgtggacgaggacatcatcgacgtggacgaggagcccgtggccgccgagcccgactacgtgcagccccagctgagaagacccttcgagctgctgatcgccgccgccatggagagaaaccccacccagttccagctgcccaacgagctgacctgcaccaccgccctgcccggcagcagcaagagaagaagaaaggaggagaccaccggcaagaacgtgaagaagacccagcacgagctggaccacaacggcctggtgcccctgcccgtgaaggtgtgcttcacctgcaacagaagctgcagagtggcccccctgatccagtgcgactactgccccctgctgttccacatggactgcctggagccccccctgaccgccatgcccctgggcagatggatgtgccccaaccacatcgagcacgtggtgctgaaccagaagaacatgaccctgagcaacagatgccaggtgttcgacagattccaggacaccgtgagccagcacgtggtgaaggtggacttcctgaacagaatccacaagaagcacccccccaacagaagagtgctgcagagcgtgaagagaagaagcctgaaggtgcccgacgccatcaagagccagtaccagttccccccccccctgatcgcccccgccgccatcagagacggcgagctgatctgcaacggcatccccgaggagagccagatgcacctgctgaacagcgagcacctggccacccaggccgagcagcaggagtggctgtgcagcgtggtggccctgcagtgcagcatcctgaagcacctgagcgccaagcagatgcccagccactgggacagcgagcagaccgagaaggccgacatcaagcccgtgatcgtgaccgacagcagcgtgaccaccagcctgcagaccgccgacaagacccccacccccagccactaccccctgagctgccccagcggcatcagcacccagaacagcctgagctgcagccccccccaccagagccccgccctggaggacatcggctgcagcagctgcgccgagaagagcaagaagaccccctgcggcaccgccaacggccccgtgaacaccgaggtgaaggccaacggcccccacctgtacagcagccccaccgacagcaccgaccccagaagactgcccggcgccaacacccccctgcccggcctgagccacagacagggctggcccagacccctgaccccccccgccgccggcggcctgcagaaccacaccgtgggcatcatcgtgaagaccgagaacgccaccggccccagcagctgcccccagagaagcctggtgcccgtgcccagcctgccccccagcatccccagcagctgcgccagcatcgagaacaccagcaccctgcagagaaagaccgtgcagagccagatcggcccccccctgaccgacagcagacccctgggcagcccccccaacgccaccagagtgctgacccccccccaggccgccggcgacggcatcctggccaccaccgccaaccagagattcagcagccccgcccccagcagcggcgagtgctgcagcgccctgggctag

SEQ ID NO: 206347 - DNA, 342 bp, Artificial Sequence
  derived and/or modified sequence
gaggagagagccgagtacaccgccgacatcatcagcaccaccgtggccgagccctacagaacctgcttcaccgccggcggcagcaagaccagccccgtggagcagcagcccgagcagcagcagccccaggacatcgtgagcctgcccctgccccccctgccccacgccacccccgaccccttcaccctgtacagccacagaaccgagagcgccggcggccacctgttcctgccccaggacctgagatggaagagccccggcctgggcgtgttcgccgtgcagagcgtgtacgagctggccagaagacacaacgtgagccccttctacagcggccccccctag

SEQ ID NO: 206348 - DNA, 411 bp, Artificial Sequence
  derived and/or modified sequence
agaagcagaaccggccccgtgagcctgcagggcgaccccaagcaggccccctggagcagcagccagagcaacagcagcagaaagaccctgttcctgagcctgtgcccccccttccccacccagccccagatccacctgcacttcaccgagcacagagccagcagccaccagggcggccccttcaagctgcagatctgcctgagcagcctgtacagcaacctgctgctgcactgccactacagagaggtgcaccacatgagcggccacagaaccgagagcgccggcggccacctgttcctgccccaggacctgagatggaagagccccggcctgggcgtgttcgccgtgcagagcgtgtacgagctggccagaagacacaacgtgagccccttctacagcggccccccctag

SEQ ID NO: 206349 - DNA, 342 bp, Artificial Sequence
  derived and/or modified sequence
gaggaacgcgccgaatataccgctgacatcatttccaccaccgtggccgaaccctatcgaacctgttttactgccggaggctccaagacttcccccgtcgaacagcagcctgagcagcagcaaccccaggatatcgtgtctctgcctttgcctccattgccgcatgcaacgccagatcctttcactctatactctcacagaacagagagcgccggcgggcacctcttcttgccccaagatctgcgatggaaaagtccggggttgggagtcttcgctgtacagtctgtgtatgaactcgcccgtcggcataatgtttctcctttttattctggacctccctag

SEQ ID NO: 206350 - DNA, 342 bp, Artificial Sequence
  derived and/or modified sequence
gaggagcgggccgagtacaccgccgacatcatcagcaccaccgtggctgaaccctaccggacttgtttcaccgcgggaggatccaagacatcccccgtggagcagcagcctgagcagcagcagccacaggatattgtgagtcttcccctgccccccctgccacacgccacaccagatccatttacactctatagtcataggactgaatccgccgggggacatctgtttctgccccaggatttgcggtggaagtctcctggcctgggggtgtttgcggtgcagagtgtgtatgaattagcacggcgccacaatgtttctccattttactcagggccaccttag

SEQ ID NO: 206351 - protein, 905 aa, Artificial Sequence [sequence omitted]

SEQ ID NO: 206352 - protein, 746 aa, Artificial Sequence
  derived and/or modified sequence
MPCLGLLANLCRHNLSVQTHIKTLSNVKSFYRTLITLLAHSSLTVVVFALSILSSLTLNEEVGEKLFHARNIHQTFQLIFNILINGDGTLTRKYSVDLLMDLLKNPKIADYLTRYEHFSSCLHQVLGLLNGKDPDSSSKVLELLLAFCSVTQLRHMLTQMMFEQSPPGSATLGSHTKCLEPTVALLRWLSQPLDGSENCSVLALELFKEIFEDVIDAANCSSADRFVTLLLPTILDQLQFTEQNLDEALTRKKCERIAKAIEVLLTLCGDDTLKMHIAKILTTVKCTTLIEQQFTYGKIDLGFGTKVADSELCKLAADVILKTLDLINKLKPLVPGMEVSFYKILQDPRLITPLAFALTSDNREQVQSGLRILLEAAPLPDFPALVLGESIAANNAYRQQETEHIPRKMPWQSSNHSFPTSIKCLTPHLKDGVPGLNIEELIEKLQSGMVVKDQICDVRISDIMDVYEMKLSTLASKESRLQDLLETKALALAQADRLIAQHRCQRTQAETEARTLASMLREVERKNEELSVLLKAQQVESERAQSDIEHLFQHNRKLESVAEEHEILTKSYMELLQRNESTEKKNKDLQITCDSLNKQIETVKKLNESLKEQNEKSIAQLIEKEEQRKEVQNQLVDREHKLANLHQKTKVQEEKIKTLQKEREDKEETIDILRKELSRTEQIRKELSIKASSLEVQKAQLEGRLEEKESLVKLQQEELNKHSHMIAMIHSLSGGKINPETVNLSI

SEQ ID NO: 206353 - DNA, 2718 bp, Artificial Sequence
  derived and/or modified sequence
atggatagtaccgcgtgtttaaaaagtttgctgcttactgtctctcagtataaggcagtgaagagcgaggccaacgccacccagctgctgcgccacttggaggtgatcagcggacagaagctaactaggctcttcacctcgaatcaaattctcaccagtgagtgtttgagctgtcttgtcgaacttctggaagatcccaacatctctgcatctttgatcctctctattatcgggcttctgtcccaattagccgtagacatcgaaaccagggattgcctacaaaatacatataatctcaactccgtccttgctggcgtcgtgtgcaggtcttctcataccgacagcgtgtttctacaatgcatccagctcttacagaaactcacttacaacgttaaaatcttttactccggagctaatattgatgagttgatcacatttctgattgatcatatccagagttccgaagatgaacttaagatgccctgcctgggcctgctggctaacctctgccgccacaatttgtctgtgcagacccacattaagacgctctctaatgttaaatcattttatcgcaccctaataaccctgttggcccattctagcttaacagtggtagtgttcgccctgagcattctgtcgtcacttaccctgaatgaagaggttggagaaaagttgttccacgcccggaacatacaccagacattccagctaatcttcaacatcctaatcaacggggatggaactcttaccagaaagtatagtgtcgatctgctgatggatttactgaaaaacccaaagattgccgactatctgacccgctatgaacacttcagtagctgcttacaccaggtcctgggtcttctgaatggaaaggacccagatagttctagcaaagtgctggagcttcttcttgccttttgcagtgttactcagctgaggcatatgctgactcagatgatgtttgagcagagtccacccgggtctgccaccttaggaagccatactaagtgcctggagcctactgtggcactccttagatggctgagccagccccttgatggcagcgaaaactgctccgtcctggctctggaactgtttaaggaaattttcgaggatgtgatcgatgccgccaactgctcctccgcggacagatttgtaacattactgctgccgacaattctcgaccagctgcagttcaccgaacagaatcttgacgaagctctgactcgcaagaaatgtgaacgcatcgctaaggcaattgaagtgctgctcaccttgtgcggagacgacactcttaaaatgcatatcgcaaaaatcttgacaacggtgaaatgcacaacacttatcgaacaacagtttacatatgggaagatcgacctgggtttcggaacaaaggtcgccgactctgaactgtgtaaattggccgctgacgtgattctgaaaacactggatttgattaataaactaaaaccgctcgtgccgggcatggaggtgagtttttacaagatcttgcaggatcctcgcctgattacccccttggcattcgctctgacttcagataatcgcgaacaggtgcaatccggcctgcggatccttttggaagccgcccctctgcctgatttccccgcattagtgctgggggagtctattgctgctaacaacgcctaccgccagcaggaaacagagcacattccacggaaaatgccatggcagagctcaaaccatagtttccctacctctatcaaatgtttaactccccatttaaaggacggcgttccaggccttaacattgaggaattaattgagaagttacagtcaggtatggtggtcaaagatcagatctgtgatgtccgcatatcggacatcatggatgtgtatgagatgaagttgagcactcttgctagcaaagagtcgagattgcaggacctgctggaaactaaggcgctggccctggcccaggctgatcggctgattgcccagcatagatgccagcgcacccaggccgagaccgaggcccgaacattggcttctatgctaagggaagtcgaacgcaagaatgaggaattatctgtcctcctgaaggctcagcaggtcgaaagcgagcgggcccagtctgatatcgaacacctgtttcaacacaaccggaagttggagagcgtcgcggaggaacatgagattttgactaagtcttacatggagcttctacagaggaacgaaagtacagaaaaaaagaataaggatctacaaataacatgtgactcattaaacaagcagattgaaaccgtgaaaaagctgaacgagtctctcaaggagcagaatgaaaaaagcattgcacaactcattgagaaagaggagcagcgtaaggaagtccagaaccagctggtggaccgcgaacacaagttagctaatctccaccagaaaactaaagttcaggaggagaaaattaagacactgcagaaggaacgagaagacaaggaagaaaccatcgacatcctcagaaaagagctctcaaggaccgaacagatacgcaaggagctgtcaattaaggcatccagccttgaggtccagaaggcacagctggagggacgtttggaggagaaagagtcactggtgaaactgcagcaagaggagctaaataagcattctcacatgattgcaatgatccactctctgtctgggggaaaaattaaccccgaaactgtgaacctgtcgatatag

SEQ ID NO: 206354 - DNA, 2718 bp, Artificial Sequence
  derived and/or modified sequence
atggacagcacagcctgcctgaagagcctgctgctgactgtgtcccagtacaaggctgtgaagtctgaggccaatgccacccagctgctgcggcacctggaggtgatcagcggccagaagctgaccaggctcttcaccagcaaccagatcctgaccagcgagtgcctgagctgcctggtggagctgctggaggaccccaacatcagcgccagcctcatcctgagcatcatcggcctgctgagccagctggccgtggacatcgagacccgggactgcctgcagaacacctacaacctgaacagcgtgctggccggcgtggtgtgccgcagcagccacacagattctgtgttcctgcagtgcatccagctgctgcagaagctgacctacaacgtgaagatcttctacagcggggccaacattgatgagctgatcaccttcctgattgaccacatccagagcagtgaagatgagctgaagatgccctgcctgggcctgctggccaacctgtgccgccacaacctgtctgtgcagacccacatcaagaccctgagcaatgtgaagagcttctaccgcaccctcatcaccctgctggcccacagcagcctgactgtggtggtgtttgccctgagcatcctgagcagcctgaccctgaatgaggaggtgggggagaagctgttccacgccaggaacatccaccagaccttccagctgatcttcaacatcctgatcaatggagatggcaccctgaccaggaagtacagcgtggacctgctgatggacctgctgaagaaccccaagattgctgactacctgaccaggtatgagcacttcagcagctgcctgcaccaggtgctgggcctgctgaatggcaaggaccctgacagcagcagcaaggtgctggagctgctgctggccttctgcagcgtgacccagctgcggcacatgctgacccagatgatgtttgagcagagccccccaggcagcgccaccctgggcagccacaccaagtgcctggagcccaccgtggccctgctgcgctggctgagccagcccctggatggcagcgagaactgcagcgtgctggccctggagctgttcaaggagatctttgaagatgtgattgatgctgccaactgcagcagcgctgacagatttgtgaccctgctgctgcccaccatcctggaccagctgcagttcacagagcagaacctggatgaggccctgaccaggaagaagtgtgagcgcatcgccaaggccatcgaggtgctgctgaccctgtgtggagatgacaccctgaagatgcacatcgccaagatcctgaccaccgtgaagtgcaccaccctgattgagcagcagttcacctacggcaagattgacctgggcttcggcaccaaggtggccgacagcgagctgtgcaagctggccgcagatgtgatcctgaagaccctggacctgatcaacaagctgaagcccctggtgcccggcatggaggtgtccttctacaagatcctgcaggaccccaggctcatcacccccctggcctttgccctgaccagtgacaaccgggagcaggtgcagagcggcctgcgcatcctgctggaggccgcccccctgcctgacttccctgccctggtgctgggggagagcattgctgccaacaatgcctaccggcagcaggagacagagcacatccccaggaagatgccctggcagagcagcaaccacagcttccccaccagcatcaagtgcctgaccccccacctgaaggatggagtgcccggcctgaacatcgaggagctgattgagaagctgcagagcggcatggtggtgaaggaccagatctgtgatgtgcgcatcagtgacatcatggatgtgtatgagatgaagctgagcaccctggccagcaaggagagccggctgcaggacctgctggagaccaaggccctggccctggcccaggccgacaggctcatcgcccagcaccgctgccagaggacccaggccgagacagaggcccggaccctggcctccatgctgcgggaggtggagaggaagaatgaggagctgtctgtgctgctgaaggcccagcaggtggagagcgagcgggcccagagcgacatcgagcacctgttccagcacaacaggaagctggagagcgtggccgaggagcacgagatcctgaccaagagctacatggagctgctgcagagaaatgaaagcacagagaagaagaacaaggacctgcagatcacctgtgacagcctgaacaagcagattgaaacagtgaagaagctgaatgaaagcctgaaggagcagaatgagaagagcatcgcccagctgattgagaaggaggagcagaggaaggaggtgcagaaccagctggtggaccgggagcacaagctggccaacctgcaccagaagaccaaggtgcaggaggagaagatcaagaccctgcagaaggagcgggaggacaaggaggagaccatcgacatcctgaggaaggagctgagcaggacagagcagatcaggaaggagctgagcatcaaggccagcagcctggaggtgcagaaggcccagctggagggccgcctggaggagaaggagagcctggtgaagctgcagcaggaggagctgaacaagcacagccacatgattgccatgatccacagcctgagcggcggcaagatcaaccctgagaccgtgaacctgagcatctag

SEQ ID NO: 206355 - DNA, 2718 bp, Artificial Sequence
  derived and/or modified sequence
atggacagcaccgcctgcctgaagagcctgctgctgaccgtgagccaatacaaagcagtcaagtcggaggcaaatgccacacaactgctgagacatctggaagtgatatctgggcaaaaattgaccagactgtttactagcaatcagattctgacttccgagtgcctgtcctgtcttgtggagttactggaagaccctaacatctctgccagcttgattttatccatcatcgggctactgtcgcagttggccgttgatatcgagactcgggactgcttacaaaatacctataatctcaattccgtgctggcaggagttgtatgcaggagcagtcataccgatagcgtgtttctgcaatgcatccagcttttacagaaactcacatataatgtcaagatcttctatagtggcgccaatatcgatgaactgatcacttttttaattgatcacatccagtcgtctgaagacgagctgaagatgccttgtctcggattgctggcaaatttgtgcaggcacaacctgtcagtgcagacacacataaaaacacttagcaatgtgaagagcttctatcgcactttaatcacccttctagcccactcctccctgaccgtcgtggtgtttgctttatcaatcttgtcgagtcttacactcaacgaagaggtcggagaaaagctgttccatgccaggaatattcaccaaactttccagctcatcttcaatattctcattaacggggacggcactctcacccggaagtattctgttgatttgcttatggatctgctgaagaatcccaaaatcgcagactatctgacacggtacgagcatttctcaagttgccttcaccaggttctgggcctgctcaacggaaaagatccagattccagtagcaaagtcctagagttgctactggctttctgttccgttacgcaactgcgccacatgttgacccagatgatgtttgagcagtctccacctgggtcagcaaccctaggaagccacactaagtgtttggagccaacggttgctctcttaaggtggctgtcacagccactggacggctccgaaaattgttcagtgcttgccctggaactcttcaaagaaatttttgaagacgtgatcgatgctgcgaattgcagctctgctgatcggttcgtgacgctcctgctgcccacaattctggaccagctgcagttcacagaacagaaccttgatgaagcgctgactaggaaaaaatgtgaaagaattgccaaggccatagaggtgcttctgacactgtgtggagacgatactctgaaaatgcacatcgctaaaatcttgaccacagtgaagtgcacaaccctcattgagcagcaattcacttacggcaagattgaccttgggttcggtacaaaggttgctgacagcgaattatgcaaattggcagccgatgttatcttaaaaaccctggacttgattaataagctcaagcccctcgttcctggcatggaggtgagcttctacaagatcctgcaggacccacgtttgattacacccctagctttcgcgttgacaagcgataacagggaacaggtgcaatctggtcttcgcattctcttagaagccgcacctctgcctgacttccccgccttagtgctgggcgagtcaatagcggcaaataacgcctacagacagcaggagacagaacacatccctaggaagatgccttggcagtcttctaatcatagctttcccacctccatcaagtgtctgactccccatctcaaggatggagtgcctggattgaatattgaagaactcattgagaagctgcagtccgggatggtggtaaaagatcagatttgtgatgtgcgaatttctgatattatggacgtttacgagatgaagcttagcacactcgcctctaaggagagccggctgcaggacctcctcgagacaaaagctttggcgctcgcccaggccgacaggcttatcgctcagcacaggtgccagaggacccaggccgagaccgaggctagaaccttggcatctatgctcagggaggtagaacgcaagaacgaagaattatctgttttgcttaaagctcagcaggtggagagtgagagggctcagtccgatattgaacacctattccagcataaccgcaaactcgaaagcgtggccgaagagcacgaaatacttaccaagagctatatggagttactgcagcggaatgaaagcacggagaagaaaaacaaggatctgcagataacatgtgactccctaaataagcagattgagactgtgaagaaactcaatgagagccttaaagagcagaacgagaaatcaattgcccagctgattgagaaggaggagcagaggaaagaagtgcaaaatcagctggttgacagagagcataagctcgccaatttacatcagaagaccaaagtgcaagaggaaaaaatcaagacactgcagaaagagagggaggacaaagaggagactatcgatatcctgcggaaggagctaagccggacagaacagatccgaaaagagctgtcgattaaggcaagctctctggaagtgcagaaagcacagctggagggccggctcgaagaaaaggagtctcttgttaagctgcagcaggaggagcttaataaacattctcacatgattgccatgatccactcgctaagcgggggcaagattaatcccgagaccgtcaacttaagtatctag

SEQ ID NO: 206356 - DNA, 2718 bp, Artificial Sequence
  derived and/or modified sequence
atggacagtaccgcttgtctcaagagcctattgctcaccgtctcacaatataaagcagttaagtccgaggctaacgccacgcagctgctgcgtcacctcgaggtcatcagcggtcagaaactgacgcggctctttacctccaaccagatcttgacctcagagtgcctgtcgtgtctcgtcgagctgctggaagatcctaacatcagcgcatcccttatcctttctattatagggctgcttagtcagctcgctgtggacattgagactcgcgattgtttacagaatacgtataatttaaactctgttcttgctggagtcgtgtgcaggtccagccataccgactccgtgtttctgcaatgtatacaactgctgcagaagctcacttataatgtcaagatcttctacagcggagcgaacattgacgagcttatcacgttcttgatcgaccatatccagtctagcgaggacgagctgaagatgccctgtctgggacttttggccaacttgtgcagacacaacctgagcgttcaaacgcacataaagactctgtcaaacgtcaagtcattttatcgcacattgatcaccttactcgcacattctagcttaacagtggtggtcttcgcgctttcaatcttgagctcactcacactgaacgaggaggttggggagaaacttttccatgccaggaacatccatcagaccttccaactgatattcaacattcttattaacggtgatggcacgctcacccgtaagtactcggtggacctcctgatggacctgctaaagaaccctaaaattgccgactatttgaccaggtacgaacatttctcatcttgcctgcatcaggtgcttggactactgaatgggaaagacccggactccagctctaaagtgctggagctgctgttggcattttgttcagttacccaactgcgccacatgctgacgcagatgatgttcgagcaatcccccccagggtcagcaacactcggatctcacacaaagtgtctggagccaacggttgctctcctgaggtggctgtctcagcccttggatggctcggagaactgctcagttttggctctcgagctgtttaaagaaatttttgaggacgtgatcgacgcagctaactgctcctcagctgatagattcgtaacacttctgctccccactatcctggatcaactccagtttactgagcagaatctcgacgaagcgttgacaagaaagaagtgtgaaagaattgcaaaagctattgaggtactactcaccctctgcggtgatgatacactgaaaatgcacatcgccaagatccttacaacagtaaaatgtacgacactgatagagcagcagttcacgtacgggaaaatcgacctcggcttcgggaccaaggtcgccgattcagagctgtgtaagctggctgcagacgttatcctgaagactctcgacctcattaataaactcaaacctctcgtccccggtatggaggtgtccttttataaaattcttcaggaccccagactgattacccccctggcctttgcgctgacgtcagataatagggaacaggttcagtcggggctcagaattctactggaggctgccccactccctgattttcccgctctagtgctgggagagagcatcgcagccaacaatgcttacagacagcaggaaaccgaacatatccccaggaagatgccctggcagtcttctaatcacagctttcctaccagtattaaatgtctgacaccccatctgaaagacggagtgcccggactgaatatcgaggaactgatcgagaagctgcaatcaggaatggttgtgaaagaccaaatatgcgacgtcaggattagcgacattatggatgtttacgagatgaaactgagtactctggcatctaaggaatcacgcctgcaagatcttctcgagactaaagcgttagctctagcacaggcagatcgattaatcgcccagcacaggtgccagaggacgcaggctgagacggaagccaggacgctcgcaagcatgctgcgcgaagtagaacggaagaacgaagagttgtccgtgctccttaaagcccagcaagttgagagcgagcgggcacagagtgacatagaacacttgtttcagcacaatagaaagctagaaagtgtcgccgaggaacacgaaattctgacgaaatcttacatggagttgctgcagaggaacgagtccaccgagaaaaagaacaaggatctccagatcacctgtgactccctgaacaagcagattgaaacagttaagaaacttaatgaaagcctcaaggaacagaatgagaagagcattgcccaactgattgagaaagaggaacaaagaaaagaggtgcagaaccagctggtcgatagggaacacaaactggccaaccttcatcagaagaccaaagttcaagaagaaaaaataaagaccctgcagaaagaaagagaggacaaagaggaaacgatcgacatccttcgtaaggagctgtcaaggaccgaacagattcgtaaggagttgtcaataaaggcatccagcctggaggtccagaaagcccaactggaaggacgtctcgaggagaaggaatcgctggtgaagctgcagcaggaggagctcaacaagcattctcacatgattgccatgattcacagcctctctgggggaaaaatcaaccccgaaacagtaaatctctcaatttag

SEQ ID NO: 206357 - DNA, 3955 bp, Artificial Sequence
  derived and/or modified sequence
aaaaaaagcgcggcgaaagctaaaggccggcgcacgctgggcggtggtggtccctaagccgggccgcggccggtgcaatggactccactgcctgcttgaagtccttgctcctgactgtcagtcagtacaaagccgtgaagtcagaggcgaacgccactcagcttttgcggcacttggaggtaatttctggacagaaactcacacgactatttacatcaaatcagatattaacaagtgaatgcttgagttgccttgtagagctacttgaagaccccaacataagtgcttcactgatcttaagtattatcggtttgctgtctcaactagcagtagacattgaaaccagagattgtcttcagaatacatataatctgaatagtgtgctggcgggagtggtttgtcggagcagccacactgattcggtgtttttgcagtgcattcaacttctacagaagttaacatataatgtcaaaattttctattctggtgccaatatagatgaattaattacgttcctgatagatcacattcaatcttctgaagatgagttaaaaatgccttgtctaggattattggcaaatctttgtcggcacaatctttctgttcaaacgcacataaagacattgagtaatgtgaaatctttttatcgaactcttatcaccttgttggcccatagtagtttaactgtggttgtgtttgcactttcaatattatccagtttgacattaaatgaagaggtgggggaaaagctattccatgctcgaaacattcatcagacttttcaactaatatttaatattctcataaacggtgatggcactctaactagaaagtattcagttgacctactgatggatctccttaagaatcctaaaattgctgattatctcaccagatatgagcacttttcttcatgtcttcaccaagtattaggtcttcttaatggaaaggatcctgattcctcttcaaaggttttagaattacttcttgccttctgttcagtgactcagctgcgccatatgctcactcagatgatgtttgaacagtctccacctggcagcgccactctgggaagccatactaaatgtttagaacctactgtggctctactgcgctggttaagccaacctttggacggatcagaaaactgttctgttttagcattggagttgttcaaggaaatatttgaggatgtcatagatgctgctaactgttcctcggctgatcgttttgtgacccttctgctgcctacaatccttgatcaacttcagttcacagaacaaaatctagatgaggctttaacaagaaaaaaatgtgaaaggattgccaaggccattgaagttttgttaactctctgtggagatgatacactaaaaatgcatattgcaaaaatcttgacaactgtcaagtgtaccactcttatagaacaacaatttacatatggcaagattgacctgggatttggaacaaaggttgcagattctgaattatgcaaacttgctgctgatgtaattttgaaaactcttgatttgattaacaaacttaaaccattggttcctggtatggaagtaagcttctacaaaatacttcaggacccacgtttgattactcctttggcttttgctttaacgtcagataatagagaacaagtacagtctggactgagaatattattggaggctgctccactgccagattttcctgctttagtacttggagaaagtatagcagcaaacaatgcctatagacaacaggaaacagaacatatacccagaaaaatgccctggcaatcatcaaatcacagttttccaacatcaataaagtgtttaactcctcatttgaaagatggtgttcctggattgaatattgaagaattaatagagaaacttcagtctggaatggtggtaaaggatcagatttgtgatgtgagaatatctgacataatggatgtatatgaaatgaaactatccacattagcttccaaagaaagcaggctacaagatcttttggaaacaaaagctctagcccttgcacaggctgatagactgattgctcagcatcgctgtcaaagaactcaagctgaaacagaggcacggacacttgctagtatgttgagagaagttgagagaaaaaatgaagagcttagtgtgttgctgaaggcgcagcaagttgaatcagaaagagcgcagagtgatattgagcatctctttcaacataataggaagttagagtctgtggctgaagaacatgaaatactgacaaaatcctacatggaacttcttcagagaaatgaaagtactgaaaagaagaataaagatttacagatcacatgtgattctctgaataaacaaattgagacagtgaaaaagttgaatgagtcactcaaggaacaaaatgaaaaaagtattgcccaattaatagagaaagaagaacagagaaaagaagtacagaatcagctagtagacagagaacataagctagcaaatttgcatcaaaaaacaaaagtacaagaagaaaagattaaaaccttacaaaaggaaagggaagataaggaagaaaccattgatatccttagaaaagaattaagcagaacagaacagataagaaaagagttgagcattaaggcttcctccctagaggttcaaaaggcacaattagaaggtcgtttggaagagaaagagtccttggtgaaacttcagcaagaggaattgaacaaacactcccacatgatagcaatgatccacagtttaagtggtggaaaaataaatccagaaactgtgaatctcagtatatagacattatggcattttggaatttgtaatctcatgatatttttgatgtatttatctattggagggggggtgggtaggggagttaatttgtgacttcgtaacaataagaagttattatctaatttagtaaagaccctgatctgttgcatgttttttatttgatagtttgaatagaaatttaattttctaagttttactttttgtttctggcttttatggcttaaggttttctttggttcttacattagaaaatcatttttaacctccattatcatttttctaaggttctttcctttttcttagttgctttctattctgttttgcctgtcttatttattctcatttgtgattatttagatcttaagaccaaactttcttggtataacagtcctaaagattacaaaataaaaatatagagagagtaaaagtaaaaagtaaagtaaaaagagagaaggtatgattttactgctagagaagtttgtctctgaagaagcacaaaagaaaatattagtgaatttaaaataatttttatactgctgtagcataatttctaaatttgaaaaaaatgcaatggtaataaaatgtataaaaattagaaaactgtcattgtgttaaactattacatttaaatgattacatttaacacaatagctgtctcataaaaaatctaagaacttgtagaattatttgtaaggtatatttagtgtttttttctcttttttcaaatgttgcatagtggtccagatcatctataattaattataagtttcttatgatttacataaggataatttggattctactcttgctgcatattcagaaaaatattatttactgttaattctgatatgaattgtatttaatttgttgtcctaatagtttttaattggttcatttaattttaaagcataggttaaatatctttattttttttaaaatacaagggtccttctgtacttttcatttgaatcatatcctctaactactctgtaagaaacgtttttacatcaatattttgattgattttattgctataccaatacagtcattaattttacttggtgttttcttcaccatatgtctgtttgatttaagtgaatttagatttgtacagttctggaaattttttaaaaaatattatgcagagtaaaacattttaaatt

SEQ ID NO: 206358 - DNA, 3877 bp, Artificial Sequence
  derived and/or modified sequence
ccttaacttctgagctcacctattgtctttgggaagaagcagaaggaataatcccataactaccctctgggcttcatttttcattctcctccctcaaagtaatttctggacagaaactcacacgactatttacatcaaatcagatattaacaagtgaatgcttgagttgccttgtagagctacttgaagaccccaacataagtgcttcactgatcttaagtattatcggtttgctgtctcaactagcagtagacattgaaaccagagattgtcttcagaatacatataatctgaatagtgtgctggcgggagtggtttgtcggagcagccacactgattcggtgtttttgcagtgcattcaacttctacagaagttaacatataatgtcaaaattttctattctggtgccaatatagatgaattaattacgttcctgatagatcacattcaatcttctgaagatgagttaaaaatgccttgtctaggattattggcaaatctttgtcggcacaatctttctgttcaaacgcacataaagacattgagtaatgtgaaatctttttatcgaactcttatcaccttgttggcccatagtagtttaactgtggttgtgtttgcactttcaatattatccagtttgacattaaatgaagaggtgggggaaaagctattccatgctcgaaacattcatcagacttttcaactaatatttaatattctcataaacggtgatggcactctaactagaaagtattcagttgacctactgatggatctccttaagaatcctaaaattgctgattatctcaccagatatgagcacttttcttcatgtcttcaccaagtattaggtcttcttaatggaaaggatcctgattcctcttcaaaggttttagaattacttcttgccttctgttcagtgactcagctgcgccatatgctcactcagatgatgtttgaacagtctccacctggcagcgccactctgggaagccatactaaatgtttagaacctactgtggctctactgcgctggttaagccaacctttggacggatcagaaaactgttctgttttagcattggagttgttcaaggaaatatttgaggatgtcatagatgctgctaactgttcctcggctgatcgttttgtgacccttctgctgcctacaatccttgatcaacttcagttcacagaacaaaatctagatgaggctttaacaagaaaaaaatgtgaaaggattgccaaggccattgaagttttgttaactctctgtggagatgatacactaaaaatgcatattgcaaaaatcttgacaactgtcaagtgtaccactcttatagaacaacaatttacatatggcaagattgacctgggatttggaacaaaggttgcagattctgaattatgcaaacttgctgctgatgtaattttgaaaactcttgatttgattaacaaacttaaaccattggttcctggtatggaagtaagcttctacaaaatacttcaggacccacgtttgattactcctttggcttttgctttaacgtcagataatagagaacaagtacagtctggactgagaatattattggaggctgctccactgccagattttcctgctttagtacttggagaaagtatagcagcaaacaatgcctatagacaacaggaaacagaacatatacccagaaaaatgccctggcaatcatcaaatcacagttttccaacatcaataaagtgtttaactcctcatttgaaagatggtgttcctggattgaatattgaagaattaatagagaaacttcagtctggaatggtggtaaaggatcagatttgtgatgtgagaatatctgacataatggatgtatatgaaatgaaactatccacattagcttccaaagaaagcaggctacaagatcttttggaaacaaaagctctagcccttgcacaggctgatagactgattgctcagcatcgctgtcaaagaactcaagctgaaacagaggcacggacacttgctagtatgttgagagaagttgagagaaaaaatgaagagcttagtgtgttgctgaaggcgcagcaagttgaatcagaaagagcgcagagtgatattgagcatctctttcaacataataggaagttagagtctgtggctgaagaacatgaaatactgacaaaatcctacatggaacttcttcagagaaatgaaagtactgaaaagaagaataaagatttacagatcacatgtgattctctgaataaacaaattgagacagtgaaaaagttgaatgagtcactcaaggaacaaaatgaaaaaagtattgcccaattaatagagaaagaagaacagagaaaagaagtacagaatcagctagtagacagagaacataagctagcaaatttgcatcaaaaaacaaaagtacaagaagaaaagattaaaaccttacaaaaggaaagggaagataaggaagaaaccattgatatccttagaaaagaattaagcagaacagaacagataagaaaagagttgagcattaaggcttcctccctagaggttcaaaaggcacaattagaaggtcgtttggaagagaaagagtccttggtgaaacttcagcaagaggaattgaacaaacactcccacatgatagcaatgatccacagtttaagtggtggaaaaataaatccagaaactgtgaatctcagtatatagacattatggcattttggaatttgtaatctcatgatatttttgatgtatttatctattggagggggggtgggtaggggagttaatttgtgacttcgtaacaataagaagttattatctaatttagtaaagaccctgatctgttgcatgttttttatttgatagtttgaatagaaatttaattttctaagttttactttttgtttctggcttttatggcttaaggttttctttggttcttacattagaaaatcatttttaacctccattatcatttttctaaggttctttcctttttcttagttgctttctattctgttttgcctgtcttatttattctcatttgtgattatttagatcttaagaccaaactttcttggtataacagtcctaaagattacaaaataaaaatatagagagagtaaaagtaaaaagtaaagtaaaaagagagaaggtatgattttactgctagagaagtttgtctctgaagaagcacaaaagaaaatattagtgaatttaaaataatttttatactgctgtagcataatttctaaatttgaaaaaaatgcaatggtaataaaatgtataaaaattagaaaactgtcattgtgttaaactattacatttaaatgattacatttaacacaatagctgtctcataaaaaatctaagaacttgtagaattatttgtaaggtatatttagtgtttttttctcttttttcaaatgttgcatagtggtccagatcatctataattaattataagtttcttatgatttacataaggataatttggattctactcttgctgcatattcagaaaaatattatttactgttaattctgatatgaattgtatttaatttgttgtcctaatagtttttaattggttcatttaattttaaagcataggttaaatatctttattttttttaaaatacaagggtccttctgtacttttcatttgaatcatatcctctaactactctgtaagaaacgtttttacatcaatattttgattgattttattgctataccaatacagtcattaattttacttggtgttttcttcaccatatgtctgtttgatttaagtgaatttagatttgtacagttctggaaattttttaaaaaatattatgcagagtaaaacattttaaattact

SEQ ID NO: 206359 - DNA, 2718 bp, Artificial Sequence
  derived and/or modified sequence
atggacagcaccgcctgcctgaagagcctgctgctgaccgtgagccagtacaaggccgtgaagagcgaggccaacgccacccagctgctgagacacctggaggtgatcagcggccagaagctgaccagactgttcaccagcaaccagatcctgaccagcgagtgcctgagctgcctggtggagctgctggaggaccccaacatcagcgccagcctgatcctgagcatcatcggcctgctgagccagctggccgtggacatcgagaccagagactgcctgcagaacacctacaacctgaacagcgtgctggccggcgtggtgtgcagaagcagccacaccgacagcgtgttcctgcagtgcatccagctgctgcagaagctgacctacaacgtgaagatcttctacagcggcgccaacatcgacgagctgatcaccttcctgatcgaccacatccagagcagcgaggacgagctgaagatgccctgcctgggcctgctggccaacctgtgcagacacaacctgagcgtgcagacccacatcaagaccctgagcaacgtgaagagcttctacagaaccctgatcaccctgctggcccacagcagcctgaccgtggtggtgttcgccctgagcatcctgagcagcctgaccctgaacgaggaggtgggcgagaagctgttccacgccagaaacatccaccagaccttccagctgatcttcaacatcctgatcaacggcgacggcaccctgaccagaaagtacagcgtggacctgctgatggacctgctgaagaaccccaagatcgccgactacctgaccagatacgagcacttcagcagctgcctgcaccaggtgctgggcctgctgaacggcaaggaccccgacagcagcagcaaggtgctggagctgctgctggccttctgcagcgtgacccagctgagacacatgctgacccagatgatgttcgagcagagcccccccggcagcgccaccctgggcagccacaccaagtgcctggagcccaccgtggccctgctgagatggctgagccagcccctggacggcagcgagaactgcagcgtgctggccctggagctgttcaaggagatcttcgaggacgtgatcgacgccgccaactgcagcagcgccgacagattcgtgaccctgctgctgcccaccatcctggaccagctgcagttcaccgagcagaacctggacgaggccctgaccagaaagaagtgcgagagaatcgccaaggccatcgaggtgctgctgaccctgtgcggcgacgacaccctgaagatgcacatcgccaagatcctgaccaccgtgaagtgcaccaccctgatcgagcagcagttcacctacggcaagatcgacctgggcttcggcaccaaggtggccgacagcgagctgtgcaagctggccgccgacgtgatcctgaagaccctggacctgatcaacaagctgaagcccctggtgcccggcatggaggtgagcttctacaagatcctgcaggaccccagactgatcacccccctggccttcgccctgaccagcgacaacagagagcaggtgcagagcggcctgagaatcctgctggaggccgcccccctgcccgacttccccgccctggtgctgggcgagagcatcgccgccaacaacgcctacagacagcaggagaccgagcacatccccagaaagatgccctggcagagcagcaaccacagcttccccaccagcatcaagtgcctgaccccccacctgaaggacggcgtgcccggcctgaacatcgaggagctgatcgagaagctgcagagcggcatggtggtgaaggaccagatctgcgacgtgagaatcagcgacatcatggacgtgtacgagatgaagctgagcaccctggccagcaaggagagcagactgcaggacctgctggagaccaaggccctggccctggcccaggccgacagactgatcgcccagcacagatgccagagaacccaggccgagaccgaggccagaaccctggccagcatgctgagagaggtggagagaaagaacgaggagctgagcgtgctgctgaaggcccagcaggtggagagcgagagagcccagagcgacatcgagcacctgttccagcacaacagaaagctggagagcgtggccgaggagcacgagatcctgaccaagagctacatggagctgctgcagagaaacgagagcaccgagaagaagaacaaggacctgcagatcacctgcgacagcctgaacaagcagatcgagaccgtgaagaagctgaacgagagcctgaaggagcagaacgagaagagcatcgcccagctgatcgagaaggaggagcagagaaaggaggtgcagaaccagctggtggacagagagcacaagctggccaacctgcaccagaagaccaaggtgcaggaggagaagatcaagaccctgcagaaggagagagaggacaaggaggagaccatcgacatcctgagaaaggagctgagcagaaccgagcagatcagaaaggagctgagcatcaaggccagcagcctggaggtgcagaaggcccagctggagggcagactggaggagaaggagagcctggtgaagctgcagcaggaggagctgaacaagcacagccacatgatcgccatgatccacagcctgagcggcggcaagatcaaccccgagaccgtgaacctgagcatctag

SEQ ID NO: 206360 - protein, 1646 aa, Artificial Sequence
  derived and/or modified sequence
MWHGNHVQPGATHRPNQGLEMLQGLGIGMKAFHNFNYFLFFYNVLLGLGACLSRLLISCLLGMWLIARIDRTIMQSGYEGADMGFSAWIGMLYMDHYHINPVLVSFCHILITNHREKKLQQSTKYWCLNQSAESLRICAMRGGENRPPARVQSSSEELELRHQSLDAFPGRRLPGRGIQPAAKMSSVGKVTQVPNGKAYQQIFQAEVQLVHSLAATRKRAAERSVTLKSGRIPMMKKVETPEGEVMSPRQQKWMHSLPNDWIMENPVLHREKERAKREKARESENTIAAREVRGLMDTIVPEKISTSTFQRQAEHKRKSYESALASFQEEIAQVGKEMEPLIVDTGGLFLKKLTESDEEMNRLFLKVENDTNLEDYTIQALLELWDKVAGRLLLRKQEIKELDEALHSLEFSRTDKLKSVLKKYAEVIEKTSYLMRPEVYRLINEEAMVMNYALLGNRKALAQLFVNLMESTLQQELDSRHRWQGLVDTWKALKKEALLQSFSEFMASESIHTPPAVTKELEVMLKTQNVLQQRRLKHLCTICDLLPPSYSKTQLTEWHSSLNSLNKELDTYHVDCMMRIRLLYEKTWQECLMHVQNCKKQLLDWKAFTEEEAETLVNQFFFQMVGALQGKVEEDLELLDKSFETLADQTEWQSSHLFKYFQEVVQLWEAHQSELLVQELELEKRMEQHRQKHSLESQVQEAHLDRLLDQLRQQSDKETLAFHLEKVKDYLKNMKSRYECFHTLLTKEVMEYPAIMLKELNSYSSALSQYFFVREIFEQNLAGEVIFKFRQPEAHEKPSQKRVKKLRKKQGSKEDMTRSEESISSGTSTARSVEEVEEENDQEMESFITEEVLGQQKKSPLHAKMDESKEGSIQGLEEMQVEREGSLNPSLNEENVKGQGEKKEESEEEDEKEEEEEEEKLEEEKEEKEAQEEQESLSVGEEEDKEEGLEEIYYEDMESFTISSGNTYFVFVPLEEEHCRKSHSTFSAMFINDTSSAKFIEQVTIPSRLILEIKKQLFSEGGNFSPKEINSLCSRLEKEAARIELVESVIMLNMEKLENEYLDQANDVINKFESKFHNLSVDLIFIEKIQRLLTNLQVKIKCQVAKSNSQTNGLNFSLQQLQNKIKTCQESRGEKTTVTTEELLSFVQTWKEKLSQRIQYLNCSLDRVSMTELVFTNTILKDQEEDSDILTSSEALEEEAKLDVVTPESFTQLSRVGKPLIEDPAVDVIRKLLQLPNTKWPTHHCDKDPSQTGFKRHRCQPENSGKKAVPSASATSAGSLQTTHPPLSHSFTPHPKPNKMERKYRVLGDKPPPAAEDFKGIILTLLWESSENLLTVAEEFYRKEKRPVTRPDCMCDTFDQCAENISKKILEYQSQANKYHNSCLIELRIQIRRFEELLPQVCWLVMENFKEHHWKKFFTSVKEIRGQFEEQQKRLEKRKDKNAQKLHLNLGHPVHFQEMESLHLSEEERQEELDSMIRMNKEKLEECTRRNGQVFITNLATFTEKFLLQLDEVVTIDDVQVARMEPPKQKLSMLIRRKLAGLSLKEESEKPLIERGSRKWPGIKPTEVTIQNKILLQPTSSISTTKTTLGHLAAVEARDAVYLKYLASFEEELKRIQDDCTSQIKEAQRWKDSWKQSLHTIQGLYV

SEQ ID NO: 206361 - protein, 1701 aa, Artificial Sequence
  derived and/or modified sequence
MRGGENRPPARVQSSSEELELRHQSLDAFPGRRLPGRGIQPAAKMSSVGKVTQVPNGKAYQQIFQAEVQLVHSLAATRKRAAERSVTLKSGRIPMMKKVETPEGEVMSPRQQKWMHSLPNDWIMENPVLHREKERAKREKARESENTIAAREVRGLMDTIVPEKISTSTFQRQAEHKRKSYESALASFQEEIAQVGKEMEPLIVDTGGLFLKKLTESDEEMNRLFLKVENDTNLEDYTIQALLELWDKVAGRLLLRKQEIKELDEALHSLEFSRTDKLKSVLKKYAEVIEKTSYLMRPEVYRLINEEAMVMNYALLGNRKALAQLFVNLMESTLQQELDSRHRWQGLVDTWKALKKEALLQSFSEFMASESIHTPPAVTKELEVMLKTQNVLQQRRLKHLCTICDLLPPSYSKTQLTEWHSSLNSLNKELDTYHVDCMMRIRLLYEKTWQECLMHVQNCKKQLLDWKAFTEEEAETLVNQFFFQMVGALQGKVEEDLELLDKSFETLADQTEWQSSHLFKYFQEVVQLWEAHQSELLVQELELEKRMEQHRQKHSLESQVQEAHLDRLLDQLRQQSDKETLAFHLEKVKDYLKNMKSRYECFHTLLTKEVMEYPAIMLKELNSYSSALSQYFFVREIFEQNLAGEVIFKFRQPEAHEKPSQKRVKKLRKKQGSKEDMTRSEESISSGTSTARSVEEVEEENDQEMESFITEEVLGQQKKSPLHAKMDESKEGSIQGLEEMQVEREGSLNPSLNEENVKGQGEKKEESEEEDEKEEEEEEEKLEEEKEEKEAQEEQESLSVGEEEDKEEGLEEIYYEDMESFTISSGNTYFVFVPLEEEHCRKSHSTFSAMFINDTSSAKFIEQVTIPSRLILEIKKQLRAGFFEHLEKWFDQCSLNTRVTVATKINELDSELELHLHLHQPRAQQIEKDIHNVRAAELLLHQEQLDSHCAGVTETLKKKRLMFCQFQEEQNVRSKNFRLKIYDMEHIFLNATRSQKLVTLSNTLHQELLSYVDVTQVSLRSFRQYLEESLGKLRYSNIEFIKHCRLFSEGGNFSPKEINSLCSRLEKEAARIELVESVIMLNMEKLENEYLDQANDVINKFESKFHNLSVDLIFIEKIQRLLTNLQVKIKCQVAKSNSQTNGLNFSLQQLQNKIKTCQESRGEKTTVTTEELLSFVQTWKEKLSQRIQYLNCSLDRVSMTELVFTNTILKDQEEDSDILTSSEALEEEAKLDVVTPESFTQLSRVGKPLIEDPAVDVIRKLLQLPNTKWPTHHCDKDPSQTGRGAWACGSRGSSEAGAGGAVCSPPVLCSCPGPSSPKGFKRHRCQPENSGKKAVPSASATSAGSFTPHPKPNKMERKYRVLGDKPPPAAEDFKGIILTLLWESSENLLTVAEEFYRKEKRPVTRPDCMCDTFDQCAENISKKILEYQSQANKYHNSCLIELRIQIRRFEELLPQVCWLVMENFKEHHWKKFFTSVKEIRGQFEEQQKRLEKRKDKNAQKLHLNLGHPVHFQEMESLHLSEEERQEELDSMIRMNKEKLEECTRRNGQVFITNLATFTEKFLLQLDEVVTIDDVQVARMEPPKQKLSMLIRRKLAGLSLKEESEKPLIERGSRKWPGIKPTEVTIQNKILLQPTSSISTTKTTLGHLAAVEARDAVYLKYLASFEEELKRIQDDCTSQIKEAQRWKDSWKQSLHTIQGLYV

SEQ ID NO: 206362 - protein, 682 aa, Artificial Sequence
  derived and/or modified sequence
MWHGNHVQPGATHRPNQGLEMLQGLGIGMKAFHNFNYFLFFYNVLLGLGACLSRLLISCLLGMWLIARIDRTIMQSGYEGADMGFSAWIGMLYMDHYHINPVLVSFCHILITNHREKKLQQSTKYWCLNQSAESLRICAMRGGENRPPARVQSSSEELELRHQSLDAFPGRRLPGRGIQPAAKMSSVGKVTQVPNGKAYQQIFQAEVQLVHSLAATRKRAAERSVTLKSGRIPMMKKVETPEGEVMSPRQQKWMHSLPNDWIMENPVLHREKERAKREKARESENTIAAREVRGLMDTIVPEKISTSTFQRQAEHKRKSYESALASFQEEIAQVGKEMEPLIVDTGGLFLKKLTESDEEMNRLFLKVENDTNLEDYTIQALLELWDKVAGRLLLRKQEIKELDEALHSLEFSRTDKLKSVLKKYAEVIEKTSYLMRPEVYRLINEEAMVMNYALLGNRKALAQLFVNLMESTLQQELDSRHRWQGLVDTWKALKKEALLQSFSDLLPPSYSKTQLTEWHSSLNSLNKELDTYHVDCMMRIRLLYEKTWQECLMHVQNCKKQLLDWKAFTEEEAETLVNQFFFQMVGALQGKVEEDLELLDVRAGDCSTGELRNPSRLWQIRQSGRVHTSSSISRRWYNCGRHTRASCWCRSWSWRRGWSSTGRSTAWRARCRRPTSIGSWTN

SEQ ID NO: 206363 - protein, 903 aa, Artificial Sequence
  derived and/or modified sequence
MRGGENRPPARVQSSSEELELRHQSLDAFPGRRLPGRGIQPAAKMSSVGKVTQVPNGKAYQQIFQAEVQLVHSLAATRKRAAERSVTLKSGRIPMMKKVETPEGEVMSPRQQKWMHSLPNDWIMENPVLHREKERAKREKARESENTIAAREVRGLMDTIVPEKISTSTFQRQAEHKRKSYESALASFQEEIAQEMEPLIVDTGGLFLKKLTESDEEMNRLFLKVENDTNLEDYTIQALLELWDKVAGRLLLRKQEIKELDEALHSLEFSRTDKLKSVLKKYAEVIEKTSYLMRPEVYRLINEEAMVMNYALLGNRKALAQLFVNLMESTLQQELDSRHRWQGLVDTWKALKKEALLQSFSEFMASESIHTPPAVTKELEVMLKTQNVLQQRRLKHLCTICDLLPPSYSKTQLTEWHSSLNSLNKELDTYHVDCMMRIRLLYEKTWQECLMHVQNCKKQLLDWKAFTEEEAETLVNQFFFQMVGALQGKVEEDLELLDKSFETLADQTEWQSSHLFKYFQEVVQLWEAHQSELLVQELELEKRMEQHRQKHSLESQVQEAHLDRLLDQLRQQSDKETLAFHLEKVKDYLKNMKSRYECFHTLLTKEVMEYPAIMLKELNSYSSALSQYFFVREIFEQNLAGEVIFKFRQPEAHEKPSQKRVKKLRKKQGSKEDMTRSEESISSGTSTARSVEEVEEENDQEMESFITEEVLGQQKKSPLHAKMDESKEGSIQGLEEMQVEREGSLNPSLNEENVKGQGEKKEESEEEDEKEEEEEEEKLEEEKEEKEAQEEQESLSVGEEEDKEEGLEEIYYEDMESFTISSGNTYFVFVPLEEEHCRKSHSTFSAMFINDTSSAKFIEQVTIPSRLILEIKKHRAWWCVPVIPATQEAEAGESPEPRRRRLQ

SEQ ID NO: 206364 - protein, 899 aa, Artificial Sequence
  derived and/or modified sequence
GRPAAVVAGPALAALRESLRICAMRGGENRPPARVQSSSEELELRHQSLDAFPGRRLPGRGIQPAAKMSSVGKVTQVPNGKAYQQIFQAEVQLVHSLAATRKRAAERSVTLKSGRIPMMKKVETPEGEVMSPRQQKWMHSLPNDWIMENPVLHREKERAKREKARESENTIAAREVRGLMDTIVPEKISTSTFQRQAEHKRKSYESALASFQEEIAQVGKEMEPLIVDTGGLFLKKLTESDEEMNRLFLKVENDTNLEDYTIQALLELWDKVAGRLLLRKQEIKELDEALHSLEFSRTDKLKSVLKKYAEVIEKTSYLMRPEVYRLINEEAMVMNYALLGNRKALAQLFVNLMESTLQQELDSRHRWQGLVDTWKALKKEALLQSFSEFMASESIHTPPAVTKELEVMLKTQNVLQQRRLKHLCTICDLLPPSYSKTQLTEWHSSLNSLNKELDTYHVDCMMRIRLLYEKTWQECLMHVQNCKKQLLDWKAFTEEEAETLVNQFFFQMVGALQGKVEEDLELLDKSFETLADQTEWQSSHLFKYFQEVVQLWEAHQSELLVQELELEKRMEQHRQKHSLESQVQEAHLDRLLDQLRQQSDKETLAFHLEKVKDYLKNMKSRYECFHTLLTKEVMEYPAIMLKELNSYSSALSQYFFVREIFEQNLAGEVIFKFRQPEAHEKPSQKRVKKLRKKQGSKEDMTRSEESISSGTSTARSVEEVEEENDQEMESFITEEVLGQQKKSPLHAKMDESKEGSIQGLEEMQVEREGSLNPSLNEENVKGQGEKKEESEEEDEKEEEEEEEKLEEEKEEKEAQEEQESLSVGEEEDKEEGLEEIYYEDMESFTISSGNTYFVFVPLEEEHCRKSHSTFSAMFINDTSSAKFIEQVTIPSRLILEIKK

SEQ ID NO: 206365 - DNA, 6269 bp, Artificial Sequence
  derived and/or modified sequence
cagctctggcagaagcaacggtggcttcgagggatggcggcggctgcaacaggacctgcagcatcccagaggaactgactaaggctttggaacagaaaccagatgatgcacaatattatcgtcaaagagcttattgtcacattcttcttgggaattactgtggtgcagatgctaatttcagtgactggattaaaaggtgtcgaagctcagaatggctcggaatctgaggtgtttgtggagaattatgagaccctcgtgttttactggccctcgctgctgtgccttgccttcctgctgggccgcttcctgcatatgtttgtcaaggctctgagggtgcacctcggctgggagctccaggtggaagaaaaatctgtcctggaagtgcaccagggagagcacgtcaagcagctcctgaggataccccgccctcaagagaaaaaaaagtcttggttccaaaccaggatatatgagtgggatccctgctttcaatttccaagcagaatgattggaaccattgtgttggcattcatctgcctgtatcttttcattgtcatcgagttctgcgtgtttgtgtacgtgagagatgagttggatgtgcttgaaaacaacctggaaagctacatcaccttcacgaaccattcaggggtcctgaccccagtcatcctgcaggtgaaagagctgatcagtgtcaccaaaggagtctgggtggcgaccattttgcccgcgtatctcacgtgtgtgagctatctgttccacattttggtctgttacagaaagcacatgaagaggctatgggcaggagataaacattttcttcctttgaagttccataacccggcctcgtcggagagcatggtggccattgcaaggtactctggctggcaaatagcctatattctgtggggctacctcatcattcacatggtacagagcctatgtggcatggcaatcatgtacagcctggtgctacccatcgtccaaaccagggcctggaaatgctgcaagggctgggcattgggatgaaagcgttccacaacttcaactactttctgttcttctacaacgtgctgctgggcctgggtgcctgcctttccaggctgctcatcagttgcctcctcggcatgtggctgattgcccgcatcgacaggaccatcatgcagagtggctatgagggagcagacatggggttcagtgcatggattgggatgctctacatggaccattatcacatcaaccctgtgcttgtcagcttttgccacatcctgatcacaaatcacagggagaagaagctgcagcagagcaccaaatactggtgcctaaatcaatcggcagagtcccttcggatttgcgccatgcgcggcggggagaaccggcctcctgctcgagttcagagctcatctgaggaattggaattgagacaccaaagcctagacgcgtttcctggacgacggcttcccggcaggggcatccagccagcggccaagatgtcgtcagtggggaaggtgacccaggttccgaatgggaaagcctaccagcagatcttccaggctgaggtgcagctggtccactccctggcggccaccaggaagcgggctgcagagcgttctgtgaccctgaagagtggcaggatacccatgatgaagaaggtggagactcctgaaggggaggtgatgtctccccgacagcagaagtggatgcacagcctccccaacgactggatcatggaaaaccctgttctccacagggaaaaggaaagagccaagagggaaaaagcccgagagagtgagaacaccatcgctgcccgagaagtgcggggtctcatggatactatagttcctgagaagataagcaccagcacctttcaaaggcaagcagaacacaagaggaagagctacgagagcgctctggccagctttcaggaggagattgcgcaggtgggaaaggaaatggaacctctcatcgtggacacagggggactttttttgaagaagctgactgagtctgatgaagaaatgaaccgtctcttcctaaaggtggaaaatgacaccaaccttgaggactacaccatccaagccctgctggagctgtgggataaggtggccgggcggttactgctccggaagcaggagattaaggagctggatgaggccctgcactcgctggagttctcccgaaccgataaactaaaaagcgtgttgaagaaatatgcagaagtcatagagaaaacttcctacctcatgcggcccgaagtgtacaggctgataaatgaagaagccatggtcatgaactatgccctgctgggcaaccggaaggctctcgcccagctgtttgtcaacctgatggagtccaccctgcagcaggagctggacagccgccaccgctggcaaggcttggtggacacctggaaggctctcaagaaggaggccctgctgcagagtttcagtgagttcatggccagtgagagtatccatactcccccggctgtgacgaaggagctagaggtcatgctgaagacccagaacgtcctgcagcaaaggcggctgaagcatctctgcaccatctgtgacctcctgccccccagttacagcaaaactcagctgactgagtggcattcttccctcaactccctgaacaaggagctagacacctaccacgtggactgcatgatgcggatccgcctgctgtatgagaagacatggcaggagtgcctgatgcatgtgcagaattgtaagaagcagctgctggactggaaagccttcactgaggaggaggcagagaccctggtgaaccagttcttcttccagatggtgggagcactccagggcaaagtggaggaggacctggagctcttggacaaatccttcgagactctggcagatcagacagagtggcagagttcacacctcttcaagtatttccaggaggtggtacaactgtgggaggcacaccagagcgagctgttggtgcaggagctggagctggagaagaggatggagcagcaccggcagaagcacagcctggagagccaggtgcaggaggcccacctcgataggctcttggaccaactgaggcagcaaagtgacaaagaaacactggcgtttcacctggaaaaggtcaaagattatctgaagaacatgaaatccaggtatgaatgttttcacaccctcctgacaaaggaagtgatggagtacccagcgatcatgctgaaagaactcaactcctacagctctgccctcagccaatacttctttgtgcgtgaaatctttgaacagaacttggctggagaagtcattttcaaattcaggcaaccagaagcacatgaaaaaccctcccagaagagagtgaaaaaactgaggaagaagcaagggtctaaagaggacatgaccagaagtgaggaaagcataagtagtgggacaagtactgccaggtcagtagaagaggtggaagaagaaaacgatcaagaaatggagtccttcataactgaagaggtgctggggcagcagaaaaaatctccactgcatgctaagatggatgagtccaaagaaggctctattcagggactggaagaaatgcaggttgaaagagagggctccttaaacccatccctgaatgaggagaatgtgaagggtcaaggagaaaagaaggaggagtcagaggaggaagatgagaaggaggaagaggaggaggaggagaagctggaggaagagaaggaggagaaggaggcacaggaagagcaagagagtttatctgtgggtgaggaagaagacaaggaagagggtctagaggagatatactatgaggacatggagtccttcacaatctccagtggaaacacttattttgtctttgtacccctggaagaagagcattgtaggaagtcccattccaccttctcagccatgttcatcaacgacacttccagtgccaagttcatagaacaagtgacaattccatcgagactaattttagaaattaagaaacaattgttttcagagggaggcaacttttctcctaaagaaatcaattcactgtgttcccgactggagaaggaagctgcccggatagagttggttgaaagtgtcatcatgctcaacatggagaagttggagaatgagtacctggaccaggccaatgatgtcatcaacaagtttgaaagcaaattccataacctgtctgtggaccttattttcatagagaaaatccagcggttgctgacgaatctgcaagtgaaaatcaagtgccaggtggcaaaatccaattcgcaaacaaatggattaaatttctctctgcaacagcttcagaacaagataaaaacttgtcaagagtccaggggagagaaaaccacagtgaccacagaagaactcctcagcttcgtccaaacttggaaggaaaaactgagccagaggattcagtaccttaactgcagcctggacagggtgtccatgactgaactggtctttaccaacaccatcctgaaggaccaggaggaagacagtgacatcctgacatcttcagaagcccttgaagaggaggccaagctggacgtggtcacccctgagtccttcacccagctgagccgcgtggggaagcccctgattgaggacccagctgtggatgtgatcaggaagctcctgcaacttcccaacacaaaatggccaacccaccattgtgacaaagatccgtcccagacaggcttcaagcgacatcggtgccagccagaaaactctgggaagaaggctgtacccagtgccagtgctacctctgcaggcagcctccagaccacccacccacctttgtcccacagcttcacaccgcaccccaagcccaacaaaatggagagaaagtaccgggtgcttggggacaagcctccccctgctgccgaggattttaaggggatcatcttgaccctcctctgggagagcagtgagaacctgctgacagtcgcagaggagttctaccgtaaagaaaaacgcccagtcaccaggcctgactgcatgtgtgacacctttgaccagtgcgccgagaacattagcaaaaagatcctggagtatcagagccaggcaaataagtaccacaactcctgcctcatagaattacggatccagatcaggagatttgaggagctgctgccccaagtgtgttggctggtgatggagaatttcaaggaacaccactggaaaaagtttttcacctctgtgaaggagatccgaggacagttcgaggaacagcagaagcggctggagaaaagaaaggacaaaaatgcccagaagctccatctaaatcttggacaccccgtacatttccaagaaatggagtctctacacttaagtgaagaggaaaggcaggaagagctggacagcatgattaggatgaacaaggagaagctggaggaatgtaccagaaggaatggccaggttttcataaccaacttggccaccttcaccgagaagttcctactgcagttggatgaggtggtcaccattgacgatgtccaggttgcaaggatggagccccccaaacagaaattatcaatgctcatacgaaggaaactcgctgggctctccctgaaggaagagagtgagaaacccctgattgaacgtggaagcaggaagtggccagggatcaaacccaccgaagtcaccatccaaaacaagattcttctccagccaacatcatcgatttccaccaccaaaaccaccctgggccacctggcggccgtggaagcccgagatgctgtgtacctgaaatatttagcatcatttgaggaggagctaaagaggatccaggatgactgtacatctcagataaaggaggctcagcgctggaaggacagctggaagcagtccctgcacactatccaaggcctgtatgtgtgaccctccgccccaccatgaataaacactttcttatacagactccttccctgtccatctacctgcctacctactttccgtccatccctccctcccttcatccctccacccctgctctgtgccgggcactgtagctttaccagcgaacaggacacagcatggtccctgcccacgtggagccctcttcccatgaggaaggcaagcatgaaaggggaattccacgtggttagcagggagggtgagtaccaggaatcagtcacttcaaataggcaccagagcttcaaaggacatcacctccaaacagcatgctgggcagggcacgtcatcttgaaaaatgaaataaaggtcatgggaaaatgatattttaatttaacagaataaacaagtatgggttat

SEQ ID NO: 206366 - DNA, 6851 bp, Artificial Sequence
  derived and/or modified sequence
cagctctggcagaagcaacggtggcttcgagggatggcggcggctgcaacaggacctgcagcatcccagaggaactgactaaggctttggaacagaaaccagatgatgcacaatattatcgtcaaagagcttattgtcacattcttcttgggaattactgtggtgcagatgctaatttcagtgactggattaaaaggtgtcgaagctcagaatggctcggaatctgaggtgtttgtggagaattatgagaccctcgtgttttactggccctcgctgctgtgccttgccttcctgctgggccgcttcctgcatatgtttgtcaaggctctgagggtgcacctcggctgggagctccaggtggaagaaaaatctgtcctggaagtgcaccagggagagcacgtcaagcagctcctgaggataccccgccctcaagagaaaaaaaagtcttggttccaaaccaggatatatgagtgggatccctgctttcaatttccaagcagaatgattggaaccattgtgttggcattcatctgcctgtatcttttcattgtcatcgagttctgcgtgtttgtgtacgtgagagatgagttggatgtgcttgaaaacaacctggaaagctacatcaccttcacgaaccattcaggggtcctgaccccagtcatcctgcaggtgaaagagctgatcagtgtcaccaaaggagtctgggtggcgaccattttgcccgcgtatctcacgtgtgtgagctatctgttccacattttggtctgttacagaaagcacatgaagaggctatgggcaggagataaacattttcttcctttgaagttccataacccggcctcgtcggagagcatggtggccattgcaaggtactctggctggcaaatagcctatattctgtggggctacctcatcattcacatggtacagagcctatgtggcatggcaatcatgtacagcctggtgctacccatcgtccaaaccagggcctggaaatgctgcaagggctgggcattgggatgaaagcgttccacaacttcaactactttctgttcttctacaacgtgctgctgggcctgggtgcctgcctttccaggctgctcatcagttgcctcctcggcatgtggctgattgcccgcatcgacaggaccatcatgcagagtggctatgagggagcagacatggggttcagtgcatggattgggatgctctacatggaccattatcacatcaaccctgtgcttgtcagcttttgccacatcctgatcacaaatcacagggagaagaagctgcagcagagcaccaaatactggtgcctaaatcaatcggcagagtcccttcggatttgcgccatgcgcggcggggagaaccggcctcctgctcgagttcagagctcatctgaggaattggaattgagacaccaaagcctagacgcgtttcctggacgacggcttcccggcaggggcatccagccagcggccaagatgtcgtcagtggggaaggtgacccaggttccgaatgggaaagcctaccagcagatcttccaggctgaggtgcagctggtccactccctggcggccaccaggaagcgggctgcagagcgttctgtgaccctgaagagtggcaggatacccatgatgaagaaggtggagactcctgaaggggaggtgatgtctccccgacagcagaagtggatgcacagcctccccaacgactggatcatggaaaaccctgttctccacagggaaaaggaaagagccaagagggaaaaagcccgagagagtgagaacaccatcgctgcccgagaagtgcggggtctcatggatactatagttcctgagaagataagcaccagcacctttcaaaggcaagcagaacacaagaggaagagctacgagagcgctctggccagctttcaggaggagattgcgcaggtgggaaaggaaatggaacctctcatcgtggacacagggggactttttttgaagaagctgactgagtctgatgaagaaatgaaccgtctcttcctaaaggtggaaaatgacaccaaccttgaggactacaccatccaagccctgctggagctgtgggataaggtggccgggcggttactgctccggaagcaggagattaaggagctggatgaggccctgcactcgctggagttctcccgaaccgataaactaaaaagcgtgttgaagaaatatgcagaagtcatagagaaaacttcctacctcatgcggcccgaagtgtacaggctgataaatgaagaagccatggtcatgaactatgccctgctgggcaaccggaaggctctcgcccagctgtttgtcaacctgatggagtccaccctgcagcaggagctggacagccgccaccgctggcaaggcttggtggacacctggaaggctctcaagaaggaggccctgctgcagagtttcagtgagttcatggccagtgagagtatccatactcccccggctgtgacgaaggagctagaggtcatgctgaagacccagaacgtcctgcagcaaaggcggctgaagcatctctgcaccatctgtgacctcctgccccccagttacagcaaaactcagctgactgagtggcattcttccctcaactccctgaacaaggagctagacacctaccacgtggactgcatgatgcggatccgcctgctgtatgagaagacatggcaggagtgcctgatgcatgtgcagaattgtaagaagcagctgctggactggaaagccttcactgaggaggaggcagagaccctggtgaaccagttcttcttccagatggtgggagcactccagggcaaagtggaggaggacctggagctcttggacaaatccttcgagactctggcagatcagacagagtggcagagttcacacctcttcaagtatttccaggaggtggtacaactgtgggaggcacaccagagcgagctgttggtgcaggagctggagctggagaagaggatggagcagcaccggcagaagcacagcctggagagccaggtgcaggaggcccacctcgataggctcttggaccaactgaggcagcaaagtgacaaagaaacactggcgtttcacctggaaaaggtcaaagattatctgaagaacatgaaatccaggtatgaatgttttcacaccctcctgacaaaggaagtgatggagtacccagcgatcatgctgaaagaactcaactcctacagctctgccctcagccaatacttctttgtgcgtgaaatctttgaacagaacttggctggagaagtcattttcaaattcaggcaaccagaagcacatgaaaaaccctcccagaagagagtgaaaaaactgaggaagaagcaagggtctaaagaggacatgaccagaagtgaggaaagcataagtagtgggacaagtactgccaggtcagtagaagaggtggaagaagaaaacgatcaagaaatggagtccttcataactgaagaggtgctggggcagcagaaaaaatctccactgcatgctaagatggatgagtccaaagaaggctctattcagggactggaagaaatgcaggttgaaagagagggctccttaaacccatccctgaatgaggagaatgtgaagggtcaaggagaaaagaaggaggagtcagaggaggaagatgagaaggaggaagaggaggaggaggagaagctggaggaagagaaggaggagaaggaggcacaggaagagcaagagagtttatctgtgggtgaggaagaagacaaggaagagggtctagaggagatatactatgaggacatggagtccttcacaatctccagtggaaacacttattttgtctttgtacccctggaagaagagcattgtaggaagtcccattccaccttctcagccatgttcatcaacgacacttccagtgccaagttcatagaacaagtgacaattccatcgagactaattttagaaattaagaaacaacttcgagctggcttcttcgagcaccttgagaagtggtttgaccagtgttccctcaacacccgggtcaccgtggccaccaaaatcaatgagctggattcagaactggagctgcatctgcacctgcaccagccaagagcccagcagattgaaaaagacatccacaacgtcagggcagccgagcttttgcttcatcaagagcagttggacagccactgtgctggggtgaccgagacgctgaagaagaagcggctgatgttctgccagttccaagaagagcaaaacgtgaggagcaaaaacttccgccttaagatctatgacatggagcacatcttcttgaatgccaccaggagccaaaagctggtcactctcagcaacacactgcaccaggagttgcttagctatgttgatgtcacccaggtgtccctgcgcagcttccggcagtacttggaggagagtctgggcaaactccgctactcaaatattgagttcatcaaacactgcagattgttttcagagggaggcaacttttctcctaaagaaatcaattcactgtgttcccgactggagaaggaagctgcccggatagagttggttgaaagtgtcatcatgctcaacatggagaagttggagaatgagtacctggaccaggccaatgatgtcatcaacaagtttgaaagcaaattccataacctgtctgtggaccttattttcatagagaaaatccagcggttgctgacgaatctgcaagtgaaaatcaagtgccaggtggcaaaatccaattcgcaaacaaatggattaaatttctctctgcaacagcttcagaacaagataaaaacttgtcaagagtccaggggagagaaaaccacagtgaccacagaagaactcctcagcttcgtccaaacttggaaggaaaaactgagccagaggattcagtaccttaactgcagcctggacagggtgtccatgactgaactggtctttaccaacaccatcctgaaggaccaggaggaagacagtgacatcctgacatcttcagaagcccttgaagaggaggccaagctggacgtggtcacccctgagtccttcacccagctgagccgcgtggggaagcccctgattgaggacccagctgtggatgtgatcaggaagctcctgcaacttcccaacacaaaatggccaacccaccattgtgacaaagatccgtcccagacaggtagaggcgcatgggcctgtgggtctcggggcagcagtgaggcaggggctggtggtgctgtgtgctcacctcctgtcctctgctcctgtcctgggccctcgtcacccaaaggcttcaagcgacatcggtgccagccagaaaactctgggaagaaggctgtacccagtgccagtgctacctctgcaggcagcttcacaccgcaccccaagcccaacaaaatggagagaaagtaccgggtgcttggggacaagcctccccctgctgccgaggattttaaggggatcatcttgaccctcctctgggagagcagtgagaacctgctgacagtcgcagaggagttctaccgtaaagaaaaacgcccagtcaccaggcctgactgcatgtgtgacacctttgaccagtgcgccgagaacattagcaaaaagatcctggagtatcagagccaggcaaataagtaccacaactcctgcctcatagaattacggatccagatcaggagatttgaggagctgctgccccaagtgtgttggctggtgatggagaatttcaaggaacaccactggaaaaagtttttcacctctgtgaaggagatccgaggacagttcgaggaacagcagaagcggctggagaaaagaaaggacaaaaatgcccagaagctccatctaaatcttggacaccccgtacatttccaagaaatggagtctctacacttaagtgaagaggaaaggcaggaagagctggacagcatgattaggatgaacaaggagaagctggaggaatgtaccagaaggaatggccaggttttcataaccaacttggccaccttcaccgagaagttcctactgcagttggatgaggtggtcaccattgacgatgtccaggttgcaaggatggagccccccaaacagaaattatcaatgctcatacgaaggaaactcgctgggctctccctgaaggaagagagtgagaaacccctgattgaacgtggaagcaggaagtggccagggatcaaacccaccgaagtcaccatccaaaacaagattcttctccagccaacatcatcgatttccaccaccaaaaccaccctgggccacctggcggccgtggaagcccgagatgctgtgtacctgaaatatttagcatcatttgaggaggagctaaagaggatccaggatgactgtacatctcagataaaggaggctcagcgctggaaggacagctggaagcagtccctgcacactatccaaggcctgtatgtgtgaccctccgccccaccatgaataaacactttcttatacagactccttccctgtccatctacctgcctacctactttccgtccatccctccctcccttcatccctccacccctgctctgtgccgggcactgtagctttaccagcgaacaggacacagcatggtccctgcccacgtggagccctcttcccatgaggaaggcaagcatgaaaggggaattccacgtggttagcagggagggtgagtaccaggaatcagtcacttcaaataggcaccagagcttcaaaggacatcacctccaaacagcatgctgggcagggcacgtcatcttgaaaaatgaaataaaggtcatgggaaaatgatattttaatttaacagaataaacaagtatgggttat

SEQ ID NO: 206367 - DNA, 6184 bp, Artificial Sequence
  derived and/or modified sequence
cagctctggcagaagcaacggtggcttcgagggatggcggcggctgcaacaggacctgcagcatcccagaggaactgactaaggctttggaacagaaaccagatgatgcacaatattatcgtcaaagagcttattgtcacattcttcttgggaattactgtggtgcagatgctaatttcagtgactggattaaaaggtgtcgaagctcagaatggctcggaatctgaggtgtttgtggagaattatgagaccctcgtgttttactggccctcgctgctgtgccttgccttcctgctgggccgcttcctgcatatgtttgtcaaggctctgagggtgcacctcggctgggagctccaggtggaagaaaaatctgtcctggaagtgcaccagggagagcacgtcaagcagctcctgaggataccccgccctcaagagaaaaaaaagtcttggttccaaaccaggatatatgagtgggatccctgctttcaatttccaagcagaatgattggaaccattgtgttggcattcatctgcctgtatcttttcattgtcatcgagttctgcgtgtttgtgtacgtgagagatgagttggatgtgcttgaaaacaacctggaaagctacatcaccttcacgaaccattcaggggtcctgaccccagtcatcctgcaggtgaaagagctgatcagtgtcaccaaaggagtctgggtggcgaccattttgcccgcgtatctcacgtgtgtgagctatctgttccacattttggtctgttacagaaagcacatgaagaggctatgggcaggagataaacattttcttcctttgaagttccataacccggcctcgtcggagagcatggtggccattgcaaggtactctggctggcaaatagcctatattctgtggggctacctcatcattcacatggtacagagcctatgtggcatggcaatcatgtacagcctggtgctacccatcgtccaaaccagggcctggaaatgctgcaagggctgggcattgggatgaaagcgttccacaacttcaactactttctgttcttctacaacgtgctgctgggcctgggtgcctgcctttccaggctgctcatcagttgcctcctcggcatgtggctgattgcccgcatcgacaggaccatcatgcagagtggctatgagggagcagacatggggttcagtgcatggattgggatgctctacatggaccattatcacatcaaccctgtgcttgtcagcttttgccacatcctgatcacaaatcacagggagaagaagctgcagcagagcaccaaatactggtgcctaaatcaatcggcagagtcccttcggatttgcgccatgcgcggcggggagaaccggcctcctgctcgagttcagagctcatctgaggaattggaattgagacaccaaagcctagacgcgtttcctggacgacggcttcccggcaggggcatccagccagcggccaagatgtcgtcagtggggaaggtgacccaggttccgaatgggaaagcctaccagcagatcttccaggctgaggtgcagctggtccactccctggcggccaccaggaagcgggctgcagagcgttctgtgaccctgaagagtggcaggatacccatgatgaagaaggtggagactcctgaaggggaggtgatgtctccccgacagcagaagtggatgcacagcctccccaacgactggatcatggaaaaccctgttctccacagggaaaaggaaagagccaagagggaaaaagcccgagagagtgagaacaccatcgctgcccgagaagtgcggggtctcatggatactatagttcctgagaagataagcaccagcacctttcaaaggcaagcagaacacaagaggaagagctacgagagcgctctggccagctttcaggaggagattgcgcaggtgggaaaggaaatggaacctctcatcgtggacacagggggactttttttgaagaagctgactgagtctgatgaagaaatgaaccgtctcttcctaaaggtggaaaatgacaccaaccttgaggactacaccatccaagccctgctggagctgtgggataaggtggccgggcggttactgctccggaagcaggagattaaggagctggatgaggccctgcactcgctggagttctcccgaaccgataaactaaaaagcgtgttgaagaaatatgcagaagtcatagagaaaacttcctacctcatgcggcccgaagtgtacaggctgataaatgaagaagccatggtcatgaactatgccctgctgggcaaccggaaggctctcgcccagctgtttgtcaacctgatggagtccaccctgcagcaggagctggacagccgccaccgctggcaaggcttggtggacacctggaaggctctcaagaaggaggccctgctgcagagtttcagtgacctcctgccccccagttacagcaaaactcagctgactgagtggcattcttccctcaactccctgaacaaggagctagacacctaccacgtggactgcatgatgcggatccgcctgctgtatgagaagacatggcaggagtgcctgatgcatgtgcagaattgtaagaagcagctgctggactggaaagccttcactgaggaggaggcagagaccctggtgaaccagttcttcttccagatggtgggagcactccagggcaaagtggaggaggacctggagctcttggacgtgcgtgctggggactgttccactggggagctgagaaatccttcgagactctggcagatcagacagagtggcagagttcacacctcttcaagtatttccaggaggtggtacaactgtgggaggcacaccagagcgagctgttggtgcaggagctggagctggagaagaggatggagcagcaccggcagaagcacagcctggagagccaggtgcaggaggcccacctcgataggctcttggaccaactgaggcagcaaagtgacaaagaaacactggcgtttcacctggaaaaggtcaaagattatctgaagaacatgaaatccaggtatgaatgttttcacaccctcctgacaaaggaagtgatggagtacccagcgatcatgctgaaagaactcaactcctacagctctgccctcagccaatacttctttgtgcgtgaaatctttgaacagaacttggctggagaagtcattttcaaattcaggcaaccagaagcacatgaaaaaccctcccagaagagagtgaaaaaactgaggaagaagcaagggtctaaagaggacatgaccagaagtgaggaaagcataagtagtgggacaagtactgccaggtcagtagaagaggtggaagaagaaaacgatcaagaaatggagtccttcataactgaagaggtgctggggcagcagaaaaaatctccactgcatgctaagatggatgagtccaaagaaggctctattcagggactggaagaaatgcaggttgaaagagagggctccttaaacccatccctgaatgaggagaatgtgaagggtcaaggagaaaagaaggaggagtcagaggaggaagatgagaaggaggaagaggaggaggaggagaagctggaggaagagaaggaggagaaggaggcacaggaagagcaagagagtttatctgtgggtgaggaagaagacaaggaagagggtctagaggagatatactatgaggacatggagtccttcacaatctccagtggaaacacttattttgtctttgtacccctggaagaagagcattgtaggaagtcccattccaccttctcagccatgttcatcaacgacacttccagtgccaagttcatagaacaagtgacaattccatcgagactaattttagaaattaagaaacaattgttttcagagggaggcaacttttctcctaaagaaatcaattcactgtgttcccgactggagaaggaagctgcccggatagagttggttgaaagtgtcatcatgctcaacatggagaagttggagaatgagtacctggaccaggccaatgatgtcatcaacaagtttgaaagcaaattccataacctgtctgtggaccttattttcatagagaaaatccagcggttgctgacgaatctgcaagtgaaaatcaagtgccaggtggcaaaatccaattcgcaaacaaatggattaaatttctctctgcaacagcttcagaacaagataaaaacttgtcaagagtccaggggagagaaaaccacagtgaccacagaagaactcctcagcttcgtccaaacttggaaggaaaaactgagccagaggattcagtaccttaactgcagcctggacagggtgtccatgactgaactggtctttaccaacaccatcctgaaggaccaggaggaagacagtgacatcctgacatcttcagaagcccttgaagaggaggccaagctggacgtggtcacccctgagtccttcacccagctgagccgcgtggggaagcccctgattgaggacccagctgtggatgtgatcaggaagctcctgcaacttcccaacacaaaatggccaacccaccattgtgacaaagatccgtcccagacaggcttcaagcgacatcggtgccagccagaaaactctgggaagaaggctgtacccagtgccagtgctacctctgcaggcagcctccagaccacccacccacctttgtcccacagcttcacaccgcaccccaagcccaacaaaatggagagaaagtaccgggtgcttggggacaagcctccccctgctgccgaggattttaaggggatcatcttgaccctcctctgggagagcagtgagaacctgctgacagtcgcagaggagttctaccgtaaagaaaaacgcccagtcaccaggcctgactgcatgtgtgacacctttgaccagtgcgccgagaacattagcaaaaagatcctggagtatcagagccaggcaaataagtaccacaactcctgcctcatagaattacggatccagatcaggagatttgaggagctgctgccccaagtgtgttggctggtgatggagaatttcaaggaacaccactggaaaaagtttttcacctctgtgaaggagatccgaggacagttcgaggaacagcagaagcggctggagaaaagaaaggacaaaaatgcccagaagctccatctaaatcttggacaccccgtacatttccaagaaatggagtctctacacttaagtgaagaggaaaggcaggaagagctggacagcatgattaggatgaacaaggagaagctggaggaatgtaccagaaggaatggccaggttttcataaccaacttggccaccttcaccgagaagttcctactgcagttggatgaggtggtcaccattgacgatgtccaggttgcaaggatggagccccccaaacagaaattatcaatgctcatacgaaggaaactcgctgggctctccctgaaggaagagagtgagaaacccctgattgaacgtggaagcaggaagtggccagggatcaaacccaccgaagtcaccatccaaaacaagattcttctccagccaacatcatcgatttccaccaccaaaaccaccctgggccacctggcggccgtggaagcccgagatgctgtgtacctgaaatatttagcatcatttgaggaggagctaaagaggatccaggatgactgtacatctcagataaaggaggctcagcgctggaaggacagctggaagcagtccctgcacactatccaaggcctgtatgtgtgaccctccgccccaccatgaataaacactttcttatacagactccttccctgtccatctacctgcctacctactttccgtccatccctccctcccttcatccctccacccctgctctgtgccgggcactgtagctttaccagcgaacaggacacagcatggtccctgcccacgtggagccctcttcccatgaggaaggcaagcatgaaaggggaattccacgtggttagcagggagggtgagtaccaggaatcagtcacttcaaataggcaccagagcttcaaaggacatcacctccaaacagcatgctgggcagggcacgtcatcttgaaaaatgaaataaaggtcatgggaaaatgatattttaatttaacagaataaacaagtatgggttat

SEQ ID NO: 206368 - DNA, 4064 bp, Artificial Sequence
  derived and/or modified sequence
cagctctggcagaagcaacggtggcttcgagggatggcggcggctgcaacaggacctgcagcatcccagaggaactgactaaggctttggaacagaaaccagatgatgcacaatattatcgtcaaagagcttattgtcacattcttcttgggaattactgtggtgcagatgctaatttcagtgactggattaaaaggtgtcgaagctcagaatggctcggaatctgaggtgtttgtggagaattatgagaccctcgtgttttactggccctcgctgctgtgccttgccttcctgctgggccgcttcctgcatatgtttgtcaaggctctgagggtgcacctcggctgggagctccaggtggaagaaaaatctgtcctggaagtgcaccagggagagcacgtcaagcagctcctgaggataccccgccctcaagagaaaaaaaagtcttggttccaaaccaggatatatgagtgggatccctgctttcaatttccaagcagaatgattggaaccattgtgttggcattcatctgcctgtatcttttcattgtcatcgagttctgcgtgtttgtgtacgtgagagatgagttggatgtgcttgaaaacaacctggaaagctacatcaccttcacgaaccattcaggggtcctgaccccagtcatcctgcaggtgaaagagctgatcagtgtcaccaaaggagtctgggtggcgaccattttgcccgcgtatctcacgtgtgtgagctatctgttccacattttggtctgttacagaaagcacatgaagaggctatgggcaggagataaacattttcttcctttgaagttccataacccggcctcgtcggagagcatggtggccattgcaaggtactctggctggcaaatagcctatattctgtggggctacctcatcattcacatggtacagagcctatgtggcatggcaatcatgtacagcctggtgctacccatcgtccaaaccagggcctggaaatgctgcaagggctgggcattgggatgaaagcgttccacaacttcaactactttctgttcttctacaacgtgctgctgggcctgggtgcctgcctttccaggctgctcatcagttgcctcctcggcatgtggctgattgcccgcatcgacaggaccatcatgcagagtggctatgagggagcagacatggggttcagtgcatggattgggatgctctacatggaccattatcacatcaaccctgtgcttgtcagcttttgccacatcctgatcacaaatcacagggagaagaagctgcagcagagcaccaaatactggtgcctaaatcaatcggcagagtcccttcggatttgcgccatgcgcggcggggagaaccggcctcctgctcgagttcagagctcatctgaggaattggaattgagacaccaaagcctagacgcgtttcctggacgacggcttcccggcaggggcatccagccagcggccaagatgtcgtcagtggggaaggtgacccaggttccgaatgggaaagcctaccagcagatcttccaggctgaggtgcagctggtccactccctggcggccaccaggaagcgggctgcagagcgttctgtgaccctgaagagtggcaggatacccatgatgaagaaggtggagactcctgaaggggaggtgatgtctccccgacagcagaagtggatgcacagcctccccaacgactggatcatggaaaaccctgttctccacagggaaaaggaaagagccaagagggaaaaagcccgagagagtgagaacaccatcgctgcccgagaagtgcggggtctcatggatactatagttcctgagaagataagcaccagcacctttcaaaggcaagcagaacacaagaggaagagctacgagagcgctctggccagctttcaggaggagattgcgcaggaaatggaacctctcatcgtggacacagggggactttttttgaagaagctgactgagtctgatgaagaaatgaaccgtctcttcctaaaggtggaaaatgacaccaaccttgaggactacaccatccaagccctgctggagctgtgggataaggtggccgggcggttactgctccggaagcaggagattaaggagctggatgaggccctgcactcgctggagttctcccgaaccgataaactaaaaagcgtgttgaagaaatatgcagaagtcatagagaaaacttcctacctcatgcggcccgaagtgtacaggctgataaatgaagaagccatggtcatgaactatgccctgctgggcaaccggaaggctctcgcccagctgtttgtcaacctgatggagtccaccctgcagcaggagctggacagccgccaccgctggcaaggcttggtggacacctggaaggctctcaagaaggaggccctgctgcagagtttcagtgagttcatggccagtgagagtatccatactcccccggctgtgacgaaggagctagaggtcatgctgaagacccagaacgtcctgcagcaaaggcggctgaagcatctctgcaccatctgtgacctcctgccccccagttacagcaaaactcagctgactgagtggcattcttccctcaactccctgaacaaggagctagacacctaccacgtggactgcatgatgcggatccgcctgctgtatgagaagacatggcaggagtgcctgatgcatgtgcagaattgtaagaagcagctgctggactggaaagccttcactgaggaggaggcagagaccctggtgaaccagttcttcttccagatggtgggagcactccagggcaaagtggaggaggacctggagctcttggacaaatccttcgagactctggcagatcagacagagtggcagagttcacacctcttcaagtatttccaggaggtggtacaactgtgggaggcacaccagagcgagctgttggtgcaggagctggagctggagaagaggatggagcagcaccggcagaagcacagcctggagagccaggtgcaggaggcccacctcgataggctcttggaccaactgaggcagcaaagtgacaaagaaacactggcgtttcacctggaaaaggtcaaagattatctgaagaacatgaaatccaggtatgaatgttttcacaccctcctgacaaaggaagtgatggagtacccagcgatcatgctgaaagaactcaactcctacagctctgccctcagccaatacttctttgtgcgtgaaatctttgaacagaacttggctggagaagtcattttcaaattcaggcaaccagaagcacatgaaaaaccctcccagaagagagtgaaaaaactgaggaagaagcaagggtctaaagaggacatgaccagaagtgaggaaagcataagtagtgggacaagtactgccaggtcagtagaagaggtggaagaagaaaacgatcaagaaatggagtccttcataactgaagaggtgctggggcagcagaaaaaatctccactgcatgctaagatggatgagtccaaagaaggctctattcagggactggaagaaatgcaggttgaaagagagggctccttaaacccatccctgaatgaggagaatgtgaagggtcaaggagaaaagaaggaggagtcagaggaggaagatgagaaggaggaagaggaggaggaggagaagctggaggaagagaaggaggagaaggaggcacaggaagagcaagagagtttatctgtgggtgaggaagaagacaaggaagagggtctagaggagatatactatgaggacatggagtccttcacaatctccagtggaaacacttattttgtctttgtacccctggaagaagagcattgtaggaagtcccattccaccttctcagccatgttcatcaacgacacttccagtgccaagttcatagaacaagtgacaattccatcgagactaattttagaaattaagaaacaccgggcatggtggtgtgtgcctgtaattccagctactcaagaggctgaagcaggagaatcgcctgaacccaggaggcggaggttacagtga

SEQ ID NO: 206369 - DNA, 5242 bp, Artificial Sequence
  derived and/or modified sequence
gagcgccgttaacttttccccgaagagcatggcagagtgaagcacaagcaataatcctgtattattcgcgttcccagagtcccttcggatttgcgccatgcgcggcggggagaaccggcctcctgctcgagttcagagctcatctgaggaattggaattgagacaccaaagcctagacgcgtttcctggacgacggcttcccggcaggggcatccagccagcggccaagatgtcgtcagtggggaaggtgacccaggttccgaatgggaaagcctaccagcagatcttccaggctgaggtgcagctggtccactccctggcggccaccaggaagcgggctgcagagcgttctgtgaccctgaagagtggcaggatacccatgatgaagaaggtggagactcctgaaggggaggtgatgtctccccgacagcagaagtggatgcacagcctccccaacgactggatcatggaaaaccctgttctccacagggaaaaggaaagagccaagagggaaaaagcccgagagagtgagaacaccatcgctgcccgagaagtgcggggtctcatggatactatagttcctgagaagataagcaccagcacctttcaaaggcaagcagaacacaagaggaagagctacgagagcgctctggccagctttcaggaggagattgcgcaggtgggaaaggaaatggaacctctcatcgtggacacagggggactttttttgaagaagctgactgagtctgatgaagaaatgaaccgtctcttcctaaaggtggaaaatgacaccaaccttgaggactacaccatccaagccctgctggagctgtgggataaggtggccgggcggttactgctccggaagcaggagattaaggagctggatgaggccctgcactcgctggagttctcccgaaccgataaactaaaaagcgtgttgaagaaatatgcagaagtcatagagaaaacttcctacctcatgcggcccgaagtgtacaggctgataaatgaagaagccatggtcatgaactatgccctgctgggcaaccggaaggctctcgcccagctgtttgtcaacctgatggagtccaccctgcagcaggagctggacagccgccaccgctggcaaggcttggtggacacctggaaggctctcaagaaggaggccctgctgcagagtttcagtgagttcatggccagtgagagtatccatactcccccggctgtgacgaaggagctagaggtcatgctgaagacccagaacgtcctgcagcaaaggcggctgaagcatctctgcaccatctgtgacctcctgccccccagttacagcaaaactcagctgactgagtggcattcttccctcaactccctgaacaaggagctagacacctaccacgtggactgcatgatgcggatccgcctgctgtatgagaagacatggcaggagtgcctgatgcatgtgcagaattgtaagaagcagctgctggactggaaagccttcactgaggaggaggcagagaccctggtgaaccagttcttcttccagatggtgggagcactccagggcaaagtggaggaggacctggagctcttggacaaatccttcgagactctggcagatcagacagagtggcagagttcacacctcttcaagtatttccaggaggtggtacaactgtgggaggcacaccagagcgagctgttggtgcaggagctggagctggagaagaggatggagcagcaccggcagaagcacagcctggagagccaggtgcaggaggcccacctcgataggctcttggaccaactgaggcagcaaagtgacaaagaaacactggcgtttcacctggaaaaggtcaaagattatctgaagaacatgaaatccaggtatgaatgttttcacaccctcctgacaaaggaagtgatggagtacccagcgatcatgctgaaagaactcaactcctacagctctgccctcagccaatacttctttgtgcgtgaaatctttgaacagaacttggctggagaagtcattttcaaattcaggcaaccagaagcacatgaaaaaccctcccagaagagagtgaaaaaactgaggaagaagcaagggtctaaagaggacatgaccagaagtgaggaaagcataagtagtgggacaagtactgccaggtcagtagaagaggtggaagaagaaaacgatcaagaaatggagtccttcataactgaagaggtgctggggcagcagaaaaaatctccactgcatgctaagatggatgagtccaaagaaggctctattcagggactggaagaaatgcaggttgaaagagagggctccttaaacccatccctgaatgaggagaatgtgaagggtcaaggagaaaagaaggaggagtcagaggaggaagatgagaaggaggaagaggaggaggaggagaagctggaggaagagaaggaggagaaggaggcacaggaagagcaagagagtttatctgtgggtgaggaagaagacaaggaagagggtctagaggagatatactatgaggacatggagtccttcacaatctccagtggaaacacttattttgtctttgtacccctggaagaagagcattgtaggaagtcccattccaccttctcagccatgttcatcaacgacacttccagtgccaagttcatagaacaagtgacaattccatcgagactaattttagaaattaagaaacaacttcgagctggcttcttcgagcaccttgagaagtggtttgaccagtgttccctcaacacccgggtcaccgtggccaccaaaatcaatgagctggattcagaactggagctgcatctgcacctgcaccagccaagagcccagcagattgaaaaagacatccacaacgtcagggcagccgagcttttgcttcatcaagagcagttggacagccactgtgctggggtgaccgagacgctgaagaagaagcggctgatgttctgccagttccaagaagagcaaaacgtgaggagcaaaaacttccgccttaagatctatgacatggagcacatcttcttgaatgccaccaggagccaaaagctggtcactctcagcaacacactgcaccaggagttgcttagctatgttgatgtcacccaggtgtccctgcgcagcttccggcagtacttggaggagagtctgggcaaactccgctactcaaatattgagttcatcaaacactgcagattgttttcagagggaggcaacttttctcctaaagaaatcaattcactgtgttcccgactggagaaggaagctgcccggatagagttggttgaaagtgtcatcatgctcaacatggagaagttggagaatgagtacctggaccaggccaatgatgtcatcaacaagtttgaaagcaaattccataacctgtctgtggaccttattttcatagagaaaatccagcggttgctgacgaatctgcaagtgaaaatcaagtgccaggtggcaaaatccaattcgcaaacaaatggattaaatttctctctgcaacagcttcagaacaagataaaaacttgtcaagagtccaggggagagaaaaccacagtgaccacagaagaactcctcagcttcgtccaaacttggaaggaaaaactgagccagaggattcagtaccttaactgcagcctggacagggtgtccatgactgaactggtctttaccaacaccatcctgaaggaccaggaggaagacagtgacatcctgacatcttcagaagcccttgaagaggaggccaagctggacgtggtcacccctgagtccttcacccagctgagccgcgtggggaagcccctgattgaggacccagctgtggatgtgatcaggaagctcctgcaacttcccaacacaaaatggccaacccaccattgtgacaaagatccgtcccagacaggtagaggcgcatgggcctgtgggtctcggggcagcagtgaggcaggggctggtggtgctgtgtgctcacctcctgtcctctgctcctgtcctgggccctcgtcacccaaaggcttcaagcgacatcggtgccagccagaaaactctgggaagaaggctgtacccagtgccagtgctacctctgcaggcagcttcacaccgcaccccaagcccaacaaaatggagagaaagtaccgggtgcttggggacaagcctccccctgctgccgaggattttaaggggatcatcttgaccctcctctgggagagcagtgagaacctgctgacagtcgcagaggagttctaccgtaaagaaaaacgcccagtcaccaggcctgactgcatgtgtgacacctttgaccagtgcgccgagaacattagcaaaaagatcctggagtatcagagccaggcaaataagtaccacaactcctgcctcatagaattacggatccagatcaggagatttgaggagctgctgccccaagtgtgttggctggtgatggagaatttcaaggaacaccactggaaaaagtttttcacctctgtgaaggagatccgaggacagttcgaggaacagcagaagcggctggagaaaagaaaggacaaaaatgcccagaagctccatctaaatcttggacaccccgtacatttccaagaaatggagtctctacacttaagtgaagaggaaaggcaggaagagctggacagcatgattaggatgaacaaggagaagctggaggaatgtaccagaaggaatggccaggttttcataaccaacttggccaccttcaccgagaagttcctactgcagttggatgaggtggtcaccattgacgatgtccaggttgcaaggatggagccccccaaacagaaattatcaatgctcatacgaaggaaactcgctgggctctccctgaaggaagagagtgagaaacccctgattgaacgtggaagcaggaagtggccagggatcaaacccaccgaagtcaccatccaaaacaagattcttctccagccaacatcatcgatttccaccaccaaaaccaccctgggccacctggcggccgtggaagcccgagatgctgtgtacctgaaatatttagcatcatttgaggaggagctaaagaggatccaggatgactgtacatctcagataaaggaggctcagcgctggaaggacagctggaagcagtccctgcacactatccaaggcctgtatgtgtgaccctccgccccaccatgaataaacactttcttatacaga

SEQ ID NO: 206370 - DNA, 4986 bp, Artificial Sequence
  derived and/or modified sequence
gggcgtccagctgcagttgtcgctggaccggccctggctgccttgagagagtcccttcggatttgcgccatgcgcggcggggagaaccggcctcctgctcgagttcagagctcatctgaggaattggaattgagacaccaaagcctagacgcgtttcctggacgacggcttcccggcaggggcatccagccagcggccaagatgtcgtcagtggggaaggtgacccaggttccgaatgggaaagcctaccagcagatcttccaggctgaggtgcagctggtccactccctggcggccaccaggaagcgggctgcagagcgttctgtgaccctgaagagtggcaggatacccatgatgaagaaggtggagactcctgaaggggaggtgatgtctccccgacagcagaagtggatgcacagcctccccaacgactggatcatggaaaaccctgttctccacagggaaaaggaaagagccaagagggaaaaagcccgagagagtgagaacaccatcgctgcccgagaagtgcggggtctcatggatactatagttcctgagaagataagcaccagcacctttcaaaggcaagcagaacacaagaggaagagctacgagagcgctctggccagctttcaggaggagattgcgcaggtgggaaaggaaatggaacctctcatcgtggacacagggggactttttttgaagaagctgactgagtctgatgaagaaatgaaccgtctcttcctaaaggtggaaaatgacaccaaccttgaggactacaccatccaagccctgctggagctgtgggataaggtggccgggcggttactgctccggaagcaggagattaaggagctggatgaggccctgcactcgctggagttctcccgaaccgataaactaaaaagcgtgttgaagaaatatgcagaagtcatagagaaaacttcctacctcatgcggcccgaagtgtacaggctgataaatgaagaagccatggtcatgaactatgccctgctgggcaaccggaaggctctcgcccagctgtttgtcaacctgatggagtccaccctgcagcaggagctggacagccgccaccgctggcaaggcttggtggacacctggaaggctctcaagaaggaggccctgctgcagagtttcagtgagttcatggccagtgagagtatccatactcccccggctgtgacgaaggagctagaggtcatgctgaagacccagaacgtcctgcagcaaaggcggctgaagcatctctgcaccatctgtgacctcctgccccccagttacagcaaaactcagctgactgagtggcattcttccctcaactccctgaacaaggagctagacacctaccacgtggactgcatgatgcggatccgcctgctgtatgagaagacatggcaggagtgcctgatgcatgtgcagaattgtaagaagcagctgctggactggaaagccttcactgaggaggaggcagagaccctggtgaaccagttcttcttccagatggtgggagcactccagggcaaagtggaggaggacctggagctcttggacaaatccttcgagactctggcagatcagacagagtggcagagttcacacctcttcaagtatttccaggaggtggtacaactgtgggaggcacaccagagcgagctgttggtgcaggagctggagctggagaagaggatggagcagcaccggcagaagcacagcctggagagccaggtgcaggaggcccacctcgataggctcttggaccaactgaggcagcaaagtgacaaagaaacactggcgtttcacctggaaaaggtcaaagattatctgaagaacatgaaatccaggtatgaatgttttcacaccctcctgacaaaggaagtgatggagtacccagcgatcatgctgaaagaactcaactcctacagctctgccctcagccaatacttctttgtgcgtgaaatctttgaacagaacttggctggagaagtcattttcaaattcaggcaaccagaagcacatgaaaaaccctcccagaagagagtgaaaaaactgaggaagaagcaagggtctaaagaggacatgaccagaagtgaggaaagcataagtagtgggacaagtactgccaggtcagtagaagaggtggaagaagaaaacgatcaagaaatggagtccttcataactgaagaggtgctggggcagcagaaaaaatctccactgcatgctaagatggatgagtccaaagaaggctctattcagggactggaagaaatgcaggttgaaagagagggctccttaaacccatccctgaatgaggagaatgtgaagggtcaaggagaaaagaaggaggagtcagaggaggaagatgagaaggaggaagaggaggaggaggagaagctggaggaagagaaggaggagaaggaggcacaggaagagcaagagagtttatctgtgggtgaggaagaagacaaggaagagggtctagaggagatatactatgaggacatggagtccttcacaatctccagtggaaacacttattttgtctttgtacccctggaagaagagcattgtaggaagtcccattccaccttctcagccatgttcatcaacgacacttccagtgccaagttcatagaacaagtgacaattccatcgagactaattttagaaattaagaaacaattgttttcagagggaggcaacttttctcctaaagaaatcaattcactgtgttcccgactggagaaggaagctgcccggatagagttggttgaaagtgtcatcatgctcaacatggagaagttggagaatgagtacctggaccaggccaatgatgtcatcaacaagtttgaaagcaaattccataacctgtctgtggaccttattttcatagagaaaatccagcggttgctgacgaatctgcaagtgaaaatcaagtgccaggtggcaaaatccaattcgcaaacaaatggattaaatttctctctgcaacagcttcagaacaagataaaaacttgtcaagagtccaggggagagaaaaccacagtgaccacagaagaactcctcagcttcgtccaaacttggaaggaaaaactgagccagaggattcagtaccttaactgcagcctggacagggtgtccatgactgaactggtctttaccaacaccatcctgaaggaccaggaggaagacagtgacatcctgacatcttcagaagcccttgaagaggaggccaagctggacgtggtcacccctgagtccttcacccagctgagccgcgtggggaagcccctgattgaggacccagctgtggatgtgatcaggaagctcctgcaacttcccaacacaaaatggccaacccaccattgtgacaaagatccgtcccagacaggcttcaagcgacatcggtgccagccagaaaactctgggaagaaggctgtacccagtgccagtgctacctctgcaggcagcctccagaccacccacccacctttgtcccacagcttcacaccgcaccccaagcccaacaaaatggagagaaagtaccgggtgcttggggacaagcctccccctgctgccgaggattttaaggggatcatcttgaccctcctctgggagagcagtgagaacctgctgacagtcgcagaggagttctaccgtaaagaaaaacgcccagtcaccaggcctgactgcatgtgtgacacctttgaccagtgcgccgagaacattagcaaaaagatcctggagtatcagagccaggcaaataagtaccacaactcctgcctcatagaattacggatccagatcaggagatttgaggagctgctgccccaagtgtgttggctggtgatggagaatttcaaggaacaccactggaaaaagtttttcacctctgtgaaggagatccgaggacagttcgaggaacagcagaagcggctggagaaaagaaaggacaaaaatgcccagaagctccatctaaatcttggacaccccgtacatttccaagaaatggagtctctacacttaagtgaagaggaaaggcaggaagagctggacagcatgattaggatgaacaaggagaagctggaggaatgtaccagaaggaatggccaggttttcataaccaacttggccaccttcaccgagaagttcctactgcagttggatgaggtggtcaccattgacgatgtccaggttgcaaggatggagccccccaaacagaaattatcaatgctcatacgaaggaaactcgctgggctctccctgaaggaagagagtgagaaacccctgattgaacgtggaagcaggaagtggccagggatcaaacccaccgaagtcaccatccaaaacaagattcttctccagccaacatcatcgatttccaccaccaaaaccaccctgggccacctggcggccgtggaagcccgagatgctgtgtacctgaaatatttagcatcatttgaggaggagctaaagaggatccaggatgactgtacatctcagataaaggaggctcagcgctggaaggacagctggaagcagtccctgcacactatccaaggcctgtatgtgtgaccctccgccccaccatgaataaacactttcttatacagactccttccctgtccatctacctgcctacctactttccgtccatccctccctcccttcatccctccacccctgctctgtgccgggcactgtagctttaccagcgaacaggacacagcatggtccctgcccacgtggagccctcttcccatgaggaaggcaagcatgaaaggggaattccacgtggttagcagggagggtgagtaccaggaatcagtcacttcaaataggcaccagagcttcaaaggacatcacctccaaacagcatgctgggcagggcacgtcatcttgaaaaatgaaataaaggtcatgggaaaatgatattttaatttaacagaataaacaagtatgggttat

SEQ ID NO: 206371 - DNA, 4941 bp, Artificial Sequence
  derived and/or modified sequence
atgtggcacggcaaccacgtgcagcccggcgccacccacagacccaaccagggcctggagatgctgcagggcctgggcatcggcatgaaggccttccacaacttcaactacttcctgttcttctacaacgtgctgctgggcctgggcgcctgcctgagcagactgctgatcagctgcctgctgggcatgtggctgatcgccagaatcgacagaaccatcatgcagagcggctacgagggcgccgacatgggcttcagcgcctggatcggcatgctgtacatggaccactaccacatcaaccccgtgctggtgagcttctgccacatcctgatcaccaaccacagagagaagaagctgcagcagagcaccaagtactggtgcctgaaccagagcgccgagagcctgagaatctgcgccatgagaggcggcgagaacagaccccccgccagagtgcagagcagcagcgaggagctggagctgagacaccagagcctggacgccttccccggcagaagactgcccggcagaggcatccagcccgccgccaagatgagcagcgtgggcaaggtgacccaggtgcccaacggcaaggcctaccagcagatcttccaggccgaggtgcagctggtgcacagcctggccgccaccagaaagagagccgccgagagaagcgtgaccctgaagagcggcagaatccccatgatgaagaaggtggagacccccgagggcgaggtgatgagccccagacagcagaagtggatgcacagcctgcccaacgactggatcatggagaaccccgtgctgcacagagagaaggagagagccaagagagagaaggccagagagagcgagaacaccatcgccgccagagaggtgagaggcctgatggacaccatcgtgcccgagaagatcagcaccagcaccttccagagacaggccgagcacaagagaaagagctacgagagcgccctggccagcttccaggaggagatcgcccaggtgggcaaggagatggagcccctgatcgtggacaccggcggcctgttcctgaagaagctgaccgagagcgacgaggagatgaacagactgttcctgaaggtggagaacgacaccaacctggaggactacaccatccaggccctgctggagctgtgggacaaggtggccggcagactgctgctgagaaagcaggagatcaaggagctggacgaggccctgcacagcctggagttcagcagaaccgacaagctgaagagcgtgctgaagaagtacgccgaggtgatcgagaagaccagctacctgatgagacccgaggtgtacagactgatcaacgaggaggccatggtgatgaactacgccctgctgggcaacagaaaggccctggcccagctgttcgtgaacctgatggagagcaccctgcagcaggagctggacagcagacacagatggcagggcctggtggacacctggaaggccctgaagaaggaggccctgctgcagagcttcagcgagttcatggccagcgagagcatccacaccccccccgccgtgaccaaggagctggaggtgatgctgaagacccagaacgtgctgcagcagagaagactgaagcacctgtgcaccatctgcgacctgctgccccccagctacagcaagacccagctgaccgagtggcacagcagcctgaacagcctgaacaaggagctggacacctaccacgtggactgcatgatgagaatcagactgctgtacgagaagacctggcaggagtgcctgatgcacgtgcagaactgcaagaagcagctgctggactggaaggccttcaccgaggaggaggccgagaccctggtgaaccagttcttcttccagatggtgggcgccctgcagggcaaggtggaggaggacctggagctgctggacaagagcttcgagaccctggccgaccagaccgagtggcagagcagccacctgttcaagtacttccaggaggtggtgcagctgtgggaggcccaccagagcgagctgctggtgcaggagctggagctggagaagagaatggagcagcacagacagaagcacagcctggagagccaggtgcaggaggcccacctggacagactgctggaccagctgagacagcagagcgacaaggagaccctggccttccacctggagaaggtgaaggactacctgaagaacatgaagagcagatacgagtgcttccacaccctgctgaccaaggaggtgatggagtaccccgccatcatgctgaaggagctgaacagctacagcagcgccctgagccagtacttcttcgtgagagagatcttcgagcagaacctggccggcgaggtgatcttcaagttcagacagcccgaggcccacgagaagcccagccagaagagagtgaagaagctgagaaagaagcagggcagcaaggaggacatgaccagaagcgaggagagcatcagcagcggcaccagcaccgccagaagcgtggaggaggtggaggaggagaacgaccaggagatggagagcttcatcaccgaggaggtgctgggccagcagaagaagagccccctgcacgccaagatggacgagagcaaggagggcagcatccagggcctggaggagatgcaggtggagagagagggcagcctgaaccccagcctgaacgaggagaacgtgaagggccagggcgagaagaaggaggagagcgaggaggaggacgagaaggaggaggaggaggaggaggagaagctggaggaggagaaggaggagaaggaggcccaggaggagcaggagagcctgagcgtgggcgaggaggaggacaaggaggagggcctggaggagatctactacgaggacatggagagcttcaccatcagcagcggcaacacctacttcgtgttcgtgcccctggaggaggagcactgcagaaagagccacagcaccttcagcgccatgttcatcaacgacaccagcagcgccaagttcatcgagcaggtgaccatccccagcagactgatcctggagatcaagaagcagctgttcagcgagggcggcaacttcagccccaaggagatcaacagcctgtgcagcagactggagaaggaggccgccagaatcgagctggtggagagcgtgatcatgctgaacatggagaagctggagaacgagtacctggaccaggccaacgacgtgatcaacaagttcgagagcaagttccacaacctgagcgtggacctgatcttcatcgagaagatccagagactgctgaccaacctgcaggtgaagatcaagtgccaggtggccaagagcaacagccagaccaacggcctgaacttcagcctgcagcagctgcagaacaagatcaagacctgccaggagagcagaggcgagaagaccaccgtgaccaccgaggagctgctgagcttcgtgcagacctggaaggagaagctgagccagagaatccagtacctgaactgcagcctggacagagtgagcatgaccgagctggtgttcaccaacaccatcctgaaggaccaggaggaggacagcgacatcctgaccagcagcgaggccctggaggaggaggccaagctggacgtggtgacccccgagagcttcacccagctgagcagagtgggcaagcccctgatcgaggaccccgccgtggacgtgatcagaaagctgctgcagctgcccaacaccaagtggcccacccaccactgcgacaaggaccccagccagaccggcttcaagagacacagatgccagcccgagaacagcggcaagaaggccgtgcccagcgccagcgccaccagcgccggcagcctgcagaccacccacccccccctgagccacagcttcaccccccaccccaagcccaacaagatggagagaaagtacagagtgctgggcgacaagcccccccccgccgccgaggacttcaagggcatcatcctgaccctgctgtgggagagcagcgagaacctgctgaccgtggccgaggagttctacagaaaggagaagagacccgtgaccagacccgactgcatgtgcgacaccttcgaccagtgcgccgagaacatcagcaagaagatcctggagtaccagagccaggccaacaagtaccacaacagctgcctgatcgagctgagaatccagatcagaagattcgaggagctgctgccccaggtgtgctggctggtgatggagaacttcaaggagcaccactggaagaagttcttcaccagcgtgaaggagatcagaggccagttcgaggagcagcagaagagactggagaagagaaaggacaagaacgcccagaagctgcacctgaacctgggccaccccgtgcacttccaggagatggagagcctgcacctgagcgaggaggagagacaggaggagctggacagcatgatcagaatgaacaaggagaagctggaggagtgcaccagaagaaacggccaggtgttcatcaccaacctggccaccttcaccgagaagttcctgctgcagctggacgaggtggtgaccatcgacgacgtgcaggtggccagaatggagccccccaagcagaagctgagcatgctgatcagaagaaagctggccggcctgagcctgaaggaggagagcgagaagcccctgatcgagagaggcagcagaaagtggcccggcatcaagcccaccgaggtgaccatccagaacaagatcctgctgcagcccaccagcagcatcagcaccaccaagaccaccctgggccacctggccgccgtggaggccagagacgccgtgtacctgaagtacctggccagcttcgaggaggagctgaagagaatccaggacgactgcaccagccagatcaaggaggcccagagatggaaggacagctggaagcagagcctgcacaccatccagggcctgtacgtgtag

SEQ ID NO: 206372 - DNA, 5106 bp, Artificial Sequence
  derived and/or modified sequence
atgagaggcggcgagaacagaccccccgccagagtgcagagcagcagcgaggagctggagctgagacaccagagcctggacgccttccccggcagaagactgcccggcagaggcatccagcccgccgccaagatgagcagcgtgggcaaggtgacccaggtgcccaacggcaaggcctaccagcagatcttccaggccgaggtgcagctggtgcacagcctggccgccaccagaaagagagccgccgagagaagcgtgaccctgaagagcggcagaatccccatgatgaagaaggtggagacccccgagggcgaggtgatgagccccagacagcagaagtggatgcacagcctgcccaacgactggatcatggagaaccccgtgctgcacagagagaaggagagagccaagagagagaaggccagagagagcgagaacaccatcgccgccagagaggtgagaggcctgatggacaccatcgtgcccgagaagatcagcaccagcaccttccagagacaggccgagcacaagagaaagagctacgagagcgccctggccagcttccaggaggagatcgcccaggtgggcaaggagatggagcccctgatcgtggacaccggcggcctgttcctgaagaagctgaccgagagcgacgaggagatgaacagactgttcctgaaggtggagaacgacaccaacctggaggactacaccatccaggccctgctggagctgtgggacaaggtggccggcagactgctgctgagaaagcaggagatcaaggagctggacgaggccctgcacagcctggagttcagcagaaccgacaagctgaagagcgtgctgaagaagtacgccgaggtgatcgagaagaccagctacctgatgagacccgaggtgtacagactgatcaacgaggaggccatggtgatgaactacgccctgctgggcaacagaaaggccctggcccagctgttcgtgaacctgatggagagcaccctgcagcaggagctggacagcagacacagatggcagggcctggtggacacctggaaggccctgaagaaggaggccctgctgcagagcttcagcgagttcatggccagcgagagcatccacaccccccccgccgtgaccaaggagctggaggtgatgctgaagacccagaacgtgctgcagcagagaagactgaagcacctgtgcaccatctgcgacctgctgccccccagctacagcaagacccagctgaccgagtggcacagcagcctgaacagcctgaacaaggagctggacacctaccacgtggactgcatgatgagaatcagactgctgtacgagaagacctggcaggagtgcctgatgcacgtgcagaactgcaagaagcagctgctggactggaaggccttcaccgaggaggaggccgagaccctggtgaaccagttcttcttccagatggtgggcgccctgcagggcaaggtggaggaggacctggagctgctggacaagagcttcgagaccctggccgaccagaccgagtggcagagcagccacctgttcaagtacttccaggaggtggtgcagctgtgggaggcccaccagagcgagctgctggtgcaggagctggagctggagaagagaatggagcagcacagacagaagcacagcctggagagccaggtgcaggaggcccacctggacagactgctggaccagctgagacagcagagcgacaaggagaccctggccttccacctggagaaggtgaaggactacctgaagaacatgaagagcagatacgagtgcttccacaccctgctgaccaaggaggtgatggagtaccccgccatcatgctgaaggagctgaacagctacagcagcgccctgagccagtacttcttcgtgagagagatcttcgagcagaacctggccggcgaggtgatcttcaagttcagacagcccgaggcccacgagaagcccagccagaagagagtgaagaagctgagaaagaagcagggcagcaaggaggacatgaccagaagcgaggagagcatcagcagcggcaccagcaccgccagaagcgtggaggaggtggaggaggagaacgaccaggagatggagagcttcatcaccgaggaggtgctgggccagcagaagaagagccccctgcacgccaagatggacgagagcaaggagggcagcatccagggcctggaggagatgcaggtggagagagagggcagcctgaaccccagcctgaacgaggagaacgtgaagggccagggcgagaagaaggaggagagcgaggaggaggacgagaaggaggaggaggaggaggaggagaagctggaggaggagaaggaggagaaggaggcccaggaggagcaggagagcctgagcgtgggcgaggaggaggacaaggaggagggcctggaggagatctactacgaggacatggagagcttcaccatcagcagcggcaacacctacttcgtgttcgtgcccctggaggaggagcactgcagaaagagccacagcaccttcagcgccatgttcatcaacgacaccagcagcgccaagttcatcgagcaggtgaccatccccagcagactgatcctggagatcaagaagcagctgagagccggcttcttcgagcacctggagaagtggttcgaccagtgcagcctgaacaccagagtgaccgtggccaccaagatcaacgagctggacagcgagctggagctgcacctgcacctgcaccagcccagagcccagcagatcgagaaggacatccacaacgtgagagccgccgagctgctgctgcaccaggagcagctggacagccactgcgccggcgtgaccgagaccctgaagaagaagagactgatgttctgccagttccaggaggagcagaacgtgagaagcaagaacttcagactgaagatctacgacatggagcacatcttcctgaacgccaccagaagccagaagctggtgaccctgagcaacaccctgcaccaggagctgctgagctacgtggacgtgacccaggtgagcctgagaagcttcagacagtacctggaggagagcctgggcaagctgagatacagcaacatcgagttcatcaagcactgcagactgttcagcgagggcggcaacttcagccccaaggagatcaacagcctgtgcagcagactggagaaggaggccgccagaatcgagctggtggagagcgtgatcatgctgaacatggagaagctggagaacgagtacctggaccaggccaacgacgtgatcaacaagttcgagagcaagttccacaacctgagcgtggacctgatcttcatcgagaagatccagagactgctgaccaacctgcaggtgaagatcaagtgccaggtggccaagagcaacagccagaccaacggcctgaacttcagcctgcagcagctgcagaacaagatcaagacctgccaggagagcagaggcgagaagaccaccgtgaccaccgaggagctgctgagcttcgtgcagacctggaaggagaagctgagccagagaatccagtacctgaactgcagcctggacagagtgagcatgaccgagctggtgttcaccaacaccatcctgaaggaccaggaggaggacagcgacatcctgaccagcagcgaggccctggaggaggaggccaagctggacgtggtgacccccgagagcttcacccagctgagcagagtgggcaagcccctgatcgaggaccccgccgtggacgtgatcagaaagctgctgcagctgcccaacaccaagtggcccacccaccactgcgacaaggaccccagccagaccggcagaggcgcctgggcctgcggcagcagaggcagcagcgaggccggcgccggcggcgccgtgtgcagcccccccgtgctgtgcagctgccccggccccagcagccccaagggcttcaagagacacagatgccagcccgagaacagcggcaagaaggccgtgcccagcgccagcgccaccagcgccggcagcttcaccccccaccccaagcccaacaagatggagagaaagtacagagtgctgggcgacaagcccccccccgccgccgaggacttcaagggcatcatcctgaccctgctgtgggagagcagcgagaacctgctgaccgtggccgaggagttctacagaaaggagaagagacccgtgaccagacccgactgcatgtgcgacaccttcgaccagtgcgccgagaacatcagcaagaagatcctggagtaccagagccaggccaacaagtaccacaacagctgcctgatcgagctgagaatccagatcagaagattcgaggagctgctgccccaggtgtgctggctggtgatggagaacttcaaggagcaccactggaagaagttcttcaccagcgtgaaggagatcagaggccagttcgaggagcagcagaagagactggagaagagaaaggacaagaacgcccagaagctgcacctgaacctgggccaccccgtgcacttccaggagatggagagcctgcacctgagcgaggaggagagacaggaggagctggacagcatgatcagaatgaacaaggagaagctggaggagtgcaccagaagaaacggccaggtgttcatcaccaacctggccaccttcaccgagaagttcctgctgcagctggacgaggtggtgaccatcgacgacgtgcaggtggccagaatggagccccccaagcagaagctgagcatgctgatcagaagaaagctggccggcctgagcctgaaggaggagagcgagaagcccctgatcgagagaggcagcagaaagtggcccggcatcaagcccaccgaggtgaccatccagaacaagatcctgctgcagcccaccagcagcatcagcaccaccaagaccaccctgggccacctggccgccgtggaggccagagacgccgtgtacctgaagtacctggccagcttcgaggaggagctgaagagaatccaggacgactgcaccagccagatcaaggaggcccagagatggaaggacagctggaagcagagcctgcacaccatccagggcctgtacgtgtag

SEQ ID NO: 206373 - DNA, 2049 bp, Artificial Sequence
  derived and/or modified sequence
atgtggcacggcaaccacgtgcagcccggcgccacccacagacccaaccagggcctggagatgctgcagggcctgggcatcggcatgaaggccttccacaacttcaactacttcctgttcttctacaacgtgctgctgggcctgggcgcctgcctgagcagactgctgatcagctgcctgctgggcatgtggctgatcgccagaatcgacagaaccatcatgcagagcggctacgagggcgccgacatgggcttcagcgcctggatcggcatgctgtacatggaccactaccacatcaaccccgtgctggtgagcttctgccacatcctgatcaccaaccacagagagaagaagctgcagcagagcaccaagtactggtgcctgaaccagagcgccgagagcctgagaatctgcgccatgagaggcggcgagaacagaccccccgccagagtgcagagcagcagcgaggagctggagctgagacaccagagcctggacgccttccccggcagaagactgcccggcagaggcatccagcccgccgccaagatgagcagcgtgggcaaggtgacccaggtgcccaacggcaaggcctaccagcagatcttccaggccgaggtgcagctggtgcacagcctggccgccaccagaaagagagccgccgagagaagcgtgaccctgaagagcggcagaatccccatgatgaagaaggtggagacccccgagggcgaggtgatgagccccagacagcagaagtggatgcacagcctgcccaacgactggatcatggagaaccccgtgctgcacagagagaaggagagagccaagagagagaaggccagagagagcgagaacaccatcgccgccagagaggtgagaggcctgatggacaccatcgtgcccgagaagatcagcaccagcaccttccagagacaggccgagcacaagagaaagagctacgagagcgccctggccagcttccaggaggagatcgcccaggtgggcaaggagatggagcccctgatcgtggacaccggcggcctgttcctgaagaagctgaccgagagcgacgaggagatgaacagactgttcctgaaggtggagaacgacaccaacctggaggactacaccatccaggccctgctggagctgtgggacaaggtggccggcagactgctgctgagaaagcaggagatcaaggagctggacgaggccctgcacagcctggagttcagcagaaccgacaagctgaagagcgtgctgaagaagtacgccgaggtgatcgagaagaccagctacctgatgagacccgaggtgtacagactgatcaacgaggaggccatggtgatgaactacgccctgctgggcaacagaaaggccctggcccagctgttcgtgaacctgatggagagcaccctgcagcaggagctggacagcagacacagatggcagggcctggtggacacctggaaggccctgaagaaggaggccctgctgcagagcttcagcgacctgctgccccccagctacagcaagacccagctgaccgagtggcacagcagcctgaacagcctgaacaaggagctggacacctaccacgtggactgcatgatgagaatcagactgctgtacgagaagacctggcaggagtgcctgatgcacgtgcagaactgcaagaagcagctgctggactggaaggccttcaccgaggaggaggccgagaccctggtgaaccagttcttcttccagatggtgggcgccctgcagggcaaggtggaggaggacctggagctgctggacgtgagagccggcgactgcagcaccggcgagctgagaaaccccagcagactgtggcagatcagacagagcggcagagtgcacaccagcagcagcatcagcagaagatggtacaactgcggcagacacaccagagccagctgctggtgcagaagctggagctggagaagaggctggagcagcaccggcagaagcaccgcctggagagccagatgcagaagacccaccagcatcggcagctggaccaactag

SEQ ID NO: 206374 - DNA, 2712 bp, Artificial Sequence
  derived and/or modified sequence
atgagaggcggcgagaacagaccccccgccagagtgcagagcagcagcgaggagctggagctgagacaccagagcctggacgccttccccggcagaagactgcccggcagaggcatccagcccgccgccaagatgagcagcgtgggcaaggtgacccaggtgcccaacggcaaggcctaccagcagatcttccaggccgaggtgcagctggtgcacagcctggccgccaccagaaagagagccgccgagagaagcgtgaccctgaagagcggcagaatccccatgatgaagaaggtggagacccccgagggcgaggtgatgagccccagacagcagaagtggatgcacagcctgcccaacgactggatcatggagaaccccgtgctgcacagagagaaggagagagccaagagagagaaggccagagagagcgagaacaccatcgccgccagagaggtgagaggcctgatggacaccatcgtgcccgagaagatcagcaccagcaccttccagagacaggccgagcacaagagaaagagctacgagagcgccctggccagcttccaggaggagatcgcccaggagatggagcccctgatcgtggacaccggcggcctgttcctgaagaagctgaccgagagcgacgaggagatgaacagactgttcctgaaggtggagaacgacaccaacctggaggactacaccatccaggccctgctggagctgtgggacaaggtggccggcagactgctgctgagaaagcaggagatcaaggagctggacgaggccctgcacagcctggagttcagcagaaccgacaagctgaagagcgtgctgaagaagtacgccgaggtgatcgagaagaccagctacctgatgagacccgaggtgtacagactgatcaacgaggaggccatggtgatgaactacgccctgctgggcaacagaaaggccctggcccagctgttcgtgaacctgatggagagcaccctgcagcaggagctggacagcagacacagatggcagggcctggtggacacctggaaggccctgaagaaggaggccctgctgcagagcttcagcgagttcatggccagcgagagcatccacaccccccccgccgtgaccaaggagctggaggtgatgctgaagacccagaacgtgctgcagcagagaagactgaagcacctgtgcaccatctgcgacctgctgccccccagctacagcaagacccagctgaccgagtggcacagcagcctgaacagcctgaacaaggagctggacacctaccacgtggactgcatgatgagaatcagactgctgtacgagaagacctggcaggagtgcctgatgcacgtgcagaactgcaagaagcagctgctggactggaaggccttcaccgaggaggaggccgagaccctggtgaaccagttcttcttccagatggtgggcgccctgcagggcaaggtggaggaggacctggagctgctggacaagagcttcgagaccctggccgaccagaccgagtggcagagcagccacctgttcaagtacttccaggaggtggtgcagctgtgggaggcccaccagagcgagctgctggtgcaggagctggagctggagaagagaatggagcagcacagacagaagcacagcctggagagccaggtgcaggaggcccacctggacagactgctggaccagctgagacagcagagcgacaaggagaccctggccttccacctggagaaggtgaaggactacctgaagaacatgaagagcagatacgagtgcttccacaccctgctgaccaaggaggtgatggagtaccccgccatcatgctgaaggagctgaacagctacagcagcgccctgagccagtacttcttcgtgagagagatcttcgagcagaacctggccggcgaggtgatcttcaagttcagacagcccgaggcccacgagaagcccagccagaagagagtgaagaagctgagaaagaagcagggcagcaaggaggacatgaccagaagcgaggagagcatcagcagcggcaccagcaccgccagaagcgtggaggaggtggaggaggagaacgaccaggagatggagagcttcatcaccgaggaggtgctgggccagcagaagaagagccccctgcacgccaagatggacgagagcaaggagggcagcatccagggcctggaggagatgcaggtggagagagagggcagcctgaaccccagcctgaacgaggagaacgtgaagggccagggcgagaagaaggaggagagcgaggaggaggacgagaaggaggaggaggaggaggaggagaagctggaggaggagaaggaggagaaggaggcccaggaggagcaggagagcctgagcgtgggcgaggaggaggacaaggaggagggcctggaggagatctactacgaggacatggagagcttcaccatcagcagcggcaacacctacttcgtgttcgtgcccctggaggaggagcactgcagaaagagccacagcaccttcagcgccatgttcatcaacgacaccagcagcgccaagttcatcgagcaggtgaccatccccagcagactgatcctggagatcaagaagcacagagcctggtggtgcgtgcccgtgatccccgccacccaggaggccgaggccggcgagagccccgagcccagaagaagaagactgcagtag

SEQ ID NO: 206375 - DNA, 2700 bp, Artificial Sequence
  derived and/or modified sequence
ggcagacccgccgccgtggtggccggccccgccctggccgccctgagagagagcctgagaatctgcgccatgagaggcggcgagaacagaccccccgccagagtgcagagcagcagcgaggagctggagctgagacaccagagcctggacgccttccccggcagaagactgcccggcagaggcatccagcccgccgccaagatgagcagcgtgggcaaggtgacccaggtgcccaacggcaaggcctaccagcagatcttccaggccgaggtgcagctggtgcacagcctggccgccaccagaaagagagccgccgagagaagcgtgaccctgaagagcggcagaatccccatgatgaagaaggtggagacccccgagggcgaggtgatgagccccagacagcagaagtggatgcacagcctgcccaacgactggatcatggagaaccccgtgctgcacagagagaaggagagagccaagagagagaaggccagagagagcgagaacaccatcgccgccagagaggtgagaggcctgatggacaccatcgtgcccgagaagatcagcaccagcaccttccagagacaggccgagcacaagagaaagagctacgagagcgccctggccagcttccaggaggagatcgcccaggtgggcaaggagatggagcccctgatcgtggacaccggcggcctgttcctgaagaagctgaccgagagcgacgaggagatgaacagactgttcctgaaggtggagaacgacaccaacctggaggactacaccatccaggccctgctggagctgtgggacaaggtggccggcagactgctgctgagaaagcaggagatcaaggagctggacgaggccctgcacagcctggagttcagcagaaccgacaagctgaagagcgtgctgaagaagtacgccgaggtgatcgagaagaccagctacctgatgagacccgaggtgtacagactgatcaacgaggaggccatggtgatgaactacgccctgctgggcaacagaaaggccctggcccagctgttcgtgaacctgatggagagcaccctgcagcaggagctggacagcagacacagatggcagggcctggtggacacctggaaggccctgaagaaggaggccctgctgcagagcttcagcgagttcatggccagcgagagcatccacaccccccccgccgtgaccaaggagctggaggtgatgctgaagacccagaacgtgctgcagcagagaagactgaagcacctgtgcaccatctgcgacctgctgccccccagctacagcaagacccagctgaccgagtggcacagcagcctgaacagcctgaacaaggagctggacacctaccacgtggactgcatgatgagaatcagactgctgtacgagaagacctggcaggagtgcctgatgcacgtgcagaactgcaagaagcagctgctggactggaaggccttcaccgaggaggaggccgagaccctggtgaaccagttcttcttccagatggtgggcgccctgcagggcaaggtggaggaggacctggagctgctggacaagagcttcgagaccctggccgaccagaccgagtggcagagcagccacctgttcaagtacttccaggaggtggtgcagctgtgggaggcccaccagagcgagctgctggtgcaggagctggagctggagaagagaatggagcagcacagacagaagcacagcctggagagccaggtgcaggaggcccacctggacagactgctggaccagctgagacagcagagcgacaaggagaccctggccttccacctggagaaggtgaaggactacctgaagaacatgaagagcagatacgagtgcttccacaccctgctgaccaaggaggtgatggagtaccccgccatcatgctgaaggagctgaacagctacagcagcgccctgagccagtacttcttcgtgagagagatcttcgagcagaacctggccggcgaggtgatcttcaagttcagacagcccgaggcccacgagaagcccagccagaagagagtgaagaagctgagaaagaagcagggcagcaaggaggacatgaccagaagcgaggagagcatcagcagcggcaccagcaccgccagaagcgtggaggaggtggaggaggagaacgaccaggagatggagagcttcatcaccgaggaggtgctgggccagcagaagaagagccccctgcacgccaagatggacgagagcaaggagggcagcatccagggcctggaggagatgcaggtggagagagagggcagcctgaaccccagcctgaacgaggagaacgtgaagggccagggcgagaagaaggaggagagcgaggaggaggacgagaaggaggaggaggaggaggaggagaagctggaggaggagaaggaggagaaggaggcccaggaggagcaggagagcctgagcgtgggcgaggaggaggacaaggaggagggcctggaggagatctactacgaggacatggagagcttcaccatcagcagcggcaacacctacttcgtgttcgtgcccctggaggaggagcactgcagaaagagccacagcaccttcagcgccatgttcatcaacgacaccagcagcgccaagttcatcgagcaggtgaccatccccagcagactgatcctggagatcaagaagtag

SEQ ID NO: 206376 - DNA, 4941 bp, Artificial Sequence
  derived and/or modified sequence
atgtggcacgggaatcatgtgcagccgggggccacccaccgtccaaatcagggattggagatgttacaaggattggggatcggcatgaaggccttccataattttaactattttctgtttttttataatgttctcctcggccttggggcctgcctctccaggctgctaatctcctgtctgctcggcatgtggctgatcgctaggattgacagaaccattatgcagtccggatatgaaggagccgacatgggtttctctgcctggattggcatgctctacatggaccattaccatatcaaccccgtactggtcagcttttgtcatattctgattacgaatcaccgggaaaaaaaactacagcagagtaccaaatactggtgtcttaaccagtccgcagagtccctgcgaatctgtgcaatgaggggcggcgagaatagaccacccgctcgagtgcagagctcctccgaagagctggaactgcgccatcagagcttggacgcatttccagggaggcgattgcctggacgaggcattcagccagccgctaagatgagcagcgtgggtaaagtgactcaagtacctaacgggaaggcctatcagcaaattttccaggcagaggtgcagcttgtccacagcttggctgcaactcgtaaaagagcggccgagaggtctgtgactttgaaatccggcaggattcctatgatgaaaaaagtcgagactcctgaaggggaagtcatgtctcctcggcagcagaaatggatgcattcactgcccaacgattggataatggagaatcctgtgctccatcgggaaaaggagcgcgcgaagcgagaaaaagcacgagagtccgagaacactatcgcagccagggaggtgcggggtctgatggacaccatcgtaccggaaaagatttcaacaagtacgtttcagcgacaggctgaacataaacggaaatcctatgagtccgctttggctagctttcaggaggagatcgcccaggtgggtaaggagatggaaccattaatcgtggataccggtggattgttcctgaaaaaactgacggagtcggacgaagagatgaatcgactctttctcaaagtagagaacgacaccaacctggaagactatacgatccaggctcttctggaattgtgggataaagtcgctggcaggctgctcctgagaaagcaggagattaaagagctcgacgaggccttacactccctggagtttagtagaactgacaaactgaaaagtgttctgaaaaagtatgcagaggttattgaaaaaaccagctatctaatgcgccccgaagtctatcggctaattaacgaagaggctatggtcatgaattatgccttactgggcaataggaaagctcttgcccagctctttgtgaacctaatggaatcgacactgcagcaagagctagactcaagacataggtggcaaggtctggtcgatacatggaaggctctgaagaaagaggccttgttgcaaagtttctctgaattcatggcaagcgagtccatccacactccccctgccgtgactaaagagctggaagtgatgcttaaaacgcagaacgtcctacagcagaggagactgaagcatctttgcactatctgtgacctactcccaccatcatatagcaagactcagctgaccgagtggcacagctccctgaatagccttaataaggagctggacacgtaccatgtcgattgcatgatgaggattcggctcctatatgagaagacctggcaggagtgcctaatgcatgtgcaaaactgtaagaagcaattattggattggaaagcattcacagaagaagaggccgagacacttgtgaatcagttctttttccagatggtgggggctctgcaaggtaaggttgaggaagatctcgagcttttggataaatcattcgagactctcgctgatcagaccgaatggcagagctcccatctgttcaagtatttccaggaagtggtccagctctgggaggctcaccaatcggaactccttgtccaggagttggaacttgaaaaacgcatggaacagcacaggcagaaacacagtcttgaatcacaagtccaggaagcgcacctcgaccggttgctagatcagctgcgacagcagagtgacaaagagactcttgcttttcacctggagaaggtaaaggattatcttaagaacatgaaaagcagatacgagtgtttccatacgctgctgaccaaggaagtgatggagtacccagccattatgctcaaggagctcaactcttatagctccgcactctcgcagtacttttttgtgcgagagatcttcgaacagaacctagccggcgaggtgattttcaagtttcggcaacctgaggctcacgagaaacctagtcagaagcgagtgaaaaagctccggaagaagcaaggaagcaaagaggatatgactaggagtgaagaatccatctctagcgggacgtccaccgctagatcagtcgaggaggtggaggaggagaacgaccaagaaatggagagcttcatcacagaggaagtcctcggtcaacagaagaaatctcctctgcatgctaaaatggatgagagcaaagagggctctatccagggcctggaggaaatgcaggtggaaagggagggctccctgaacccatccctgaatgaggaaaatgtgaaggggcaaggcgaaaagaaggaagagagcgaagaagaagatgagaaggaggaagaggaagaagaagaaaagcttgaagaggagaaggaggaaaaggaagcccaggaggagcaggagagccttagcgtgggtgaagaagaggacaaagaagaggggcttgaggagatctactacgaagacatggagtctttcacgatctccagtggaaacacttacttcgtatttgtgccactggaggaagagcattgtcgcaaatctcactcaaccttttctgccatgtttattaacgacacttctagcgccaagtttatagagcaggtcacaatcccctccaggctcatactcgagattaaaaagcaattatttagtgagggagggaatttctctcccaaggaaattaactccctttgcagccggctggagaaagaagcggctcggatcgagcttgttgagagtgtgattatgcttaatatggaaaaactcgaaaacgaatacctcgatcaagctaatgacgtcatcaacaaatttgagagcaagttccataacctttccgtggacctcatcttcattgaaaagatccagagactcctcaccaacttacaggtcaaaatcaagtgtcaagtggcgaaatccaatagccagacaaatggcctgaactttagcctccagcaactgcagaacaagattaaaacgtgccaggaaagtcgcggagaaaaaacaactgttacgacagaagagctgctctccttcgttcagacttggaaagaaaagctgtcccagcggatccaatacctgaattgctccctcgatcgggttagcatgactgagctcgtatttacaaacaccatcctcaaggaccaggaggaggatagcgatattttgacatcgtccgaggcgctggaagaagaagcaaagctcgacgtagtgactcccgaaagtttcactcaactctctcgggtaggaaaacccctcatagaggaccctgcagttgatgtaatcaggaagttgctgcagctacccaataccaagtggcccacgcatcactgcgacaaggaccccagtcaaacgggatttaaaaggcatcgatgtcagcccgaaaactctgggaagaaggcagtgccatccgcgtccgccacatcagcgggcagtctacaaactactcacccccccctgtctcatagctttacgccacatcctaaacccaacaagatggagcggaagtaccgcgtgttgggtgataagccccctcccgcagcagaggactttaagggcattatcctgaccctactctgggagagctccgagaatctgttgaccgtggccgaagagttttatcgcaaagaaaaacggcccgtcacacgcccggattgcatgtgcgatacattcgatcagtgcgccgagaacatcagtaagaagatactagagtaccagagccaagcaaacaagtaccacaacagctgtctaatcgagctgagaatccagattcggagattcgaggagctcctcccacaagtgtgttggctcgtgatggaaaattttaaggagcaccactggaagaaattcttcacctccgtaaaggagatcaggggtcagtttgaggagcagcaaaaacggctggagaaaaggaaggataaaaatgcccaaaagctccatctgaacctggggcatccggttcactttcaagagatggaatctttgcacctcagcgaggaggaacggcaagaagagctggacagcatgattcggatgaacaaagagaagttggaagagtgtactcggcggaatgggcaggtgttcatcacgaatctcgcaacattcacagaaaagtttcttctgcaactagatgaagtcgtcaccatcgacgatgtgcaggtagcccggatggaacccccgaagcagaaactctcaatgctcatccgccgcaagctggcgggattgagcttgaaagaggaatcagaaaaacccctaattgaacgcggaagccgcaaatggcccgggattaagccaacggaggttactatccagaataaaattctccttcagcccacaagttctatctccactacgaaaaccacgctgggacacctggctgccgtcgaagcccgcgacgccgtttacctgaagtacctcgcgtcctttgaagaggagctcaagcggatacaggacgattgtactagccagatcaaggaggcccagcggtggaaggatagctggaagcaaagtctgcatacgatccagggcctgtacgtgtag

SEQ ID NO: 206377 - DNA, 5106 bp, Artificial Sequence
  derived and/or modified sequence
atgagggggggcgaaaacaggccaccggcaagagtgcagtcctcaagcgaagaactggaattgcgacaccaatctctggacgccttccctggccggagattgcctggccgtgggattcagcccgctgctaagatgtcctcggtcggtaaagtgacgcaggtccctaatggcaaagcatatcaacaaatcttccaggcagaagtacagctcgtgcattccctagccgccacccgcaagcgcgctgccgagcgcagcgtcacattgaagtccgggcgcatccccatgatgaaaaaagtggagaccccggagggcgaggttatgagcccacgacagcagaaatggatgcatagcctgcccaatgactggattatggagaacccagtattacatcgggagaaggaacgagccaagagagagaaagccagggaatctgagaatacaatcgcggcccgggaggtgagaggacttatggacactattgtccctgaaaaaattagcacctccacattccaacgccaagcagaacacaagagaaaaagttacgagtccgccttagcatcttttcaagaggagatagcccaggtagggaaagagatggagccactaatcgtcgacaccggggggctgttcctgaaaaagctcactgaatccgacgaggagatgaacagattgttcctgaaagtggagaatgatacaaatctcgaagactacactatccaggcactcttggaactatgggataaggtggccggtaggcttctgctaagaaagcaggaaattaaggagctcgatgaggctttgcactcgctcgaattttcgagaaccgacaaactgaagagcgtgcttaagaagtacgctgaggtgattgaaaaaacctcatacctgatgaggccagaggtctatagactgatcaacgaggaggcaatggtaatgaactacgcattgctcgggaacaggaaggccctcgctcaactgttcgttaacctcatggaaagtaccctgcagcaggagcttgattcccgtcacagatggcaagggttggtcgatacctggaaagcactgaaaaaggaagctctattgcagagcttctctgagttcatggcaagcgagtccatccacactccccccgcagttactaaggagctggaggtcatgcttaagacgcagaatgtgctgcaacagcgacggctcaagcacctttgtaccatctgcgacctccttccaccttcctattcgaagacccaacttacagaatggcactcctccctcaactcactgaataaggagctggatacgtaccacgtggactgtatgatgagaatccgattgctttatgagaagacctggcaagagtgcctgatgcatgtccagaattgtaagaagcagctcctagattggaaagcctttacagaggaggaggccgaaaccctagtgaatcagtttttctttcaaatggttggggctctgcagggtaaggtggaggaagacctggaactgttagataaatcttttgagacacttgcggaccaaactgaatggcagtcatctcaccttttcaagtacttccaggaagtggttcagctttgggaggcacaccaatccgagctgctggtccaggaactcgaactggagaagcgcatggagcagcatcggcagaagcattcactagaatctcaagtccaggaggcccacctggaccgccttctcgatcagctgaggcagcagtccgacaaggaaacactagcattccatcttgaaaaggtcaaagactacctcaaaaacatgaaaagcaggtacgagtgttttcacaccctcctcaccaaagaggtgatggagtatcctgccatcatgctgaaagagttaaatagttattccagtgcacttagccaatatttttttgttagggaaatctttgaacagaacctggccggcgaggttatcttcaaatttcggcagcccgaagcacatgagaaaccctcacagaagcgcgtaaagaagctgcggaagaaacaaggaagcaaagaggacatgactagatccgaggaaagcattagcagtggaacttctactgccaggtctgtcgaagaagtggaagaagagaacgaccaggaaatggagtccttcatcactgaagaggtcctggggcagcaaaaaaagagccccttgcatgccaagatggacgagtctaaggaagggtcaatacagggcctagaggagatgcaggtggagcgggagggatcactgaaccctagtctgaacgaggaaaacgtgaaggggcagggcgaaaagaaagaagaaagcgaagaagaggacgagaaggaggaagaggaagaagaggaaaagttggaggaggaaaaggaggagaaggaggcccaggaggagcaagagtctcttagcgtgggtgaggaggaggataaagaggagggactggaagagatctattacgaggacatggagtcttttacaatatcatcaggcaacacttattttgtcttcgtgccattagaggaggagcactgtaggaaatcccacagcacgtttagtgcgatgttcataaatgacacttcctcagctaaattcatcgaacaagtgactatcccatcacggcttatcctcgaaatcaaaaagcagctacgtgctggatttttcgaacacttggagaaatggttcgaccagtgtagcctgaatacaagggtaacagtggccacgaagattaatgaattggatagtgagctggaactgcatctccatctgcatcaaccccgtgctcagcagatcgagaaggacatccacaatgtacgcgcggctgagctcctccttcatcaggaacagctcgacagccactgtgccggggttaccgaaacgttgaaaaaaaagcgtctgatgttctgtcagttccaagaggaacagaatgttcgcagtaagaacttccggcttaagatctatgatatggagcacattttcctcaatgcaacacggtcccagaaattagtgacattaagcaacaccttacaccaggagctccttagctacgtggatgtgacacaggtgtcccttagaagcttcagacagtacttggaagagtccctgggtaagctaaggtacagtaacattgagttcataaagcactgccgcctgttctccgagggcggaaatttcagccccaaggaaatcaattcactgtgcagtaggctagagaaagaggctgcgcgcatagagttagttgaatccgtcattatgcttaatatggagaagttggagaacgagtatctggatcaggctaatgatgtgattaacaagttcgagtcaaaattccacaaccttagcgtcgatctgatcttcatagaaaagattcagcggctactgactaatctccaggttaagatcaagtgtcaagtggccaaatctaatagccaaacaaacggcctgaacttttccctgcagcagctgcaaaacaaaattaagacttgtcaggaatcccggggcgagaagactactgtcaccacagaagagctgctgtccttcgttcaaacctggaaggaaaaactgtcacagcgcatccaatacctcaactgtagcctggatcgcgtgagtatgacagagctggtctttactaacaccatcctaaaagatcaggaggaagactctgatatcctcacttcgagcgaagcacttgaagaggaagctaaactcgatgtggtgacccctgagtccttcacccagctgagccgagtgggcaagcctcttattgaagatccagccgtggacgtcatacgcaaattgctgcagttacccaacacaaagtggccaacccaccactgtgataaggacccatcacagaccgggcgcggtgcctgggcgtgtgggtcgagaggcagctccgaagccggagccgggggcgcagtgtgtagccctcccgttctgtgctcttgccctggcccaagcagccccaaaggattcaaacggcaccgctgccaacctgaaaacagcggtaaaaaagcggtgccctctgcatcagctaccagtgccggaagctttactccacacccaaagcccaataagatggagaggaagtatagggtcctgggggataagccacccccagccgccgaggacttcaagggaatcatcctcaccctcctgtgggaaagcagcgagaacctcctgacagttgcagaggagttctacagaaaggagaaacgaccggtgactcggccagactgtatgtgtgatactttcgaccagtgtgccgaaaacatatcgaagaaaatccttgaataccagtcccaggccaacaagtaccacaattcctgcttgatcgaactcaggatccagatcagaaggttcgaggagctgcttccccaggtttgttggctggttatggagaatttcaaagagcatcattggaaaaagttctttacttccgtgaaagagattcggggccaattcgaagaacagcagaagagacttgagaaaaggaaggacaagaacgcccagaagctgcacttaaacctggggcacccagtccactttcaggagatggagagtctgcacttgtcagaagaagaacggcaggaagagctggactctatgatacgtatgaacaaagaaaagctggaggagtgtaccaggaggaacgggcaagtgtttatcaccaacttggcgacctttaccgagaagttcttgttgcagctcgacgaggtggtgaccatcgatgacgtccaggtggcgcgcatggaaccccccaagcaaaagctcagtatgttgatccggcgtaaactggctgggctgtctcttaaagaggaatcagaaaagccactcattgagcggggctcccgcaagtggccgggtattaagcccactgaggtgacaatccagaacaagattcttctccagcctacttcgagcataagcacgacgaagacaactctgggacacctagctgccgtcgaagcgcgagatgcggtgtatctcaagtatctcgccagtttcgaggaggagctaaaacggattcaggatgactgcaccagccagatcaaagaagctcaacgatggaaagactcctggaagcagtctctacacacaattcaggggctgtatgtgtag

SEQ ID NO: 206378 - DNA, 2049 bp, Artificial Sequence
  derived and/or modified sequence
atgtggcacggcaatcacgtgcagccaggcgccacccataggcccaaccagggccttgagatgctgcaaggtctcggaatcggcatgaaggccttccacaattttaattattttttatttttttacaatgtacttctaggcttgggggcatgcctgtctcgtcttttgatatcatgtctcctcggtatgtggttaatcgcccgaatcgaccggactatcatgcagtcaggctatgagggtgcagatatggggtttagcgcatggataggcatgctctatatggaccactatcatataaatccagtcctggtctcattctgtcacattctgatcacaaaccatcgcgagaagaaactccagcagtcaacaaagtattggtgcttgaaccagtcagcagaaagcctgcgcatctgcgcaatgcgcggaggtgaaaatcggccccctgctagagtgcaatcgagttcagaagagctggagttgcggcaccaatcactcgatgcgttccctggacgcagactgccagggaggggtattcagcctgccgctaagatgagctcagtggggaaggtgacccaggtccccaatgggaaggcataccagcaaattttccaggctgaagtgcaacttgtacacagcctggcagcaacaagaaagagggcagcagagcggagcgttactctgaagagcggtaggatccccatgatgaagaaggtggagacgcctgagggggaagtgatgtcccctcgacagcaaaaatggatgcactcattacccaatgactggattatggaaaacccagtcctgcatcgggagaaagaaagagcaaaacgtgaaaaagcaagagagagcgagaacaccatagctgcgagggaggtaagggggctgatggatactatcgttcccgagaagattagcacatcaacttttcagagacaagccgagcacaaacgtaagtcttatgagtccgctctggcatccttccaggaggagatcgcccaggtgggaaaggagatggagccacttatcgtggatactggcggcttgttcctcaaaaagctaacggaaagcgatgaggaaatgaaccgtcttttcctgaaggtagagaatgacacaaacttggaggattataccatacaggcgctcctagaactgtgggacaaggtagcgggccgcctgctgctgagaaagcaggagatcaaagagctagatgaagcactccactctctagagttctcacggactgacaagctgaaatccgtactcaaaaaatacgccgaggttatcgaaaagaccagctacctcatgcgaccggaagtctaccggctgataaacgaggaggccatggtgatgaactatgccctccttggaaaccgtaaagctcttgctcagctgtttgtaaacctgatggaatcgacgctccagcaagagctagactctcgacaccggtggcaaggcctggttgacacttggaaggcgctgaaaaaagaagcattgctgcagagctttagtgatctgcttccgccttcctatagtaagactcagcttacagagtggcacagtagcctgaacagccttaataaggagcttgatacttatcatgtggattgtatgatgcggatcagactgctatatgagaagacatggcaggaatgccttatgcacgtccaaaattgcaagaaacagctgctcgattggaaggctttcactgaggaggaagccgaaacactcgtaaaccaatttttctttcagatggtcggcgccctgcagggaaaagtggaagaggatctggagctcttggacgtcagagctggtgattgcagtactggggagctgaggaacccgtctagactgtggcagatccgccaatcagggagagtacatacttcgtcctcaatttcgcggaggtggtataactgtgggcggcacacacgcgcctcttgttggtgtcggtcctggagctggcgtaggggctggagctccacgggccgctctacagcatggcgcgcaaggtgtaggagaccaacctctatcggctcatggaccaactag

SEQ ID NO: 206379 - DNA, 2712 bp, Artificial Sequence
  derived and/or modified sequence
atgcgaggcggtgagaaccgtccaccagccagagtgcaaagctccagtgaggagctcgaactgcgtcatcagagtctggatgcctttcccggaagaagacttccaggcagaggcatccagccagccgccaaaatgagctcagtaggcaaggtcactcaagttccaaacggcaaggcatatcagcagatcttccaggccgaggttcagctcgttcactccctggctgccacacgcaagagggccgccgagcgcagcgtcactctcaagagcggccgtatccctatgatgaaaaaggtcgagacccctgaaggagaggtgatgagtccgcggcagcagaaatggatgcatagtctaccaaatgattggattatggagaaccctgtactccaccgagaaaaagagcgcgcaaaaagagagaaagcgagggaatccgagaacaccatcgccgcccgcgaggtgaggggactcatggataccatcgtgccagaaaagatttctacaagtaccttccagaggcaggcagagcataagagaaagtcgtatgaatcagctttggcttcttttcaagaggagattgcacaagagatggagcccctaattgtagataccggcggcctcttcctgaaaaaactaactgagtccgatgaggaaatgaaccgcctttttctgaaagtcgagaatgacactaacttagaagattacaccatccaggcactcctagaactctgggacaaagtggccggccggctcctgctgcgaaagcaggaaatcaaggagctggatgaggctctgcactccctcgagttttctcgcactgataagctgaaatcagtgctgaaaaagtacgcggaagtaattgagaaaacctcatatttgatgcgcccagaggtttaccgacttatcaacgaagaggcaatggtaatgaattatgcccttttgggcaacaggaaggccctcgcacagctgttcgttaacttaatggaatccacacttcagcaggaactcgatagccgccacaggtggcaaggattagtcgacacttggaaggccctcaagaaggaagcccttcttcagagtttctcagagtttatggccagcgagtccatccacactccccctgcagtgactaaagaactggaagtcatgttgaaaactcagaacgttctgcagcaaaggaggctcaaacatctatgtacaatttgtgaccttctccccccttcatactccaaaacccagctgaccgagtggcactccagcctgaactcccttaacaaagagctcgacacctatcacgtggactgcatgatgcgaatacggctgctgtacgaaaaaacatggcaagaatgtctgatgcacgtgcagaactgtaaaaaacagctgctcgattggaaagcattcacagaggaggaggccgagaccctggtgaaccagttcttcttccagatggtgggcgccctgcaaggtaaggtggaagaagatctcgagctgttggataaatcttttgagacattagccgatcagactgagtggcaaagtagtcacctgttcaagtactttcaggaggtcgtccagctttgggaggcccatcagtctgagctgctcgttcaggaacttgagttggaaaaacgcatggagcaacacagacagaagcatagcctggaaagtcaggtgcaggaagcgcatctggaccgcctactcgaccagctcagacaacagtcggacaaagagaccttggcatttcatctggagaaggttaaggactatctcaaaaacatgaagtcccggtacgagtgttttcataccctacttactaaagaggtgatggagtatcccgccataatgctgaaggagcttaattcctacagttccgcactgagtcaatatttttttgtgagggagatcttcgagcagaatttagcaggcgaggttatttttaaattcagacagcctgaagcccatgaaaagccaagccagaagagggtcaaaaagctccggaaaaaacaaggctctaaagaggacatgaccagatcagaagagagtatctcttcaggcacatccactgctagatccgttgaagaagtggaagaggaaaacgaccaagaaatggaaagcttcatcacagaggaggtgctggggcagcagaagaaatctcccctgcacgcaaaaatggatgaatctaaggaaggatcaatccaggggctcgaagagatgcaggtggagcgtgaaggatctcttaatccaagtctgaatgaggagaacgtaaaaggtcagggagagaaaaaggaagagtctgaggaggaagacgagaaagaggaggaagaagaggaggagaagctggaggaggagaaagaagaaaaagaggcccaggaggagcaagaaagtctctccgtgggggaagaggaagataaggaggagggcctggaagagatatactacgaagatatggaatcgttcacaatctccagtgggaacacatatttcgtgttcgtccctctggaggaggaacactgccgcaagtcccactccactttttcagccatgttcattaatgatactagttcagccaagtttatcgagcaggtgactatacctagtcgccttatcctggaaatcaagaaacaccgcgcctggtggtgtgtgcccgtgattcccgctacccaagaggcggaggcaggtgagagccctgaacctaggagacggaggctgcagtag

SEQ ID NO: 206380 - DNA, 5106 bp, Artificial Sequence
  derived and/or modified sequence
atgcgcgggggagagaaccgaccccctgctcgtgtgcagtcatcctccgaagaactggagcttcgacaccagtccctcgacgcctttccgggtaggcgattgccaggtagaggcattcagccagccgctaaaatgtcttcagtcggcaaggtcacccaggttcccaacggaaaggcttatcagcagatctttcaggccgaagtgcaactcgtgcactccttagcagcgacgaggaagcgagctgcagagcggtcagtcacacttaagtctgggagaatccccatgatgaagaaagtagagacccccgagggcgaggttatgtcccctcgacagcagaagtggatgcactcactgcctaatgattggattatggagaaccctgttctgcaccgagagaaagaaagggcaaaacgggagaaggcccgggaatcggaaaacacaatcgccgcgcgggaggttcggggcctgatggataccatagtcccagagaagatatccacatcaaccttccagaggcaagccgagcacaagcggaaatcatacgagagtgctctggccagcttccaagaagaaattgcacaggtcggtaaggaaatggaacctttgattgttgatactgggggcttgttcctaaagaagttaactgagagcgacgaagaaatgaatcgactttttctgaaggtggaaaatgatactaatctggaagattatactatacaggccctgctggaattgtgggataaggtagccggacgtctcctcctgagaaagcaagagataaaagagctggacgaagccttgcatagcctggagtttagccggacagacaaattgaaatctgtcctgaagaaatacgctgaagttatcgagaaaacatcttatttaatgaggcccgaagtgtacagattgattaacgaggaagctatggttatgaattatgctttactcggcaaccgcaaggctctggcccagctcttcgtaaatctgatggagagcacgctccagcaggaactggactctaggcatagatggcaaggcctagtcgacacatggaaggctctgaagaaggaagccctcctgcagagcttctcggagttcatggccagcgagtcaattcacacgccacctgcagtgaccaaagagctcgaagtcatgttaaagacacaaaatgtgctccagcagcggcgcctgaagcatctatgtaccatttgcgatcttctcccaccaagctacagcaagacccagctgactgaatggcattcatccctgaacagcctgaacaaggaactggacacctatcacgttgactgtatgatgaggatcaggctgctgtacgagaagacatggcaggaatgtctcatgcatgtgcagaactgcaagaaacagttgcttgactggaaggcatttaccgaggaagaggccgaaaccttagtaaatcagttcttctttcaaatggtaggggctttacagggtaaagtcgaggaagacctggaattactggataagagctttgaaacgttggcagaccagacagagtggcagtcctcacacctttttaagtactttcaggaggttgtccagctatgggaggcccatcagtccgagcttctagtgcaggaactggagttggagaagcggatggagcaacaccgccagaagcattccctcgagtctcaggtgcaagaggctcacctggaccggctcttagatcaattgcgacagcagagcgacaaggagacactggcctttcacctcgagaaggttaaggattaccttaagaatatgaagagcagatacgaatgcttccatacactgctgaccaaggaggtaatggaatatcctgctatcatgctgaaggaactaaacagctacagtagtgccctgtcccaatacttcttcgtgagggagatttttgagcagaatctggcgggtgaagtaatttttaagttcagacagccggaggcacacgagaagccctcgcagaagagggtgaagaaactccggaaaaagcagggttctaaagaagatatgaccagatcagaagagtccatttccagtggtacaagcaccgctcgctccgttgaggaggtagaggaggaaaacgaccaggagatggaatcctttatcactgaagaggtgctgggccagcagaaaaaatctccgctacacgccaaaatggacgagtccaaagagggctccatccagggcttggaagaaatgcaggtcgagagggagggctcactgaatccatccctcaacgaagagaatgtgaagggccaaggggagaagaaagaagagtcagaggaggaagacgagaaggaagaggaagaagaagaagaaaagctggaggaagagaaagaggaaaaggaggctcaagaggagcaggagtccttatcggtcggggaggaagaggacaaggaagagggactcgaggaaatttactacgaggatatggaatcctttaccatcagttcgggaaacacatacttcgtgttcgtccctctcgaggaagagcattgtagaaaatctcactctacttttagcgcaatgtttattaacgacacgagcagtgctaaatttatcgagcaggtgaccatccctagcagactcatcctggagatcaagaagcagttgagagcaggctttttcgaacatttagaaaaatggtttgaccagtgttccctaaatacacgcgtgaccgtggctaccaaaattaatgaactggacagcgaactagagctgcacctgcacctacaccagccaagggctcagcaaatagaaaaggacatccacaatgtgagggcagctgaactcttactccaccaggagcaacttgacagccactgcgccggcgtcaccgaaacccttaagaagaagaggttaatgttttgtcaattccaggaggaacagaatgtgcggtccaagaactttaggctcaagatctacgatatggagcatatcttcctcaatgcgacacgcagccagaagttagtgaccctttcaaatacgttgcaccaagagctgctgtcctacgtggatgtgactcaggtgtcgttgcgctcatttcggcagtacctcgaagagagtttaggcaagctgagatattcaaatattgagttcataaagcattgtagattgttctctgagggaggcaacttctctccaaaggagatcaacagcctgtgttcccggctcgagaaggaagcagctagaatcgaactggttgaatctgtgatcatgctgaatatggaaaagctcgagaatgagtatctggaccaggctaacgatgtgataaacaagttcgagagcaaatttcacaacctgtctgtggacctaatattcatcgagaagatccagagactcctcaccaacctgcaagttaagattaagtgtcaggtggccaagtcgaatagccagacaaatggtctgaattttagcctccagcagctccagaacaagatcaagacctgtcaggagtcacggggggagaaaaccacagtcaccacagaggagcttttgagcttcgtgcagacctggaaagaaaagctgtcccagcgcattcagtaccttaattgttctctggatcgcgtgagcatgaccgagcttgtgtttactaacactatcctcaaagaccaagaggaggactccgacatccttacatcatcagaagcactcgaggaagaggccaaactagacgttgtgacgcccgagtctttcactcaactgtcacgtgtagggaaacccttgatagaggatcctgccgtggatgtgatccgcaagctgctgcaacttcctaacaccaagtggcctacccaccattgcgacaaggacccctcccaaactggcagaggagcatgggcctgcggatcacgcgggtcttcggaagccggagccggtggggccgtgtgctcaccacccgtgctgtgctcctgccccgggccatcctctcccaaagggttcaaaagacaccgctgtcaacctgaaaacagtggtaagaaagcggtccctagcgctagcgcaacttcagcggggtcctttacaccacatccaaagcccaacaagatggagaggaaataccgcgtactgggagacaagccgccacccgcggctgaagatttcaagggcattattctcactttgctctgggaatctagcgaaaacctgctgacagtggccgaagagttctaccgaaaggagaagaggcccgtcactcggcccgactgcatgtgtgatacatttgaccagtgtgctgaaaacatttctaagaaaatcctcgaataccagtcccaagccaacaaatatcataactcctgtctgattgagctaagaatccaaattcggcggtttgaagaattgctgcctcaagtgtgttggctggtgatggagaacttcaaggaacaccactggaagaagttctttaccagcgttaaggaaattagggggcagtttgaagagcagcagaagagactcgagaagagaaaagataagaatgcacagaagttgcacttaaacctaggccaccccgtgcacttccaagaaatggagagcctgcatctgagcgaagaagagaggcaagaggagctggactccatgatcaggatgaacaaagaaaagctggaagagtgcactaggagaaatggacaggtgttcatcacaaacctcgccacattcactgaaaagtttctcctgcagctggatgaggttgtcacaatcgatgatgtgcaggtggcccggatggaaccaccaaagcagaaactttcaatgctcattagaagaaagttggccgggctcagtcttaaggaagaatcggagaaaccgctcattgagcgtggctctcgaaagtggcccgggattaagcccactgaggtcaccattcagaataagatcctccttcagcccaccagtagtatctccacgacaaagactaccctcggccatttggccgccgtggaagctagagacgcggtctacctgaagtacctggctagctttgaggaagagctgaaacgaatacaggacgactgtacttctcaaataaaggaggcacagcgatggaaagacagctggaaacaatcgctgcacactatccagggactttatgtttag

SEQ ID NO: 206381 - DNA, 2700 bp, Artificial Sequence
  derived and/or modified sequence
gggcggccagccgccgtggtcgctgggccagctctggcagcactgcgagaaagcctgcggatttgtgctatgagaggaggggagaaccggcctccagcccgtgttcagtccagctcagaggaactggagcttaggcatcagagcctcgacgccttccccgggagacggctccctggacgaggcattcagcccgccgctaagatgtcatccgtgggaaaagtgacccaagtgcccaatggtaaggcctatcagcagatttttcaggcagaggtgcagctcgtgcatagccttgcggccacacgaaaaagagctgctgaacgctctgtcaccctaaaaagtggcaggatccctatgatgaagaaggtagagacgcccgagggtgaagtcatgtctccaaggcagcaaaagtggatgcacagcctcccaaacgactggattatggaaaaccccgtgctgcatagagagaaggagcgcgcaaagcgcgagaaggctcgcgagtctgagaacacaattgcagcccgggaggtgcgaggactcatggatacaatcgttccagagaagatctccacttctacctttcagaggcaggccgaacacaagcgtaaaagctatgagagcgctcttgcctcgttccaggaggaaattgcccaagtaggtaaggagatggaacccctaattgtcgacaccggcgggctgtttttaaagaaactgacagagtccgacgaggagatgaaccgtttgtttctgaaagtagaaaacgacaccaatctggaagactacacaattcaggccctgttggagctgtgggataaggttgctgggcggttactgctgagaaaacaggaaattaaggagcttgatgaagcgctgcacagtcttgagtttagtagaaccgataaattaaagagtgtgcttaagaagtacgctgaggtgatagagaaaacctcttacttgatgaggcctgaggtctaccgactcatcaacgaggaagcgatggtcatgaattatgccctgttgggcaatagaaaggcattggctcagctcttcgtgaacctcatggaaagtaccctgcagcaggaactcgacagtcgtcataggtggcagggattggtcgatacatggaaagctctgaagaaagaagcactcctccaaagcttttcagaatttatggcctcggagagcattcatacgccaccggccgtaaccaaggaactggaagtcatgctgaaaacgcaaaatgtgctgcaacagcgccggctgaagcacctgtgcaccatctgtgacctgctgccaccaagctactcaaagacgcagctaaccgaatggcatagctctctaaactctttgaataaggagctggacacatatcatgtggactgtatgatgcggatccgactactttacgaaaagacctggcaggaatgtctgatgcacgtacaaaactgcaagaagcagcttctagactggaaggcctttaccgaggaagaggccgagaccctggttaaccagtttttctttcagatggtgggggcgctgcagggaaaggtggaggaagacctggagcttctcgataagagtttcgaaacgctagctgaccagacagaatggcagtcatctcatttgttcaagtatttccaagaggtcgtgcagctatgggaggctcaccagtccgagctcctggtgcaggaactggagctggaaaagcgtatggagcagcatcgccagaaacactcgctggagtcacaagtacaggaagcccacctggatcggctgttggaccagctcagacagcaatcagataaagagaccttagccttccacttggaaaaagttaaggactacctcaaaaatatgaagtcgcggtatgagtgcttccacactctgttaacaaaagaggtgatggaatatcccgccattatgctgaaagagctgaatagctattcttccgccctgtctcagtacttcttcgtgagagaaatcttcgaacagaacctggcgggcgaagtgatctttaaattccggcagcccgaagcacacgagaagccatcccagaaaagagtaaagaaactcaggaagaaacagggctccaaagaggatatgacgcggtccgaagaaagcatcagctcaggaacaagcaccgcccgctccgttgaagaagttgaagaagagaatgatcaagagatggaaagcttcatcactgaagaggtacttgggcaacaaaagaaaagccctctccacgcgaagatggacgaatcaaaggagggttccattcagggcctagaagaaatgcaggttgaaagagaggggtctctgaatcctagtctcaatgaagagaacgtgaagggtcaaggggaaaaaaaggaagaaagcgaggaggaggatgaaaaagaggaggaagaggaggaagaaaagctcgaagaagagaaggaagagaaagaggcgcaggaggagcaggagtctctatctgttggcgaggaagaagataaggaggaaggcctggaagagatctattatgaggacatggagtctttcactatttctagcggtaacacgtattttgtttttgtccctctggaggaggagcattgccggaaaagccacagcaccttctcagcaatgttcatcaacgacacatcttctgcaaaattcattgaacaggttaccatcccgtcccgcctgatactagagattaagaagtag

SEQ ID NO: 206382 - DNA, 4941 bp, Artificial Sequence
  derived and/or modified sequence
atgtggcacggcaaccacgtgcagcccggggccacccaccggcccaaccagggcctggagatgctgcagggcctgggcatcggcatgaaggccttccacaacttcaactacttcctgttcttctacaacgtgctgctgggcctgggcgcctgcctgagccggctgctgatcagctgcctgctgggcatgtggctgattgccagaattgacaggaccatcatgcagagcggctatgagggcgctgacatgggcttcagcgcctggattggcatgctgtacatggaccactaccacatcaaccctgtgctggtgtccttctgccacatcctgatcaccaaccaccgggagaagaagctgcagcagagcaccaagtactggtgcctgaaccagagcgctgagagcctgcgcatctgtgccatgaggggcggggagaacagacctccagcccgggtgcagagcagcagcgaggagctggagctgcggcaccagagcctggatgccttccctggaagaaggctgcccggccggggcatccagcctgctgccaagatgagctctgtgggcaaggtgacccaggtgcccaacgggaaggcctaccagcagatcttccaggccgaggtgcagctggtgcacagcctggccgccaccaggaagagagctgctgagaggtctgtgaccctgaagagcggccgcatccccatgatgaagaaggtggagaccccagagggggaggtgatgagcccccggcagcagaagtggatgcacagcctgcccaatgactggatcatggagaaccctgtgctgcaccgggagaaggagcgggccaagcgggagaaggcccgggagagcgagaacaccatcgccgcccgggaggtgcggggcctgatggacaccatcgtgcctgagaagatcagcaccagcaccttccagaggcaggccgagcacaagaggaagagctatgagagcgccctggccagcttccaggaggagatcgcccaggtgggcaaggagatggagcccctcatcgtggacacaggaggcctcttcctgaagaagctgacagaaagtgatgaggagatgaacagactcttcctgaaggtggagaatgacaccaacctggaggactacaccatccaggccctgctggagctgtgggacaaggtggccggccgcctgctgctgaggaagcaggagatcaaggagctggatgaggccctgcacagcctggagttcagcaggacagacaagctgaagtctgtgctgaagaagtatgcagaggtgattgagaagaccagctacctgatgaggcctgaggtgtaccgcctcatcaatgaggaggccatggtgatgaactatgccctgctgggcaacaggaaggccctggcccagctgtttgtgaacctgatggagagcaccctgcagcaggagctggacagccgccaccgctggcagggcctggtggacacctggaaggccctgaagaaggaggccctgctgcagagcttcagcgagttcatggccagcgagagcatccacaccccacctgctgtgaccaaggagctggaggtgatgctgaagacccagaatgtgctgcagcagaggcggctgaagcacctgtgcaccatctgtgacctgctgcccccatcctacagcaagacccagctgacagagtggcacagcagcctgaacagcctgaacaaggagctggacacctaccacgtggactgcatgatgaggatccggctgctgtatgagaagacctggcaggagtgcctgatgcacgtgcagaactgcaagaagcagctgctggactggaaggccttcacagaggaggaggccgagaccctggtgaaccagttcttcttccagatggtgggcgccctgcagggcaaggtggaggaggacctggagctgctggacaagagctttgagaccctggccgaccagacagagtggcagagcagccacctgttcaagtacttccaggaggtggtgcagctgtgggaggcccaccagagcgagctgctggtgcaggagctggagctggagaagaggatggagcagcaccggcagaagcacagcctggagagccaggtgcaggaggcccacctggaccggctgctggaccagctgcggcagcagagcgacaaggagaccctggccttccacctggagaaggtgaaggactacctgaagaacatgaagagccgctatgagtgcttccacaccctgctgaccaaggaggtgatggagtacccagccatcatgctgaaggagctgaacagctacagcagcgccctgagccagtacttctttgtgcgggagatctttgagcagaacctggccggggaggtgatcttcaagttccggcagcctgaggcccacgagaagcccagccagaagagggtgaagaagctgaggaagaagcagggcagcaaggaggacatgaccaggtctgaggagagcatcagcagcggcaccagcacagcccggtctgtggaggaggtggaggaggagaatgaccaggagatggagagcttcatcacagaggaggtgctgggccagcagaagaagagccccctgcacgccaagatggatgagagcaaggagggcagcatccagggcctggaggagatgcaggtggagcgggagggcagcctgaaccccagcctgaatgaggagaatgtgaagggccagggcgagaagaaggaggagagcgaggaggaggatgagaaggaggaggaggaggaggaggagaagctggaggaggagaaggaggagaaggaggcccaggaggagcaggagagcctgtctgtgggggaggaggaggacaaggaggagggcctggaggagatctactatgaggacatggagagcttcaccatcagcagcggcaacacctactttgtgtttgtgcccctggaggaggagcactgcaggaagagccacagcaccttcagcgccatgttcatcaatgacaccagcagcgccaagttcatcgagcaggtgaccatccccagccgcctcatcctggagatcaagaagcagctgttcagcgagggcggcaacttcagccccaaggagatcaacagcctgtgcagccggctggagaaggaggccgccagaattgagctggtggagagcgtcatcatgctgaacatggagaagctggagaatgagtacctggaccaggccaatgatgtgatcaacaagtttgagagcaagttccacaacctgtctgtggacctgatcttcatcgagaagatccagaggctgctgaccaacctgcaggtgaagatcaagtgccaggtggccaagagcaacagccagaccaacggcctgaacttcagcctgcagcagctgcagaacaagatcaagacctgccaggagagcagaggagagaagaccaccgtgaccacagaggagctgctgagctttgtgcagacctggaaggagaagctgagccagaggatccagtacctgaactgcagcctggacagagtgtccatgacagagctggtgttcaccaacaccatcctgaaggaccaggaggaggacagcgacatcctgaccagcagcgaggccctggaggaggaggccaagctggatgtggtgaccccagagagcttcacccagctgagccgggtgggcaagcccctgattgaggaccctgctgtggatgtgatcaggaagctgctgcagctgcccaacaccaagtggcccacccaccactgtgacaaggaccccagccagacaggcttcaagaggcaccgctgccagcctgagaacagcggcaagaaggctgtgcccagcgccagcgccaccagcgctggcagcctgcagaccacccacccccccctgagccacagcttcaccccccaccccaagcccaacaagatggagaggaagtacagagtgctgggggacaagcccccacctgctgctgaggacttcaagggcatcatcctgaccctgctgtgggagagcagcgagaacctgctgactgtggccgaggagttctacaggaaggagaagaggcctgtgaccaggccagactgcatgtgtgacacctttgaccagtgtgccgagaacatcagcaagaagatcctggagtaccagagccaggccaacaagtaccacaacagctgcctgattgagctgcgcatccagatccgccgctttgaggagctgctgccccaggtgtgctggctggtgatggagaacttcaaggagcaccactggaagaagttcttcacctctgtgaaggagatccggggccagtttgaggagcagcagaagaggctggagaagaggaaggacaagaatgcccagaagctgcacctgaacctgggccaccctgtgcacttccaggagatggagagcctgcacctgtctgaggaggagcggcaggaggagctggacagcatgatccgcatgaacaaggagaagctggaggagtgcaccaggagaaatggccaggtgttcatcaccaacctggccaccttcacagagaagttcctgctgcagctggatgaggtggtgaccattgatgatgtgcaggtggccaggatggagccccccaagcagaagctgtccatgctgatccggaggaagctggccggcctgagcctgaaggaggagagcgagaagcccctgattgagcggggcagcaggaagtggccaggcatcaagcccacagaggtgaccatccagaacaagatcctgctgcagcccaccagcagcatcagcaccaccaagaccaccctgggccacctggccgctgtggaggccagagatgctgtgtacctgaagtacctggccagctttgaggaggagctgaagaggatccaggatgactgcaccagccagatcaaggaggcccagcgctggaaggacagctggaagcagagcctgcacaccatccagggcctgtatgtgtag

SEQ ID NO: 206383 - DNA, 5106 bp, Artificial Sequence
  derived and/or modified sequence
atgagaggaggagaaaatcggcccccagcccgggtgcagagcagcagcgaggagctggagctgcggcaccagagcctggatgccttccctggccggcggctgcccggccggggcatccagcctgctgccaagatgagctctgtgggcaaggtgacccaggtgcccaacgggaaggcctaccagcagatcttccaggccgaggtgcagctggtgcacagcctggccgccaccaggaagagagctgctgagaggtctgtgaccctgaagagcggccgcatccccatgatgaagaaggtggagaccccagagggggaggtgatgagcccccggcagcagaagtggatgcacagcctgcccaatgactggatcatggagaaccctgtgctgcaccgggagaaggagcgggccaagcgggagaaggcccgggagagcgagaacaccatcgccgcccgggaggtgcggggcctgatggacaccatcgtgcctgagaagatcagcaccagcaccttccagaggcaggccgagcacaagaggaagagctatgaaagtgccctggccagcttccaggaggagatcgcccaggtgggcaaggagatggagcccctgattgtggacaccggcggcctcttcctgaagaagctgacagaaagtgatgaggagatgaacagactcttcctgaaggtggagaatgacaccaacctggaggactacaccatccaggccctgctggagctgtgggacaaggtggccggccgcctgctgctgaggaagcaggagatcaaggagctggatgaggccctgcacagcctggagttcagcaggacagacaagctgaagtctgtgctgaagaagtatgcagaggtgattgagaagaccagctacctgatgaggcctgaggtgtaccgcctcatcaatgaggaggccatggtgatgaactatgccctgctgggcaacaggaaggccctggcccagctgtttgtgaacctgatggagagcaccctgcagcaggagctggacagccgccaccgctggcagggcctggtggacacctggaaggccctgaagaaggaggccctgctgcagagcttcagcgagttcatggccagcgagagcatccacaccccacctgctgtgaccaaggagctggaggtgatgctgaagacccagaatgtgctgcagcagaggcggctgaagcacctgtgcaccatctgtgacctgctgccccccagctacagcaagacccagctgacagagtggcacagcagcctgaacagcctgaacaaggagctggacacctaccacgtggactgcatgatgaggatccggctgctgtatgagaagacctggcaggagtgcctgatgcacgtgcagaactgcaagaagcagctgctggactggaaggccttcacagaggaggaggccgagaccctggtgaaccagttcttcttccagatggtgggcgccctgcagggcaaggtggaggaggacctggagctgctggacaagagctttgagaccctggccgaccagacagagtggcagagcagccacctgttcaagtacttccaggaggtggtgcagctgtgggaggcccaccagagcgagctgctggtgcaggagctggagctggagaagaggatggagcagcaccggcagaagcacagcctggagagccaggtgcaggaggcccacctggaccggctgctggaccagctgcggcagcagagcgacaaggagaccctggccttccacctggagaaggtgaaggactacctgaagaacatgaagagccgctatgagtgcttccacaccctgctgaccaaggaggtgatggagtacccagccatcatgctgaaggagctgaacagctacagcagcgccctgagccagtacttctttgtgcgggagatctttgagcagaacctggccggggaggtgatcttcaagttccggcagcctgaggcccacgagaagcccagccagaagagggtgaagaagctgaggaagaagcagggcagcaaagaagacatgaccaggtctgaggagagcatcagcagcggcaccagcacagcccggtctgtggaggaggtggaggaggagaatgaccaggagatggagagcttcatcacagaggaggtgctgggccagcagaagaagagccccctgcacgccaagatggatgagagcaaggagggcagcatccagggcctggaggagatgcaggtggagcgggagggcagcctgaaccccagcctgaatgaagaaaatgtgaagggccagggcgagaagaaggaggagagcgaggaggaggatgagaaggaggaggaggaggaggaggagaagctggaggaggagaaggaggagaaggaggcccaggaggagcaggagagcctgtctgtgggggaggaggaggacaaggaggagggcctggaggagatctactatgaggacatggagagcttcaccatcagcagcggcaacacctactttgtgtttgtgcccctggaggaggagcactgcaggaagagccacagcaccttcagcgccatgttcatcaatgacaccagcagcgccaagttcatcgagcaggtgaccatccccagccgcctcatcctggagatcaagaagcagctgcgggccggcttctttgagcacctggagaagtggtttgaccagtgcagcctgaacaccagggtgacagtggccaccaagatcaatgagctggacagcgagctggagctgcacctgcacctgcaccagccccgggcccagcagatcgagaaggacatccacaacgtgcgggctgctgagctgctgctgcaccaggagcagctggacagccactgtgccggcgtgacagagaccctgaagaagaagaggctgatgttctgccagttccaggaggagcagaatgtgcgcagcaagaacttccggctgaagatctatgacatggagcacatcttcctgaatgccaccaggagccagaagctggtgaccctgagcaacaccctgcaccaggagctgctgtcctatgtggatgtgacccaggtgtccctgcgctccttccggcagtacctggaggagagcctgggcaagctgcgctacagcaacatcgagttcatcaagcactgccgcctcttcagcgagggcggcaacttcagccccaaggagatcaacagcctgtgcagccggctggagaaggaggccgcccgcatcgagctggtggagagcgtcatcatgctgaacatggagaagctggagaatgagtacctggaccaggccaatgatgtgatcaacaagtttgagagcaagttccacaacctgtctgtggacctgatcttcatcgagaagatccagaggctgctgaccaacctgcaggtgaagatcaagtgccaggtggccaagagcaacagccagaccaacggcctgaacttcagcctgcagcagctgcagaacaagatcaagacctgccaggagagcagaggagagaagaccaccgtgaccacagaggagctgctgagctttgtgcagacctggaaggagaagctgagccagaggatccagtacctgaactgcagcctggacagagtgtccatgacagagctggtgttcaccaacaccatcctgaaggaccaggaggaggacagcgacatcctgaccagcagcgaggccctggaggaggaggccaagctggatgtggtgaccccagagagcttcacccagctgagccgggtgggcaagcccctgattgaagatcctgctgtggatgtgatcaggaagctgctgcagctgcccaacaccaagtggcccacccaccactgtgacaaggaccccagccagacaggccgcggggcctgggcctgtggcagccggggcagcagcgaggccggggccggcggcgctgtgtgcagcccccctgtgctgtgcagctgccccggccccagcagccccaagggcttcaagaggcaccgctgccagcctgagaacagcggcaagaaggctgtgcccagcgccagcgccaccagcgctggcagcttcaccccccaccccaagcccaacaagatggagaggaagtacagagtgctgggggacaagcccccacctgctgctgaggacttcaagggcatcatcctgaccctgctgtgggagagcagcgagaacctgctgactgtggccgaggagttctacaggaaggagaagaggcctgtgaccaggccagactgcatgtgtgacacctttgaccagtgtgccgagaacatcagcaagaagatcctggagtaccagagccaggccaacaagtaccacaacagctgcctgattgagctgcgcatccagatcagaagatttgaggagctgctgccccaggtgtgctggctggtgatggagaacttcaaggagcaccactggaagaagttcttcacctctgtgaaggagatccggggccagtttgaggagcagcagaagaggctggagaagaggaaggacaagaatgcccagaagctgcacctgaacctgggccaccctgtgcacttccaggagatggagagcctgcacctgtctgaggaggagcggcaggaggagctggacagcatgatccgcatgaacaaggagaagctggaggagtgcaccaggagaaatggccaggtgttcatcaccaacctggccaccttcacagagaagttcctgctgcagctggatgaggtggtgaccattgatgatgtgcaggtggccaggatggagccccccaagcagaagctgtccatgctgatccggaggaagctggccggcctgagcctgaaggaggagagcgagaagcccctcatcgagcggggcagcaggaagtggccaggcatcaagcccacagaggtgaccatccagaacaagatcctgctgcagcccaccagcagcatcagcaccaccaagaccaccctgggccacctggccgctgtggaggccagagatgctgtgtacctgaagtacctggccagctttgaggaggagctgaagaggatccaggatgactgcaccagccagatcaaggaggcccagcgctggaaggacagctggaagcagagcctgcacaccatccagggcctgtatgtgtag

SEQ ID NO: 206384 - DNA, 2049 bp, Artificial Sequence
  derived and/or modified sequence
atgtggcacggcaaccacgtgcagcccggggccacccaccggcccaaccagggcctggagatgctgcagggcctgggcatcggcatgaaggccttccacaacttcaactacttcctgttcttctacaacgtgctgctgggcctgggcgcctgcctgagccggctgctgatcagctgcctgctgggcatgtggctgattgccagaattgacaggaccatcatgcagagcggctatgagggcgctgacatgggcttcagcgcctggattggcatgctgtacatggaccactaccacatcaaccctgtgctggtgtccttctgccacatcctgatcaccaaccaccgggagaagaagctgcagcagagcaccaagtactggtgcctgaaccagagcgctgagagcctgcgcatctgtgccatgaggggcggggagaacagacctccagcccgggtgcagagcagcagcgaggagctggagctgcggcaccagagcctggatgccttccctggaagaaggctgcccggccggggcatccagcctgctgccaagatgagctctgtgggcaaggtgacccaggtgcccaacgggaaggcctaccagcagatcttccaggccgaggtgcagctggtgcacagcctggccgccaccaggaagagagctgctgagaggtctgtgaccctgaagagcggccgcatccccatgatgaagaaggtggagaccccagagggggaggtgatgagcccccggcagcagaagtggatgcacagcctgcccaatgactggatcatggagaaccctgtgctgcaccgggagaaggagcgggccaagcgggagaaggcccgggagagcgagaacaccatcgccgcccgggaggtgcggggcctgatggacaccatcgtgcctgagaagatcagcaccagcaccttccagaggcaggccgagcacaagaggaagagctatgagagcgccctggccagcttccaggaggagatcgcccaggtgggcaaggagatggagcccctcatcgtggacacaggaggcctcttcctgaagaagctgacagaaagtgatgaggagatgaacagactcttcctgaaggtggagaatgacaccaacctggaggactacaccatccaggccctgctggagctgtgggacaaggtggccggccgcctgctgctgaggaagcaggagatcaaggagctggatgaggccctgcacagcctggagttcagcaggacagacaagctgaagtctgtgctgaagaagtatgcagaggtgattgagaagaccagctacctgatgaggcctgaggtgtaccgcctcatcaatgaggaggccatggtgatgaactatgccctgctgggcaacaggaaggccctggcccagctgtttgtgaacctgatggagagcaccctgcagcaggagctggacagccgccaccgctggcagggcctggtggacacctggaaggccctgaagaaggaggccctgctgcagagcttcagtgacctgctgcccccatcctacagcaagacccagctgacagagtggcacagcagcctgaacagcctgaacaaggagctggacacctaccacgtggactgcatgatgaggatccggctgctgtatgagaagacctggcaggagtgcctgatgcacgtgcagaactgcaagaagcagctgctggactggaaggccttcacagaggaggaggccgagaccctggtgaaccagttcttcttccagatggtgggcgccctgcagggcaaggtggaggaggacctggagctgctggatgtgcgggccggggactgcagcactggagagctgaggaaccccagccggctgtggcagatccggcagagcggccgggtgcacaccagcagcagcatcagccgccgctggtacaactgtggccgccacacccgggccagctgctggtgccgctcctggagctggaggcggggctggagcagcacaggccgcagcacagcctggagggcccgctgccggcggcccaccagcatcggctcctggaccaactag

SEQ ID NO: 206385 - DNA, 2712 bp, Artificial Sequence
  derived and/or modified sequence
atgagaggaggagaaaatcggcccccagcccgggtgcagagcagcagcgaggagctggagctgcggcaccagagcctggatgccttccctggccggcggctgcccggccggggcatccagcctgctgccaagatgagctctgtgggcaaggtgacccaggtgcccaacgggaaggcctaccagcagatcttccaggccgaggtgcagctggtgcacagcctggccgccaccaggaagagagctgctgagaggtctgtgaccctgaagagcggccgcatccccatgatgaagaaggtggagaccccagagggggaggtgatgagcccccggcagcagaagtggatgcacagcctgcccaatgactggatcatggagaaccctgtgctgcaccgggagaaggagcgggccaagcgggagaaggcccgggagagcgagaacaccatcgccgcccgggaggtgcggggcctgatggacaccatcgtgcctgagaagatcagcaccagcaccttccagaggcaggccgagcacaagaggaagagctatgaaagtgccctggccagcttccaggaggagatcgcccaggagatggagcccctcatcgtggacacaggaggcctcttcctgaagaagctgacagaaagtgatgaggagatgaacagactcttcctgaaggtggagaatgacaccaacctggaggactacaccatccaggccctgctggagctgtgggacaaggtggccggccgcctgctgctgaggaagcaggagatcaaggagctggatgaggccctgcacagcctggagttcagcaggacagacaagctgaagtctgtgctgaagaagtatgcagaggtgattgagaagaccagctacctgatgaggcctgaggtgtaccgcctcatcaatgaggaggccatggtgatgaactatgccctgctgggcaacaggaaggccctggcccagctgtttgtgaacctgatggagagcaccctgcagcaggagctggacagccgccaccgctggcagggcctggtggacacctggaaggccctgaagaaggaggccctgctgcagagcttcagcgagttcatggccagcgagagcatccacaccccacctgctgtgaccaaggagctggaggtgatgctgaagacccagaatgtgctgcagcagaggcggctgaagcacctgtgcaccatctgtgacctgctgcccccatcctacagcaagacccagctgacagagtggcacagcagcctgaacagcctgaacaaggagctggacacctaccacgtggactgcatgatgaggatccggctgctgtatgagaagacctggcaggagtgcctgatgcacgtgcagaactgcaagaagcagctgctggactggaaggccttcacagaggaggaggccgagaccctggtgaaccagttcttcttccagatggtgggcgccctgcagggcaaggtggaggaggacctggagctgctggacaagagctttgagaccctggccgaccagacagagtggcagagcagccacctgttcaagtacttccaggaggtggtgcagctgtgggaggcccaccagagcgagctgctggtgcaggagctggagctggagaagaggatggagcagcaccggcagaagcacagcctggagagccaggtgcaggaggcccacctggaccggctgctggaccagctgcggcagcagagcgacaaggagaccctggccttccacctggagaaggtgaaggactacctgaagaacatgaagagccgctatgagtgcttccacaccctgctgaccaaggaggtgatggagtacccagccatcatgctgaaggagctgaacagctacagcagcgccctgagccagtacttctttgtgcgggagatctttgagcagaacctggccggggaggtgatcttcaagttccggcagcctgaggcccacgagaagcccagccagaagagggtgaagaagctgaggaagaagcagggcagcaaggaggacatgaccaggtctgaggagagcatcagcagcggcaccagcacagcccggtctgtggaggaggtggaggaggagaatgaccaggagatggagagcttcatcacagaggaggtgctgggccagcagaagaagagccccctgcacgccaagatggatgagagcaaggagggcagcatccagggcctggaggagatgcaggtggagcgggagggcagcctgaaccccagcctgaatgaggagaatgtgaagggccagggcgagaagaaggaggagagcgaggaggaggatgagaaggaggaggaggaggaggaggagaagctggaggaggagaaggaggagaaggaggcccaggaggagcaggagagcctgtctgtgggggaggaggaggacaaggaggagggcctggaggagatctactatgaggacatggagagcttcaccatcagcagcggcaacacctactttgtgtttgtgcccctggaggaggagcactgcaggaagagccacagcaccttcagcgccatgttcatcaatgacaccagcagcgccaagttcatcgagcaggtgaccatccccagccgcctcatcctggagatcaagaagcaccgggcctggtggtgtgtgcctgtgatcccagccacccaggaggccgaggccggggagagccctgagcccaggagaagaaggctgcagtag

SEQ ID NO: 206386 - DNA, 2700 bp, Artificial Sequence
  derived and/or modified sequence
ggccggcctgctgctgtggtggccggccctgccctggccgccctgcgggagagcctgcgcatctgtgccatgaggggcggggagaacagacctccagcccgggtgcagagcagcagcgaggagctggagctgcggcaccagagcctggatgccttccctggaagaaggctgcccggccggggcatccagcctgctgccaagatgagctctgtgggcaaggtgacccaggtgcccaacgggaaggcctaccagcagatcttccaggccgaggtgcagctggtgcacagcctggccgccaccaggaagagagctgctgagaggtctgtgaccctgaagagcggccgcatccccatgatgaagaaggtggagaccccagagggggaggtgatgagcccccggcagcagaagtggatgcacagcctgcccaatgactggatcatggagaaccctgtgctgcaccgggagaaggagcgggccaagcgggagaaggcccgggagagcgagaacaccatcgccgcccgggaggtgcggggcctgatggacaccatcgtgcctgagaagatcagcaccagcaccttccagaggcaggccgagcacaagaggaagagctatgagagcgccctggccagcttccaggaggagatcgcccaggtgggcaaggagatggagcccctcatcgtggacacaggaggcctcttcctgaagaagctgacagaaagtgatgaggagatgaacagactcttcctgaaggtggagaatgacaccaacctggaggactacaccatccaggccctgctggagctgtgggacaaggtggccggccgcctgctgctgaggaagcaggagatcaaggagctggatgaggccctgcacagcctggagttcagcaggacagacaagctgaagtctgtgctgaagaagtatgcagaggtgattgagaagaccagctacctgatgaggcctgaggtgtaccgcctcatcaatgaggaggccatggtgatgaactatgccctgctgggcaacaggaaggccctggcccagctgtttgtgaacctgatggagagcaccctgcagcaggagctggacagccgccaccgctggcagggcctggtggacacctggaaggccctgaagaaggaggccctgctgcagagcttcagcgagttcatggccagcgagagcatccacaccccacctgctgtgaccaaggagctggaggtgatgctgaagacccagaatgtgctgcagcagaggcggctgaagcacctgtgcaccatctgtgacctgctgcccccatcctacagcaagacccagctgacagagtggcacagcagcctgaacagcctgaacaaggagctggacacctaccacgtggactgcatgatgaggatccggctgctgtatgagaagacctggcaggagtgcctgatgcacgtgcagaactgcaagaagcagctgctggactggaaggccttcacagaggaggaggccgagaccctggtgaaccagttcttcttccagatggtgggcgccctgcagggcaaggtggaggaggacctggagctgctggacaagagctttgagaccctggccgaccagacagagtggcagagcagccacctgttcaagtacttccaggaggtggtgcagctgtgggaggcccaccagagcgagctgctggtgcaggagctggagctggagaagaggatggagcagcaccggcagaagcacagcctggagagccaggtgcaggaggcccacctggaccggctgctggaccagctgcggcagcagagcgacaaggagaccctggccttccacctggagaaggtgaaggactacctgaagaacatgaagagccgctatgagtgcttccacaccctgctgaccaaggaggtgatggagtacccagccatcatgctgaaggagctgaacagctacagcagcgccctgagccagtacttctttgtgcgggagatctttgagcagaacctggccggggaggtgatcttcaagttccggcagcctgaggcccacgagaagcccagccagaagagggtgaagaagctgaggaagaagcagggcagcaaggaggacatgaccaggtctgaggagagcatcagcagcggcaccagcacagcccggtctgtggaggaggtggaggaggagaatgaccaggagatggagagcttcatcacagaggaggtgctgggccagcagaagaagagccccctgcacgccaagatggatgagagcaaggagggcagcatccagggcctggaggagatgcaggtggagcgggagggcagcctgaaccccagcctgaatgaggagaatgtgaagggccagggcgagaagaaggaggagagcgaggaggaggatgagaaggaggaggaggaggaggaggagaagctggaggaggagaaggaggagaaggaggcccaggaggagcaggagagcctgtctgtgggggaggaggaggacaaggaggagggcctggaggagatctactatgaggacatggagagcttcaccatcagcagcggcaacacctactttgtgtttgtgcccctggaggaggagcactgcaggaagagccacagcaccttcagcgccatgttcatcaatgacaccagcagcgccaagttcatcgagcaggtgaccatccccagccgcctcatcctggagatcaagaagtag

SEQ ID NO: 206387 - DNA, 4941 bp, Artificial Sequence
  derived and/or modified sequence
atgtggcacggcaaccacgtgcagcccggcgccacccaccggcccaatcagggtctcgaaatgctccagggcctcggaataggaatgaaggcatttcacaactttaactatttcctgtttttctacaacgtcctgcttggtctcggcgcgtgtctgtcccggctcctgatctcctgtctgctagggatgtggttgatcgcgcgaatcgataggacaatcatgcagtccggatacgagggagcggatatgggattctcagcatggattggcatgctctacatggaccactatcacattaatcctgtcctcgtgtctttctgccacatcctaatcacaaatcacagggaaaagaagttacagcagtctacaaagtactggtgtctgaatcaatctgctgagagcctgcggatctgtgccatgaggggcggtgagaacagaccccccgccagggtgcagagttccagcgaggagcttgaactgaggcatcagtcactcgacgcgtttcctgggcgtagactgcccggccggggtatccaaccggccgccaaaatgagttctgtgggcaaagtgacccaggttccgaatgggaaggcctaccagcagatcttccaggctgaggtgcagctggtccatagcttggctgccaccagaaaacgcgcagccgagagatcagtgacacttaagagtggtagaatccctatgatgaagaaagtcgagactccagaaggtgaagtgatgagcccccgacagcagaagtggatgcacagtctgcccaacgactggattatggaaaatcccgttctgcaccgtgagaaggaacgggcgaaaagggaaaaagctcgggaatccgagaataccatcgcggctcgagaggtgcgcggactgatggacaccatcgtgccagagaagatttcaaccagtacatttcaacgacaagccgagcacaagcggaaaagttatgaatcagctctggcctccttccaggaggaaatcgcccaggtcggcaaggagatggagcccctgatcgttgataccggcggcttgtttttgaagaaacttacagagagtgatgaggagatgaaccgtctgtttctcaaggtggagaacgacacaaacctggaggactacaccatacaggccttgctcgagctatgggataaggtcgccggaagactgcttttgcgaaagcaggagatcaaggaactggacgaagccctgcatagtttagagttttctcgaacagacaaattgaaatctgtccttaagaagtatgccgaggtgattgagaagacgtcctacctaatgcgtcctgaagtgtacaggcttataaatgaagaagcaatggtgatgaattatgcattgctcgggaatagaaaggccttggcccagctatttgttaaccttatggagtctacactccagcaggaactcgactctcgccatagatggcagggactggtggatacttggaaggccctgaaaaaagaggctctattacagagtttttccgagttcatggcttccgagtccatccataccccacctgccgtgacaaaagaactggaagtgatgctgaaaactcagaatgtcctgcagcaacggaggctcaagcacctttgcaccatttgcgaccttctgcccccctcctactcaaaaactcagctgaccgaatggcactcctccctgaactcactcaacaaggagctcgatacttatcatgtggattgcatgatgcggattcgccttttgtatgagaaaacttggcaggagtgcctgatgcacgtgcagaactgtaaaaagcagctgctggactggaaagcattcacggaagaagaggccgaaactctcgtgaaccagtttttctttcagatggtcggagctctccaggggaaggtggaggaagacctcgagctgctggacaaaagctttgaaaccctggcagatcaaacagaatggcaatcttcacacctgtttaaatacttccaggaagtggtgcagctgtgggaggcccatcaaagtgaattgctggttcaggaactggagctcgaaaagaggatggagcagcaccgccaaaagcactccctggaatcgcaggtacaagaggcacacctggatagactgctggaccagcttcgacagcagtccgacaaggagactctggcttttcatcttgaaaaggtgaaagattacctgaagaacatgaagagccgctacgagtgcttccacactctcctgactaaggaagtcatggagtatcccgcaatcatgcttaaagagctaaattcgtactcctccgcattatcacagtacttctttgtcagggagatctttgagcagaacttggccggagaggtgatttttaaatttcggcagccggaggctcacgagaagccttcccagaagcgagtcaaaaaactcagaaaaaagcaaggctcaaaagaggacatgacccggagtgaagagagtatttcttcaggaacaagtactgcccggtcggtggaggaagtggaagaagagaacgaccaggagatggagtcctttatcactgaagaggtcctgggccagcagaaaaaatctccactgcacgcgaaaatggacgaatccaaagagggctctatccagggcctggaggagatgcaagtggaacgcgagggatccttgaatccatctttaaacgaggaaaacgtaaagggccagggagagaagaaagaggaaagcgaagaggaagacgagaaggaagaggaggaggaagaagaaaagcttgaggaggagaaggaggagaaagaggcgcaggaagagcaagagtcactgagcgtcggcgaggaggaagacaaggaggagggtctggaggaaatctattacgaggacatggagagctttacaatatcatccggcaacacgtattttgtttttgtccctctggaggaagagcactgtcggaaatcccactcaacatttagtgcaatgttcattaatgatacaagctcggcaaagttcatcgaacaggttacgatcccctcccgactcatattagagatcaagaaacagctgttcagcgaggggggaaatttctcacctaaggagattaactccttatgctcaaggcttgagaaggaggcagccaggatagagcttgtagagagcgtcattatgcttaatatggaaaagctggagaacgaatacctcgatcaggccaacgacgtaattaataaattcgaaagcaaattccacaatctgtcggtggatcttatctttatcgaaaagattcaaagactactcacgaatttgcaggtaaagatcaagtgtcaggttgctaagtctaacagccagaccaatggactgaatttctccctccagcagctgcagaacaagatcaaaacctgccaggagtcaagaggggagaagacaacagtcaccactgaggaactgctctcatttgtgcagacgtggaaggagaaactatcccagcgcattcagtacttgaattgctccttggaccgcgtaagtatgacagaacttgtgttcaccaacacaatcctgaaggaccaggaggaagacagcgatatactgacatcctctgaagcactggaggaggaggcgaaactcgatgtcgttacaccagagtcgttcacgcagctgtcccgggtgggtaaaccacttatcgaggatcccgccgtggatgtaattaggaagttgctgcagctgccgaatacgaagtggcccactcaccattgtgacaaggacccgtctcagaccgggttcaagcgccaccgatgtcaacctgagaattctgggaaaaaggccgtcccttccgcctctgctacctctgccggttctttgcaaacgactcatccccctctttcacattcattcacaccacatcccaaaccaaataagatggagcgtaagtatcgcgtgttgggagacaagccccctccggctgcagaagactttaaggggattattcttactctgctatgggaatcctccgagaacctcctcactgttgctgaggagttctacaggaaggagaaaagacccgtaaccaggcctgattgcatgtgcgatacgtttgatcaatgcgccgaaaatatttccaagaagattctggaataccaaagtcaggctaacaagtatcacaattcctgtcttattgaactacgtatccagatccgtagatttgaagagctgttgcctcaagtgtgttggctggtgatggaaaatttcaaggagcaccactggaagaaattcttcacatccgtgaaagaaatcagaggccagttcgaggagcaacagaagaggcttgaaaagcgtaaggacaaaaacgctcagaagctgcatctgaatctgggccaccctgttcacttccaggagatggagagcctgcacctcagtgaggaggagcgccaagaagagctcgattccatgatccggatgaataaagagaagttggaggaatgtacgagacgtaacgggcaggtcttcatcaccaacctggcgaccttcacggaaaagttcctgctccaactcgacgaagtagtaacgatcgacgacgtacaggtggcaaggatggagccgccaaaacaaaagctctccatgttgattagaaggaagttggcgggattgtcgctgaaagaggaatcggagaagccattgattgagcggggttctaggaaatggcctgggatcaaaccaacagaagttactattcaaaacaaaattctgctgcagccaacttcctcaatctcgactactaaaacgacgctcggtcatctggctgctgtcgaggctcgggatgcagtgtaccttaaatacctggcatctttcgaagaagaactgaagaggatccaagatgattgcacgagtcagatcaaggaagctcagagatggaaggacagctggaaacagagcctgcacaccattcagggcctatacgtgtag

SEQ ID NO: 206388 - DNA, 5106 bp, Artificial Sequence
  derived and/or modified sequence
atgcggggcggcgagaaccggccccccgcccgggtgcagagcagctccgaggagctcgagctccgtcaccagagcctggatgcgtttccaggacggcggctgcccggccggggcatccagcccgccgccaagatgtcttctgtcggcaaggtgacgcaagtaccaaacggcaaggcttatcagcagatcttccaggcagaggttcagctggtccattccctcgccgccacccggaagcgggctgcagagagatccgtgaccctaaagagtggccgcatccctatgatgaaaaaagttgaaacccccgaaggggaggtgatgtcacctcgccagcagaaatggatgcacagcctccctaatgactggattatggaaaaccccgttctccaccgggagaaggaacgtgctaagcgcgaaaaagcccgcgagtctgagaacaccatcgccgccagggaggttcgggggctgatggatacaatcgtcccagaaaagataagcacttcaacttttcagagacaggccgaacataaacggaagtcctatgaatcagccctggcttctttccaggaagaaatcgctcaggtgggtaaggagatggaaccccttattgtggatacaggggggctgttcctgaagaagttgaccgagagcgacgaagaaatgaacaggctgttcctgaaagttgagaatgacaccaatctcgaggactacacaatacaggctttgttagaattgtgggacaaggtggccggacgcctgttactccgtaagcaggagataaaggaactcgacgaagcgctgcattcactggagttctcacgcactgacaagctaaagtcggtcctaaagaaatatgccgaagtcatcgaaaagacttcctacctgatgcggcccgaagtctatcgcctgattaacgaggaagccatggtgatgaactacgctctgctgggaaacaggaaggcactcgcccaacttttcgtgaatctcatggaatccacgctgcagcaggagttggactcccggcatagatggcagggtctcgtcgatacctggaaagccctcaagaaagaggctctgctgcaatccttttcggagttcatggcctcagagagcatccacacacctcccgcggtgaccaaagaactggaggtcatgctcaagacacaaaatgtgttgcagcagcggagacttaaacacctttgcacgatatgcgacctcctcccaccatcatatagcaagacccagcttacagaatggcactccagcctgaatagtctgaacaaagaactcgacacttatcacgtggattgtatgatgaggatccgcctgctctacgagaaaacctggcaggagtgcctcatgcacgtccagaattgcaaaaaacagttgctggattggaaggcctttactgaagaggaagctgagacactcgtgaatcagttcttcttccagatggtaggggcactccaggggaaggttgaggaggatctggaactcctagataagtcgtttgagaccctggcagatcagactgaatggcagagctctcacctttttaagtatttccaggaagtggtgcagctatgggaggctcaccagtccgagcttctggttcaggaattggaactcgagaagaggatggaacagcatagacaaaaacatagcctagagagccaggtacaggaggcccacctcgacaggctattggatcagctgcgtcaacagagcgacaaggaaactctggcattccacttggaaaaggtcaaggactacctgaaaaacatgaaatcacggtacgaatgttttcatacgttacttacaaaagaggttatggagtaccctgctattatgctgaaagagctgaatagctactcctcagccctaagccagtatttcttcgtgcgggagatcttcgaacaaaacctggccggagaagtgatttttaagtttagacaaccagaagctcacgagaagccatctcaaaaacgagtgaagaagctgagaaagaagcaaggctctaaagaggatatgacgcggtctgaagagagtatcagttccgggacctctactgccagaagtgttgaggaagtggaggaggagaatgatcaagagatggagtcatttatcactgaggaagtcctgggacagcagaagaagtctcctctgcacgcgaagatggatgaatccaaggagggatccatccagggtttggaggagatgcaggtggaaagagagggatccctgaaccctagtctgaatgaagaaaacgtgaaagggcagggagagaaaaaagaagaatctgaggaagaggatgagaaagaggaagaagaagaagaagaaaaactggaagaggagaaggaggaaaaggaagcccaggaagagcaggagtctctgagcgtgggcgaggaggaggataaagaggaaggcctggaagagatctactatgaggatatggagtcctttacaatttccagcggcaatacatacttcgtcttcgtgcctctggaggaagagcactgtaggaagagccactctactttctcagccatgtttatcaacgatacaagctcagctaagtttatcgaacaggtcaccatcccaagcaggctcatcctcgaaattaagaaacagttgcgggcaggattcttcgagcatctggagaagtggtttgaccagtgctccctgaacaccagggtaacggtggcaaccaagataaacgagttagattccgaattggagctacacctgcatctgcaccagcccagggctcagcagattgaaaaagatattcacaatgtgagagccgctgaactgcttctccatcaggagcaactggattcacattgtgctggggtgacagagactctcaagaaaaagcgcctgatgttctgccagttccaggaagaacagaatgtcaggagtaaaaacttccggctgaagatatacgatatggagcatatctttttgaatgctaccagatctcagaaattggtcactctgtcaaacactcttcatcaggaattgttgagctacgttgacgtgacacaggtgtcattgcgttcctttagacagtatcttgaggagagtctgggcaaactccgatattccaatatagagtttatcaagcattgccgcctgtttagtgagggggggaacttctctccaaaggagatcaatagtctctgtagccgactggaaaaggaggcagcgcgcatcgaactggtcgagtcagtgattatgctcaacatggagaagctggagaacgagtacctcgatcaagcaaacgatgtgatcaacaagttcgaaagtaagttccacaacctaagtgtagacttgatttttatcgagaagatacagcgccttcttacaaacttgcaagtcaaaattaaatgccaagttgcaaagtcaaatagccagactaatgggctgaacttctcccttcaacagctgcaaaacaagatcaagacatgccaggaatccaggggcgagaagacaacagtaaccaccgaagaactcctctccttcgtgcagacatggaaggagaaattgtcccagcgcatacagtacttgaattgttcactcgacagggtcagtatgactgaactggtcttcactaacaccattctgaaggaccaggaagaggattccgatatcctgacatcctcagaagcgttggaagaagaggccaaactcgatgtggtgaccccggaaagtttcacccagttgagccgtgttggcaaacctttgattgaagaccccgctgttgatgtgatacggaaacttctccaactgcctaacaccaagtggccaacacatcactgtgataaggatcccagccagactggacgtggagcttgggcctgtggcagtagggggagtagcgaggccggagccggtggtgccgtctgttctcccccagtgctatgttcctgccccggtccaagcagtcctaagggatttaaaaggcataggtgccagccagagaacagcgggaaaaaggccgtcccttccgcatccgccacaagcgcagggtcctttactcctcatcccaagccgaacaagatggagagaaaatatcgagtgctgggagataaacctccccccgccgccgaggacttcaagggcataatcctcacactgctctgggagagcagcgagaacctgctcaccgtggctgaggaattctatcgcaaggaaaaaaggccagtgacccggccggactgcatgtgtgacaccttcgatcagtgcgctgagaatatcagcaagaagatcctcgagtatcagagtcaagcaaataagtatcacaattcatgcttgatagagcttaggattcagattagacgttttgaagaactgctaccacaggtgtgctggctcgtgatggagaacttcaaagaacatcactggaagaagttttttacctcggtgaaggaaatacgagggcagttcgaggagcagcagaagcggctggagaaacggaaagacaaaaacgcacaaaagctacatcttaacttggggcacccagtgcactttcaggagatggaatccttacatctgagtgaagaggaacgccaggaggagcttgattctatgatacggatgaacaaggaaaagttagaggaatgcactaggcgcaacggtcaggtctttattaccaatctggccacgttcaccgagaaattcttactgcagcttgacgaagtcgtcacaattgatgatgtgcaagtcgctagaatggagcctcccaagcaaaaactgagtatgctgatccgccgtaaactggccggcctgagtctgaaagaagaatctgaaaaacccctcatcgaacgggggtcgagaaaatggccaggcatcaagcccacggaagtgacgatccaaaacaaaattctgttacagccaacctccagcattagtactacaaaaactacgctggggcatctggcagctgtggaggcaagagacgcagtgtaccttaaatacttggcatcctttgaagaggagctcaagcgcatccaggatgattgtacgtctcaaatcaaggaggcccaacgctggaaagattcttggaaacaaagcctgcacacaatccagggcttatacgtttag

SEQ ID NO: 206389 - DNA, 2049 bp, Artificial Sequence
  derived and/or modified sequence
atgtggcacggcaaccacgtgcagcccggcgccacccaccggcccaaccaggggctggagatgctacagggactgggcattggcatgaaagcgttccataattttaattacttcttatttttctacaatgtgttgctgggcctcggggcctgtctgtcgcggttgctgatctcctgcctgctcggcatgtggctcatcgctcggatagacaggaccataatgcagtccggctatgagggtgccgacatgggcttcagtgcctggatcggaatgttatatatggatcactaccatatcaatccagtcctggtgtctttctgtcacatcctcatcaccaaccaccgcgaaaaaaagttacagcagtccactaaatactggtgcttaaatcagagtgcagaaagtctacggatttgcgccatgagaggaggtgagaaccgacctcccgcgcgcgtgcagtcttcaagtgaggagttagaactgagacatcagtctctggacgccttccctggcaggagactaccgggccgtggaattcagcccgcagcgaaaatgtctagcgtggggaaagttacacaagtgcctaatgggaaggcctatcaacagattttccaggccgaggttcagttagtgcactctctcgcagctacaagaaagcgggcggccgaacgcagcgtgaccctaaaatcagggagaatcccaatgatgaaaaaggtggaaaccccagagggtgaggtgatgtctcctcgccagcagaagtggatgcattcattacctaacgactggattatggaaaatcccgtgctgcacagggaaaaggaacgggcaaagcgcgagaaggctagggagtcggagaatacaattgcagcccgcgaagtacgggggctcatggacacgattgtccccgagaagatttctacatccacatttcaacgccaggccgaacacaagaggaaatcttacgaatctgccctggcttcctttcaagaggagatcgcccaggtggggaaggaaatggaacccttgatagttgacactggcgggctctttctcaagaagctgacggaatccgatgaggaaatgaatagactcttcctcaaagtggaaaacgataccaacctcgaggattacacaattcaggccctactggagttgtgggacaaggtggctggcagactgctcctgcgcaaacaggaaattaaggagttggatgaagcgctgcacagtcttgagttctccagaaccgacaagctgaaatccgttctgaagaaatatgccgaagttatagaaaagaccagctacttgatgaggcctgaggtatatcggctgataaacgaggaggccatggtcatgaattacgctcttctgggcaataggaaggcattggcccaactctttgttaacctcatggaatctacactccagcaggagcttgactcacgccaccgatggcagggtctggtcgacacttggaaggctctcaagaaggaggctttgctccagagctttagcgacctgttgcctcccagttactccaaaacacaacttacggagtggcattcttcactgaactcactgaacaaggaattagacacatatcacgttgattgcatgatgcgcattagattactttacgaaaagacttggcaggaatgtctgatgcatgtacaaaactgtaaaaagcagttgctggattggaaagcttttacggaggaagaagcagaaactttggtcaaccaattcttcttccagatggtgggcgctttacaggggaaggtggaagaagatctagagctgctagacgtgagagctggcgattgtagcactggtgagctgcggaatccatccagactttggcaaatcagacagagtggcagggttcacacgagtagtagcatcagtcgtcggtggtataattgcggaaggcatactagggcctcttgctggtgccgatcatggtcgtggcgcagggggtggtcctccactgggcgatctaccgcgtggagggccagatgcagaaggcctacctccatcgggtcttggactaactag

SEQ ID NO: 206390 - DNA, 2712 bp, Artificial Sequence
  derived and/or modified sequence
atgcggggcggcgagaaccggccccccgcccgggtgcagagcagcagtgaggagctggaactgaggcaccagtcgctagacgcctttccaggaaggagactgccaggccgtggtatacaaccagccgcgaaaatgtcttcagttggcaaggtgacccaggtcccaaacggaaaagcttaccaacagatctttcaagcggaagtgcagttggttcactcacttgccgcgacgcggaagcgagcggctgagaggtccgttactctgaagagcggcagaatccccatgatgaaaaaagttgagacaccagaaggcgaagtgatgagtccccggcaacaaaagtggatgcactctctgccaaacgattggattatggagaatcccgttctccatcgcgaaaaggaacgggccaaacgcgagaaagcccgcgagtccgaaaacaccattgcggctcgggaggtcaggggcctgatggatactattgttcccgagaaaatctccacttcaacctttcagcgacaggcagagcacaagagaaaaagttatgagagtgcgctggcatcctttcaggaagaaatcgcccaggagatggagcccttgattgtggacacaggcggattgtttcttaaaaaactcacagagtccgacgaggagatgaatcggctcttcctgaaagtggagaacgacactaatttagaggactacactatacaggcgctcctggaactgtgggataaggtcgccggtcggcttctgttgcgtaaacaggagataaaagaattagatgaagccctccactcgttagagttctcccgaaccgataaattgaagagcgtactgaagaagtatgcagaggtaatagagaagacatcctacttgatgcggcccgaagtctaccgcctcattaatgaagaggccatggtgatgaattatgcgctgctgggaaatcgaaaggctttagcccagctgttcgtcaacttaatggaatctacactccagcaggagctggactctcgccaccggtggcaaggcctagtcgatacttggaaagccttaaagaaagaggcgctgctgcagagtttctccgagttcatggcttcggagagcatccatactccgcctgccgtcaccaaagaattggaagtaatgctgaagacccagaatgttctccaacagagacggctgaaacatctgtgcacaatatgcgatctgctgcctccttcctacagcaagacacagctcacggagtggcattcatcactcaactcccttaataaggagctggacacttaccacgtggattgcatgatgcggattaggctcctctacgaaaaaacatggcaggaatgcctgatgcatgtccagaattgcaaaaagcagctgctcgattggaaagcatttacagaggaggaagctgaaactctggttaaccagttctttttccagatggtgggagcactgcagggtaaagttgaagaggaccttgagctcctggataagtcctttgagaccctggcggatcagacggaatggcaatcctcccacctattcaaatacttccaagaagttgttcaattgtgggaggcgcaccagtccgaattgcttgtccaggagctggaactggagaagcgcatggaacaacacaggcagaagcattctctcgagagccaggtgcaagaagcacatctcgaccgcctgcttgaccagcttcggcaacaatcggacaaagaaacactggcttttcacttggaaaaggtgaaggattacctgaaaaatatgaaaagcagatatgagtgttttcatacgcttctaactaaagaagtcatggaatacccggccataatgctgaaagaactgaattcttactcctccgccctcagtcaatacttcttcgtgcgagagatattcgagcagaacttagcgggcgaggtgatcttcaaatttcggcaaccagaagcccatgaaaaacccagtcagaagcgtgttaagaagcttaggaaaaaacagggaagtaaggaagacatgacacgcagtgaggagtcaattagttccggcacctctactgctagatctgtggaagaagtggaggaggagaatgatcaggaaatggagtctttcataacggaagaagtgttgggccaacaaaaaaagagtcccctacatgccaaaatggacgagtccaaggaaggtagtatacagggtctggaagaaatgcaggtcgaaagggagggtagtttgaaccccagcctgaatgaggaaaatgtcaagggacagggcgagaaaaaggaggagtcagaggaggaggacgagaaggaagaagaggaagaggaagagaaactagaagaagagaaggaagaaaaggaagctcaggaggaacaggagtctctcagcgttggagaagaggaagataaggaagagggtctggaagagatttattacgaagatatggagtcttttaccattagtagcggaaacacatacttcgttttcgtgccgttagaggaagagcattgtcggaagtcacacagtactttcagcgcgatgttcattaatgataccagctcggctaagtttatcgagcaagtgacaattccatctaggcttatcttggaaattaaaaagcacagggcttggtggtgtgtacccgtgattccagccacgcaagaggccgaggcaggcgagtcccctgaaccacgccgccgcagactgcagtag

SEQ ID NO: 206391 - DNA, 5106 bp, Artificial Sequence
  derived and/or modified sequence
atgcggggcggcgagaaccggccccccgcccgggtgcagagcagcagtgaggaattggagctgagacatcaatctctagatgcattcccaggtaggcgtttgcctggacgtggcatccaacccgctgcgaagatgtcatcagtggggaaggtgacacaggtcccaaatggcaaagcgtaccagcaaatttttcaggcagaagttcagctcgtgcatagtctggccgccacccgcaaacgagctgcggagagaagcgtgacactaaagagcggtcgcatccctatgatgaaaaaagtggagacgcctgagggagaggttatgtcaccgagacagcagaagtggatgcattccctgcccaacgactggatcatggaaaacccggtccttcatagggaaaaggagcgcgcgaaacgggagaaagccagagaatccgagaatacaattgctgctagagaggtgaggggtctgatggacaccattgtcccagagaaaatctcaacgtcaacattccagagacaggcggagcacaagcgcaaaagctacgagagcgctctcgcgagctttcaagaggagattgcacaggtgggcaaggaaatggaacctttaattgtggacaccgggggactgttcctgaagaaattaacagaatcagatgaggaaatgaatagactgttcctgaaagtggaaaatgacacaaacctcgaagattataccatacaggccctcctcgaattatgggacaaagtggctggccgtctgctcttaagaaaacaggagataaaggagctcgatgaggccctccatagcctcgagttctctcggaccgacaaactgaagtccgttctcaaaaagtacgcagaggtcatagagaagaccagctatttaatgcggccggaggtgtatagattgattaacgaagaagcaatggtgatgaactacgcactactaggtaaccgtaaagctctcgcacagttgtttgtaaatctcatggaatccactctccagcaggagctggactctcgccatagatggcaggggctggtggatacgtggaaagctcttaagaaagaggcgcttctgcagagcttcagtgagtttatggcttcggaatctatacacacccctcctgcagtgacaaaagagttggaagtgatgcttaaaacccaaaatgtattgcaacagcgcagattaaagcacctgtgtaccatctgcgacctccttcctccaagctatagcaagacacagttgaccgagtggcactctagccttaactccctaaataaagagctggatacgtatcacgtcgattgtatgatgagaatccgccttctgtatgagaagacctggcaggaatgcctgatgcatgtgcagaattgtaagaagcagctgcttgattggaaggctttcacagaggaggaggctgaaaccctggtaaaccaatttttttttcaaatggtgggagcactccaggggaaagtggaagaagacctggagttactcgacaaatctttcgagaccctggccgatcagactgagtggcaaagttcccacctctttaaatacttccaggaggtggtgcaactgtgggaagcccatcagtctgagctgctggtgcaggagctggaactggagaaaaggatggaacagcacagacagaagcactcactggagagtcaggtgcaggaggcccatctggaccgcctgttggatcagttacggcagcagtccgataaagagactttagccttccacctggaaaaagtaaaggactatctgaagaatatgaagtcccggtatgagtgttttcatacccttctgactaaagaggtcatggaatatcctgccattatgctgaaagaattgaatagttattctagtgctttatcacagtatttttttgtgagagaaattttcgaacagaacctggcaggcgaagtgattttcaaattccgacaacctgaggcacacgaaaaaccatcccagaaaagagtcaaaaagctgcgaaagaaacaaggaagcaaagaagatatgaccaggagtgaagagtctatttcctctgggacttcgactgcacgctccgtggaggaggtggaggaggagaacgatcaggagatggagagtttcatcacagaagaagttttggggcaacagaagaaaagtccattgcacgctaagatggacgaatccaaagagggcagcatacaagggctcgaggagatgcaagtggaaagggagggatccctgaacccctcacttaacgaggagaacgtgaaggggcagggtgagaagaaagaggaatccgaggaggaggatgaaaaggaagaagaagaggaggaggagaaacttgaggaggagaaggaagagaaggaggcccaggaagaacaggagtctctcagtgtgggcgaggaggaggataaggaggaaggcctagaagaaatttactacgaagacatggagtcatttacaattagctcaggaaatacctatttcgtcttcgttcctctggaagaagaacactgtagaaagagtcacagcaccttcagcgctatgttcatcaacgacacttctagcgctaaattcattgagcaggtgactatcccctcgagactgatcctggaaatcaaaaaacagctgcgcgccggttttttcgagcacctggagaaatggttcgaccagtgttccctgaatactcgcgtaaccgtggcgactaaaatcaatgaactcgacagtgaactggaactgcatcttcatctgcaccagccccgggcccagcaaattgaaaaggatatacataacgtccgcgctgctgaactcctgttacaccaggagcaacttgatagccactgcgccggcgtgacagaaaccctgaagaaaaagcggttgatgttctgtcagtttcaggaagaacaaaacgttagatcaaaaaattttagattgaagatttatgatatggaacacatcttcctgaatgccacacgctctcagaaacttgtaaccctatctaacactctgcatcaagaacttctttcatacgttgacgtgacccaggtgtcactccgctcattccgccagtacctcgaagagtctttaggcaagctacgttattccaacattgagtttatcaagcattgtaggctgttctcagaaggagggaacttcagtccaaaggagatcaactcactgtgctctagactggagaaagaagcagctagaatcgaacttgtggaatccgtgataatgctgaacatggagaagctcgagaacgaatacttagaccaggccaacgacgtaatcaacaaatttgaatccaaattccataatcttagcgtcgacctgatatttattgaaaagatacaaaggcttctgaccaacctccaggtcaaaatcaaatgtcaggttgcaaaaagtaacagtcagaccaacgggctgaatttcagccttcaacagctgcagaacaagatcaagacgtgtcaggagtccaggggcgagaagaccacagtgactacagaggagctcctgtcctttgtacagacctggaaggagaaattatcccaaaggattcagtacctgaactgttccctcgatcgcgtgtcaatgacagagctggtgtttactaacacaatcctgaaagaccaagaagaggattcagacatcctgaccagctctgaggcactcgaggaggaagccaaattagatgtggtcacaccagaatcgttcacccagctctcccgggtgggcaagcccttgattgaagaccctgccgtggacgtgattaggaaattactccagcttcccaatactaagtggcccactcaccattgcgacaaagatccatcacagaccggccgcggagcctgggcctgcgggagcagagggtccagtgaagccggcgccggaggcgctgtgtgttcgccccccgtcctctgtagttgcccaggaccaagcagcccaaaagggttcaagcggcataggtgccagccagagaattccgggaagaaggccgtgccatctgcctcagcaacttctgcgggatctttcaccccccatcccaaacctaataagatggaacgcaagtatagggtcttgggcgacaagcccccacctgccgcagaggacttcaagggtataatccttaccctgctgtgggaatcttctgaaaatctgctgaccgtagccgaagaattctacaggaaagaaaagcgacctgtaacccggcccgactgcatgtgcgacacatttgatcaatgtgcagagaacatatccaaaaaaatccttgagtaccagtcacaagctaacaaatatcacaactcttgtttgatcgaactcaggatccagatccggagattcgaagagcttctgccacaggtatgttggttggtgatggagaatttcaaagagcatcactggaaaaagttcttcacgagcgtgaaagaaatacgaggccagtttgaggaacaacaaaagagactcgagaagaggaaagacaagaatgcccagaagctgcatctgaacctcggacatcctgtccactttcaggagatggaatcgctacacctgtccgaggaagagcgacaggaagagctggacagtatgatcagaatgaacaaggagaagctggaggagtgtacaagaagaaacgggcaggtcttcatcacaaacctggctaccttcacagaaaagttcctactccaactggatgaggtcgtgacaatcgacgacgtgcaggtggctcgaatggagcccccgaaacagaagctcagtatgctgatacggaggaaactggctggccttagcctgaaagaggagagcgaaaagccgctgattgaacggggcagccggaagtggcccggcatcaagccgactgaggttaccatacaaaataagattcttttgcaaccaacatcatctatcagcactactaaaaccacgctggggcacttggccgccgtggaggccagagacgcagtttacttaaagtacctcgcctcatttgaggaagagctcaaacgcatccaagatgactgtacatcccagatcaaggaggctcagcgatggaaggacagctggaagcagagcttgcatactattcaggggttgtacgtttag

SEQ ID NO: 206392 - DNA, 2700 bp, Artificial Sequence
  derived and/or modified sequence
ggccggcccgccgccgtggtggccggccccgccctggccgccctgagagagagcctgcgcatatgcgccatgcgcggaggagaaaacagaccccctgccagagtgcagagctcttctgaagagttagaactgaggcaccagagcctggacgcgtttccagggcggagacttcctgggaggggcatacagcctgcagcaaagatgtcttccgtgggaaaggtcacgcaagtgcccaacggcaaagcctaccagcagattttccaagctgaagtgcaactcgtccacagcctagcggcaactagaaagcgcgccgcagaacgctctgttactttgaagagcggccgtattcctatgatgaaaaaagtggagacaccagagggggaagttatgtctccccgacagcagaagtggatgcattcactgccaaacgactggatcatggagaaccctgtgctgcacagagagaaagaaagagctaaaagagagaaggcccgagaatcagaaaataccattgcagccagggaagtgcgcggcctcatggatactatcgttccagaaaagatttctacttcaacattccagcgacaggcagaacacaagcgaaagtcctacgaatctgccctagctagttttcaagaggagattgcccaggtgggtaaggaaatggagcccctcatcgtggacactggcggcctgttcctcaaaaaactgacagagagcgatgaagagatgaacagactctttcttaaagtggagaatgataccaatctggaggactataccatacaggccctcttggagctgtgggacaaggtggctggtaggttgctcctgaggaagcaagagatcaaagaactcgatgaggctctgcactctctggagttttctcgaactgacaagttgaagagtgtcttgaagaaatacgcagaagtcatcgaaaagactagctacctgatgagacctgaagtgtaccgcctaattaacgaagaggccatggttatgaattatgctctactgggaaatcgcaaggcactggcccaattattcgtgaatctgatggaaagtacactacagcaggaactggattctagacaccgatggcaggggctggtagacacatggaaggcactgaagaaggaggctcttctgcaatcattcagtgagtttatggcctctgaatccatacatactcctcccgcagtcacaaaagagctggaggtgatgctgaagacacagaacgtgctgcagcaaagacgcttaaagcatctgtgtaccatttgtgacctcctgcccccaagctattccaaaactcagcttactgagtggcactccagtctgaactccttgaacaaagaattagatacttaccatgtggattgcatgatgcgaattcggttgctgtatgagaaaacatggcaggaatgcctgatgcatgttcaaaattgcaaaaagcagcttttggactggaaggcattcactgaggaggaagcagagacactagtgaaccagttttttttccagatggtgggtgcactgcagggaaaggttgaagaggacctcgagctgcttgacaagtccttcgagacattggctgatcagactgagtggcagtcttcgcacctgttcaaatactttcaggaggtcgtacagttgtgggaggcgcaccagtcagagctactagtccaggagctggaattggaaaaacgaatggagcagcatcgccagaagcactccctggaatctcaggtgcaggaagcccatctcgatcgcttgttggaccagctacggcaacaaagcgacaaggagaccttggccttccacctcgagaaagtgaaggattacttaaaaaacatgaaaagtagatatgaatgcttccacacactgctgactaaggaggtgatggagtatcctgctatcatgctcaaggaactgaattcatactcttcagccctgagccagtatttctttgtgagggagatttttgagcagaacctggctggcgaggtgatctttaagtttcggcagccagaggcccacgaaaaaccttcccagaagagggtgaagaagttgcgtaagaagcagggtagtaaggaggacatgactcgcagtgaggagagcatttcttcaggtacgtctaccgctcggagtgttgaagaagtggaagaagagaacgaccaggagatggagtcgttcattacagaggaggtgctgggccagcagaagaagagtccactgcacgcaaagatggacgaaagcaaggaaggcagcatccagggcctggaggagatgcaagtggagcgggaggggtcgctgaatccatccctgaacgaggagaacgttaagggacagggcgagaaaaaggaggagtcagaggaagaggacgagaaagaagaagaagaggaggaagagaaacttgaggaagagaaggaggaaaaggaagcccaggaagagcaggagtctctttccgtgggcgaagaagaagataaagaggaagggctagaggaaatctattacgaggacatggagtctttcaccatctcttcaggcaacacctacttcgtgtttgtgccactggaggaagaacattgtagaaagtctcatagtactttctcagccatgtttatcaatgatacctccagtgccaagtttatagaacaggtcaccatccccagcaggttgatactggaaattaaaaagtag

SEQ ID NO: 206393 - DNA, 4941 bp, Artificial Sequence
  derived and/or modified sequence
atgtggcatggaaaccacgtgcagcctggggctactcaccggcctaatcagggcctggaaatgctccaaggactcgggatcgggatgaaagcattccataattttaactattttctgtttttctacaacgtcctcttgggtctgggggcttgtctgtctagactcttaatctcttgcttgttaggaatgtggctgatagcccgaatagatcggaccattatgcagtccggatacgagggcgcagatatgggattcagtgcttggattggaatgctctatatggatcactatcacattaacccagtcctcgtgtcgttctgccatatactgatcacaaaccaccgggagaaaaagcttcagcagtcaactaaatattggtgtctcaaccagtccgccgaatcgcttcggatctgcgctatgagagggggtgaaaatagaccccctgctagggttcagtcctcctctgaagaacttgaacttcggcaccagtctctggacgcatttccaggcaggagattgcccggacggggaattcagccagccgcaaagatgagctctgttggcaaggtcactcaggtgcccaacggcaaagcataccagcagatttttcaggcagaagtccagctggtgcattccttggcggcaactagaaagcgggcagcagaaagatcagtcacactcaagtccggcaggattcccatgatgaagaaggtcgagactccagagggtgaggttatgtcgcccaggcaacagaagtggatgcatagtcttcccaatgattggatcatggagaacccagtgttgcaccgggagaaagagagggctaagcgagagaaggcgagggagtctgagaacacaattgccgcacgggaagtgcgtggtctgatggatacaatcgtacctgagaagatttccacctcaactttccaacggcaggcagaacacaagcggaagtcttacgaaagtgcactcgccagttttcaggaggaaattgcacaggtcggtaaggagatggagccgttgattgttgacaccggcggattgtttctcaagaaactcactgagtccgatgaggagatgaatcgcctctttctgaaggtggaaaacgatacaaatctcgaggactatactattcaggccctactggagctctgggacaaggtcgcaggaaggctcttattaaggaaacaagagatcaaggagctggacgaggctctgcactcactggagttcagcaggacggacaagctaaagtcagtgctaaagaagtacgctgaggtgattgaaaagacatcctacctgatgcgccctgaagtataccgattgataaacgaggaggccatggttatgaactatgctttacttggaaatcgcaaagccctagcccagctcttcgtcaacctaatggagagcaccctccagcaagagctggattcacgtcacagatggcaggggctggtggacacatggaaagccttgaagaaagaagcgttgctccagagtttttccgagttcatggctagtgagagcatccacacccccccagccgtgaccaaagagttggaagtcatgttgaagacacaaaacgtgcttcagcagcgccgactgaagcacctgtgtacaatctgcgacttgctgccacccagctatagtaaaacgcaactgactgagtggcacagctcccttaatagcctcaacaaggaacttgacacatatcacgtggattgcatgatgcgcattcgactgctgtatgagaagacctggcaggaatgcctgatgcacgtgcagaattgtaagaagcagctcctagactggaaggcatttacagaggaggaggctgagaccctggtcaatcaattcttttttcaaatggtgggggcacttcagggcaaagttgaagaggacctggagctacttgacaagagcttcgagaccctcgctgatcagacggaatggcagagtagtcatctctttaagtactttcaggaggttgtgcaattatgggaagcgcaccagtcagaactgttagtgcaggaactcgaactggaaaaaagaatggaacagcacaggcagaagcatagcctggagtcgcaagtgcaggaggctcacctggataggctcctggaccagctacgacagcagagtgacaaagagaccctcgcattccacttagagaaggtaaaggattatctgaaaaatatgaagagccgctatgagtgttttcacacccttctaactaaagaggtgatggagtaccctgcaatcatgctgaaggagttgaattcttactcctctgcactctctcaatacttttttgtccgcgagatctttgagcagaatttagctggggaggtcatctttaaattcagacagcccgaagcacatgaaaaacccagccagaagagagtgaagaagctgagaaagaagcagggaagcaaagaggacatgacccggtcggaagagtcaatctcttccggaacctccacagccaggtccgtcgaggaggtcgaagaggagaatgatcaggagatggagtcattcattaccgaagaggtgttgggtcaacagaaaaagtcccctttgcatgcaaagatggacgagagcaaggagggctcaatccagggactggaggagatgcaagtcgagcgcgaaggatctctgaacccatcgctgaacgaggaaaatgtgaagggccagggcgagaaaaaagaggagagtgaggaggaagacgagaaagaagaggaagaggaggaggagaaacttgaagaagagaaggaagaaaaagaggctcaggaagaacaggaaagcttgagtgtcggtgaggaggaagacaaggaggagggactagaggagatttactatgaagatatggagtctttcaccatttcttctggtaacacatactttgttttcgtgcctctggaggaggaacattgtcgcaaaagccacagtacattttccgcaatgtttatcaacgatacgagctctgctaagttcatagaacaggtgactatcccctcaagattaatcttggagatcaaaaaacagctgttcagcgagggtggaaattttagccccaaagagatcaactccctctgcagccgactcgaaaaggaggcagcgaggattgagctggtggagtccgtgatcatgttgaatatggaaaaactggaaaatgagtaccttgatcaagcaaatgatgtcatcaataaatttgaaagtaaattccataacctgtccgttgatcttatttttattgagaaaattcagcgactgttgacaaacctgcaggtgaagatcaaatgccaggtcgcaaaatccaactctcagaccaatggactgaacttctctctccaacaactgcagaataagataaagacctgccaagagagtagaggggagaaaaccaccgtaaccactgaggagctgctgagcttcgtgcagacttggaaagaaaagctgagccagaggatacagtacttaaactgctctctcgacagggtgtccatgacagagctggtgtttacaaataccatcttgaaagatcaagaagaggacagcgacattcttacatcaagcgaggcactggaggaggaagccaagcttgatgttgtgacgccagagtcattcactcagctgtccagggttgggaagcctctgatagaagacccagctgtagatgttatcagaaaactgctccagcttcctaatacaaagtggcccacgcaccactgcgacaaggacccgtcacagaccggcttcaaacgacataggtgccaacccgagaattccggcaaaaaggccgtgccttcagctagcgccacatccgctgggtcgttgcagaccactcatccgccactgtcacattcgtttacccctcacccaaaacctaacaaaatggaacgcaagtaccgcgttctgggggataagcccccaccggctgcagaggacttcaaggggataatcctaaccctactgtgggagtcttccgagaatctgcttacggtagcggaggaattctatagaaaggagaagcgcccagttacaaggccggactgcatgtgcgacacatttgaccagtgcgccgagaatatcagcaaaaaaatcctcgagtaccagagccaagcaaacaaataccataacagttgcctcattgaattgagaatccagatccggaggttcgaagagttgcttccgcaggtgtgctggttggtgatggaaaatttcaaggagcaccactggaagaaattcttcaccagcgtaaaagagatccgaggtcagttcgaagaacagcaaaaaagactggagaaaaggaaggacaagaatgcccagaagctgcatctcaatctcggccatcctgttcatttccaggagatggaaagtctgcacttgtcggaggaagaacggcaggaggaactggattcaatgattcggatgaataaagaaaagttggaagagtgcacaaggcgcaatggacaggtgtttattactaacttggccacctttaccgaaaagttcctgctacaactggatgaggtcgtcacaattgacgatgtgcaagtagcaaggatggaaccccctaagcaaaagcttagcatgttgatcagaaggaagctggccggtctgtccctcaaggaagaatccgaaaaaccgctgatcgaacgtggctctcgcaaatggcccggaatcaagccaactgaggtcacgatccagaacaagattctgctgcaacctacatctagtatatccacaacgaaaacaactctgggccacctagctgccgtggaggcacgcgatgctgtttatctaaagtacctcgcctccttcgaggaggagctgaagaggatccaagatgactgcacatcccagatcaaagaggctcagcgctggaaagattcttggaagcaaagtcttcacacaattcagggcctgtacgtttag

SEQ ID NO: 206394 - DNA, 5105 bp, Artificial Sequence
  derived and/or modified sequence
atgcgtgggggagaaaaccggccacctgcccgagtccagtccagctcggaggagctagaactgagacatcaaagcttggatgcgttccccggtaggagactgcctggtaggggaatccagcctgcagctaaaatgtcatcagtgggcaaggtcacccaggtgcctaatggaaaagcgtatcagcagatatttcaggctgaagtccaactcgttcactccctggcagctactaggaaacgcgcagctgagagatccgtcactctgaaatccgggagaatcccaatgatgaaaaaggttgagaccccagagggagaggtcatgtctccgcgacagcagaaatggatgcattcgctcccaaatgattggattatggagaacccagtgctacatagagaaaaggaacgggctaaacgggagaaggccagggaatccgaaaataccattgccgctcgggaggtaagaggattaatggatacaattgtgcccgagaaaattagcacatctacattccaacggcaggctgagcataagcggaagtcctatgagtcagctcttgcatccttccaggaggagattgcgcaagtgggcaaagagatggaacccttaattgtcgacacgggcggactgtttttgaagaaactgacagaatccgacgaagaaatgaacaggctgttccttaaggtggaaaacgatactaacttagaagactatactatccaggcattgttggaactctgggacaaagtcgctgggaggcttctgctgagaaaacaggagataaaggagttggatgaagccttgcattccctggaattctcacggacggacaagttgaagagtgtcctcaaaaagtatgctgaggtgatcgagaaaacatcatacctgatgcggcctgaggtgtatagattgataaacgaagaagctatggtaatgaactacgccctactgggcaaccggaaggccttagcccagctgttcgtgaacctcatggagtcaactctgcaacaagagctggactcaagacatcgttggcaaggattagtcgatacctggaaggcacttaagaaagaagcactgttgcagtccttttccgagttcatggcctcagagtccattcatactcctccagcagtgacaaaggagctggaggtcatgcttaaaacacagaatgtgctccagcagagacgactgaaacacctgtgcacaatttgtgacctgctgccaccatcctattcaaaaacgcagcttaccgaatggcactcgtcgctgaattcccttaacaaagagctcgacacttaccacgtggattgtatgatgcggatccggctcctctacgagaaaacctggcaagagtgtcttatgcacgttcagaattgtaaaaaacagctactggattggaaggctttcaccgaagaagaagcggagacgctggtcaaccagttttttttccagatggtcggagcactgcagggcaaggttgaagaggacctcgagctcctagataagagtttcgaaaccctggctgatcagaccgagtggcagagctctcacctgttcaaatactttcaggaggtagttcagctctgggaagcccaccagtcagaactcttagtgcaggagctcgagctcgaaaagcgaatggaacaacacaggcagaaacattcactggagtcccaggtgcaggaggcccacttggaccggctgctggaccagctgcggcagcagtccgataaggagactctggctttccatctggaaaaggtaaaggactatctaaaaaatatgaaatcgcgttacgagtgtttccacaccctgctgactaaagaagtaatggaataccctgccatcatgctgaaggagcttaattcctattcctctgctctgtcccagtatttttttgtgagagagatattcgagcagaacctcgccggtgaagtgatttttaagttccgccagccggaagcgcacgagaaaccctcccaaaaaagggttaaaaagttaaggaagaagcaaggctccaaagaagacatgacccgttcagaggagtccatctcctcagggacctctaccgccagaagtgtggaagaagtcgaggaggaaaatgatcaagagatggaatccttcatcaccgaggaagtgctcggacagcagaagaagagccctcttcatgcaaagatggacgagagcaaagagggctccatccagggcttggaggagatgcaggtggaacgggagggatctcttaacccttctctgaacgaggaaaatgtgaagggacagggcgaaaagaaggaagaatccgaagaagaggacgagaaggaagaagaggaagaggaggagaagctggaagaggaaaaagaggagaaagaggctcaagaggagcaggagtcattaagtgtgggtgaagaagaagataaagaggaaggactcgaggaaatttattacgaagacatggaaagctttacaatctcaagtgggaatacgtatttcgtgttcgtgccactcgaagaggagcattgtcgtaagtcccactcaaccttcagcgccatgtttatcaatgataccagctctgctaagtttattgagcaagtgaccatcccaagtaggctgatcttggagattaagaagcagttgcgtgccggattcttcgaacatttggaaaagtggtttgaccagtgctcactgaatacgagagttacagtggctaccaagattaacgaactggattccgagctggaactgcacctgcacttgcaccaacccagagcacaacagatcgaaaaagacatacacaacgtgcgcgctgcagagttactactccaccaggagcaactggattctcattgcgccggagtgacagaaaccctgaagaagaagcgactcatgttttgtcagtttcaggaggaacaaaatgttaggagtaagaactttagactaaagatctacgacatggagcatatttttctcaacgctactcgaagccagaagctagtgaccctgtccaataccctgcaccaagaactcctatcttacgtcgacgtgacacaagtatcccttagatcctttagacagtatctcgaggaatctttggggaagctgagatatagtaatatagagttcataaaacattgtagactgttttccgagggcggaaacttttcccctaaggaaatcaattctctatgcagccgtctggaaaaggaggcagcacgcatcgagctggtagagtccgtcattatgctgaacatggaaaaattagagaacgagtatctggatcaggcaaatgacgtcatcaacaagtttgaaagtaaattccataatctgagcgttgacctgatattcatcgagaagatccaacgcctgcttaccaacctacaggtcaaaatcaagtgccaggtcgctaaaagcaactcccagacaaatgggctgaacttctccctccagcagctccagaataaaattaaaacttgccaggagtcgaggggggaaaagaccacagtgactactgaagagcttctctcttttgtgcaaacatggaaagagaaactcagccagcgcatacagtacttgaactgttcccttgacagagtctccatgaccgaattggtctttaccaacaccattctgaaggatcaggaggaagatagtgacatactcacatcctctgaggctttagaagaggaagccaagctggacgttgtcacaccagagtctttcacccagctttcacgggttggtaaaccattgattgaggacccagcagtagacgtgatcagaaagctgctgcagctgccaaatacgaaatggcctacgcatcactgtgataaggacccatcacagaccggacgaggcgcatgggcatgcgggagccgcggatcctctgaagcgggtgccggtggtgccgtttgttcacccccagtgctttgctcttgtccagggccatcaagccctaagggattcaagcggcaccggtgtcagcctgagaattctggtaaaaaagccgtgcctagcgccagcgctacatccgcaggatcctttacaccccatcccaagcctaacaagatggagcgaaagtacagggtactgggcgacaagcctcctccagctgctgaggacttcaaaggcataattctgacactcttatgggagtcgtccgagaacttattaacggttgctgaggaattctaccgcaaagagaaaaggcccgtgacccgccctgactgtatgtgcgacacctttgatcaatgcgcggaaaacatttccaagaaaattttggaatatcagtctcaggccaataaataccataatagctgtctgatcgagctccggattcagattagaagattcgaagagctgctccctcaggtatgctggctggtcatggagaactttaaagagcaccactggaagaagttcttcaccagtgtcaaggaaattcgcggtcagttcgaggagcagcagaagcgcctggagaaaagaaaggacaaaaatgcccagaagctgcacctaaatttgggccacccggtgcatttccaagagatggagagcctgcacctctcggaggaggagaggcaagaggaactagattctatgatacgaatgaataaggaaaaattggaagaatgcacccgcaggaacggccaggtttttatcaccaacttagcaaccttcacggagaaattccttctacagctggatgaagtggtcaccatcgacgacgttcaggtggccagaatggaaccaccaaagcagaagctctcaatgctgatccgcagaaaattggctgggctgtccctgaaagaagagtccgaaaagcctctgatcgaaagggggtcccggaagtggccaggaatcaagcccacagaggtgaccatccagaacaaaatcctactgcagcctacgagttccatcagcacaaccaagacaactttgggtcacctggctgccgtggaggctcgagatgccgtctatcttaagtacctcgcgtcgtttgaggaagagctgaagagaatccaagacgattgcacatcccaaatcaaagaggcccagcgctggaaagattcttggaaacagagtttgcacaccatacagggcctgtacgtgta

SEQ ID NO: 206395 - DNA, 2049 bp, Artificial Sequence
  derived and/or modified sequence
atgtggcatggtaatcacgtgcaacccggagccacccaccgcccaaatcagggcttagagatgctgcaggggctgggcatcgggatgaaagcgtttcataacttcaactattttctctttttctataacgttttgctgggcttgggagcatgtctctccagacttttaatctcgtgcctactcggcatgtggttgattgcacgaatcgacaggacgatcatgcaatcaggatatgaaggagccgatatgggcttctcagcatggattgggatgctgtacatggaccactatcacatcaacccagtacttgtctcgttctgccatattcttattacaaatcatcgcgagaagaagctgcagcaaagcaccaagtattggtgccttaatcagtccgccgaaagtcttaggatttgtgccatgagaggcggagaaaatcgccctccagcacgggttcagagctcttctgaagagctggaactgcggcaccagtctctcgacgctttcccaggtaggagactgccagggagaggtattcagcctgctgcaaaaatgagttctgtgggtaaggtgactcaagtgccgaacgggaaagcttatcagcagatatttcaggccgaggtgcagttagtgcacagcctggcggctacccgcaagagggccgctgagcgctccgtcaccctgaaaagtggtcggatccctatgatgaaaaaggtcgagaccccagaaggcgaggtgatgagtccaaggcagcaaaaatggatgcactctctccctaacgattggatcatggaaaaccccgtcctgcaccgtgaaaaggagcgggctaaaagggagaaggccagagagagtgagaacaccatcgcagccagagaggtgcgaggacttatggatacaatcgtccccgaaaagatttccacatcgacctttcagcgccaggctgaacacaaacgcaagtcttatgaaagcgcactggcgtccttccaggaagagatcgctcaggtaggtaaggagatggagccactgattgttgataccggaggcctttttctcaaaaagctgacagagtctgacgaggaaatgaatcgcctgtttctgaaggtcgaaaatgatacaaatctcgaagactacaccattcaagccctgctggaactatgggacaaagtggcaggaagactgctattacgcaaacaggagattaaggagctggatgaagcgctgcactcactggaattctcccgaaccgacaagctgaaatctgtactaaagaaatacgcagaagtgatcgagaagacgagctatctgatgaggcccgaagtgtatagactgatcaatgaagaagccatggtgatgaattacgctctgttaggcaacagaaaagcactagcgcagctctttgtgaacttgatggaatcaaccctccaacaagaactcgattctcggcataggtggcaaggtttagtggacacatggaaggccctgaaaaaagaggctctgctgcagtctttcagcgatctgctgcctccaagttactccaaaactcagctaaccgaatggcacagttccctcaattccttgaataaggagctggacacctaccatgtggattgcatgatgaggatccggctgctttatgagaaaacctggcaggagtgtctgatgcacgtccagaattgtaagaaacagctgctagattggaaggccttcactgaggaagaggccgagacactggtgaatcagtttttcttccagatggtcggggcactgcaaggaaaagtcgaggaggacctcgaactcctggacgtgcgggctggcgattgctcaactggcgagctgagaaatcctagcagactctggcagatccggcagtcggggagggtgcacaccagttcttccatctctcgaaggtggtacaattgtggtagacatacgcgggcatcctgctggtgtcggtcttggtcctggcgtcggggatggagctctacaggcagatccaccgcctggcgtgcgagatgtaggaggcctactagcatcggcagctggaccaattag

SEQ ID NO: 206396 - DNA, 2712 bp, Artificial Sequence
  derived and/or modified sequence
atgcgcggtggtgaaaacaggccacctgccagagtccagagctcctctgaagaactagagcttagacatcagtctctggatgcatttccaggcaggaggctgcctgggaggggaatccagcccgctgccaagatgtcttctgtcggcaaggtaacccaggtacccaacggaaaggcatatcagcaaatcttccaagccgaagtgcagctcgtgcactctctggcagctacaagaaagcgagccgcagaaaggtcagttaccctgaagtcagggaggataccgatgatgaaaaaggtggaaacgccagagggggaggtaatgtcgccgcgacagcaaaagtggatgcattctttacccaacgattggatcatggaaaaccccgtactacatagagagaaggaacgcgcaaagcgagaaaaagccagggaaagtgagaacaccatagccgctcgagaggtgcgagggttgatggacacaatagtccccgagaaaatctctacttcaacctttcagcggcaagccgagcacaaaaggaaatcatacgaatcagccctcgcctcattccaggaagaaattgcccaggagatggagccactgatcgtggacacaggcggattatttctcaaaaagctcaccgagtccgacgaggaaatgaatcggctgtttctgaaggtcgagaacgatacgaatcttgaagactacacaatacaagctttactcgagctctgggataaagtggctgggagactgctcctgcgcaagcaggagattaaggaactggatgaagcactccacagcctggaattttcacggacagacaaattgaagagtgttcttaagaaatatgctgaggtgattgagaagaccagctaccttatgaggcctgaggtgtacagacttatcaacgaggaagcaatggttatgaattacgcattattggggaatagaaaagccctcgcacaactctttgtgaacttgatggagagcacactgcagcaagagttagatagcagacaccgttggcaaggactggttgacacatggaaagctttgaaaaaggaagcgctcctgcaatctttttctgaattcatggccagtgagagcattcatactccacccgctgtcacaaaggagctggaggtgatgctgaaaactcaaaacgtcctgcagcagcggaggttgaagcacctctgcacaatctgcgatttactcccaccaagctactcaaagacccagctgaccgaatggcattcaagcttaaacagcctgaacaaagaactagatacctatcacgttgattgcatgatgcgcattcggctgctgtatgagaaaacctggcaagagtgcctgatgcacgttcagaactgcaaaaagcaacttctggactggaaagcatttaccgaagaggaagctgagacactcgtgaaccagttcttctttcaaatggtcggcgcactgcaaggcaaagtggaggaggatctcgagctcctggacaaaagctttgagaccctcgcagaccaaactgagtggcaaagtagtcatctgtttaaatatttccaggaagttgtgcagctgtgggaggctcaccaaagcgaactgttggttcaggaacttgagcttgaaaaaaggatggagcagcatcgacagaagcacagcctggagtctcaggttcaggaagcgcatttggatcggctgcttgaccagctgcggcaacagagcgataaggagacattggccttccacttggagaaggtaaaagactacctcaaaaatatgaaaagtaggtacgaatgcttccacacactcctcacaaaagaggtgatggagtaccccgcaattatgttgaaggagctgaatagttattcttctgcactgtcccagtattttttcgtacgggaaatcttcgagcagaatctggctggggaggtgatatttaagttccgccagccagaggcccacgaaaaacctagtcaaaaacgcgtaaaaaaattgcgcaaaaagcagggcagcaaagaggatatgacgcggtcagaggagtctatttcttccgggacgagcacagcaagatccgtcgaggaggttgaggaagaaaacgaccaggaaatggagtcttttatcaccgaggaagtactgggtcagcagaagaaatctcccttgcacgccaagatggatgagagtaaagaaggaagtatccaggggcttgaagaaatgcaggttgaacgagaaggatccctcaaccctagtctgaacgaagagaatgtcaaaggccaaggtgaaaaaaaagaggagtcagaggaggaagatgaaaaggaggaagaggaggaagaggagaaacttgaggaggagaaagaagaaaaggaagctcaagaggagcaggaatctctatccgtgggcgaggaagaagacaaggaagaggggctggaggaaatttactatgaggatatggaatccttcacaatctcaagcggaaacacttacttcgtcttcgtgccactagaggaagagcattgtaggaagtctcactctacatttagcgcaatgtttatcaatgacacctcatcagccaagttcattgagcaggtcactatcccctccagactcatattggaaatcaagaaacacagggcatggtggtgcgtccctgtgatacccgctacgcaagaggcagaggcaggtgaaagccctgagcctcgcaggcgacgtctacagtag

SEQ ID NO: 206397 - DNA, 5106 bp, Artificial Sequence
  derived and/or modified sequence
atgcggggtggcgaaaaccgccctccagccagggtgcagagtagttccgaagagttggaacttaggcaccagagccttgatgctttccctggcaggcgcctgccaggtcgaggaatccaacccgcagccaagatgtccagcgtggggaaggtgactcaggtgccgaacgggaaggcataccagcaaatatttcaagccgaagtacagctcgtgcactcactggccgctacaagaaaaagggccgcagaaaggtcggtgacactcaagagcggccgtataccaatgatgaaaaaggtggagactccagagggagaggtgatgtcaccacggcagcagaagtggatgcattccctgccaaatgattggattatggaaaaccccgtgctccacagggaaaaagagcgggcaaagagagaaaaggccagggagagcgagaataccatcgctgcccgtgaagtcagaggtctgatggataccatcgtgcctgagaagatatccaccagcacatttcagaggcaggccgagcacaaaaggaaatcctacgagagtgctctcgctagttttcaagaggagattgcacaggtaggaaaggagatggagcccctaatagttgacaccggaggattattcttaaaaaagcttacagaatctgatgaggagatgaacagacttttcctgaaggtcgaaaatgatacaaacctcgaagactatacaattcaggctctgctcgaactctgggataaagtggcaggacggctcctcctcaggaagcaggaaataaaggaactggatgaggccttgcatagtcttgagtttagccggactgataaattgaagtccgtgctgaagaaatatgctgaagttattgaaaagacgtcatatctgatgagaccggaagtgtaccgcctaatcaacgaggaggctatggttatgaactatgcgctgttgggcaatagaaaggccctcgcccagctttttgtaaatcttatggagtcaactctacagcaggagctggacagtcggcaccgctggcaggggctcgttgatacatggaaagctctaaagaaggaggcattgctacagtccttctcagaattcatggcttccgagtctatccacactccacctgccgtgaccaaagaactggaagtaatgctgaaaacacagaacgtactgcagcagcggagactaaaacatttgtgtacgatttgtgatttgctgccgcctagctattccaaaacccagctgactgaatggcattcctctctcaattccctgaacaaggagcttgacacctatcacgtggactgcatgatgcgcataaggttgctctatgagaagacgtggcaggaatgcctcatgcacgtgcagaattgtaaaaagcagctgctggactggaaggcgttcaccgaagaggaggctgaaacactggtcaatcaattcttctttcaaatggttggtgcattgcaaggcaaggttgaggaggaccttgagttactggataagtcgttcgagaccttggccgaccaaaccgaatggcagagttcacacctgtttaagtattttcaagaagtcgtccagctctgggaagcgcaccaatctgaactcctagtacaagagctggaacttgaaaaacgcatggaacagcatcgccagaagcatagtctcgaatcccaagtccaggaggctcatctcgatcgactcttggaccaactgcgtcagcagtcagataaagagacactagcctttcatttggaaaaggttaaagactaccttaagaatatgaagtctaggtacgaatgctttcacaccttgctaacaaaggaagtcatggagtatccagctatcatgctgaaagaactcaattcttactcatcagccctctcccagtactttttcgtgcgtgagatctttgaacagaacctggctggggaggtgattttcaaatttagacaacccgaggctcacgagaagcccagccagaagagagtcaaaaagctgcgcaagaaacaggggtcaaaggaagatatgacccggagtgaagagtccatttcgagcggtacatccactgccaggtctgttgaagaggtggaggaggagaacgaccaggaaatggaaagcttcatcacagaggaggtgcttggccagcaaaaaaaaagtcccctgcacgccaaaatggacgaatccaaggagggatcgatccagggtctggaagagatgcaggtcgaaagagagggatcactgaacccctccctcaatgaggagaatgtgaaaggacagggcgagaagaaggaagaaagcgaggaagaagatgaaaaagaggaggaagaggaagaggagaagttggaggaagagaaggaagagaaggaagcccaggaggaacaggaatcgctcagcgtcggagaagaggaggacaaggaggaagggctagaggaaatctattacgaggacatggagagttttacgatctcctcaggcaacacttatttcgtattcgtgccgctcgaggaggagcactgtaggaaatcacattccactttcagcgcgatgttcattaacgacacctcttctgctaagtttatcgagcaagtgacaatcccctccaggctgatacttgaaatcaaaaaacaactgcgggcagggttcttcgagcacttagaaaaatggtttgaccagtgctcccttaatacaagagttaccgttgccacaaaaattaatgaactggatagcgagctcgagctacacttgcacctgcaccagcccagagcacagcagatcgagaaggacatccataatgtgagagccgcagagcttctcctccaccaggaacagttggactcccactgtgcgggagtgaccgagactctgaagaagaaacgcttgatgttctgtcagtttcaggaggagcagaatgtgcgctcaaagaattttcgccttaaaatttatgacatggagcacatttttctgaatgcaacccgaagccagaaattagtcaccctttccaataccctccaccaggaactgctgtcgtacgtggacgtgacccaagtttcacttcgctcctttcgccagtaccttgaggaaagccttggcaaacttagatattccaacattgagtttatcaagcactgcaggctattttccgaaggtggcaacttctcacccaaggagattaattctctgtgctcacggctggaaaaagaggcggctaggatcgagctcgtggaatctgtgatcatgctcaacatggaaaaattggagaatgagtaccttgaccaggctaatgacgtgatcaataagttcgagtccaaatttcacaatctctctgtggacctgatcttcatagaaaagatccagagacttctgacaaatctccaggttaagattaaatgtcaagtcgcaaagtccaactcccagacgaatggtctgaacttttctctgcagcagctgcagaataagatcaaaacttgccaagagagtcgtggtgaaaagaccaccgtgaccacagaagagctgctcagtttcgtacagacatggaaagaaaaattgagccaacgcattcagtacctgaattgtagcctggacagggtgagcatgaccgaactggtattcacaaatacaatactgaaggatcaggaggaagattctgatattcttacttcttcagaggcactggaggaagaagctaagcttgacgttgtcaccccagagtctttcactcagctttcccgagtgggtaaaccgcttatcgaagacccagcagtggatgtgatccgcaagttactgcaactgcccaacactaaatggcccacccaccattgcgacaaagatcccagccagacaggtaggggagcctgggcttgtggaagtaggggttccagcgaggccggagcaggcggagcagtctgtagcccacccgtgctttgcagttgtcccggaccatcaagccccaaaggctttaagagacaccggtgccagcccgagaatagtggaaaaaaggccgtcccatctgcctctgccacttcggcaggctctttcactcctcaccccaaacccaacaaaatggagcgcaagtatcgtgtgctgggggacaaaccgccacctgccgctgaggattttaagggtattattctcactcttctgtgggagagttccgaaaaccttttgacagtggccgaagagttttacagaaaagagaaaagacctgttacacgcccagattgtatgtgcgacacatttgatcagtgcgcggagaatatctcaaagaaaattctcgaataccagtcccaggctaacaaataccacaatagttgtctgattgaactccggattcaaataaggcgctttgaagagttgctgccacaggtttgctggttagtaatggaaaactttaaggaacaccattggaagaagtttttcactagtgttaaggagatcagagggcagtttgaagagcagcaaaagcgtctcgagaagcgcaaagacaagaacgctcagaagctgcatctcaacctggggcaccctgtgcacttccaggagatggaatcattgcacctgtctgaggaggaacggcaggaggaactggactctatgatcaggatgaacaaagagaagcttgaagagtgcacaaggcgaaacgggcaagttttcataaccaatcttgctacgttcacagaaaagttcctcctgcagctggacgaagtggtcactatagatgatgtgcaagtggccaggatggagcccccaaagcagaaattgtctatgctgatcagacggaaactggcagggttgtctctgaaggaggagtctgaaaagccgcttattgagcggggaagccgcaagtggcctgggatcaagcccaccgaagtcaccattcagaataaaatcctgctccagccaacgtcctccatctcgactaccaagacgacactgggccacttagccgcagttgaagctcgcgatgccgtctacctaaagtatttggccagcttcgaggaagaactgaagaggattcaggacgattgtactagccagataaaagaggcccagcggtggaaagattcatggaagcagtctctgcataccatccaggggctgtatgtctag

SEQ ID NO: 206398 - DNA, 2700 bp, Artificial Sequence
  derived and/or modified sequence
ggacggccagcagccgtggtcgcaggccctgctttggccgctctccgtgagagcttacgtatatgcgcgatgagaggaggtgagaaccgacctcccgctagagttcagtcgagctcagaggagctggaacttagacatcaatccctcgacgcttttcctgggaggcggctccccggacggggaatccagccggcagccaaaatgtcgagcgtggggaaagtgacccaagtaccgaacggaaaagcctaccaacagatctttcaggctgaggtgcaactcgtccactcactcgctgccactagaaagagagcagcggagaggtcagtaactctcaagtcaggacggattccgatgatgaagaaagtggagacaccagaaggagaagtgatgagtcctcggcagcagaagtggatgcactctctgccaaacgattggatcatggagaaccccgtactgcatcgcgaaaaggagagagccaagcgggagaaggctcgagagtcagagaacaccattgctgcaagggaagtccgaggtttgatggacactatagttccggagaagatttccacctccacctttcagaggcaagcagaacataaaaggaaatcttatgagtcagccctggcttccttccaggaggagatcgcccaggtagggaaagaaatggagccgctcattgtcgacaccggaggcctctttctgaaaaagttgaccgaatctgatgaggagatgaacaggctgttccttaaggtcgagaacgacacaaaccttgaggactatactatccaggccctgctggagctgtgggacaaggtcgcaggacgtctgctccttaggaaacaagaaataaaggagctggatgaggcactgcacagcctcgagttttcacgaacagacaaactgaagtccgtgctgaagaagtacgcagaggtgatcgaaaagacctcttacctgatgcgcccagaagtttacaggcttatcaatgaggaagccatggtcatgaattacgccttactaggtaaccgcaaagccctagcacaacttttcgtgaacttaatggagagcaccttacagcaagagctggactcacgtcacaggtggcaaggcctggtggatacatggaaggccctgaagaaagaggccctcttgcagtctttttccgagtttatggcatcagagagtattcacacaccgcctgccgtaacgaaggaacttgaagtcatgcttaaaactcagaacgtccttcagcagcggagactgaagcatctgtgcaccatctgtgatttactccccccttcctattctaagacccagctgaccgaatggcactctagtcttaactccttaaacaaagaacttgatacttatcatgtggactgtatgatgaggatccgtctgctgtatgagaaaacatggcaagagtgtctgatgcatgtgcaaaattgtaaaaagcaactgttagactggaaggcttttaccgaagaggaggctgagaccctggtgaaccagttttttttccagatggtcggtgctctgcagggcaaggtggaggaggatctggaactcctcgacaaatcttttgaaactctggcggaccagactgagtggcagtcctcgcacctgtttaaatacttccaggaggtggtccagctgtgggaggcccaccaaagcgaactgttggtacaggagctggagcttgaaaaacgaatggaacagcaccggcagaaacactcactggagtctcaggtgcaagaagcccatcttgataggctgctcgatcaactgcgacaacagagcgacaaggagacacttgcattccatttagagaaggttaaggattacttgaagaatatgaaaagtagatacgagtgttttcataccctcttgaccaaggaggtgatggaataccctgcgattatgctaaaggagctgaattcttatagctcagctctgagccagtacttcttcgtccgcgagattttcgaacagaatttagccggagaggtcatcttcaagttccgtcagccagaagcccacgaaaaaccttctcaaaagcgcgttaagaaactgaggaagaagcagggttctaaagaagatatgacgcgaagtgaggaaagcatttcctccggtaccagcacggcccgatctgtcgaggaagtggaagaagagaacgatcaggaaatggagtcctttatcacagaggaagtcctcggacagcaaaagaaatcccctcttcacgccaagatggacgagagtaaagaaggatcgattcaaggtctggaagagatgcaagtagaaagagaggggtcattgaacccctcgttgaatgaagagaacgtgaagggtcaaggggagaagaaggaagagagtgaggaagaagatgaaaaagaagaggaggaggaagaagaaaagctagaggaggagaaagaggagaaagaagcccaggaagagcaggaaagcctatcagtgggcgaggaggaggataaagaggaggggctggaggaaatatactacgaggatatggagagcttcacaattagttcagggaatacttacttcgtgttcgtgcctctcgaggaggagcattgtaggaagtctcatagtacattctccgcaatgttcattaacgacacctctagcgctaaattcatcgaacaggtgactataccatctagactgatactggaaatcaagaagtag

SEQ ID NO: 206399 - DNA, 570 bp, Artificial Sequence
  derived and/or modified sequence
atgtgtgccaagaggctgcggggccccttccgcatcttcctgcccctgaggaagtacagcttcttccccagccaggtggcccagccctttgccagcgctgctgtggcccaggccctgctgagcagccctggcaccaacctgcagcagaccctggtgggcggcctgcggctgcggcacggctctgtgggcggggcccagtgggtggtgaaggccgcctgcccctgggagccccaggatgtggcctgctgcggcggcttcaccgtgacagccagaattgctgcctgtgtgctgctgtgcctgtgtgagcacatgtacacccccagcgcccacgccaggatgacctttggaacagagcacctgctgctgtggccagcccagaggagagctgaccccaggacagctgcccccatccggctgcaccagggccagctggaccccagccgggaccctgagaacctgcgggcctgggccgtgggcagctgcagagctggggtggagctgcacggcagccctgtgcacctgcacatgagagctggccagcacatctccatgtttgctggggtggcctag

SEQ ID NO: 206400 - protein, 879 aa, Artificial Sequence
  derived and/or modified sequence
MKEEAFLRRRFSLCPPSSTPQKVDPRKLTRNLLLSGDNELYPLSPGKDMEPNGPSLPRDEGPPTPSSATKVPPAEYRLCNGSDKECVSPTARVTKKETLKAQKENYRQEKKRATRQLLSALTDPSVVIMADSLKIRGTLKSWTKLWCVLKPGVLLIYKTPKVGQWVGTVLLHCCELIERPSKKDGFCFKLFHPLDQSVWAVKGPKGESVGSITQPLPSSYLIFRAASESDGRCWLDALELALRCSSLLRLGTCKPGRDGEPGTSPDASPSSLCGLPASATVHPDQDLFPLNGSSLENDAFSDKSERENPEESDTETQDHSRKTESGSDQSETPGAPVRRGTTYVEQVQEELGELGEASQVETVSEENKSLMWTLLKQLRPGMDLSRVVLPTFVLEPRSFLNKLSDYYYHADLLSRAAVEEDAYSRMKLVLRWYLSGFYKKPKGIKKPYNPILGETFRCCWFHPQTDSRTFYIAEQVSHHPPVSAFHVSNRKDGFCISGSITAKSRFYGNSLSALLDGKATLTFLNRAEDYTLTMPYAHCKGILYGTMTLELGGKVTIECAKNNFQAQLEFKLKPFFGGSTSINQISGKITSGEEVLASLSGHWDRDVFIKEEGSGSSALFWTPSGEVRRQRLRQHTVPLEEQTELESERLWQHVTRAISKGDQHRATQEKFALEEAQRQRARERQESLMPWKPQLFHLDPITQEWHYRYEDHSPWDPLKDIAQFEQDGILRTLQQEAVARQTTFLGSPGPRHERSGPDQRLRKASDQPSGHSQATESSGSTPESCPELSDEEQDGDFVPGGESPCPRCRKEARRLQALHEAILSIREAQQELHRHLSAMLSSTARAAQAPTPGLLQSPRSWFLLCVFLACQLFINHILK

SEQ ID NO: 206401 - protein, 139 aa, Artificial Sequence
  derived and/or modified sequence
MKEEAFLRRRFSLCPPSSTPQKVDPRKLTRNLLLSGDNELYPLSPGKDMEPNGPSLPRDEGPPTPSSATKVPPAEYRLCNGSDKECVSPTARVTKKETLKAQKENYRQEKKRATRQLLSALTDPSVVIMADSLKIRGTL

SEQ ID NO: 206402 - protein, 69 aa, Artificial Sequence
  derived and/or modified sequence
MKEEAFLRRRFSLCPPSSTPQKVDPRKLTRNLLLSGDNELYPLSPGKDMEPNGPSLPRDEGPPTPSSAT

SEQ ID NO: 206403 - DNA, 2640 bp, Artificial Sequence
  derived and/or modified sequence
atgaaggaggaggcgtttctgcgcagacgcttttccctgtgtccaccctccagcacacctcaaaaagtcgaccctcgcaaactgacacgcaatctgctcctatctggcgataacgaactgtacccgctttcccccggcaaggacatggaaccgaatggtccttcacttccacgagatgagggaccacccactccctcatccgccactaaggttcctccagccgaatatcggctgtgcaatggaagtgataaagagtgtgtgtctcctacagctcgcgtgacaaaaaaagaaacgctgaaagctcaaaaagagaactataggcaggagaaaaagcgtgccacccggcagctgttgagcgcactaactgatccttccgtggtgataatggctgactcgctgaagattcgtggtacgctgaaatcctggactaaactgtggtgcgtgcttaaacccggggttttgcttatttacaagacccctaaggtaggacaatgggttggaaccgtcctgctgcactgttgtgaacttattgagaggccatccaagaaagacggcttctgctttaagctcttccaccctctggatcagtctgtctgggctgtgaaaggtcccaagggtgagtcggtggggagcatcacccagccgctgcctagctcttacctcatttttagagcagcttcagaatcggacggccggtgttggctggatgccctagaacttgccctgcggtgctcctcactcctgaggctgggaacatgtaaacctggtagggacggagagcctggcacctcccctgacgcctcgccttccagcttatgcgggttacccgccagtgcaactgtgcaccccgatcaggacctgttcccccttaacggtagctccctcgagaacgacgcctttagtgacaagtctgagagagagaacccggaagagtccgacaccgagacccaggatcattcgagaaaaaccgaatctggtagcgatcagagcgaaacgcccggggctcccgtcaggcgtggtactacatacgtcgaacaagtgcaggaggagcttggtgagctgggcgaagccagtcaggtggaaactgtctccgaggagaataaatccctgatgtggacattactgaaacagcttaggcctggcatggatttgtcaagagtagttctccctacgtttgtgctggaacctcggagctttctcaacaagcttagcgattactattatcacgcagaccttctgtcccgggcagcagtggaggaggatgcatacagccgtatgaagctggtgttgaggtggtacttaagcggcttttataagaagcccaagggcatcaagaaaccatataatccgatactcggtgaaacatttcgatgttgttggttccacccccagaccgattctcggaccttctacattgccgagcaggtttcgcatcatcctcctgttagtgcatttcacgtcagcaatagaaaggacggcttctgcattagcggttctataacagcgaagagccgattttatggcaactcactcagtgccctgcttgatggaaaagcgacactcacattcctgaaccgggctgaggactataccttaaccatgccgtatgcacactgcaagggtatcttgtacggcaccatgactctagagctgggtggaaaagtcactatagaatgcgccaagaataacttccaggctcagctcgaattcaagctgaagccctttttcggcggaagcacatcaattaatcagatttctggaaagataacatctggcgaggaagtactggcttccctcagcggccattgggaccgcgacgtgtttatcaaggaggaggggagcggctccagtgccctgttctggacaccctcgggagaggttcgtcggcagcggctaagacagcatactgtgcccctcgaggaacaaacagagcttgaatctgaacggctctggcagcacgtcactagggctattagcaaaggagatcaacatcgggctacccaagagaaatttgcccttgaggaggcacaacggcagcgagcgagagaaaggcaggagtccctcatgccttggaaacctcagctgttccacttagatcctatcacccaggagtggcattaccgatacgaagatcacagtccctgggatcctctgaaagatatagcccagttcgagcaggacgggatcctccgaactctgcaacaggaagctgtagctaggcagacaaccttcctggggagtccaggccccaggcacgagaggtcaggaccagatcagcggttgcgcaaggcctctgaccagcctagcggacattcccaggccacagagtctagcgggagtactcccgagtcctgtccagaactgtcagatgaggaacaggacggcgacttcgtccccggcggagaaagcccctgtccacgctgtagaaaagaggcccggcgcctgcaagctcttcatgaagccattctgagcattcgagaggctcaacaggaactgcataggcacctgagtgccatgctcagctcaacggctcgtgccgcacaagcgccaaccccagggcttctgcagtctccacgctcatggttcctgttgtgtgtcttcctcgcctgccagctcttcattaaccacattttaaagtag

SEQ ID NO: 206404 - DNA, 420 bp, Artificial Sequence
  derived and/or modified sequence
atgaaagaggaggcttttttgagaagacgcttctccttgtgtccgccaagctctacccctcagaaagtagaccctcgtaagctaacacgcaacttactattgagcggagacaacgagctctaccctctgagcccaggcaaggacatggaacctaatggtccatctctcccacgcgatgaaggccctcccactcccagctccgcgacgaaagtgcctcctgctgagtatcggctctgcaacggatccgacaaggagtgtgtgagtcctacagcaagagtcacaaagaaggaaactttgaaagcccagaaggaaaattatcggcaggagaaaaagagggccacccggcaactgctgagcgcccttacagacccctccgtggtcatcatggctgatagcctcaagattcgaggcacattgtag

SEQ ID NO: 206405 - DNA, 1533 bp, Artificial Sequence
  derived and/or modified sequence
atgtgtgtgccccatcgtcagggacaccaggaaggtgatagtcagggtgctgagggcgagctgcctgccggagaggagccgaggtcctttctcaacaagttatccgactactattatcatgcagacttgttgtctcgtgccgcagtggaagaagatgcatactcgagaatgaagttggtgctgcggtggtacctgtcaggcttctacaagaagcccaaagggataaagaaaccctataatccgattttgggcgaaactttccgctgctgttggtttcaccctcagacagactcccgtacgttctatattgccgagcaagtctcccaccacccgccagtctccgcatttcatgtgtctaataggaaggatggattttgtataagcggatctatcactgcgaaatcgcgtttctacggcaatagcttgtccgcgctgctagatgggaaagccaccctcacctttctcaacagagcggaggactacaccctgacaatgccctatgcccactgtaaggggattttgtacggcacaatgactttagaactgggcggtaaggtcacaatcgagtgtgcgaaaaataactttcaagcccagttagagttcaagttgaaacccttttttggcggtagcacgtctataaaccaaatatcaggtaaaatcacgtctggcgaggaagtcttagcgtctctctcgggacactgggacagagacgtgttcattaaggaggaggggtctgggagttcggcactattttggactcctagcggtgaagttaggaggcagcgcttgagacagcacaccgtacccctagaggagcagacagagctggagagtgagaggctgtggcagcatgtgacaagggcaatttcgaaaggcgatcaacatcgggccactcaggaaaagtttgctctagaggaggcccagaggcagagggccagagaaagacaggaatccctgatgccatggaagccacagttgttccacctggacccaatcactcaagaatggcactatagatacgaggatcattctccttgggaccccctgaaggatatcgcacagttcgaacaggatggtatcctgagaacactgcagcaggaggccgtcgcccggcaaaccacgttcctgggaagccccgggcctagacatgagcggtcgggacccgatcagagactgaggaaagccagcgaccagcccagcggccatagccaagccaccgaaagtagcgggtctaccccggaatcgtgccctgagctgtccgatgaggaacaggacggggactttgtgccgggcggcgagtccccttgtcctagatgcagaaaggaggcacggcggctccaggcattacatgaagctattctgagtatacgagaagcacagcaggaattacacagacacctgtcagcaatgttgagttccacagctagggcagctcaggcccccaccccagggctgctccagagccctcgctcttggttcctcctctgtgtgttcctcgcgtgccagctcttcattaatcacatactcaagtag

SEQ ID NO: 206406 - DNA, 2640 bp, Artificial Sequence
  derived and/or modified sequence
atgaaggaggaggccttcctgcggcggcgcttcagcctgtgcccccccagcagcaccccccagaaggtggaccccaggaagctgaccaggaacctgctgctgagcggggacaatgagctgtaccccctgagccctgggaaggacatggagcccaacggccccagcctgcccagagatgagggcccccccacccccagcagcgccaccaaggtgcccccagctgagtaccgcctgtgcaatggaagtgacaaggaatgtgtgagccccacagcccgggtgaccaagaaggagaccctgaaggcccagaaggagaactaccggcaggagaagaagagggccacccggcagctgctgagcgccctgacagaccccagcgtggtgatcatggctgacagcctgaagatccggggcaccctgaagtcctggaccaagctgtggtgtgtgctgaagccaggagtgctgctgatctacaagacccccaaggtgggccagtgggtgggcaccgtgctgctgcactgctgtgagctgattgagcggcccagcaagaaggatggcttctgcttcaagctgttccaccccctggaccagagcgtgtgggccgtgaagggccccaagggggagagcgtgggcagcatcacccagcccctgcccagcagctacctgatcttccgggccgccagcgagagtgatggccgctgctggctggatgccctggagctggccctgcgctgcagcagcctgctgcggctgggcacctgcaagccaggaagagatggagagcccggcaccagcccagatgccagccccagcagcctgtgtggcctgcctgccagcgccaccgtgcacccagaccaggacctcttccccctgaatggcagcagcctggagaatgatgccttcagtgacaagtcagaaagagaaaatcctgaggagagtgacacagagacccaggaccacagcaggaagacagaaagtggcagtgaccagagcgagacccctggggcccctgtgcggcggggcaccacctacgtggagcaggtgcaggaggagctgggggagctgggggaggccagccaggtggagaccgtgtctgaggagaacaagagcctgatgtggaccctgctgaagcagctgcggcccggcatggacctgagccgggtggtgctgcccacctttgtgctggagcccaggagcttcctgaacaagctgagtgactactactaccacgccgacctgctgagcagagctgctgtggaggaggatgcctacagcaggatgaagctggtgctgcgctggtacctgagcggcttctacaagaagcccaagggcatcaagaagccctacaaccccatcctgggggagaccttccgctgctgctggttccacccccagacagacagcaggaccttctacatcgccgagcaggtgagccaccacccccctgtgtctgccttccacgtgagcaacaggaaggatggcttctgcatcagcggcagcatcacagccaagagccgcttctacggcaacagcctgagcgccctgctggatggcaaggccaccctgaccttcctgaacagagctgaggactacaccctgaccatgccctatgcccactgcaagggcatcctgtatggcaccatgaccctggagctgggcggcaaggtgaccattgaatgtgccaagaacaacttccaggcccagctggagttcaagctgaagcccttcttcggcggcagcaccagcatcaaccagatcagcggcaagatcaccagcggggaggaggtgctggccagcctgagcggccactgggacagagatgtgttcatcaaggaggagggcagcggcagcagcgccctcttctggacccccagcggggaggtgcggcggcagaggctgcggcagcacacagtgcccctggaggagcagacagagctggagagcgagcggctgtggcagcacgtgacccgggccatcagcaagggggaccagcaccgggccacccaggagaagtttgccctggaggaggcccagaggcagagggcccgggagcggcaggagagcctgatgccctggaagccccagctgttccacctggaccccatcacccaggagtggcactaccgctatgaggaccacagcccctgggaccccctgaaggacatcgcccagtttgagcaggacggcatcctgcggaccctgcagcaggaggccgtggcccggcagaccaccttcctgggcagccctggccccaggcatgagaggagcggccctgaccagaggctgaggaaggccagtgaccagcccagcggccacagccaggccacagagagcagcggcagcaccccagagagctgcccagagctgagtgatgaggagcaggatggagactttgtgcctggaggagagagcccctgcccccgctgcaggaaggaggcccggcggctgcaggccctgcacgaggccatcctgagcatccgggaggcccagcaggagctgcaccgccacctgagcgccatgctgagcagcacagcccgggccgcccaggcccccaccccaggcctgctgcagagccccaggtcctggttcctgctgtgtgtgttcctggcctgccagctgttcatcaaccacatcctgaagtag

SEQ ID NO: 206407 - DNA, 420 bp, Artificial Sequence
  derived and/or modified sequence
atgaaggaggaggccttcctgcggcggcgcttcagcctgtgcccccccagcagcaccccccagaaggtggaccccaggaagctgaccaggaacctgctgctgagcggggacaatgagctgtaccccctgagccctgggaaggacatggagcccaacggccccagcctgcccagagatgagggcccccccacccccagcagcgccaccaaggtgcccccagctgagtaccgcctgtgcaatggaagtgacaaggaatgtgtgagccccacagcccgggtgaccaagaaggagaccctgaaggcccagaaggagaactaccggcaggagaagaagagggccacccggcagctgctgagcgccctgacagaccccagcgtggtgatcatggctgacagcctgaagatccggggcaccctgtag

SEQ ID NO: 206408 - DNA, 1533 bp, Artificial Sequence
  derived and/or modified sequence
atgtgtgtgccccaccggcagggccaccaggagggggacagccagggcgctgagggggagctgcctgctggggaggagcccaggagcttcctgaacaagctgagtgactactactaccacgccgacctgctgagcagagctgctgtggaggaggatgcctacagcaggatgaagctggtgctgcgctggtacctgagcggcttctacaagaagcccaagggcatcaagaagccctacaaccccatcctgggggagaccttccgctgctgctggttccacccccagacagacagcaggaccttctacatcgccgagcaggtgagccaccacccccctgtgtctgccttccacgtgagcaacaggaaggatggcttctgcatcagcggcagcatcacagccaagagccgcttctacggcaacagcctgagcgccctgctggatggcaaggccaccctgaccttcctgaacagagctgaggactacaccctgaccatgccctatgcccactgcaagggcatcctgtatggcaccatgaccctggagctgggcggcaaggtgaccattgaatgtgccaagaacaacttccaggcccagctggagttcaagctgaagcccttctttggaggcagcaccagcatcaaccagatcagcggcaagatcaccagcggggaggaggtgctggccagcctgagcggccactgggacagagatgtgttcatcaaggaggagggcagcggcagcagcgccctcttctggaccccatctggagaggtgcggcggcagaggctgcggcagcacacagtgcccctggaggagcagacagagctggagagcgagcggctgtggcagcacgtgacccgggccatcagcaaaggagaccagcaccgggccacccaggagaagtttgccctggaggaggcccagaggcagagggcccgggagcggcaggagagcctgatgccctggaagccccagctgttccacctggaccccatcacccaggagtggcactaccgctatgaggaccacagcccctgggaccccctgaaggacatcgcccagtttgagcaggacggcatcctgcggaccctgcagcaggaggccgtggcccggcagaccaccttcctgggcagccctggccccaggcatgagaggagcggccctgaccagaggctgaggaaggccagtgaccagcccagcggccacagccaggccacagagagcagcggcagcaccccagagagctgcccagagctgagtgatgaggagcaggatggagactttgtgcctggaggagagagcccctgcccccgctgcaggaaggaggcccggcggctgcaggccctgcacgaggccatcctgagcatccgggaggcccagcaggagctgcaccgccacctgagcgccatgctgagcagcacagcccgggccgcccaggcccccaccccaggcctgctgcagagccccaggtcctggttcctgctgtgtgtgttcctggcctgccagctgttcatcaaccacatcctgaagtag

SEQ ID NO: 206409 - DNA, 2640 bp, Artificial Sequence
  derived and/or modified sequence
atgaaggaggaggccttcctgcggcggcggttcagcctgtgccccccgagcagtactccgcaaaaggtcgatccccggaaattaacacggaacctactgctgagcggtgacaatgagctttaccctctgagccctggaaaggacatggaacctaatgggccctctctgccaagagatgaaggaccgccaaccccatctagcgctactaaggtgcccccagccgaatatcgcctgtgcaatggatccgataaggaatgcgtgtcgccaactgccagggtaacaaaaaaggagactctcaaggctcagaaagaaaattataggcaggaaaagaaacgcgccacaagacagctgctgtctgctctgacagacccctcagtagtgatcatggctgattcgctcaaaatccgaggaacactcaaatcctggacaaaattgtggtgcgtgctcaagcccggggttctcttaatctataagacacccaaggttggacagtgggttggcacagttctcctgcattgttgcgaactaatcgagcgaccgtcaaaaaaagacgggttttgttttaaacttttccaccccttagatcaatcggtgtgggcagtaaagggtccgaagggtgagagcgtgggcagcatcactcaaccactgccctcttcctacctcatttttagggcagccagcgagtctgatggccggtgctggctggatgccctggaactggcactcaggtgctcctccctcttgcggctgggaacttgtaagcccgggagggatggggagcccggaacgtctccagacgcttcaccatcttcactgtgcggcctaccagcttctgcgacggtgcatcccgaccaggatctgttcccactcaatggctcatctttggaaaatgacgctttctctgataagtccgaacgcgaaaatcccgaagagagtgatacagaaacacaggatcactcacgcaagaccgagagtggttcagaccagagcgaaactccaggggccccagtgcggcggggaaccacatacgtggaacaggtgcaggaggagcttggggaactgggggaggcctcccaggtcgaaacagtttcggaagagaataagagtctgatgtggactctgctgaaacagctgcggccagggatggatctctctagggtagtcctgcccacattcgtgctcgaacctcgcagcttcctgaataagctctctgattactattaccatgctgatctgctaagtagggccgccgtggaggaagacgcctactctaggatgaaactggtgctccgctggtacctgtccggattttacaaaaagcccaagggaataaaaaaaccatacaatcccatactcggcgaaacatttaggtgttgttggtttcatccacagacagattcccggacattttatatcgcagagcaggtgagccatcaccctccggtgtcggcatttcatgtgagtaaccggaaggatggattttgcattagcggaagcataacggctaagagtaggttctatggcaacagccttagcgccctgcttgacggaaaagcgacactaacttttttaaacagggcggaagactatactctcacaatgccttacgcccattgcaaaggaatattgtacggtaccatgacattggaactagggggcaaagtcacaatcgaatgcgccaaaaataatttccaggctcagctggagttcaagctgaagccgttctttggcggatcgacctcaattaatcagattagcggtaagataacttcaggcgaggaagtgctggcaagcctgtctgggcattgggatcgcgacgtgtttatcaaggaagagggttccggtagttcagcactgttctggactccaagtggggaagttcgccggcagcggctacgccagcacaccgtgccactggaggagcaaacagagctggaaagcgagagactctggcagcacgttaccagggctatttctaagggggaccaacatagggctacccaggaaaaattcgctctggaagaggcccagaggcagagggcacgggagcgtcaggagtcgctcatgccttggaaaccccaactgttccacctggatcccatcacgcaggaatggcattatcggtatgaggatcacagcccctgggaccctctgaaggacatagcacagttcgagcaagacggaatcttaagaacactacaacaggaagctgtggcccggcaaacaacgtttcttgggtctcccggcccacgccacgagcgtagcgggcctgatcaacggctcagaaaagcgagcgaccagcctagtggccacagccaggcaacagaaagctcaggctctacacctgaatcctgcccagagctctcagacgaggagcaagatggtgactttgtgccaggaggagagtccccgtgtcctcgttgtagaaaggaggcgcgccgcctgcaggcactgcacgaggccatcctgtccattcgagaggctcagcaggagctccatcggcatctgagcgctatgttaagtagcaccgccagagcggctcaagcgcccactccaggactgctccaaagcccaaggtcctggtttctcctctgtgttttcctggcgtgccagctttttatcaatcacatcttaaagtag

SEQ ID NO: 206410 - DNA, 420 bp, Artificial Sequence
  derived and/or modified sequence
atgaaggaggaggccttcctgcggcggcggttcagcctgtgccccccctcatccacaccacaaaaggtcgaccccagaaaacttaccagaaatctgcttctgtctggcgataacgagctctacccactaagccctggcaaagacatggaacccaacggcccatcactgcctcgggatgaggggcctcctactccctcatccgccaccaaggtgccgcccgccgaatatcgactttgcaatggctccgataaagagtgcgtgagccctaccgcccgcgtgacaaaaaaggaaaccctgaaagcccagaaagagaactacagacaggaaaagaagcgcgccacgcgtcagttgctgagcgccttgacggaccccagcgtggttatcatggcagatagtctgaagatccgaggtacgctctag

SEQ ID NO: 206411 - DNA, 1533 bp, Artificial Sequence
  derived and/or modified sequence
atgtgcgtgccccaccggcagggccaccaggagggcgacagccagggcgctgaaggcgagttgccagccggcgaggagccaagatctttcctgaataagctgagcgactactactaccacgcagatttgctgagccgcgcagccgttgaggaagacgcgtatagtcggatgaaactggtgcttcgctggtacctcagcgggttttacaagaaaccaaaggggattaaaaaaccatataatcccattctgggcgagacctttaggtgttgttggttccaccctcaaaccgacagccgaacgttttatatagccgagcaggtctctcatcacccgcctgtgtctgctttccacgtgtccaatagaaaggatggcttctgtatctctggatctatcactgcgaaatctcgtttttatggcaactccctgagcgccctgcttgacggaaaagccactctcacattcctgaaccgcgctgaggactacacattaactatgccgtatgctcactgtaaaggtatattgtacgggaccatgacactcgaactcggaggcaaggttacaatagagtgtgccaagaataactttcaagcgcaactggagttcaagctcaagccctttttcggcgggtctactagcatcaatcagatttcaggtaagattacgtcgggagaggaagtactggcctccctgtcaggacactgggacagagacgtgtttatcaaagaagaaggctcaggaagttctgctctgttctggacaccatctggagaggtccgtcggcaaaggctccgccagcacactgtcccattggaagaacagacagaattggagagcgaacgactgtggcagcacgtgacccgcgccataagcaagggcgaccagcacagggccactcaggagaaatttgcgttagaagaggcccagcgccaaagagcgagagagcgacaagaaagcctgatgccttggaagcctcaactgttccaccttgacccaattactcaggaatggcattaccgctacgaggaccatagcccatgggaccctctgaaggacatcgctcagttcgagcaagacggtatccttagaacgctgcagcaagaggctgtggcacgccaaactacattcctgggcagccccggccctagacacgaaaggtccgggcccgaccaacgtctgcgaaaagcaagcgaccagccttctggccactcacaggccactgagtcttccggcagtacaccagagagttgccctgagttaagcgatgaagaacaagatggagacttcgtccccggtggcgaatcaccctgtccccgctgccggaaggaagccagaaggcttcaggccctccacgaagctatcctgtcgataagggaggcccagcaggagctgcacaggcacttatctgcgatgctttcaagcactgctcgcgcggcacaagccccaactccgggcctgctgcagtcccctaggagctggtttctgttgtgtgtgttcctggcttgtcagttgttcatcaatcatatcctaaagtag

SEQ ID NO: 206412 - DNA, 3889 bp, Artificial Sequence
  derived and/or modified sequence
tcctccctccgccgcgccctcgctccgcctcgcgcggggggaccatctgctggcatttcctgcagccaggcccgcgccgccagtggagcccccgcgcgcccggccggcccggagcaccgagctcgcggcacggtaggagaagcccccgagcgcccacagcatgaaggaggaggccttcctccggcgccgcttctccctgtgtccaccttcctccacccctcagaaagtcgacccccggaagctcacccggaacttgctcctcagcggagacaatgagctctacccactcagcccagggaaggacatggagcccaacggcccgtcgctgcccagggatgaagggcccccgaccccaagctctgccacgaaggtgccaccggcagagtacaggctgtgcaacgggtcagacaaggaatgtgtgtcccccaccgccagggtcaccaagaaggagactctcaaggcgcagaaggagaactaccggcaggagaagaagcgcgccacacggcagctgctcagcgctctgacagaccccagcgtggtcatcatggctgacagcctgaagatccgcggcaccctgaagagctggaccaagctgtggtgcgtgctgaagccgggggtgctgctcatctacaagacgcccaaggtgggccagtgggtgggcacggtgctgctgcactgctgcgagctcatcgagcggccctccaagaaggacggcttctgcttcaagctcttccacccgctggatcagtccgtctgggccgtgaagggccccaaaggtgagagcgtgggctccatcacacagcccctgcccagcagctacctgatcttcagggccgcctccgagtcagatggtcgctgctggctggacgccctggagctggccctgcgctgctctagcctactgagactgggcacctgcaagccgggccgagacggggagccagggacctcgccagacgcatcaccctcatcgctctgtgggctgccagcctcagccaccgtccacccagaccaagacctgttcccactgaacgggtcttccctggagaacgatgcattctcagacaagtcggagagagagaaccctgaggagtcagataccgagacccaggaccatagccggaagacggagagtggcagcgaccagtcagagacccctggggccccggtgcggagagggaccacctatgtggagcaggtccaggaggagctgggggagctgggcgaggcgtcccaggtggagacagtgtcagaggagaacaagagtctgatgtggaccctgctgaagcagctacggccaggcatggacctgtcccgcgtggtgctacccacgttcgtactggagccgcgctccttcctgaacaagctctccgactactactaccacgcagacctgctctccagggctgcggtggaggaggatgcctacagccgcatgaagctggtgctgcggtggtacctgtctggcttctacaagaagcccaagggaatcaagaagccgtacaaccccatcctgggggagaccttccgctgctgctggttccacccgcagactgacagccgcacattctacatagcagagcaggtgtcccaccacccgcccgtgtctgccttccacgtcagcaaccggaaggacggcttctgcatcagtggcagcatcacagccaagtccaggttttatgggaactcgctgtcggcgctgctggacggcaaagccacgctcaccttcctgaaccgagccgaggattacacccttaccatgccctacgcccactgcaaaggaatcctgtatggcacgatgaccctggagctgggtgggaaggtcaccatcgagtgtgcgaagaacaacttccaggcccagctggaattcaaactcaagcccttcttcgggggtagcaccagcatcaaccagatctcgggaaagatcacgtcgggagaggaagtcctggcgagcctcagtggccactgggacagggacgtgtttatcaaggaggaagggagcggaagcagtgcgcttttctggaccccgagcggggaggtccgcagacagaggctgaggcagcacacggtgccgctggaggagcagacggagctggagtccgagaggctctggcagcacgtcaccagggccatcagcaagggcgaccagcacagggccacacaggagaagtttgcactggaggaggcacagcggcagcgggcccgtgagcggcaggagagcctcatgccctggaagccgcagctgttccacctggaccccatcacccaggagtggcactaccgatacgaggaccacagcccctgggaccccctgaaggacatcgcccagtttgagcaagacgggatcctgcggaccttgcagcaggaggccgtggcccgccagaccaccttcctgggcagcccagggcccaggcacgagaggtctggcccagaccagcggcttcgcaaggccagcgaccagccctccggccacagccaggccacggagagcagcggatccacgcctgagtcctgcccagagctctcagacgaggagcaggatggtgactttgtccctggcggtgagagcccatgccctcggtgcaggaaggaggcgcggcggctgcaggccctgcacgaggccatcctctccatccgagaggcccagcaggagctgcacaggcacctctcggccatgctgagctccacggcacgggcagcacaggcaccgaccccaggcctcctgcagagcccccgatcctggttcctgctctgcgtgttcctggcgtgtcagctgttcattaaccacatcctcaaataggagccctgagggcagagctcctggccggtcctgagccctccctcccaggcacccagcactttaagcctgctccatggaggcagagaggcccggcaagcacagccactgtgacggggagtccaggcgcaggagggacccggggccacaaggcgctgcgggcccaggtgtgctgggcccctctcaggggcactggcctctctgcagggccttccgcccagcgctggccttaatgctaaagccaaatgcagcttctgctgtgcgacgcactcctggccatcttgccgtgtcaccccctgtccggcctccacttgccatgggggatggatggatttagggtgggagggcctgtgggggccctggacagtcacaccccagcagcagtgagtgggcaggtttggaggagccccgagtggcccaggagtccccccacacacagatgcataggcctgccttccggagaccctgtccacattgccgggaccaccctggtggggccactggtgggtgccagggacaggttagggccactctggggaaggcattttggttttttattccacgctgtgctgtttggatgggagccccacagaggcaggtcctggaaccaccccacccccacacctggacgctcgctctggtgggggcacacgcaggtggaggtggttgtgggtgcaggtgtgtgcaggggtgtggggggcgcaggggtgtggcttagctggccccgcacccaggccggggaggctcaagttcgccactttactcagaccgatgcacagtcttcccattttacacttttttaataaacataattgcaatattttaggtgggctgcgagctgcagtcagccttcacgtctggcctcagtccccgtgtcagtgccgctctgcgtgtgcgtgtgcgcgtgtgtgagcctctacacatatatatacgtacagagccttaaaccacatcgtggcggtgccgtctgagctgtagcgggtggctttgtttccagtttttgtacccgtgtccttgtctcccctcctcccccatctggggatgtgtctgtgttccacaccttgaaataaacagacacatacgtgttctctt

SEQ ID NO: 206413 - DNA, 2621 bp, Artificial Sequence
  derived and/or modified sequence
ctccctccgccgcgccctcgctccgcctcgcgcggggggaccatctgctggcatttcctgcagccaggcccgcgccgccagtggagcccccgcgcgcccggccggcccggagcaccgagctcgcggcacggtaggagaagcccccgagcgcccacagcatgaaggaggaggccttcctccggcgccgcttctccctgtgtccaccttcctccacccctcagaaagtcgacccccggaagctcacccggaacttgctcctcagcggagacaatgagctctacccactcagcccagggaaggacatggagcccaacggcccgtcgctgcccagggatgaagggcccccgaccccaagctctgccacgaaggtgccaccggcagagtacaggctgtgcaacgggtcagacaaggaatgtgtgtcccccaccgccagggtcaccaagaaggagactctcaaggcgcagaaggagaactaccggcaggagaagaagcgcgccacacggcagctgctcagcgctctgacagaccccagcgtggtcatcatggctgacagcctgaagatccgcggcaccctgaagagctggaccaagctgtggtgcgtgctgaagccgggggtgctgctcatctacaagacgcccaaggtgggccagtgggtgggcacggtgctgctgcactgctgcgagctcatcgagcggccctccaagaaggacggcttctgcttcaagctcttccacccgctggatcagtccgtctgggccgtgaagggccccaaaggtgagagcgtgggctccatcacacagcccctgcccagcagctacctgatcttcagggccgcctccgagtcagatggtcgctgctggctggacgccctggagctggccctgcgctgctctagcctactgagactgggcacctgcaagccgggccgagacggggagccagggacctcgccagacgcatcaccctcatcgctctgtgggctgccagcctcagccaccgtccacccagaccaagacctgttcccactgaacgggtcttccctggagaacgatgcattctcagacaagtcggagagagagaaccctgaggagtcagataccgagacccaggaccatagccggaagacggagagtggcagcgaccagtcagagacccctggggccccggtgcggagagggaccacctatgtggagcaggtccaggaggagctgggggagctgggcgaggcgtcccaggtggagacagtgtcagaggagaacaagagtctgatgtggaccctgctgaagcagctacggccaggcatggacctgtcccgcgtggtgctacccacgttcgtactggagccgcgctccttcctgaacaagctctccgactactactaccacgcagacctgctctccagggctgcggtggaggaggatgcctacagccgcatgaagctggtgctgcggtggtacctgtctggcttctacaagaagcccaagggaatcaagaagccgtacaaccccatcctgggggagaccttccgctgctgctggttccacccgcagactgacagccgcacattctacatagcagagcaggtgtcccaccacccgcccgtgtctgccttccacgtcagcaaccggaaggacggcttctgcatcagtggcagcatcacagccaagtccaggttttatgggaactcgctgtcggcgctgctggacggcaaagccacgctcaccttcctgaaccgagccgaggattacacccttaccatgccctacgcccactgcaaaggaatcctgtatggcacgatgaccctggagctgggtgggaaggtcaccatcgagtgtgcgaagaacaacttccaggcccagctggaattcaaactcaagcccttcttcgggggtagcaccagcatcaaccagatctcgggaaagatcacgtcgggagaggaagtcctggcgagcctcagtggccactgggacagggacgtgtttatcaaggaggaagggagcggaagcagtgcgcttttctggaccccgagcggggaggtccgcagacagaggctgaggcagcacacggtgccgctggaggagcagacggagctggagtccgagaggctctggcagcacgtcaccagggccatcagcaagggcgaccagcacagggccacacaggagaagtttgcactggaggaggcacagcggcagcgggcccgtgagcggcaggagagcctcatgccctggaagccgcagctgttccacctggaccccatcacccaggagtggcactaccgatacgaggaccacagcccctgggaccccctgaaggacatcgcccagtttgagcaagacgggatcctgcggaccttgcagcaggaggccgtggcccgccagaccaccttcctgggcagcccagggcccaggcacgagaggtctggcccagaccagcggcttcgcaaggccagcgaccagccctccggccacagccaggccacggagagcagcggatccacgcctgagtcctgcccagagctccacggcacgggcagcacaggcaccgaccccaggcctcctgcagagcccccgatcctggttcctgctctgcgtgttcctggcgtgtcagctgttcattaa

SEQ ID NO: 206414 - DNA, 554 bp, Artificial Sequence
  derived and/or modified sequence
ctcgctccgcctcgcgcggggggaccatctgctggcatttcctgcagccaggcccgcgccgccagtggagcccccgcgcgcccggccggcccggagcaccgagctcgcggcacgaagcccccgagcgcccacagcatgaaggaggaggccttcctccggcgccgcttctccctgtgtccaccttcctccacccctcagaaagtcgacccccggaagctcacccggaacttgctcctcagcggagacaatgagctctacccactcagcccagggaaggacatggagcccaacggcccgtcgctgcccagggatgaagggcccccgaccccaagctctgccacgaaggtgccaccggcagagtacaggctgtgcaacgggtcagacaaggaatgtgtgtcccccaccgccagggtcaccaagaaggagactctcaaggcgcagaaggagaactaccggcaggagaagaagcgcgccacacggcagctgctcagcgctctgacagaccccagcgtggtcatcatggctgacagcctgaagatccgcggcaccctgaa

SEQ ID NO: 206415 - DNA, 2182 bp, Artificial Sequence
  derived and/or modified sequence
atttcctgcagccaggcccgcgccgccagtggagcccccgcgcgcccggccggcccggagcaccgagctcgcggcacggtaggagaagcccccgagcgcccacagcatgaaggaggaggccttcctccggcgccgcttctccctgtgtccaccttcctccacccctcagaaagtcgacccccggaagctcacccggaacttgctcctcagcggagacaatgagctctacccactcagcccagggaaggacatggagcccaacggcccgtcgctgcccagggatgaagggcccccgaccccaagctctgccacgaaggtgccaccggcagagtacaggctgtgcaacgggtcagacaaggaatgtgtgtcccccaccgccagggtcaccaagaaggagactctcaaggcgcagaaggagaactaccggcaggagaagaaccgcgctccttcctgaacaagctctccgactactactaccacgcagacctgctctccagggctgcggtggaggaggatgcctacagccgcatgaagctggtgctgcggtggtacctgtctggcttctacaagaagcccaagggaatcaagaagccgtacaaccccatcctgggggagaccttccgctgctgctggttccacccgcagactgacagccgcacattctacatagcagagcaggtgtcccaccacccgcccgtgtctgccttccacgtcagcaaccggaaggacggcttctgcatcagtggcagcatcacagccaagtccaggttttatgggaactcgctgtcggcgctgctggacggcaaagccacgctcaccttcctgaaccgagccgaggattacacccttaccatgccctacgcccactgcaaaggaatcctgtatggcacgatgaccctggagctgggtgggaaggtcaccatcgagtgtgcgaagaacaacttccaggcccagctggaattcaaactcaagcccttcttcgggggtagcaccagcatcaaccagatctcgggaaagatcacgtcgggagaggaagtcctggcgagcctcagtggccactgggacagggacgtgtttatcaaggaggaagggagcggaagcagtgcgcttttctggaccccgagcggggaggtccgcagacagaggctgaggcagcacacggtgccgctggaggagcagacggagctggagtccgagaggctctggcagcacgtcaccagggccatcagcaagggcgaccagcacagggccacacaggagaagtttgcactggaggaggcacagcggcagcgggcccgtgagcggcaggagagcctcatgccctggaagccgcagctgttccacctggaccccatcacccaggagtggcactaccgatacgaggaccacagcccctgggaccccctgaaggacatcgcccagtttgagcaagacgggatcctgcggaccttgcagcaggaggccgtggcccgccagaccaccttcctgggcagcccagggcccaggcacgagaggtctggcccagaccagcggcttcgcaaggccagcgaccagccctccggccacagccaggccacggagagcagcggatccacgcctgagtcctgcccagagctctcagacgaggagcaggatggtgactttgtccctggcggtgagagcccatgccctcggtgcaggaaggaggcgcggcggctgcaggccctgcacgaggccatcctctccatccgagaggcccagcaggagctgcacaggcacctctcggccatgctgagctccacggcacgggcagcacaggcaccgaccccaggcctcctgcagagcccccgatcctggttcctgctctgcgtgttcctggcgtgtcagctgttcattaaccacatcctcaaataggagccctgagggcagagctcctggccggtcctgagccctccctcccaggcacccagcactttaagcctgctccatggaggcagagaggcccggcaagcacagccactgtgacggggagtccaggcgcaggagggacccggggccacaaggcgctgcgggcccaggtgtgctgggcccctctcaggggcactggcctctctgcagggccttccgcccagcgctggccttaatgctaaagccaaatgcagcttctgctgtgcgacgcactcctggccatcttgccgtgtca

SEQ ID NO: 206416 - DNA, 2640 bp, Artificial Sequence
  derived and/or modified sequence
atgaaggaggaggcatttctccgcagacggttttcactgtgtcctccgagttccactccccaaaaggttgatccgcgaaagctcaccaggaatctgttgctgtcaggagataatgaactatatccactatctccagggaaggacatggagccaaacggcccttccctgccgagggacgaaggcccaccaaccccctccagcgccaccaaggtccccccagcagaatacaggctgtgtaacgggtccgacaaagagtgcgtgtcgccgactgcgagagtcacaaagaaggagaccctcaaagctcagaaagaaaattatcgccaggagaagaagagggccactcgccagctcctcagcgccctaactgatccctcagtagtaatcatggcagatagtctgaaaatcaggggcacgctaaaaagctggaccaaattgtggtgtgttttaaagcctggcgtgctgctgatttataaaacgcccaaagtcggccagtgggtgggaactgtgttgctgcattgttgcgagctgatcgaaagaccttctaaaaaagacggcttctgctttaaactattccaccctctggaccagtctgtctgggcggtgaagggaccgaagggtgagagtgtaggaagtattacgcagcccctgccttcttcctacttaatcttccgcgctgcatctgagagcgacggacgatgttggctggacgccctggagctggctctcaggtgcagtagccttctcagactcggcacttgtaaacccggaagagacggtgagcctgggacaagtccagacgctagcccgtcttccctgtgcggtctgcctgctagtgccacagtccaccctgaccaggacctcttccccctgaatggcagctccctggagaacgacgccttcagtgataaaagcgagcgcgaaaaccctgaggaaagtgatacggaaacgcaggaccactccagaaagactgaaagcgggagtgatcagagcgagacgcccggtgcccctgtgcgtcgaggtacgacttatgtggagcaggtgcaggaggagctgggcgagctgggggaagcctctcaggtagaaaccgtgtcagaggagaacaaaagtctgatgtggacactacttaagcaactcagacccggaatggacttatctcgggtcgtcttgcccactttcgtgctggaacctcggtctttcctgaacaaattgtcggattactattatcacgcggacttgctctccagagcagcagtcgaggaggacgcttactctcgcatgaagctagtgctgcggtggtacctcagcggattttacaagaagcccaaggggattaaaaagccctacaaccccattctgggtgaaacattccggtgctgctggttccatcctcaaacagattccaggactttctacatcgccgagcaggtaagtcaccatccaccagtatctgcttttcatgtgagcaaccggaaagacggcttctgcataagtggcagcatcacagctaagagcaggttctatggcaactctctaagcgccttgcttgacggaaaagctactttgaccttcctaaatagggcggaggattacacactcactatgccctatgcccattgtaaagggatcctttacggtaccatgaccctggagttgggcggaaaagtgaccatcgagtgcgccaaaaataatttccaggcccagctggaatttaagctgaaacctttcttcggaggcagcacttccattaaccaaatttccggaaagattacgagtggcgaagaggtgttggcaagtctatctggacattgggaccgtgacgtttttatcaaggaggaggggtccggctcttcagctttgttttggaccccctccggcgaagtcaggcgccagcgactcaggcagcacaccgtcccactggaggagcagactgagctggagagcgagcggctttggcagcacgtgacaagagcaatcagcaagggcgatcagcacagggccacacaggagaagttcgccctggaggaggctcaacggcagagagccagagaaaggcaggagtcactaatgccctggaagccgcaactctttcatctcgaccccataacacaggagtggcactatcgctatgaggaccatagtccctgggaccccctcaaagatattgcccaattcgagcaagatggcatcttacggactctgcaacaggaagcagtggcgcgtcagactactttcctcggcagtccaggccctagacatgagcgttccggccctgaccagcgcctgaggaaggcgtccgatcagccatccgggcactcccaggcaaccgagagctctggctccactcccgagtcctgccccgaactgagtgatgaggagcaggacggagacttcgtgccaggaggcgagtccccgtgccccagatgcaggaaggaggccaggcgactgcaagcacttcacgaggccattttatctatccgagaagcacaacaggagctgcatcgtcatttatcggccatgctgtcttccaccgctcgagcggcacaggcaccaacgcccggactcctgcagtcacctcgcagttggtttctgttgtgcgtattcttggcgtgccagctgttcataaatcacatactgaagtag

SEQ ID NO: 206417 - DNA, 420 bp, Artificial Sequence
  derived and/or modified sequence
atgaaagaggaagctttcttaagacggaggttctcactgtgcccaccttctagtaccccacagaaagtggacccccgtaagttaactaggaaccttctgttgtcgggtgataacgagctctatccattatcacctggcaaagacatggagcccaatggtccttcattgcctcgcgatgagggcccacccactcctagcagcgcgactaaggtaccaccagccgagtacagattgtgtaacggctccgataaggagtgtgtaagcccgacggcacgggtgactaaaaaggaaaccctgaaagcgcagaaagaaaactaccgacaggagaagaagagggctacacggcagctactgtcagccctgaccgacccatccgtcgtaatcatggccgacagtcttaagatccggggaacactgtag

SEQ ID NO: 206418 - DNA, 1533 bp, Artificial Sequence
  derived and/or modified sequence
atgtgcgtgccccaccgacagggtcaccaggaaggggatagccagggagcggagggggagctgccagccggtgaggagccccgtagtttccttaacaaactgtctgactactattatcatgcagatttgctgagccgggctgccgtggaggaggacgcttattctcgcatgaagcttgttctgaggtggtacctcagcgggttctacaaaaagcccaaaggcatcaagaaaccctataaccctatactcggtgagacttttagatgctgctggtttcacccacagacagacagccgcactttttatattgcggagcaggtgtcccaccatccgccagtgtccgcctttcacgtctctaaccgaaaggacggcttctgtatttcgggctccatcacggcaaagtctcgattctatgggaattcgctttccgcgcttctggacggtaaagccacactgacctttttgaaccgggcagaggactatacgttaacaatgccctatgctcactgcaaaggcattctgtatggaactatgactctggagctcgggggaaaagttacaatcgaatgtgccaaaaataacttccaggcacagttagaattcaagctcaagcccttctttggtgggtcaactagcatcaaccaaattagcggcaagattaccagcggggaagaggtgctggcttctctgagtggtcactgggaccgcgacgtctttatcaaggaggagggatctggatcttccgcactgttctggacgccaagtggcgaggtgagaaggcagcgtctgcgacaacatacagtccctcttgaagaacagacagagctagagtctgaacggctctggcagcacgtcacacgcgcaatctcaaaaggggaccagcatcgtgccacacaagagaagtttgccctggaagaagcccagaggcagagagccagagaacgacaggagtctctgatgccgtggaaaccccagctttttcatttagatccaataactcaggagtggcattacaggtacgaagaccactccccctgggacccgctgaaagacatcgcccagttcgaacaagacgggatcctcaggaccctacaacaggaagcggttgcccgacaaacaaccttcttgggatccccgggacctaggcacgagagatccggcccagatcagaggctgcgtaaagcttcggatcagcctagtgggcactctcaggctaccgagtcctcagggagcaccccagagtcctgccccgaactgtccgacgaagagcaggacggtgattttgtcccagggggagagtccccatgcccaaggtgtagaaaagaagctcgacggctacaagccttacatgaagcaattctgagcatacgtgaagcccagcaggagctgcatcgtcacctcagtgcaatgctctcttccacagccagggctgctcaagcccctactcccggactgttacagtcacccaggagttggtttctgttgtgcgtgttcctggcctgtcaactgtttatcaatcacattcttaaatag

SEQ ID NO: 206419 - DNA, 2640 bp, Artificial Sequence
  derived and/or modified sequence
atgaaggaggaggccttcctgagaagaagattcagcctgtgcccccccagcagcaccccccagaaggtggaccccagaaagctgaccagaaacctgctgctgagcggcgacaacgagctgtaccccctgagccccggcaaggacatggagcccaacggccccagcctgcccagagacgagggcccccccacccccagcagcgccaccaaggtgccccccgccgagtacagactgtgcaacggcagcgacaaggagtgcgtgagccccaccgccagagtgaccaagaaggagaccctgaaggcccagaaggagaactacagacaggagaagaagagagccaccagacagctgctgagcgccctgaccgaccccagcgtggtgatcatggccgacagcctgaagatcagaggcaccctgaagagctggaccaagctgtggtgcgtgctgaagcccggcgtgctgctgatctacaagacccccaaggtgggccagtgggtgggcaccgtgctgctgcactgctgcgagctgatcgagagacccagcaagaaggacggcttctgcttcaagctgttccaccccctggaccagagcgtgtgggccgtgaagggccccaagggcgagagcgtgggcagcatcacccagcccctgcccagcagctacctgatcttcagagccgccagcgagagcgacggcagatgctggctggacgccctggagctggccctgagatgcagcagcctgctgagactgggcacctgcaagcccggcagagacggcgagcccggcaccagccccgacgccagccccagcagcctgtgcggcctgcccgccagcgccaccgtgcaccccgaccaggacctgttccccctgaacggcagcagcctggagaacgacgccttcagcgacaagagcgagagagagaaccccgaggagagcgacaccgagacccaggaccacagcagaaagaccgagagcggcagcgaccagagcgagacccccggcgcccccgtgagaagaggcaccacctacgtggagcaggtgcaggaggagctgggcgagctgggcgaggccagccaggtggagaccgtgagcgaggagaacaagagcctgatgtggaccctgctgaagcagctgagacccggcatggacctgagcagagtggtgctgcccaccttcgtgctggagcccagaagcttcctgaacaagctgagcgactactactaccacgccgacctgctgagcagagccgccgtggaggaggacgcctacagcagaatgaagctggtgctgagatggtacctgagcggcttctacaagaagcccaagggcatcaagaagccctacaaccccatcctgggcgagaccttcagatgctgctggttccacccccagaccgacagcagaaccttctacatcgccgagcaggtgagccaccacccccccgtgagcgccttccacgtgagcaacagaaaggacggcttctgcatcagcggcagcatcaccgccaagagcagattctacggcaacagcctgagcgccctgctggacggcaaggccaccctgaccttcctgaacagagccgaggactacaccctgaccatgccctacgcccactgcaagggcatcctgtacggcaccatgaccctggagctgggcggcaaggtgaccatcgagtgcgccaagaacaacttccaggcccagctggagttcaagctgaagcccttcttcggcggcagcaccagcatcaaccagatcagcggcaagatcaccagcggcgaggaggtgctggccagcctgagcggccactgggacagagacgtgttcatcaaggaggagggcagcggcagcagcgccctgttctggacccccagcggcgaggtgagaagacagagactgagacagcacaccgtgcccctggaggagcagaccgagctggagagcgagagactgtggcagcacgtgaccagagccatcagcaagggcgaccagcacagagccacccaggagaagttcgccctggaggaggcccagagacagagagccagagagagacaggagagcctgatgccctggaagccccagctgttccacctggaccccatcacccaggagtggcactacagatacgaggaccacagcccctgggaccccctgaaggacatcgcccagttcgagcaggacggcatcctgagaaccctgcagcaggaggccgtggccagacagaccaccttcctgggcagccccggccccagacacgagagaagcggccccgaccagagactgagaaaggccagcgaccagcccagcggccacagccaggccaccgagagcagcggcagcacccccgagagctgccccgagctgagcgacgaggagcaggacggcgacttcgtgcccggcggcgagagcccctgccccagatgcagaaaggaggccagaagactgcaggccctgcacgaggccatcctgagcatcagagaggcccagcaggagctgcacagacacctgagcgccatgctgagcagcaccgccagagccgcccaggcccccacccccggcctgctgcagagccccagaagctggttcctgctgtgcgtgttcctggcctgccagctgttcatcaaccacatcctgaagtag

SEQ ID NO: 206420 - DNA, 420 bp, Artificial Sequence
  derived and/or modified sequence
atgaaggaggaggccttcctgagaagaagattcagcctgtgcccccccagcagcaccccccagaaggtggaccccagaaagctgaccagaaacctgctgctgagcggcgacaacgagctgtaccccctgagccccggcaaggacatggagcccaacggccccagcctgcccagagacgagggcccccccacccccagcagcgccaccaaggtgccccccgccgagtacagactgtgcaacggcagcgacaaggagtgcgtgagccccaccgccagagtgaccaagaaggagaccctgaaggcccagaaggagaactacagacaggagaagaagagagccaccagacagctgctgagcgccctgaccgaccccagcgtggtgatcatggccgacagcctgaagatcagaggcaccctgtag

SEQ ID NO: 206421 - DNA, 1533 bp, Artificial Sequence
  derived and/or modified sequence
atgtgcgtgccccacagacagggccaccaggagggcgacagccagggcgccgagggcgagctgcccgccggcgaggagcccagaagcttcctgaacaagctgagcgactactactaccacgccgacctgctgagcagagccgccgtggaggaggacgcctacagcagaatgaagctggtgctgagatggtacctgagcggcttctacaagaagcccaagggcatcaagaagccctacaaccccatcctgggcgagaccttcagatgctgctggttccacccccagaccgacagcagaaccttctacatcgccgagcaggtgagccaccacccccccgtgagcgccttccacgtgagcaacagaaaggacggcttctgcatcagcggcagcatcaccgccaagagcagattctacggcaacagcctgagcgccctgctggacggcaaggccaccctgaccttcctgaacagagccgaggactacaccctgaccatgccctacgcccactgcaagggcatcctgtacggcaccatgaccctggagctgggcggcaaggtgaccatcgagtgcgccaagaacaacttccaggcccagctggagttcaagctgaagcccttcttcggcggcagcaccagcatcaaccagatcagcggcaagatcaccagcggcgaggaggtgctggccagcctgagcggccactgggacagagacgtgttcatcaaggaggagggcagcggcagcagcgccctgttctggacccccagcggcgaggtgagaagacagagactgagacagcacaccgtgcccctggaggagcagaccgagctggagagcgagagactgtggcagcacgtgaccagagccatcagcaagggcgaccagcacagagccacccaggagaagttcgccctggaggaggcccagagacagagagccagagagagacaggagagcctgatgccctggaagccccagctgttccacctggaccccatcacccaggagtggcactacagatacgaggaccacagcccctgggaccccctgaaggacatcgcccagttcgagcaggacggcatcctgagaaccctgcagcaggaggccgtggccagacagaccaccttcctgggcagccccggccccagacacgagagaagcggccccgaccagagactgagaaaggccagcgaccagcccagcggccacagccaggccaccgagagcagcggcagcacccccgagagctgccccgagctgagcgacgaggagcaggacggcgacttcgtgcccggcggcgagagcccctgccccagatgcagaaaggaggccagaagactgcaggccctgcacgaggccatcctgagcatcagagaggcccagcaggagctgcacagacacctgagcgccatgctgagcagcaccgccagagccgcccaggcccccacccccggcctgctgcagagccccagaagctggttcctgctgtgcgtgttcctggcctgccagctgttcatcaaccacatcctgaagtag

SEQ ID NO: 206422 - protein, 774 aa, Artificial Sequence
  derived and/or modified sequence
MEAEQRPAAGASEGATPGLEAVPPVAPPPATAASGPIPKSGPEPKRRHLGTLLQPTVNKFSLRVFGSHKAVEIEQERVKSAGAWIIHPYSDFRFYWDLIMLLLMVGNLIVLPVGITFFKEENSPPWIVFNVLSDTFFLLDLVLNFRTGIVVEEGAEILLAPRAIRTRYLRTWFLVDLISSIPVDYIFLVVELEPRLDAEVYKTARALRIVRFTKILSLLRLLRLSRLIRYIHQWEEIFHMTYDLASAVVRIFNLIGMMLLLCHWDGCLQFLVPMLQDFPPDCWVSINHMVNHSWGRQYSHALFKAMSHMLCIGYGQQAPVGMPDVWLTMLSMIVGATCYAMFIGHATALIQSLDSSRRQYQEKYKQVEQYMSFHKLPADTRQRIHEYYEHRYQGKMFDEESILGELSEPLREEIINFTCRGLVAHMPLFAHADPSFVTAVLTKLRFEVFQPGDLVVREGSVGRKMYFIQHGLLSVLARGARDTRLTDGSYFGEICLLTRGRRTASVRADTYCRLYSLSVDHFNAVLEEFPMMRRAFETVAMDRLLRIGKKNSILQRKRSEPSPGSSGGIMEQHLVQHDRDMARGVRGRAPSTGAQLSGKPVLWEPLVHAPLQAAAVTSNVAIALTHQRGPLPLSPDSPATLLARSAWRSAGSPASPLVPVRAGPWASTSRLPAPPARTLHASLSRAGRSQVSLLGPPPGGGGRRLGPRGRPLSASQPSLPQRATGDGSPGRKGSGSERLPPSGLLAKPPRTAQPPRPPVPEPATPRGLQLSANM

SEQ ID NO: 206423 - DNA, 2325 bp, Artificial Sequence
  derived and/or modified sequence
atggaagccgaacaacgcccggccgccggcgccagcgagggtgcgactcctggtctcgaggccgttccacctgttgcacctccaccagccacagccgctagcggccctatcccaaagtccggaccggaacccaagcgacgccatctggggaccctgttacaacctacagtgaataaattcagcctgcgggtctttggttcccataaggcagtcgagatagaacaagagcgagtcaaatcagcgggagcctggattatccacccctatagcgactttcgcttttattgggacctgatcatgctgctactaatggtgggcaatctgatcgtactgccagtgggaattaccttttttaaggaagagaattcccctccgtggattgtgttcaacgtgctgtccgataccttcttcctgctggacctggtgctgaactttcgcaccggtatcgtggtggaggaaggcgctgagatactgcttgctccccgcgccatccgaacccgctacctcagaacttggtttttggttgatttgataagcagcatcccggttgattacatcttccttgtggtggagctggagcctcgtttggatgcggaggtctataaaactgcacgcgccctgcggattgtaagatttaccaaaattctgagtctcttgagactgctgcggctatccagacttattagatacatccatcaatgggaggagatcttccatatgacctatgacttggccagtgccgtcgtgcgcatctttaaccttataggaatgatgctcttgctgtgtcactgggacgggtgcttgcagtttcttgtaccgatgctgcaagatttcccaccagattgctgggtgagtatcaatcacatggtcaaccactcctggggacggcagtatagccatgcgctgtttaaggccatgtcacatatgctatgtatcggatacggacagcaagcaccagtgggcatgcccgacgtatggctgactatgctgtctatgattgtcggagccacatgttacgcgatgttcatcggccatgccaccgccctcatccaaagcctggatagttcacggcgccagtaccaggaaaagtataagcaggttgagcagtatatgagcttccacaaactgcccgccgatacccggcagcggatccacgagtactacgaacatcgctaccaggggaagatgtttgacgaagagagtatcctgggagagctgagcgagcccctaagagaggaaattattaatttcacttgccggggcctggtcgctcacatgccattgtttgcccacgctgaccctagttttgtgacagccgttctgactaagctgagattcgaagtcttccagcctggcgatctggtggttcgcgaggggtccgttggacggaaaatgtattttattcaacatggcctgttgtcagttctcgcgcggggagcccgcgataccaggctcaccgatgggagttacttcggtgaaatctgtctgctgaccaggggtagacgtacagcttccgtgcgggcggacacctattgtcgcctgtactcgctttctgtcgatcacttcaacgcggtgctcgaagaattcccgatgatgcgacgggcctttgagaccgtagcgatggaccggcttcttcgcatcggcaagaagaatagcatactccagagaaaaagatcagagccttctcctggcagcagtgggggcattatggagcagcacctggtgcagcatgacagggatatggccaggggggttaggggaagggccccgagtaccggggctcagctgtctggtaagccagtcctgtgggaacccttggtgcatgccccactgcaggccgctgcagtgacctccaacgtcgccatagcgttaactcatcagcgaggccccctgccactttccccagattcgcctgcaaccctcctagcaagaagcgcttggcggagcgcaggatcacctgcatccccactagtgcctgtgcgtgccggcccatgggcttccacgagcagattacctgcccctcctgctaggacattacatgcctcactgagcagggcaggaagaagtcaagttagcctgctgggcccgcctcccggagggggcggcaggagactcgggcctcgcggccgccctttaagtgcctcccagccttccttaccccagcgagctactggggatggctctcccggtagaaagggttcaggcagcgagcggcttccgcctagcggactgctcgcaaaaccccctcgaaccgcccaacctcctaggccccctgtaccagaaccagccacccctcggggcctccaactcagcgccaatatgtag

SEQ ID NO: 206424 - DNA, 3718 bp, Artificial Sequence
  derived and/or modified sequence
tgggcgccatggaggcagagcagcggccggcggcgggggccagcgaaggggcgacccctggactggaggcggtgcctcccgttgctcccccgcctgcgaccgcggcctcaggtccgatccccaaatctgggcctgagcctaagaggaggcaccttgggacgctgctccagcctacggtcaacaagttctcccttcgggtgttcggcagccacaaagcagtggaaatcgagcaggagcgggtgaagtcagcgggggcctggatcatccacccctacagcgacttccggttttactgggacctgatcatgctgctgctgatggtggggaacctcatcgtcctgcctgtgggcatcaccttcttcaaggaggagaactccccgccttggatcgtcttcaacgtattgtctgatactttcttcctactggatctggtgctcaacttccgaacgggcatcgtggtggaggagggtgctgagatcctgctggcaccgcgggccatccgcacgcgctacctgcgcacctggttcctggttgacctcatctcttctatccctgtggattacatcttcctagtggtggagctggagccacggttggacgctgaggtctacaaaacggcacgggccctacgcatcgttcgcttcaccaagatcctaagcctgctgaggctgctccgcctctcccgcctcatccgctacatacaccagtgggaggagatctttcacatgacctatgacctggccagtgctgtggttcgcatcttcaacctcattgggatgatgctgctgctatgtcactgggatggctgtctgcagttcctggtgcccatgctgcaggacttccctcccgactgctgggtctccatcaaccacatggtgaaccactcgtggggccgccagtattcccatgccctgttcaaggccatgagccacatgctgtgcattggctatgggcagcaggcacctgtaggcatgcccgacgtctggctcaccatgctcagcatgatcgtaggtgccacatgctacgccatgttcatcggccatgccacggcactcatccagtccctggactcttcccggcgtcagtaccaggagaagtacaagcaggtggagcagtacatgtccttccacaagctgccagcagacacgcggcagcgcatccacgagtactatgagcaccgctaccagggcaagatgttcgatgaggaaagcatcctgggcgagctgagcgagccgcttcgcgaggagatcattaacttcacctgtcggggcctggtggcccacatgccgctgtttgcccatgccgaccccagcttcgtcactgcagttctcaccaagctgcgctttgaggtcttccagccgggggatctcgtggtgcgtgagggctccgtggggaggaagatgtacttcatccagcatgggctgctcagtgtgctggcccgcggcgcccgggacacacgcctcaccgatggatcctactttggggagatctgcctgctaactaggggccggcgcacagccagtgttcgggctgacacctactgccgcctttactcactcagcgtggaccatttcaatgctgtgcttgaggagttccccatgatgcgccgggcctttgagactgtggccatggatcggctgctccgcatcggcaagaagaattccatactgcagcggaagcgctccgagccaagtccaggcagcagtggtggcatcatggagcagcacttggtgcaacatgacagagacatggctcggggtgttcggggtcgggccccgagcacaggagctcagcttagtggaaagccagtactgtgggagccactggtacatgcgccccttcaggcagctgctgtgacctccaatgtggccattgccctgactcatcagcggggccctctgcccctctcccctgactctccagccaccctccttgctcgctctgcttggcgctcagcaggctctccagcttccccgctggtgcccgtccgagctggcccatgggcatccacctcccgcctgcccgccccacctgcccgaaccctgcacgccagcctatcccgggcagggcgctcccaggtctccctgctgggtccccctccaggaggaggtggacggcggctaggacctcggggccgcccactctcagcctcccaaccctctctgcctcagcgggcaacaggcgatggctctcctgggcgtaagggatcaggaagtgagcggctgcctccctcagggctcctggccaaacctccaaggacagcccagccccccaggccaccagtgcctgagccagccacaccccggggtctccagctttctgccaacatgtaaaacctttgagtacatccagccttagttcttggggtgcagtagtatgtacccaagggcagatgcctcttggggaaggccatggggacctgaaacattgccccatggaaatgtcgaccctgtgcggacattccgcatactgccatgaagacggtctctgtgtcctcagctcaagaatcctgtagcttgtcccatcataatccattcacccgttcatcatgtgtactgagcagctaccatgttcaaggtaatatgccaggcgctgtatgtctccactgccaagtagaagtgactcaaaaccctctgacaaggatattcccttggctatggtcctgccaggtgcaggcccaggcccatgaccccacctttactaagcacaagtacttgccactgccatcactgccaagtaactagatgtctctgtttccctgccaatgatcctgcaggttctgcccggtctggttatcttcctgttcctgtagcatagccaggcactgccagtcacctgtgcccccattgctgtcagcagatgtcttgggtcctgagtgtgggtatccacttttacccgctcactgccacctgtggacactctgtgtctaccctctgagtgggaacatacttctaagttccctgcagtctctgtcctgtggtagaccatctttttgtaaactgcgagcttcctcttccctgtaccctctgccccagtcgtgaccccctaaaagttaaggggtagttggcacctccttattaatatgccagcctagatcccccccggtggaggggcaaatggctgaatccttgtgtgatatttttttcttcgcttgtttatttattcatttatttaattgtatttattcatttactaactttatgtgttaccaattaattttgtttacccattcctttatccatccctcccctccttttcaggtaaggagacaggaggagtaggaggaggcagggcctctccatgccagcctctgtggtccttgcccaaacccatcagcgcaatacttgaaccttctcccaggtaggggcaggaggagccacatgagagagggagaaggaccgcgtttacctttagagttttgttttgttttttccttctgagtttgctgttggtgcaggaataagggaaaggcccaaggtatccaagcctggggaagggcaggccagccagcacctctgccttctcagggacaagagtagtcctttaccaccctcactctgcctgtcccctctcctactctacagcattaaagactgtgggaccaggaccctaagtctcctttccttctgggtggggagttctggggttcttggtgtgtgggagaagttttataattgcttccaaacagctgggtttaaatataaaatagacacactca

SEQ ID NO: 206425 - DNA, 2325 bp, Artificial Sequence
  derived and/or modified sequence
atggaggccgagcagaggcctgctgctggggccagcgagggcgccaccccaggcctggaggccgtgccccctgtggcccctcctccagccacagctgccagcggccccatccccaagagcggccctgagcccaagaggaggcacctgggcaccctgctgcagcccaccgtgaacaagttcagcctgcgggtgtttggcagccacaaggctgtggagattgagcaggagcgggtgaagtctgctggggcctggatcatccacccctacagcgacttccgcttctactgggacctgatcatgctgctgctgatggtgggcaacctgattgtgctgcctgtgggcatcaccttcttcaaggaggagaacagccccccctggatcgtgttcaacgtgctgagtgacaccttcttcctgctggacctggtgctgaacttcagaactggaattgtggtggaggagggcgctgagatcctgctggccccccgggccatccgcacccgctacctgcggacctggttcctggtggacctgatcagcagcatccctgtggactacatcttcctggtggtggagctggagccccggctggatgctgaggtgtacaagacagcccgggccctgagaattgtgcgcttcaccaagatcctgagcctgctgcggctgctgcggctgagccgcctcatccgctacatccaccagtgggaggagatcttccacatgacctatgacctggccagcgctgtggtgcgcatcttcaacctgattggcatgatgctgctgctgtgccactgggatggctgcctgcagttcctggtgcccatgctgcaggacttccccccagactgctgggtgtccatcaaccacatggtgaaccacagctggggccggcagtacagccacgccctcttcaaggccatgagccacatgctgtgcatcggctacggccagcaggcccctgtgggcatgccagatgtgtggctgaccatgctgtccatgattgtgggcgccacctgctacgccatgtttattggacatgccacagccctgatccagagcctggacagcagccggcggcagtaccaggagaagtacaagcaggtggagcagtacatgtccttccacaagctgcctgctgacacccggcagagaattcatgagtactatgagcaccgctaccagggcaagatgtttgatgaggagagcatcctgggggagctgtctgagcccctgcgggaggagatcatcaacttcacctgccggggcctggtggcccacatgcccctgtttgcccacgccgaccccagctttgtgacagctgtgctgaccaagctgcgctttgaggtgttccagcccggggacctggtggtgcgggagggctctgtgggcaggaagatgtacttcatccagcacggcctgctgtctgtgctggcccggggggcccgggacacccggctgacagatggcagctactttggagagatctgcctgctgacccggggcagaagaacagcctctgtgcgggctgacacctactgccgcctgtacagcctgtctgtggaccacttcaatgctgtgctggaggagttccccatgatgagaagagcctttgagaccgtggccatggaccggctgctgagaattggcaagaagaacagcatcctgcagaggaagaggtctgagcccagccctggcagcagcggcggcatcatggagcagcacctggtgcagcacgaccgggacatggcccggggcgtgcggggccgggcccccagcactggagcccagctgagcggcaagcctgtgctgtgggagcccctggtgcacgcccccctgcaggccgctgctgtgaccagcaatgtggccatcgccctgacccaccagaggggccccctgcccctgagcccagacagccctgccaccctgctggcccggagcgcctggaggtctgctggcagccctgccagccccctggtgcctgtgcgggccggcccctgggccagcaccagccggctgcctgcccccccagcccggaccctgcacgccagcctgagccgggccggccgcagccaggtgtccctgctgggccccccacctgggggcggcggccgccgcctgggcccccggggccggcccctgagcgccagccagcccagcctgccccagagggccactggagatggcagccctggcaggaagggcagcggcagcgagcggctgccccccagcggcctgctggccaagccacccaggacagcccagccccccaggcctcctgtgcctgagcccgccaccccccggggcctgcagctgagcgccaacatgtag

SEQ ID NO: 206426 - DNA, 2325 bp, Artificial Sequence
  derived and/or modified sequence
atggaggccgagcagcggcccgccgccggcgccagcgagggcgccactccgggactcgaggccgtaccaccagtcgccccaccccccgccacagcagcatccggccctattcccaagtcgggtccagagccgaagcggcgccatttaggtactttgctccagcccacagttaacaagttcagtctcagggtgttcgggtcacacaaagctgtggaaattgagcaggaaagggtgaagtcagccggagcgtggatcatccacccttactccgacttccggttctactgggacctgatcatgctattgcttatggtaggcaatttaatagtcctcccagtgggtatcactttctttaaagaagaaaacagcccgccatggatagtattcaacgtactcagtgataccttttttctgcttgacttagtcctgaactttaggaccggcattgtggtagaggagggggccgaaatcctgctggccccccgcgccatccggacacggtatcttagaacctggttcctagtcgacctgatttcatctatccccgtagattacatttttttggtcgtggagctagaacctcgtctcgacgcagaggtctataaaaccgcacgagcgttgcgaatcgtccggttcaccaaaatactttctctgctcagactactgcgcctgtcccgtctgatccggtatattcaccagtgggaggagatctttcatatgacatatgatcttgcctcagccgtggttcgcattttcaatctcattggtatgatgctacttttgtgccattgggacgggtgcctccagttcctagtgccaatgctgcaggattttcctcccgattgttgggtgtcaatcaatcacatggttaatcattcctggggccgccaatatagtcacgcccttttcaaggcgatgtcccacatgctgtgcatcggctatgggcaacaggcacccgtaggcatgccagacgtgtggctgacaatgctcagcatgattgtcggcgcgacatgttatgccatgttcattggtcatgcgactgctctgatccagagtcttgactcaagtcgtcgtcaataccaggagaaatacaagcaggtggagcagtacatgagttttcacaaactaccggccgataccaggcagcgcattcacgaatattacgaacaccgatatcagggaaagatgtttgacgaggagtctatcctcggggagcttagtgaacccctgcgggaagaaatcatcaactttacatgtcgcggactcgtggctcatatgccccttttcgctcacgctgatcctagttttgtcacagccgttttaaccaagctgcgatttgaagttttccaacccggggacctcgtggtacgagaggggtcagtgggccggaaaatgtactttatccagcatgggctgctgagtgttctggcacggggcgcgagggacactcgccttacagatggctcttattttggagaaatttgcttactgacaagggggcggcggaccgcttcggtccgggccgatacttactgtaggctttacagcttgtctgtcgaccactttaacgccgtccttgaggaatttccgatgatgcgccgcgcgttcgagaccgttgctatggaccgacttctcagaattggaaaaaaaaactcaattcttcagcgtaagagatccgagcccagcccgggttcatctggcggcatcatggaacaacacctggtgcagcatgatcgtgacatggctaggggggtcagagggcgagccccctctacaggtgcgcagctgagtggcaaacccgtgctatgggagcccctcgttcatgccccacttcaagcagccgccgttacctcaaatgttgccatcgctctcacccaccaaaggggccctctgcccctgtcacccgactcaccagctaccttactcgcccgatcagcctggaggtccgctgggtcccctgccagccctctggtgcctgtccgagccggaccgtgggccagtaccagccgattgccagctccaccggctagaactctgcacgcatcactctcaagagccggcaggagtcaagtgtccctgctgggtccccccccaggtgggggcggccggaggctcggaccacggggcaggcctttgtctgctagtcagccatcactgccacaaagagcaacaggcgacggctcccctgggcgtaaaggctccggttcagagcggctgccaccatccgggctgctggccaaaccacctcgcacagcccaacccccccgcccgccggttcctgagccagcaactccaagaggcctacagctgtcagctaatatgtag

SEQ ID NO: 206427 - DNA, 2325 bp, Artificial Sequence
  derived and/or modified sequence
atggaagcagagcaacggccagcagctggagcttcggagggagccaccccgggtttggaggccgttcctccagtcgccccaccacccgctactgccgcatcgggccctattccaaaatctgggccagaacccaaacgcagacacttggggactctgctacagcctactgttaataagttttcgctgcgggtgttcggcagccataaggcggtggagattgagcaggagcgcgtaaagtctgctggggcttggatcatccacccgtattccgattttcgtttctactgggatctgatcatgctgctcctgatggtcggaaatcttattgttttgcccgtcgggataacctttttcaaagaagaaaactcccccccttggatcgtcttcaatgtacttagcgataccttctttctcctcgaccttgtgttaaatttccgcactggaatcgtagtggaggagggcgcagagattctcctggccccacgagccattagaaccagatacttgaggacttggtttctcgtggacctcatttcatctatccccgtagactatattttcctcgtggtcgagctggaacctcggctggatgcggaggtttataaaaccgccagggccctgcgcatcgtacggttcactaagatcttgtctctgctgaggctgctaagactctcaagactcattcggtacatccatcaatgggaggagatatttcatatgacatacgatctcgcttcagcagtggtcaggatcttcaatctgatcgggatgatgcttttattgtgccactgggatggctgcttgcagttcctggtacctatgttgcaagatttcccgcctgactgttgggtgagcatcaatcatatggtcaatcactcttgggggagacagtacagtcatgctctatttaaagccatgtcgcacatgctttgcattgggtacggacagcaggccccagtgggtatgccagatgtctggcttaccatgctgtctatgattgtgggcgcaacatgctacgccatgtttattggacatgcaactgccttgattcagtcactcgacagttctaggcggcagtaccaggaaaagtacaagcaagttgagcagtacatgtctttccacaaattaccagcagacactaggcagaggatacacgaatactacgaacaccgataccaaggaaagatgttcgatgaagaatcaattttaggagagctctcggaaccgctacgagaggaaatcattaatttcacctgccgcggtctggtggcccatatgcctctattcgcgcacgctgatcctagctttgtgaccgcagtgctgacaaaactccggttcgaggtgtttcagcctggcgatttggtggtgcgggaagggagtgttggcaggaaaatgtactttattcagcacggcctgcttagcgtccttgccagaggcgcacgggacacccggttgaccgacggatcttacttcggagagatctgtctgctcactcggggacggaggacagcatccgtcagggctgacacttactgtagattgtatagtctgagtgtggaccatttcaacgcagtgctggaggaattccccatgatgcggagagcctttgagacggtggctatggacagactgctgcgcataggtaaaaagaactctatcctgcagagaaagcgatctgaacctagcccagggtcctcagggggaattatggaacagcatctggtgcagcacgatcgcgacatggctaggggcgtcaggggacgggctcctagcaccggcgctcaactgagcggcaaaccagtgctctgggagcctttggttcatgcaccgttgcaggctgctgccgtcactagcaacgtagcaattgccctaactcatcagcggggtcccctcccgctttcaccagacagcccagctacactcttagccaggagcgcctggagaagcgcaggttctccagcctctccactggtccccgtgcgagccggaccatgggcaagcaccagtcgtcttccagcccctcctgcgcgaacccttcacgcatccctgagtagagctgggcgatcccaagtgtccttgctgggcccacctcccggtgggggaggacggaggctaggccctcgcggacgtcccctttccgcctcccaaccatctctgccgcagcgagccacaggcgacgggtcgccgggacgtaaagggtcagggtccgagagactgcctccaagtgggctgcttgccaagccacctaggacagcccagccccctagacctcctgttccggaacctgctactccccgaggtctgcaactgagtgctaatatgtag

SEQ ID NO: 206428 - DNA, 2325 bp, Artificial Sequence
  derived and/or modified sequence
atggaggccgagcagagacccgccgccggcgccagcgagggcgccacccccggcctggaggccgtgccccccgtggcccccccccccgccaccgccgccagcggccccatccccaagagcggccccgagcccaagagaagacacctgggcaccctgctgcagcccaccgtgaacaagttcagcctgagagtgttcggcagccacaaggccgtggagatcgagcaggagagagtgaagagcgccggcgcctggatcatccacccctacagcgacttcagattctactgggacctgatcatgctgctgctgatggtgggcaacctgatcgtgctgcccgtgggcatcaccttcttcaaggaggagaacagccccccctggatcgtgttcaacgtgctgagcgacaccttcttcctgctggacctggtgctgaacttcagaaccggcatcgtggtggaggagggcgccgagatcctgctggcccccagagccatcagaaccagatacctgagaacctggttcctggtggacctgatcagcagcatccccgtggactacatcttcctggtggtggagctggagcccagactggacgccgaggtgtacaagaccgccagagccctgagaatcgtgagattcaccaagatcctgagcctgctgagactgctgagactgagcagactgatcagatacatccaccagtgggaggagatcttccacatgacctacgacctggccagcgccgtggtgagaatcttcaacctgatcggcatgatgctgctgctgtgccactgggacggctgcctgcagttcctggtgcccatgctgcaggacttcccccccgactgctgggtgagcatcaaccacatggtgaaccacagctggggcagacagtacagccacgccctgttcaaggccatgagccacatgctgtgcatcggctacggccagcaggcccccgtgggcatgcccgacgtgtggctgaccatgctgagcatgatcgtgggcgccacctgctacgccatgttcatcggccacgccaccgccctgatccagagcctggacagcagcagaagacagtaccaggagaagtacaagcaggtggagcagtacatgagcttccacaagctgcccgccgacaccagacagagaatccacgagtactacgagcacagataccagggcaagatgttcgacgaggagagcatcctgggcgagctgagcgagcccctgagagaggagatcatcaacttcacctgcagaggcctggtggcccacatgcccctgttcgcccacgccgaccccagcttcgtgaccgccgtgctgaccaagctgagattcgaggtgttccagcccggcgacctggtggtgagagagggcagcgtgggcagaaagatgtacttcatccagcacggcctgctgagcgtgctggccagaggcgccagagacaccagactgaccgacggcagctacttcggcgagatctgcctgctgaccagaggcagaagaaccgccagcgtgagagccgacacctactgcagactgtacagcctgagcgtggaccacttcaacgccgtgctggaggagttccccatgatgagaagagccttcgagaccgtggccatggacagactgctgagaatcggcaagaagaacagcatcctgcagagaaagagaagcgagcccagccccggcagcagcggcggcatcatggagcagcacctggtgcagcacgacagagacatggccagaggcgtgagaggcagagcccccagcaccggcgcccagctgagcggcaagcccgtgctgtgggagcccctggtgcacgcccccctgcaggccgccgccgtgaccagcaacgtggccatcgccctgacccaccagagaggccccctgcccctgagccccgacagccccgccaccctgctggccagaagcgcctggagaagcgccggcagccccgccagccccctggtgcccgtgagagccggcccctgggccagcaccagcagactgcccgccccccccgccagaaccctgcacgccagcctgagcagagccggcagaagccaggtgagcctgctgggccccccccccggcggcggcggcagaagactgggccccagaggcagacccctgagcgccagccagcccagcctgccccagagagccaccggcgacggcagccccggcagaaagggcagcggcagcgagagactgccccccagcggcctgctggccaagccccccagaaccgcccagccccccagaccccccgtgcccgagcccgccacccccagaggcctgcagctgagcgccaacatgtag

SEQ ID NO: 206429 - protein, 690 aa, Artificial Sequence
  derived and/or modified sequence
MEESPLSRAPSRGGVNFLNVARTYIPNTKVECHYTLPPGTMPSASDWIGIFKVEAACVRDYHTFVWSSVPESTTDGSPIHTSVQFQASYLPKPGAQLYQFRYVNRQGQVCGQSPPFQFREPRPMDELVTLEEADGGSDILLVVPKATVLQNQLDESQQERNDLMQLKLQLEGQVTELRSRVQELERALATARQEHTELMEQYKGISRSHGEITEERDILSRQQGDHVARILELEDDIQTISEKVLTKEVELDRLRDTVKALTREQEKLLGQLKEVQADKEQSEAELQVAQQENHHLNLDLKEAKSWQEEQSAQAQRLKDKVAQMKDTLGQAQQRVAELEPLKEQLRGAQELAASSQQKATLLGEELASAAAARDRTIAELHRSRLEVAEVNGRLAELGLHLKEEKCQWSKERAGLLQSVEAEKDKILKLSAEILRLEKAVQEERTQNQVFKTELAREKDSSLVQLSESKRELTELRSALRVLQKEKEQLQEEKQELLEYMRKLEARLEKVADEKWNEDATTEDEEAAVGLSCPAALTDSEDESPEDMRLPPYGLCERGDPGSSPAGPREASPLVVISQPAPISPHLSGPAEDSSSDSAEDEKSVLMAAVQSGGEEANLLLPELGSAFYDMASGFTVGTLSETSTGGPATPTWKECPICKERFPAESDKDALEDHMDGHFFFSTQDPFTFE

SEQ ID NO: 206430 - protein, 629 aa, Artificial Sequence
  derived and/or modified sequence
MEESPLSRAPSRGGVNFLNVARTYIPNTKVECHYTLPPGTMPSASDWIGIFKVEAACVRDYHTFVWSSVPESTTDGSPIHTSVQFQACNQLDESQQERNDLMQLKLQLEGQVTELRSRVQELERALATARQEHTELMEQYKGISRSHGEITEERDILSRQQGDHVARILELEDDIQTISEKVLTKEVELDRLRDTVKALTREQEKLLGQLKEVQADKEQSEAELQVAQQENHHLNLDLKEAKSWQEEQSAQAQRLKDKVAQMKDTLGQAQQRVAELEPLKEQLRGAQELAASSQQKATLLGEELASAAAARDRTIAELHRSRLEVAEVNGRLAELGLHLKEEKCQWSKERAGLLQSVEAEKDKILKLSAEILRLEKAVQEERTQNQVFKTELAREKDSSLVQLSESKRELTELRSALRVLQKEKEQLQEEKQELLEYMRKLEARLEKVADEKWNEDATTEDEEAAVGLSCPAALTDSEDESPEDMRLPPYGLCERGDPGSSPAGPREASPLVVISQPAPISPHLSGPAEDSSSDSEAEDEKSVLMAAVQSGGEEANLLLPELGSAFYDMASGFTVGTLSETSTGGPATPTWKECPICKERFPAESDKDALEDHMDGHFFFSTQDPFTFE

SEQ ID NO: 206431 - protein, 633 aa, Artificial Sequence
  derived and/or modified sequence
MEESPLSRAPSRGGVNFLNVARTYIPNTKVECHYTLPPGTMPSASDWIGIFKVEAACVRDYHTFVWSSVPESTTDGSPIHTSVQFQASYLPKPGAQLYQFRYVNRQGQVCGQSPPFQFREPRPMDELVTLEEADGGSDILLVVPKATVLQNQLDESQQERNDLMQLKLQLEGQVTELRSRVQELERALATARQEHTELMEQYKGISRSHGEITEERDILSRQQGDHVARILELEDDIQTISEKVLTKEVELDRLRDTVKALTREQEKLLGQLKEVQADKEQSEAELQVAQQENHHLNLDLKEAKSWQEEQSAQAQRLKDKVAQMKDTLGQAQQRVAELEPLKEQLRGAQELAASSQQKATLLGEELASAAAARDRTIAELHRSRLEVAEVNGRLAELGLHLKEEKCQWSKERAGLLQSVEAEKDKILKLSAEILRLEKAVQEERTQNQVFKTELAREKDSSLVQLSESKRELTELRSALRVLQKEKEQLQEEKQELLEYMRKLEARLEKVADEKWNEDATTEDEEAAVGLSCPAALTDSEDESPEDMRLPPYGLCERGDPGSSPAGPREASPLVVISQPAPISPHLSGPAEDSSSDSEAEDEKSVLMAAVQSGGEEANLLLPELGSAFYDMAR

SEQ ID NO: 206432 - protein, 691 aa, Artificial Sequence
  derived and/or modified sequence
MEESPLSRAPSRGGVNFLNVARTYIPNTKVECHYTLPPGTMPSASDWIGIFKVEAACVRDYHTFVWSSVPESTTDGSPIHTSVQFQASYLPKPGAQLYQFRYVNRQGQVCGQSPPFQFREPRPMDELVTLEEADGGSDILLVVPKATVLQNQLDESQQERNDLMQLKLQLEGQVTELRSRVQELERALATARQEHTELMEQYKGISRSHGEITEERDILSRQQGDHVARILELEDDIQTISEKVLTKEVELDRLRDTVKALTREQEKLLGQLKEVQADKEQSEAELQVAQQENHHLNLDLKEAKSWQEEQSAQAQRLKDKVAQMKDTLGQAQQRVAELEPLKEQLRGAQELAASSQQKATLLGEELASAAAARDRTIAELHRSRLEVAEVNGRLAELGLHLKEEKCQWSKERAGLLQSVEAEKDKILKLSAEILRLEKAVQEERTQNQVFKTELAREKDSSLVQLSESKRELTELRSALRVLQKEKEQLQEEKQELLEYMRKLEARLEKVADEKWNEDATTEDEEAAVGLSCPAALTDSEDESPEDMRLPPYGLCERGDPGSSPAGPREASPLVVISQPAPISPHLSGPAEDSSSDSEAEDEKSVLMAAVQSGGEEANLLLPELGSAFYDMASGFTVGTLSETSTGGPATPTWKECPICKERFPAESDKDALEDHMDGHFFFSTQDPFTFE

SEQ ID NO: 206433 - DNA, 1890 bp, Artificial Sequence
  derived and/or modified sequence
atggaggagagccccctgagcagagcccccagcagaggcggcgtgaacttcctgaacgtggccagaacctacatccccaacaccaaggtggagtgccactacaccctgccccccggcaccatgcccagcgccagcgactggatcggcatcttcaaggtggaggccgcctgcgtgagagactaccacaccttcgtgtggagcagcgtgcccgagagcaccaccgacggcagccccatccacaccagcgtgcagttccaggcctgcaaccagctggacgagagccagcaggagagaaacgacctgatgcagctgaagctgcagctggagggccaggtgaccgagctgagaagcagagtgcaggagctggagagagccctggccaccgccagacaggagcacaccgagctgatggagcagtacaagggcatcagcagaagccacggcgagatcaccgaggagagagacatcctgagcagacagcagggcgaccacgtggccagaatcctggagctggaggacgacatccagaccatcagcgagaaggtgctgaccaaggaggtggagctggacagactgagagacaccgtgaaggccctgaccagagagcaggagaagctgctgggccagctgaaggaggtgcaggccgacaaggagcagagcgaggccgagctgcaggtggcccagcaggagaaccaccacctgaacctggacctgaaggaggccaagagctggcaggaggagcagagcgcccaggcccagagactgaaggacaaggtggcccagatgaaggacaccctgggccaggcccagcagagagtggccgagctggagcccctgaaggagcagctgagaggcgcccaggagctggccgccagcagccagcagaaggccaccctgctgggcgaggagctggccagcgccgccgccgccagagacagaaccatcgccgagctgcacagaagcagactggaggtggccgaggtgaacggcagactggccgagctgggcctgcacctgaaggaggagaagtgccagtggagcaaggagagagccggcctgctgcagagcgtggaggccgagaaggacaagatcctgaagctgagcgccgagatcctgagactggagaaggccgtgcaggaggagagaacccagaaccaggtgttcaagaccgagctggccagagagaaggacagcagcctggtgcagctgagcgagagcaagagagagctgaccgagctgagaagcgccctgagagtgctgcagaaggagaaggagcagctgcaggaggagaagcaggagctgctggagtacatgagaaagctggaggccagactggagaaggtggccgacgagaagtggaacgaggacgccaccaccgaggacgaggaggccgccgtgggcctgagctgccccgccgccctgaccgacagcgaggacgagagccccgaggacatgagactgcccccctacggcctgtgcgagagaggcgaccccggcagcagccccgccggccccagagaggccagccccctggtggtgatcagccagcccgcccccatcagcccccacctgagcggccccgccgaggacagcagcagcgacagcgaggccgaggacgagaagagcgtgctgatggccgccgtgcagagcggcggcgaggaggccaacctgctgctgcccgagctgggcagcgccttctacgacatggccagcggcttcaccgtgggcaccctgagcgagaccagcaccggcggccccgccacccccacctggaaggagtgccccatctgcaaggagagattccccgccgagagcgacaaggacgccctggaggaccacatggacggccacttcttcttcagcacccaggaccccttcaccttcgagtag

SEQ ID NO: 206434 - DNA, 657 bp, Artificial Sequence
  derived and/or modified sequence
atggacgagctggtgaccctggaggaggccgacggcggcagcgacatcctgctggtggtgcccaaggccaccgtgctgcagaaccagctggacgagagccagcaggagagaaacgacctgatgcagctgaagctgcagctggagggccaggtgaccgagctgagaagcagagtgcaggagctggagagagccctggccaccgccagacaggagcacaccgagctgatggagcagtacaagggcatcagcagaagccacggcgagatcaccgaggagagagacatcctgagcagacagcagggcgaccacgtggccagaatcctggagctggaggacgacatccagaccatcagcgagaaggtgctgaccaaggaggtggagctggacagactgagagacaccgtgaaggccctgaccagagagcaggagaagctgctgggccagctgaaggaggtgcaggccgacaaggagcagagcgaggccgagctgcaggtggcccagcaggagaaccaccacctgaacctggacctgaaggaggccaagagctggcaggaggagcagagcgcccaggcccagagactgaaggacaaggtggcccagatgaaggacaccctgggccaggcccagcagagagtgagacccagctggagcccctag

SEQ ID NO: 206435 - DNA, 2076 bp, Artificial Sequence
  derived and/or modified sequence
atggaggagagccccctgagcagagcccccagcagaggcggcgtgaacttcctgaacgtggccagaacctacatccccaacaccaaggtggagtgccactacaccctgccccccggcaccatgcccagcgccagcgactggatcggcatcttcaaggtggaggccgcctgcgtgagagactaccacaccttcgtgtggagcagcgtgcccgagagcaccaccgacggcagccccatccacaccagcgtgcagttccaggccagctacctgcccaagcccggcgcccagctgtaccagttcagatacgtgaacagacagggccaggtgtgcggccagagcccccccttccagttcagagagcccagacccatggacgagctggtgaccctggaggaggccgacggcggcagcgacatcctgctggtggtgcccaaggccaccgtgctgcagaaccagctggacgagagccagcaggagagaaacgacctgatgcagctgaagctgcagctggagggccaggtgaccgagctgagaagcagagtgcaggagctggagagagccctggccaccgccagacaggagcacaccgagctgatggagcagtacaagggcatcagcagaagccacggcgagatcaccgaggagagagacatcctgagcagacagcagggcgaccacgtggccagaatcctggagctggaggacgacatccagaccatcagcgagaaggtgctgaccaaggaggtggagctggacagactgagagacaccgtgaaggccctgaccagagagcaggagaagctgctgggccagctgaaggaggtgcaggccgacaaggagcagagcgaggccgagctgcaggtggcccagcaggagaaccaccacctgaacctggacctgaaggaggccaagagctggcaggaggagcagagcgcccaggcccagagactgaaggacaaggtggcccagatgaaggacaccctgggccaggcccagcagagagtggccgagctggagcccctgaaggagcagctgagaggcgcccaggagctggccgccagcagccagcagaaggccaccctgctgggcgaggagctggccagcgccgccgccgccagagacagaaccatcgccgagctgcacagaagcagactggaggtggccgaggtgaacggcagactggccgagctgggcctgcacctgaaggaggagaagtgccagtggagcaaggagagagccggcctgctgcagagcgtggaggccgagaaggacaagatcctgaagctgagcgccgagatcctgagactggagaaggccgtgcaggaggagagaacccagaaccaggtgttcaagaccgagctggccagagagaaggacagcagcctggtgcagctgagcgagagcaagagagagctgaccgagctgagaagcgccctgagagtgctgcagaaggagaaggagcagctgcaggaggagaagcaggagctgctggagtacatgagaaagctggaggccagactggagaaggtggccgacgagaagtggaacgaggacgccaccaccgaggacgaggaggccgccgtgggcctgagctgccccgccgccctgaccgacagcgaggacgagagccccgaggacatgagactgcccccctacggcctgtgcgagagaggcgaccccggcagcagccccgccggccccagagaggccagccccctggtggtgatcagccagcccgcccccatcagcccccacctgagcggccccgccgaggacagcagcagcgacagcgaggccgaggacgagaagagcgtgctgatggccgccgtgcagagcggcggcgaggaggccaacctgctgctgcccgagctgggcagcgccttctacgacatggccagcggcttcaccgtgggcaccctgagcgagaccagcaccggcggccccgccacccccacctggaaggagtgccccatctgcaaggagagattccccgccgagagcgacaaggacgccctggaggaccacatggacggccacttcttcttcagcacccaggaccccttcaccttcgagtag

SEQ ID NO: 206436 - DNA, 2073 bp, Artificial Sequence
  derived and/or modified sequence
atggaggagagccctctgtcacgagctcccagccgcggcggtgtgaattttctgaacgtcgctcggacctatattcccaatacaaaggtggaatgtcactacactcttccaccaggcaccatgccatccgcttcagactggatcggcatttttaaagttgaggcagcgtgtgtccgggactatcacaccttcgtgtggtcttcagtgcctgagagtacaactgatggaagccctattcatacaagcgtgcagttccaggccagctacctccccaagcctggcgcccaactgtatcagttcagatatgttaacaggcagggccaagtgtgtggacagtccccacctttccaattcagggagccacgacccatggacgaacttgttactttagaagaagcggacggtgggtccgacattcttttagtggtgccaaaggctaccgtgctgcagaaccagctcgatgaatcccagcaagagcggaacgacctgatgcagctgaaactgcagttagagggtcaagtgacagaactgaggtcaagggtgcaggagttagagcgcgcgcttgctaccgcaagacaagagcacaccgaactgatggagcagtacaaaggaatttcccggagccacggagagattaccgaagagcgagatatactctcacgccagcagggagaccatgtcgcaagaatcctcgaacttgaggacgacatccaaaccatttcggaaaaggtcctcactaaggaggtggagctagacaggcttcgcgacaccgttaaggccttaactagagagcaggaaaagctgcttggacagctgaaggaggtgcaagcagataaagaacaaagcgaagcagaactccaggtcgcacagcaggagaatcatcatttaaatctagacctaaaggaagcgaaaagctggcaggaagaacagagcgcgcaagctcagcgcttaaaggataaagtcgcgcagatgaaggacactcttggacaagcgcagcagagagtcgctgagctagagcccctcaaagagcagctgagaggcgcgcaagagcttgcagccagttcacagcagaaggcaacgctgctcggtgaagaactggcctctgccgctgccgctcgcgaccgtaccatcgccgagctgcatcggtcccgcctggaggtggccgaagtgaacgggcgattggcagaacttggcttgcatctgaaggaggagaagtgtcaatggagcaaggaacgagccgggctgctccagtcagtggaggccgaaaaagataagattctcaaactctcagcagagatcctgagattagagaaagccgtgcaggaggaacggactcagaatcaagtattcaagacagagctggcaagggaaaaggatagtagtctggtgcagctgtcagaaagcaagagagagttgacagaactccgatctgccctcagggttctgcaaaaagagaaggaacaattacaggaagaaaagcaagaactgctcgaatacatgcggaagctggaggccaggttggaaaaggtggccgatgaaaagtggaacgaggatgcgacaaccgaggatgaagaggccgcggttggcctgagctgtcctgctgcactcactgactcagaggatgagtcacccgaagacatgagattaccaccctatggactgtgtgagcgcggggacccaggcagtagtcctgcggggccccgggaggcctctccactggtggtgattagccagccagctcccatttctccacacctgtcgggacccgccgaagactcgagcagcgactcagccgaggatgagaagtccgtgctgatggctgcagttcagtctggaggggaagaagctaatctgctgctgcccgaactgggttcagctttctacgatatggctagcggcttcacagtggggaccctttctgaaacaagcacaggtggcccggctacccccacttggaaggagtgccctatttgcaaggaaagattccccgccgaaagcgataaggatgccctggaagaccatatggatgggcatttcttctttagtacgcaagatccattcacgttcgagtag

SEQ ID NO: 206437 - DNA, 1890 bp, Artificial Sequence
  derived and/or modified sequence
atggaagagtcgcctctttcccgcgccccttcccgcggcggcgtgaattttctcaatgtagcgcgcacatatattcctaatactaaggtcgagtgtcattatactcttccaccagggaccatgccctcagccagtgattggataggaatctttaaggtcgaagccgcttgcgtacgggattaccacacttttgtttggagctcagtgccagaatcaacgactgatggctcccccatccacacctcagtgcaattccaggcatgcaaccagctcgatgaaagccaacaggagcgaaatgatctgatgcagctgaaactccaacttgaaggtcaagtgacagaactgcgctccagagttcaggagctggagagagcgctggcgactgccaggcaagagcacactgaactcatggagcagtacaagggtatctccagaagtcatggtgaaattaccgaggagcgcgacattctaagcaggcagcagggggaccacgtagcgagaatcctcgaactggaggatgatatacaaacaattagcgagaaggtattgactaaggaagttgagctcgaccgcttgagagatacagtaaaggccctgactagagagcaggaaaaactgctaggccaactcaaagaggtgcaagctgataaggaacagtctgaggctgaacttcaggtggcacagcaagaaaaccaccatctgaatttggatctgaaagaggctaagtcttggcaggaagagcagagcgcccaggcccaaagactgaaagataaagtggcccagatgaaggatacacttgggcaggcccagcagagagtggctgaattggagcctctcaaggagcagcttcggggagcccaggagcttgctgccagcagtcagcagaaagcaacactgttaggcgaggagcttgccagcgcagcagctgcgagggataggaccattgcagaactgcacaggtcacgactggaggtcgctgaggttaacgggaggttggctgagcttgggctgcatctcaaggaggaaaagtgccagtggagtaaggagcgggccgggttgttgcaatccgtcgaagccgaaaaagacaagatcctcaaactatccgccgagatcctgagactggagaaggcagtccaggaagaaagaactcagaaccaggtattcaaaactgaattggcacgcgaaaaggacagttcactggtgcagctctccgagagtaaaagggaactgacagagttgagatccgccctgagggtgctgcagaaagagaaagagcagctccaagaggaaaaacaggagctgctagagtatatgcggaaactggaggcaaggctcgaaaaggtggccgatgaaaaatggaacgaggacgctaccacggaggacgaggaggcagcagtggggctgtcatgccctgcagcattgactgattcagaagatgaatcccctgaggacatgagattgcctccctacggcctgtgtgaaagaggagatcctggatccagtccagctggtcccagagaagcctcccctctggtggtcatctcgcagcccgcacctattagccctcacctcagcggccccgctgaagatagtagctcggattctgaggctgaggacgaaaagagtgtgctcatggccgctgtccagtctgggggggaggaagcaaaccttttgctcccggaactaggatccgcattctatgacatggccagcggcttcactgtcggcacgctctctgagaccagtaccggcggacctgcgactcctacatggaaggagtgccctatatgcaaggagcggttcccagcagagagcgataaggacgccttggaagaccatatggatggccactttttcttctcgacccaagatccttttacgttcgaatag

SEQ ID NO: 206438 - DNA, 657 bp, Artificial Sequence
  derived and/or modified sequence
atggacgaactcgtgactcttgaagaagctgatggaggaagcgacatcctgcttgtggtccctaaggctactgtgttgcagaaccaactggacgaaagtcagcaggaacgtaatgacctgatgcagcttaaactccaactggaggggcaggtgactgaactccgctcccgcgtccaggagctcgagcgggccttggccactgcccgccaagagcataccgaactcatggagcagtataaaggtatctctagaagccacggggagatcactgaggaacgggacatcctaagccggcagcaaggagatcacgttgcccggatactcgaactcgaggatgacattcagaccatctcagaaaaggtcctcaccaaggaagttgaattggacagactccgtgacacagtgaaagcccttactagggagcaggaaaaattgctggggcagctaaaggaagtccaggccgacaaggagcaatcggaagccgaacttcaggtcgctcaacaagagaaccatcacctcaatttggatctcaaggaggccaagtcttggcaggaggagcagtcagcgcaagcccagcggttaaaggacaaggttgcacagatgaaggataccctgggccaggctcagcagcgggtgaggccgagctggtctccttag

SEQ ID NO: 206439 - DNA, 2076 bp, Artificial Sequence
  derived and/or modified sequence
atggaggaatctccactgtcaagggctccatcccgaggcggagtgaactttctcaacgtggccaggacttatattccaaacacgaaggtggagtgccactatacgctacccccgggcacaatgccatctgcctccgactggatcggcattttcaaagtggaagctgcttgcgtgcgtgactatcacacctttgtctggtctagtgttcctgagtccactactgacggctcaccgattcatacttccgtccagttccaggcaagctatctgccgaagccgggggcccagttgtaccaatttcggtacgtaaacaggcaaggacaggtatgcgggcagagcccgccgttccagttcagggaacccagacctatggacgaactagttactctggaggaggctgacggcgggagtgacatacttctggttgtgcctaaagcaactgtcctgcagaaccagcttgatgagagtcagcaagaacggaacgacctgatgcagctgaagctgcagctagagggacaagtgaccgagctgcggtctagagtgcaggagctcgagcgagccctggcaacggcaaggcaggaacatacagaattgatggaacagtacaagggtatttcgcggtctcatggagagatcacggaagagcgtgatatcctgtctagacagcaaggagatcatgtcgcgcgaatcctcgagctggaagatgatatccagaccatctctgagaaggtgctgacgaaggaagttgaattagatcggcttcgagacaccgtgaaagcgctgactcgggaacaggagaaactgctcgggcagttgaaggaagttcaagctgacaaagagcaatctgaagcggagctccaggtggcccaacaggagaaccaccatcttaatcttgatctgaaggaagccaagtcatggcaggaagaacagagcgcccaggctcaaaggctgaaggacaaagtggcacagatgaaagacacactggggcaggcgcagcaacgggttgctgagcttgagccgttaaaagaacagcttcggggagcacaggagctggcagcctcttcccagcaaaaagcaacactgctgggcgaagagctggcatctgccgctgctgcacgcgatcgcacgatcgctgaattacataggtctcgactcgaggtcgccgaggtgaatgggagactggcggaactgggtctgcaccttaaggaagagaagtgtcaatggtccaaggagagggccggcttgctgcaatccgttgaagccgagaaggacaaaatactgaaacttagcgcagaaatcctgcggctggagaaggccgtgcaagaagagaggacacagaatcaggtatttaagacggagttagcgagggagaaagactcctcactggtccagctctcagagtcaaagagggaactgacagaactgcggtctgctctgagagtgctccaaaaagagaaagagcagctccaggaggaaaagcaggaactcttggagtatatgcggaaactggaggctcgcctcgagaaagtcgccgacgaaaaatggaatgaggatgctacaaccgaagatgaagaagccgcagtcgggctgtcctgccccgcagccctgacagactccgaggacgaatcacctgaagacatgcgactgcctccttatggcttgtgcgagcggggtgacccaggttcgagtcctgccggaccccgcgaggcctccccactcgttgtgatctcccagccagcgcccatctcaccgcacctatctggacccgccgaggattcttctagcgacagcgaagcagaagacgaaaaaagcgtgctgatggcagccgtacagagcggcggggaggaagctaacctccttctgccagagctcggctccgctttctacgacatggcctccggctttacagtgggcacattgtccgaaacatccaccggcggcccagctacccccacctggaaagagtgtcctatttgcaaagaacgattcccagcagaaagcgacaaggacgccttagaggaccatatggacgggcatttttttttttctacccaagacccgtttaccttcgaatag

SEQ ID NO: 206440 - DNA, 2073 bp, Artificial Sequence
  derived and/or modified sequence
atggaggagagccccctgagccgggcccccagcagaggaggagtgaacttcctgaatgtggcccggacctacatccccaacaccaaggtggagtgccactacaccctgcccccaggcaccatgcccagcgccagtgactggattggcatcttcaaggtggaggccgcctgtgtgcgggactaccacacctttgtgtggagctctgtgcctgagagcaccacagatggcagccccatccacacctctgtgcagttccaggccagctacctgcccaagccaggggcccagctgtaccagttccgctacgtgaaccggcagggccaggtgtgtggccagagcccccccttccagttccgggagccccggcccatggatgagctggtgaccctggaggaggctgatggcggcagtgacatcctgctggtggtgcccaaggccaccgtgctgcagaaccagctggatgagagccagcaggagagaaatgacctgatgcagctgaagctgcagctggagggccaggtgacagagctgcggagccgggtgcaggagctggagcgggccctggccacagcccggcaggagcacacagagctgatggagcagtacaagggcatcagccgcagccatggagagatcacagaggagcgggacatcctgagccggcagcagggcgaccacgtggcccgcatcctggagctggaggatgacatccagaccatcagcgagaaggtgctgaccaaggaggtggagctggaccggctgcgggacacagtgaaggccctgacccgggagcaggagaagctgctgggccagctgaaggaggtgcaggccgacaaggagcagagcgaggccgagctgcaggtggcccagcaggagaaccaccacctgaacctggacctgaaggaggccaagtcctggcaggaggagcagagcgcccaggcccagaggctgaaggacaaggtggcccagatgaaggacaccctgggccaggcccagcagagggtggccgagctggagcccctgaaggagcagctgcggggggcccaggagctggccgccagcagccagcagaaggccaccctgctgggggaggagctggccagcgctgctgctgcccgggacaggaccatcgccgagctgcacaggagccggctggaggtggccgaggtgaatggccgcctggccgagctgggcctgcacctgaaggaggagaagtgccagtggagcaaggagagagctggcctgctgcagagcgtggaggccgagaaggacaagatcctgaagctgtctgctgagatcctgcggctggagaaggctgtgcaggaggagaggacccagaaccaggtgttcaagacagagctggcccgggagaaggacagcagcctggtgcagctgtctgagagcaagcgggagctgacagagctgcggagcgccctgcgggtgctgcagaaggagaaggagcagctgcaggaggagaagcaggagctgctggagtacatgaggaagctggaggcccggctggagaaggtggctgatgagaagtggaatgaagatgccaccacagaagatgaggaggccgctgtgggcctgagctgcccagctgccctgacagattctgaagatgagagccctgaggacatgaggctgcccccctacggcctgtgtgagcggggggaccccggcagcagccctgctggcccccgggaggccagccccctggtggtgatcagccagcctgcccccatcagcccccacctgagcggccctgctgaggacagcagcagtgacagcgcagaagatgagaagtctgtgctgatggctgctgtgcagagcggcggggaggaggccaacctgctgctgcctgagctgggcagcgccttctatgacatggccagcggcttcaccgtgggcaccctgtctgagaccagcactggaggccctgccacccccacctggaaggagtgccccatctgcaaggagcgcttccctgctgagagtgacaaggatgccctggaggaccacatggatggccacttcttcttcagcacccaggaccccttcacctttgaatag

SEQ ID NO: 206441 - DNA, 1890 bp, Artificial Sequence
  derived and/or modified sequence
atggaggagagccccctgagccgggcccccagcagaggaggagtgaacttcctgaatgtggcccggacctacatccccaacaccaaggtggagtgccactacaccctgcccccaggcaccatgcccagcgccagtgactggattggcatcttcaaggtggaggccgcctgtgtgcgggactaccacacctttgtgtggagctctgtgcctgagagcaccacagatggcagccccatccacacctctgtgcagttccaggcctgcaaccagctggatgagagccagcaggagagaaatgacctgatgcagctgaagctgcagctggagggccaggtgacagagctgcggagccgggtgcaggagctggagcgggccctggccacagcccggcaggagcacacagagctgatggagcagtacaagggcatcagccgcagccatggagagatcacagaggagcgggacatcctgagccggcagcagggcgaccacgtggcccgcatcctggagctggaggatgacatccagaccatcagcgagaaggtgctgaccaaggaggtggagctggaccggctgcgggacacagtgaaggccctgacccgggagcaggagaagctgctgggccagctgaaggaggtgcaggccgacaaggagcagagcgaggccgagctgcaggtggcccagcaggagaaccaccacctgaacctggacctgaaggaggccaagtcctggcaggaggagcagagcgcccaggcccagaggctgaaggacaaggtggcccagatgaaggacaccctgggccaggcccagcagagggtggccgagctggagcccctgaaggagcagctgcggggggcccaggagctggccgccagcagccagcagaaggccaccctgctgggggaggagctggccagcgctgctgctgcccgggacaggaccatcgccgagctgcacaggagccggctggaggtggccgaggtgaatggccgcctggccgagctgggcctgcacctgaaggaggagaagtgccagtggagcaaggagagagctggcctgctgcagagcgtggaggccgagaaggacaagatcctgaagctgtctgctgagatcctgcggctggagaaggctgtgcaggaggagaggacccagaaccaggtgttcaagacagagctggcccgggagaaggacagcagcctggtgcagctgtctgagagcaagcgggagctgacagagctgcggagcgccctgcgggtgctgcagaaggagaaggagcagctgcaggaggagaagcaggagctgctggagtacatgaggaagctggaggcccggctggagaaggtggctgatgagaagtggaatgaagatgccaccacagaagatgaggaggccgctgtgggcctgagctgcccagctgccctgacagattctgaagatgagagccctgaggacatgaggctgcccccctacggcctgtgtgagcggggggaccccggcagcagccctgctggcccccgggaggccagccccctggtggtgatcagccagcctgcccccatcagcccccacctgagcggccctgctgaggacagcagcagtgacagcgaggccgaggatgagaagtctgtgctgatggctgctgtgcagagcggcggggaggaggccaacctgctgctgcctgagctgggcagcgccttctatgacatggccagcggcttcaccgtgggcaccctgtctgagaccagcactggaggccctgccacccccacctggaaggaatgtcccatctgcaaggagcgcttccctgctgagagtgacaaggatgccctggaggaccacatggatggccacttcttcttcagcacccaggaccccttcacctttgaatag

SEQ ID NO: 206442 - DNA, 657 bp, Artificial Sequence
  derived and/or modified sequence
atggatgagctggtgaccctggaggaggctgatggcggcagtgacatcctgctggtggtgcccaaggccaccgtgctgcagaaccagctggatgagagccagcaggagagaaatgacctgatgcagctgaagctgcagctggagggccaggtgacagagctgcggagccgggtgcaggagctggagcgggccctggccacagcccggcaggagcacacagagctgatggagcagtacaagggcatcagccgcagccacggggagatcacagaggagcgggacatcctgagccggcagcagggcgaccacgtggcccgcatcctggagctggaggatgacatccagaccatcagcgagaaggtgctgaccaaggaggtggagctggaccggctgcgggacacagtgaaggccctgacccgggagcaggagaagctgctgggccagctgaaggaggtgcaggccgacaaggagcagagcgaggccgagctgcaggtggcccagcaggagaaccaccacctgaacctggacctgaaggaggccaagtcctggcaggaggagcagagcgcccaggcccagaggctgaaggacaaggtggcccagatgaaggacaccctgggccaggcccagcagagggtgcggcccagctggagcccctag

SEQ ID NO: 206443 - DNA, 2076 bp, Artificial Sequence
  derived and/or modified sequence
atggaggagagccccctgagccgggcccccagcagaggaggagtgaacttcctgaatgtggcccggacctacatccccaacaccaaggtggagtgccactacaccctgcccccaggcaccatgcccagcgccagtgactggattggcatcttcaaggtggaggccgcctgtgtgcgggactaccacacctttgtgtggagctctgtgcctgagagcaccacagatggcagccccatccacacctctgtgcagttccaggccagctacctgcccaagccaggggcccagctgtaccagttccgctacgtgaaccggcagggccaggtgtgtggccagagcccccccttccagttccgggagccccggcccatggatgagctggtgaccctggaggaggctgatggcggcagtgacatcctgctggtggtgcccaaggccaccgtgctgcagaaccagctggatgagagccagcaggagagaaatgacctgatgcagctgaagctgcagctggagggccaggtgacagagctgcggagccgggtgcaggagctggagcgggccctggccacagcccggcaggagcacacagagctgatggagcagtacaagggcatcagccgcagccatggagagatcacagaggagcgggacatcctgagccggcagcagggcgaccacgtggcccgcatcctggagctggaggatgacatccagaccatcagcgagaaggtgctgaccaaggaggtggagctggaccggctgcgggacacagtgaaggccctgacccgggagcaggagaagctgctgggccagctgaaggaggtgcaggccgacaaggagcagagcgaggccgagctgcaggtggcccagcaggagaaccaccacctgaacctggacctgaaggaggccaagtcctggcaggaggagcagagcgcccaggcccagaggctgaaggacaaggtggcccagatgaaggacaccctgggccaggcccagcagagggtggccgagctggagcccctgaaggagcagctgcggggggcccaggagctggccgccagcagccagcagaaggccaccctgctgggggaggagctggccagcgctgctgctgcccgggacaggaccatcgccgagctgcacaggagccggctggaggtggccgaggtgaatggccgcctggccgagctgggcctgcacctgaaggaggagaagtgccagtggagcaaggagagagctggcctgctgcagagcgtggaggccgagaaggacaagatcctgaagctgtctgctgagatcctgcggctggagaaggctgtgcaggaggagaggacccagaaccaggtgttcaagacagagctggcccgggagaaggacagcagcctggtgcagctgtctgagagcaagcgggagctgacagagctgcggagcgccctgcgggtgctgcagaaggagaaggagcagctgcaggaggagaagcaggagctgctggagtacatgaggaagctggaggcccggctggagaaggtggctgatgagaagtggaatgaagatgccaccacagaagatgaggaggccgctgtgggcctgagctgcccagctgccctgacagattctgaagatgagagccctgaggacatgaggctgcccccctacggcctgtgtgagcggggggaccccggcagcagccctgctggcccccgggaggccagccccctggtggtgatcagccagcctgcccccatcagcccccacctgagcggccctgctgaggacagcagcagtgacagcgaggccgaggatgagaagtctgtgctgatggctgctgtgcagagcggcggggaggaggccaacctgctgctgcctgagctgggcagcgccttctatgacatggccagcggcttcaccgtgggcaccctgtctgagaccagcactggaggccctgccacccccacctggaaggaatgtcccatctgcaaggagcgcttccctgctgagagtgacaaggatgccctggaggaccacatggatggccacttcttcttcagcacccaggaccccttcacctttgaatag

SEQ ID NO: 206444 - DNA, 2073 bp, Artificial Sequence
  derived and/or modified sequence
atggaggagagccccctgagccgggcccccagccggggcggcgtgaactttctgaacgtcgccaggacttatataccaaacactaaggtcgaatgtcattatacactcccacccggcaccatgccaagcgcatccgattggatcggtatcttcaaggtggaagcggcctgcgtgagagactaccacaccttcgtgtggtcttccgttcctgagtctaccacagatggctcgcccatccacactagcgtccagtttcaggccagctatctgccgaagcctggcgcccagctgtatcaatttagatacgttaatcgtcagggccaggtgtgtggtcagtcccctccattccagttccgcgaacctcgcccgatggacgagctcgtgacacttgaggaagcagacggtgggtccgatatcttattggtagtaccaaaagctactgtacttcaaaaccaacttgatgagtcgcagcaggagcggaatgatttgatgcagctcaaactgcaactagagggacaagtcaccgaattacgttctagagtgcaggagctcgaacgtgcactagccactgctagacaagaacataccgagttgatggaacagtacaaaggaatctctcgtagccacggcgagatcacagaggagagagacattctgtccagacaacagggtgaccatgtggcgcgcattttagaactggaggatgacattcagaccatctcagaaaaagtcttgacaaaggaggtcgagctggaccgacttcgcgatacagtcaaagctctcacaagagaacaggaaaagctgctaggtcagttgaaggaggtgcaagcggacaaggagcagagcgaggccgagttgcaggttgcccagcaggaaaaccatcaccttaatctcgacctcaaggaggccaagtcctggcaagaagaacaatcagctcaagcccagcggttgaaagacaaagtggctcagatgaaggataccctcggacaggctcagcaacgcgtcgccgaactcgagccccttaaggagcaactcagaggtgcacaggagttggccgcatcatcacagcagaaggctaccctgctcggggaggagttggcctccgctgcagcagcacgggataggaccattgcagagttgcaccgcagcaggttggaagttgccgaggtgaatgggcgcctcgccgaattggggctccatctgaaggaggagaaatgtcaatggagcaaagagcgggctggtctcctgcaatcagtagaggcggaaaaggataagatactgaagctgagtgccgagattcttaggctggagaaggctgtccaagaagaacgcacacagaaccaggtgtttaaaaccgagcttgcccgagaaaaagacagcagcctcgtgcagttgtccgagtccaaaagagagctgacggaattgcggtctgccctcagagtacttcaaaaggaaaaagagcagctacaggaagagaaacaggaattgctggagtacatgagaaagctagaagcaagattagagaaggtggcagacgaaaagtggaatgaggatgctactactgaggacgaagaagccgctgtggggctgagctgcccagccgccctgacagacagcgaggacgagagtcccgaagatatgcgcctgcctccatacgggctctgtgagaggggggacccaggtagttctcctgctggcccacgggaggcctctcctcttgtggtcatcagccagccagcccctatcagtccgcacctgagtggccctgctgaagattcaagttcggattctgccgaggacgagaaatcagtcctgatggcagccgtgcagagcgggggcgaagaagcaaatctgcttctcccagagctggggtcagcgttttacgacatggcctcaggtttcactgtaggtaccctttctgaaacctcaaccggtgggcccgccacccccacctggaaagaatgtccaatttgcaaagaaagatttcccgctgagtctgataaagatgccctcgaggatcacatggacgggcattttttcttttcaacccaggaccccttcacgtttgaatag

SEQ ID NO: 206445 - DNA, 1890 bp, Artificial Sequence
  derived and/or modified sequence
atggaggagagccccctgagccgggcccccagccggggcggcgtgaacttcttgaacgtcgcacgtacttacattccaaatacaaaggtggaatgtcactatactctacctccaggcaccatgccttccgccagcgattggattggcatattcaaagttgaagcggcttgcgtgcgcgattaccatacctttgtgtggagtagcgtgcctgaatcgaccaccgacggttctccaatccatacctccgtacagtttcaggcatgcaatcagctcgatgagagtcagcaggaacggaacgaccttatgcagctgaaattgcagttggagggacaagtaacagagctgaggtcccgagtgcaagagttagagcgagcactagcaactgcacgacaggaacacacagaactgatggaacaatataagggtatatctagatcgcatggggagatcacagaagagcgtgatatccttagtcgtcagcaaggcgaccacgttgccaggatcctggagctggaggatgacattcaaaccataagtgaaaaggtcttaacaaaagaggtggaactagatagactacgagacacagtgaaggctctgactagagagcaggagaagctactcgggcagttgaaagaggttcaggctgataaggaacagtcagaggcagaactccaggtggcgcagcaagagaaccatcacctgaacctggacttaaaagaagccaaatcttggcaggaggaacagtccgctcaagcccagagacttaaagacaaggtggcccagatgaaggataccctcggacaggcacagcagagggtggccgagctggagcccctcaaagagcaactgcgtggagcacaggaactagctgccagtagtcagcaaaaggccacactcctcggcgaggagctcgcttcagcagctgctgcgcgcgatcgcaccatcgccgagctgcaccgatctaggttagaagtggcagaggtgaacggacgacttgcggagctgggtcttcacctgaaagaggagaagtgtcaatggtcgaaagaacgcgcagggcttcttcaaagtgtcgaggcagagaaagataagatcctaaaactgtccgcagagatccttaggctggaaaaggcagtccaggaagaacggacgcaaaatcaggtctttaagactgaactcgccagagaaaaggatagctccctagtgcagctgtcagagtcaaagcgcgagttaacagagttgcggtcagcccttcgcgtgttgcagaaagaaaaggagcagttacaggaggagaaacaggagctcttagaatatatgagaaaacttgaggctcggctggagaaggtggcagatgagaaatggaacgaggacgccaccaccgaggatgaggaagctgctgttggactttcctgtccagcagcccttaccgactctgaagacgagtctccagaggacatgcgcctaccaccttatggcctgtgcgaacgaggagatcccgggtcctcacccgccggccctcgcgaagcgtccccactggtggtcatctctcagcctgctccaatttccccgcacttgtccggtcccgccgaagactcttcctccgattcggaggcggaggatgaaaagtccgtcctcatggccgccgttcaaagcggcggagaggaggccaacctgctgctgcctgagctgggctcagccttctacgatatggcttcgggatttacagtgggcaccctatctgagacaagtaccggtggcccagccacacccacatggaaggaatgtccaatctgcaaagagcggttccctgccgaaagcgacaaagacgctctggaagaccatatggatggacactttttcttttcgacccaggaccccttcacgttcgaatag

SEQ ID NO: 206446 - DNA, 657 bp, Artificial Sequence
  derived and/or modified sequence
atggacgagctggtgaccctggaggaggccgacggcggcagcgacatcctgttagtggtacccaaagctaccgtcctgcagaatcagctggacgaatcacaacaggaacgaaatgatcttatgcaattgaaactccagctagagggtcaagttactgagctccgatctcgcgtacaggagctggaacgggccctcgccacggcgaggcaagaacacacggagctcatggagcagtacaagggcatcagcagatctcacggggaaattacagaggaaagagatattttaagtaggcagcagggcgaccatgtcgcgaggatcctagaactggaggacgatattcagacaatcagcgaaaaggtactgacaaaagaggttgagctcgacaggctcagggataccgtgaaggcactgacccgggaacaagaaaagttgctagggcaattgaaagaagtgcaggctgacaaggaacagagtgaagctgagctccaagttgcccaacaggaaaaccaccacctaaacttagatctgaaagaggctaagtcctggcaagaggagcagtcagcccaagcccagagactcaaagataaggtggcgcagatgaaggatacactcgggcaggcacaacagagagtccgtccgtcttggagcccgtag

SEQ ID NO: 206447 - DNA, 2076 bp, Artificial Sequence
  derived and/or modified sequence
atggaggagagccccctgagccgggcccccagccggggcggcgtgaacttccttaatgtcgcccgaacatacatccctaatacaaaagttgagtgccactacaccttacctcccggcactatgcccagcgccagtgactggataggcatctttaaggtggaggcagcgtgtgtgagggactaccacacttttgtgtggtccagcgtgcctgagtccacgactgacggatctcccatacatacttctgtgcagttccaggcttcttatctgccaaagccgggtgcacaattataccaatttaggtacgtcaatcggcagggtcaggtttgtgggcaaagccctcccttccagttccgcgaacctaggcctatggatgagttagtgacacttgaagaggcagatggcggaagtgatattctgttagtagtccccaaagctactgtgctgcaaaaccagttggatgagtcccagcaagagcggaacgatctcatgcagctcaaactgcaactggaagggcaggttaccgagctgaggagccgggttcaggaattggaacgggcactggcaactgcccgccaggagcacacagaactgatggagcaatataaggggatttcacgtagtcacggtgagatcacagaagaacgcgatattctttccagacagcaaggagaccatgtggcccgcatccttgagcttgaagacgatattcaaaccatctccgagaaggtgttgacaaaagaggtggagctagaccgattgcgagataccgtgaaggcactaacgagggagcaagagaaattactgggacagttaaaagaagtgcaggccgataaagaacaaagcgaagctgagctccaggtggcccagcaagagaatcatcatctcaacctggacctgaaagaggccaagagctggcaggaagagcagtccgctcaggcccagaggctgaaggataaagtggcgcagatgaaagataccctggggcaggcacagcagcgggtggccgaactcgaacctttgaaagagcagctacgaggtgcccaagagctcgccgcctcctctcagcaaaaagctaccctgctcggcgaggagctagcaagtgcagcagccgcccgggaccggacgattgcggaactgcaccgctcacgcctggaagttgccgaggtgaacggaaggctggcagaactgggcttacacctgaaagaagagaaatgccaatggagcaaagaacgagccggtttattgcagtctgtagaagccgagaaagacaagattctcaaactgtctgcagaaatccttcggctggagaaggccgtgcaggaggaacgcactcagaaccaagtttttaagacagagctggcaagagagaaggattcatccttagtgcagctgtccgagagcaaacgtgagttgaccgagctgcggagcgcactgcgagtgttgcaaaaagagaaagaacagctgcaggaagaaaaacaagagctgttggaatatatgcggaaactggaggcaaggttggagaaagtcgctgatgaaaaatggaacgaggacgcaaccacagaggatgaggaggccgcagttggacttagttgccccgcagcactgaccgactccgaggacgaatctcccgaggacatgagactcccaccctacgggctgtgcgagcgtggtgatcccggttcctctcctgcaggacctcgagaggccagccccttggtcgtgatctcccagcccgcccccatctctccccacctttctgggcctgccgaagactcctcaagcgattctgaggccgaagacgaaaaaagtgtcctgatggcagccgtccagagtggaggtgaggaggctaatttactcctccctgagctaggatccgccttctacgacatggcttctgggttcaccgtcggcacactttcagagacctccactggaggccctgccactcctacctggaaggaatgccctatctgtaaggagcgctttcctgcagagagtgacaaggatgcactggaagatcacatggacggacactttttcttctccacccaggaccccttcaccttcgagtag

SEQ ID NO: 206448 - DNA, 2776 bp, Artificial Sequence
  derived and/or modified sequence
ggtgaaaggtgaggggaacagctgatccgtctgttgggaggacagatatctcaaggccaggatggaagaatcaccactaagccgggcaccatcccgtggtggagtcaactttctcaatgtagcccggacctacatccccaacaccaaggtggaatgtcactacacccttcccccaggcaccatgcccagtgccagtgactggattggcatcttcaaggtggaggctgcctgtgttcgggattaccacacatttgtgtggtcttccgtgcctgaaagtacaactgatggttcccccattcacaccagtgtccagttccaagcctgtaaccagctcgatgagagccagcaagaacggaatgacctgatgcagctgaagctacagctggagggacaggtgacagagctgaggagccgagtgcaggagctcgagagggctctggcaactgccaggcaggagcacacggagctgatggaacagtacaaggggatttcccggtcccatggggagatcacagaagagagggacatcctgagccggcaacagggagaccatgtggcacgcatcctggagctagaggatgacatccagaccatcagtgagaaagtgctgacgaaggaagtggagctggacaggcttagagacacagtgaaggccctgactcgggaacaagagaagctccttgggcaactgaaagaagtacaagcagacaaggagcaaagtgaggctgagctccaagtggcacaacaggagaaccatcacttaaatttggacctgaaggaggcgaagagctggcaagaggagcagagtgctcaggctcagcgactgaaagacaaggtggcccagatgaaggacaccctaggccaggcccagcagcgggtggccgagctggagcccttgaaggagcagcttcgaggggcccaggagcttgcagcctcaagccagcagaaagccacccttcttggggaggagttggccagtgcagcagcagccagggaccgcaccatagccgaactacaccgcagccgcctggaagtggctgaagttaacggcaggctggctgagctcggtttgcacttgaaggaagaaaaatgccaatggagcaaggagcgggcagggctgctgcagagtgtggaggcagagaaggacaagatcctgaagctgagtgcagagatacttcgattggagaaggcagttcaggaggagaggacccaaaaccaagtgttcaagactgagctggcccgggagaaggattctagcctggtacagttgtcagaaagtaagcgggagctgacagagctgcggtcagccctgcgtgtgctccagaaggaaaaggagcagttacaggaggagaaacaggaattgctagagtacatgagaaagctagaggcccgcctggagaaggtggcagatgagaagtggaatgaggatgccaccacagaggatgaggaggccgctgtggggctgagctgcccggcagctctgacagactcagaggacgagtccccagaagacatgaggctcccaccctatggcctttgtgagcgtggagacccaggctcctctcctgctgggcctcgagaggcttctccccttgttgtcatcagccagccggctcccatttctcctcacctctctgggccagctgaggacagtagctctgactcggaggctgaagatgagaagtcagtcctgatggcagctgtgcagagtgggggtgaggaggccaacttactgcttcctgaactgggcagtgccttctatgacatggccagtggctttacagtgggtaccctgtcagaaaccagcactgggggccctgccacccccacatggaaggagtgtcctatctgtaaggagcgctttcctgctgagagtgacaaggatgccctggaggaccacatggatggacacttctttttcagcacccaggaccccttcacctttgagtgatcttactccctcgtacatgcacaaatacacactcatgcacacacacactcacacacatgcatacacttaggtttcatgcccattttctatcacactgggctccatgatattctgttccctaagaactgcttctgtgtgccctgttttcatcccaagatttctcacttcatcctctcctacctggctcttttgtcccagggaggggtcctgttcggaagcagtggctgaatttatcccctgaaagtggttttggaggaaccgggatggaggaggccttcccctgtgggaatagaatcgtccactcctagccctggttgcttctgatacacagccactgcacacacacactcacactcacactcccttgtctgatgccccaaagccaattcctggggcaccctaccctctcttatttggagtttccgttggtttacctgagttttctctggggtctgcacagaggcagcagcatggacatcatggcctctcaggtcccttttggttctcagtttcattggttcctctttctgttcccccattgacttctgtgccccaccctagccttttccataaccttaggtattcagtttggaggggttttttgtatttttgaggattcctgtattctgtatcctctcctcgcatctcctcacatggaaagaaataatgtatttgtgccttctgtgaggaatggggggaacaagtggtcccaggtatccccatttccaaggcccccctccctctccaggtccccccacagcaataaaagcttccccctgatatccatccctttgtagtttgaacaaatatatttatatgatatgt

SEQ ID NO: 206449 - DNA, 2073 bp, Artificial Sequence
  derived and/or modified sequence
atggaagaatcaccactgtcgagagctccatcgaggggaggggtcaacttcttgaacgtggcacgaacttatatacccaacacgaaagtggagtgtcattatacacttcccccaggcaccatgccttccgcttcagactggattggcattttcaaggtcgaggccgcatgcgttagggactatcatacctttgtctggagttcagtgccagagagcacaacagacggcagcccaatccacaccagcgtccagttccaagcatcctatctccctaagcccggagcacagctttatcagttcaggtacgtcaacagacagggtcaggtttgcggtcagagcccaccgttccagtttagggagcctcggccaatggacgagctagttaccctggaagaggcagacggaggcagtgacatactgttggtcgtgcctaaggccaccgtgttgcagaaccagctggatgagtcccagcaggagcgtaacgacttgatgcagctgaaacttcaactggaagggcaggtgacagagctcagatcacgcgtgcaagaactggagagagcactggcgactgccaggcaggagcataccgaactgatggagcagtacaagggtattagtaggagccatggcgagattacggaagagcgcgatattttatctcgacagcagggggaccatgttgcacgcattttggaacttgaggacgacattcagacgattagtgagaaagtacttaccaaggaggtagagctggatcgacttcgtgataccgtaaaggcactcacacgggagcaggagaagttgttggggcagctcaaggaggtacaagcggataaagaacaaagcgaggcagaactgcaggtggcacaacaggagaatcaccacttgaacctggatctcaaagaggccaaatcatggcaggaggagcagtccgctcaagctcagcggctgaaggataaggtggcccaaatgaaggacaccttgggccaagctcaacagagggtggctgaactagagccactgaaagaacagctcaggggagctcaggaactcgccgcttcatcccagcagaaggcaacactattaggggaggagctggcgtctgctgcagctgccagagataggacaatcgccgaactccacagaagtaggttggaggtcgccgaagtaaacgggaggttggccgagctcggcttgcatttaaaggaagagaagtgtcaatggtccaaagaacgggcagggctgctccaaagcgtggaagccgagaaggacaaaattctgaagttgagcgctgagatactgcgactcgagaaggctgttcaggaggaaagaacccagaaccaggtgtttaaaaccgagctcgctcgggagaaggatagctctctggttcagctctcagagtccaaaagagaactcaccgagttgcgcagtgcgctccgggtgttgcagaaagagaaggagcaactccaggaggagaagcaggagctgttagagtacatgagaaaacttgaggctcgcctggaaaaagtcgctgatgagaaatggaatgaagatgccacaaccgaggatgaagaggcagccgtagggctgtcgtgccccgcagcgctgaccgacagcgaggacgaaagtccagaagatatgagactgcctccttacgggctgtgcgagcggggagatcccggatcctccccggctggaccccgagaagcttccccactggttgtgattagtcagccagctccgatctctcctcatctgagtggccctgctgaggattcttcaagtgactccgccgaggatgaaaagagcgtgttaatggccgctgttcagagtggaggcgaggaggccaacctgttgctccccgaactaggaagcgccttctacgatatggccagtggcttcactgtcggtactttgtccgagacgtctaccggcggacccgctacaccaacttggaaggagtgccccatttgcaaagaaagatttccagcagaaagcgacaaggatgccctcgaggaccatatggacggccactttttcttctccacacaggacccttttaccttcgaatag

SEQ ID NO: 206450 - DNA, 1890 bp, Artificial Sequence
  derived and/or modified sequence
atggaggagtcccccctatcacgggctccatctagaggcggagtcaacttcctgaatgtggctcgcacctatatcccgaacactaaggttgaatgtcactacacgttgcctccgggaaccatgccatcagcaagcgattggatcgggatctttaaggtcgaggccgcatgcgtgagggactatcataccttcgtgtggtctagtgttccggagtctacaacggacggtagcccgatccatacctccgtgcagtttcaagcctgtaatcagctcgatgagagccagcaggagaggaacgatctcatgcaactgaagttacagctggagggccaggtcacagagctccgatcccgggtccaggagctagaaagagcattggccactgcccgacaagaacacaccgagctcatggagcagtacaaggggattagtcggtcccacggtgagatcactgaggagcgcgatatcctttctcggcagcagggggatcacgtggctagaatccttgagctcgaagatgacatccaaaccatctctgagaaagtgctcactaaagaagtggagctcgacagactgcgagacacagtgaaagccctaacacgcgaacaggaaaagctcctgggccagctcaaagaggtacaagcagataaggaacaaagcgaggccgagctgcaggttgcccagcaggaaaaccatcacctgaacctggacttgaaggaggctaaatcttggcaggaggagcagtcagctcaagctcagcgcctcaaagataaagtcgctcagatgaaggacactctaggccaagcccaacagcgagttgcagagctagagccgctcaaggagcagctgcgcggtgctcaagagcttgcggcatcaagtcaacaaaaagccacccttctgggcgaggagctagctagtgctgccgctgccagagaccgaaccattgccgaactgcacaggtcacggttggaggtcgctgaagtgaatggtcgactcgccgaattgggcttgcacctaaaagaagagaaatgccagtggagcaaggaaagggcaggactattacaatctgtggaagcggagaaagataaaatcctcaagctttcagctgaaattctacgattagagaaagctgtgcaagaagaacgcacccagaatcaggtgtttaaaaccgaactggccagagagaaggactcatcgctcgtgcagctcagcgagtctaagagggagcttaccgagcttcgatccgctctgcgagtgcttcagaaggagaaggagcagttgcaagaagagaagcaggagctgctggagtatatgagaaaactcgaagctcgtcttgagaaggtcgccgatgaaaagtggaacgaggatgcaacgacagaagatgaggaagcagctgtgggcctctcatgtcccgctgcgcttaccgattcagaggatgagtccccggaggatatgcgactgcctccctatggcttgtgcgaacgtggagacccaggaagctccccagccggtcctcgggaggccagcccactggtggtcatatctcagcctgcccctattagcccccatctgagcggaccagctgaagactcgagctctgatagtgaggccgaggacgaaaaaagcgttcttatggccgctgtacagtccggtggcgaggaggccaatttgctgttacctgaacttgggtccgccttctatgacatggcctcggggttcactgttgggaccctttctgagaccagtactggtggcccagcaacccccacctggaaggaatgtcccatctgcaaagagagatttccagctgagagcgataaggacgccctcgaggaccatatggatggccatttcttctttagcacacaagatcccttcacattcgagtag

SEQ ID NO: 206451 - DNA, 657 bp, Artificial Sequence
  derived and/or modified sequence
atggatgaactggtgacacttgaggaagcagatgggggatccgacatactattagtggtccccaaggcaacagtgttacagaatcagttagatgagagccaacaggaacgcaatgatttgatgcagcttaagcttcaactggaaggacaggtcactgagttaagatccagagttcaggagttggagagggctctggctaccgcccgacaggagcatactgagctcatggagcagtacaaaggaatttctcgttcacacggcgaaattactgaggagagggacatattgagccggcagcagggcgatcacgttgccagaatactcgagctcgaagacgacattcagactatctccgaaaaggttctaaccaaagaagtggagcttgatcgtctgcgggacacggtcaaggctctcactcgcgagcaggaaaagttgttgggccagctaaaagaggtgcaagcagataaggagcagtccgaggctgagctccaggtggcacaacaggagaaccatcatttaaatctcgatctgaaagaggccaaatcctggcaggaggagcagagtgcccaggcccagcgcctgaaagacaaagtcgctcagatgaaggacactttaggtcaggcccagcagcgcgttcggccatcctggtcaccctag

SEQ ID NO: 206452 - DNA, 2076 bp, Artificial Sequence
  derived and/or modified sequence
atggaggagagccccctcagcagggcacccagccgcggtggcgtcaacttcctgaacgtggcccgaacatatattcctaacacaaaagtggagtgtcactatactctacccccaggcactatgccttctgcctccgattggataggaattttcaaggtcgaggctgcttgtgttcgcgattaccacactttcgtgtggtctagcgtgcccgagtctaccacagatggaagtcccatccacacaagcgtccaattccaggcaagttaccttcctaagcccggagcgcagttgtatcagtttcgttatgtgaaccggcaaggacaagtgtgtgggcagagtcctccctttcagtttcgggaacctagacccatggatgagctggtcactctggaggaggcagatgggggaagtgacattcttctcgtggttcccaaggctactgtcctgcaaaatcaactggatgagtctcagcaggagcgcaatgacctaatgcagctcaaacttcagctggaaggccaagtcaccgaattgcgaagccgcgtccaggaattggagagggcgttagcaaccgccagacaggagcatacggaacttatggagcaatacaaaggaatctctaggagtcatggagaaatcaccgaggagcgggacatcctgtcccggcagcagggggaccacgtcgcaaggattttggagcttgaggacgatatccagactatctcagaaaaggtcttaaccaaagaggtcgaattggataggctcagagacaccgtcaaggctctgacccgggaacaagagaagttgctcggacagttaaaggaggtacaggccgacaaggagcagtccgaagccgagctgcaggtcgcccaacaggagaaccaccacctgaacttggatctgaaggaggccaagtcgtggcaagaagaacagagtgcacaggcgcagaggttaaaagacaaggtagcacagatgaaggataccctgggtcaggcacagcagcgagtggcagagctcgagcccctgaaagagcagcttcggggagcgcaggaactagcagcgtcttctcagcaaaaagccaccctcctgggagaggagttagcctctgctgcagcagcacgtgatagaacaatcgcagagctccatcgcagtagactggaagtcgctgaggtgaacgggaggctagcagagctaggccttcacttgaaagaggaaaaatgtcagtggagcaaggagcgggctgggctgcttcagagtgtggaagctgagaaggacaaaattctaaaactcagcgccgaaatactcaggctggagaaggcggtgcaggaagagcggacacagaaccaagtatttaaaactgagttagcacgggaaaaggattcctctctggtgcagttgagcgagtcaaaacgggagttgacggagcttcgaagcgcactgagggtactgcagaaagaaaaggaacagctgcaggaagagaaacaggagttgctcgagtacatgagaaaactcgaggcccgtctcgagaaggttgctgacgagaagtggaatgaagatgccaccaccgaggacgaagaggcagcagtggggctctcatgcccggctgccctgactgactcagaggacgaaagccccgaggatatgcgcttgccaccctacggtttgtgtgaaaggggcgaccccggatcatctcctgccggtccacgagaagcatctcctctggtggttatttctcaacccgcacctatttcgccacatctttccggaccagcagaggattcatcctccgattcagaggctgaagacgagaaaagcgtgctgatggcagctgtccagagcgggggtgaagaagctaatctcctgttgcctgaactgggctcagcgttttatgatatggccagcggcttcactgttgggacactctccgaaacctcaacaggcggacctgctacccccacctggaaggaatgccctatctgcaaggagagatttccagccgaatccgacaaagacgccctggaggaccacatggatggccactttttcttttctacccaggatccttttacctttgagtag

SEQ ID NO: 206453 - DNA, 1268 bp, Artificial Sequence
  derived and/or modified sequence
ggtgaaaggtgaggggaacagctgatccgtctgttgggaggacagatatctcaaggccaggatggaagaatcaccactaagccgggcaccatcccgtggtggagtcaactttctcaatgtagcccggacctacatccccaacaccaaggtggaatgtcactacacccttcccccaggcaccatgcccagtgccagtgactggattggcatcttcaagccagctacctgcccaaaccaggagctcagctctaccagttccgatatgtgaaccgccagggccaggtgtgtgggcagagcccccctttccagttccgagagccaaggcccatggatgaactggtgaccctggaggaggctgatgggggctctgacatcctgctggttgtccccaaggcaactgtgttacagaaccagctcgatgagagccagcaagaacggaatgacctgatgcagctgaagctacagctggagggacaggtgacagagctgaggagccgagtgcaggagctcgagagggctctggcaactgccaggcaggagcacacggagctgatggaacagtacaaggggatttcccggtcccatggggagatcacagaagagagggacatcctgagccggcaacagggagaccatgtggcacgcatcctggagctagaggatgacatccagaccatcagtgagaaagtgctgacgaaggaagtggagctggacaggcttagagacacagtgaaggccctgactcgggaacaagagaagctccttgggcaactgaaagaagtacaagcagacaaggagcaaagtgaggctgagctccaagtggcacaacaggagaaccatcacttaaatttggacctgaaggaggcgaagagctggcaagaggagcagagtgctcaggctcagcgactgaaagacaaggtggcccagatgaaggacaccctaggccaggcccagcagcgggtgaggccgagctggagcccttgaaggagcagcttcgaggggcccaggagcttgcagcctcaagccagcagaaagccacccttcttggggaggagttggccagtgcagcagcagccagggaccgcaccatagccgaactacaccgcagccgcctggaagtggctgaagttaacggcaggctggctgagctcggtttgcacttgaaggaagaaaaatgccaatggagcaaggagcgggcagggctgctgcagagtgtggaggcagagaaggacaagatcctgaagctgagtgcagagatacttcgattg

SEQ ID NO: 206454 - DNA, 3264 bp, Artificial Sequence
  derived and/or modified sequence
aaaccagcagccacccctaatgcagccggccccctcctaagggatcatgggccttgaagtcctttgctggccacaccctcgttttctgtcataggagtgagaactacgcctcccaggatgccgcggtgaggccgccgtcacggacgccctcttccccgccctccttgcgcgcagccttctgggatgtatagtcctagatccgagcacgcagcggcaaaagggcgcagaagaaccacaaaccccagaagccctcgcgcccactcttctccctcccctccagaagtcggagtgctgtttttgttgttggtgaaaggtgaggggaacagctgatccgtctgttgggaggacagatatctcaaggccaggatggaagaatcaccactaagccgggcaccatcccgtggtggagtcaactttctcaatgtagcccggacctacatccccaacaccaaggtggaatgtcactacacccttcccccaggcaccatgcccagtgccagtgactggattggcatcttcaaggtggaggctgcctgtgttcgggattaccacacatttgtgtggtcttccgtgcctgaaagtacaactgatggttcccccattcacaccagtgtccagttccaagccagctacctgcccaaaccaggagctcagctctaccagttccgatatgtgaaccgccagggccaggtgtgtgggcagagcccccctttccagttccgagagccaaggcccatggatgaactggtgaccctggaggaggctgatgggggctctgacatcctgctggttgtccccaaggcaactgtgttacagaaccagctcgatgagagccagcaagaacggaatgacctgatgcagctgaagctacagctggagggacaggtgacagagctgaggagccgagtgcaggagctcgagagggctctggcaactgccaggcaggagcacacggagctgatggaacagtacaaggggatttcccggtcccatggggagatcacagaagagagggacatcctgagccggcaacagggagaccatgtggcacgcatcctggagctagaggatgacatccagaccatcagtgagaaagtgctgacgaaggaagtggagctggacaggcttagagacacagtgaaggccctgactcgggaacaagagaagctccttgggcaactgaaagaagtacaagcagacaaggagcaaagtgaggctgagctccaagtggcacaacaggagaaccatcacttaaatttggacctgaaggaggcgaagagctggcaagaggagcagagtgctcaggctcagcgactgaaagacaaggtggcccagatgaaggacaccctaggccaggcccagcagcgggtggccgagctggagcccttgaaggagcagcttcgaggggcccaggagcttgcagcctcaagccagcagaaagccacccttcttggggaggagttggccagtgcagcagcagccagggaccgcaccatagccgaactacaccgcagccgcctggaagtggctgaagttaacggcaggctggctgagctcggtttgcacttgaaggaagaaaaatgccaatggagcaaggagcgggcagggctgctgcagagtgtggaggcagagaaggacaagatcctgaagctgagtgcagagatacttcgattggagaaggcagttcaggaggagaggacccaaaaccaagtgttcaagactgagctggcccgggagaaggattctagcctggtacagttgtcagaaagtaagcgggagctgacagagctgcggtcagccctgcgtgtgctccagaaggaaaaggagcagttacaggaggagaaacaggaattgctagagtacatgagaaagctagaggcccgcctggagaaggtggcagatgagaagtggaatgaggatgccaccacagaggatgaggaggccgctgtggggctgagctgcccggcagctctgacagactcagaggacgagtccccagaagacatgaggctcccaccctatggcctttgtgagcgtggagacccaggctcctctcctgctgggcctcgagaggcttctccccttgttgtcatcagccagccggctcccatttctcctcacctctctgggccagctgaggacagtagctctgactcggctgaagatgagaagtcagtcctgatggcagctgtgcagagtgggggtgaggaggccaacttactgcttcctgaactgggcagtgccttctatgacatggccagtggctttacagtgggtaccctgtcagaaaccagcactgggggccctgccacccccacatggaaggagtgtcctatctgtaaggagcgctttcctgctgagagtgacaaggatgccctggaggaccacatggatggacacttctttttcagcacccaggaccccttcacctttgagtgatcttactccctcgtacatgcacaaatacacactcatgcacacacacactcacacacatgcatacacttaggtttcatgcccattttctatcacactgggctccatgatattctgttccctaagaactgcttctgtgtgccctgttttcatcccaagatttctcacttcatcctctcctacctggctcttttgtcccagggaggggtcctgttcggaagcagtggctgaatttatcccctgaaagtggttttggaggaaccgggatggaggaggccttcccctgtgggaatagaatcgtccactcctagccctggttgcttctgatacacagccactgcacacacacactcacactcacactcccttgtctgatgccccaaagccaattcctggggcaccctaccctctcttatttggagtttccgttggtttacctgagttttctctggggtctgcacagaggcagcagcatggacatcatggcctctcaggtcccttttggttctcagtttcattggttcctctttctgttcccccattgacttctgtgccccaccctagccttttccataaccttaggtattcagtttggaggggttttttgtatttttgaggattcctgtattctgtatcctctcctcgcatctcctcacatggaaagaaataatgtatttgtgccttctgtgaggaatggggggaacaagtggtcccaggtatccccatttccaaggcccccctccctctccaggtccccccacagcaataaaagcttccccctgatatccatccctttgtagtttgaacaaatatatttatatgatatgt

SEQ ID NO: 206455 - DNA, 2291 bp, Artificial Sequence
  derived and/or modified sequence
ggtgaaaggtgaggggaacagctgatccgtctgttgggaggacagatatctcaaggccaggatggaagaatcaccactaagccgggcaccatcccgtggtggagtcaactttctcaatgtagcccggacctacatccccaacaccaaggtggaatgtcactacacccttcccccaggcaccatgcccagtgccagtgactggattggcatcttcaaggtggaggctgcctgtgttcgggattaccacacatttgtgtggtcttccgtgcctgaaagtacaactgatggttcccccattcacaccagtgtccagttccaagccagctacctgcccaaaccaggagctcagctctaccagttccgatatgtgaaccgccagggccaggtgtgtgggcagagcccccctttccagttccgagagccaaggcccatggatgaactggtgaccctggaggaggctgatgggggctctgacatcctgctggttgtccccaaggcaactgtgttacagaaccagctcgatgagagccagcaagaacggaatgacctgatgcagctgaagctacagctggagggacaggtgacagagctgaggagccgagtgcaggagctcgagagggctctggcaactgccaggcaggagcacacggagctgatggaacagtacaaggggatttcccggtcccatggggagatcacagaagagagggacatcctgagccggcaacagggagaccatgtggcacgcatcctggagctagaggatgacatccagaccatcagtgagaaagtgctgacgaaggaagtggagctggacaggcttagagacacagtgaaggccctgactcgggaacaagagaagctccttgggcaactgaaagaagtacaagcagacaaggagcaaagtgaggctgagctccaagtggcacaacaggagaaccatcacttaaatttggacctgaaggaggcgaagagctggcaagaggagcagagtgctcaggctcagcgactgaaagacaaggtggcccagatgaaggacaccctaggccaggcccagcagcgggtggccgagctggagcccttgaaggagcagcttcgaggggcccaggagcttgcagcctcaagccagcagaaagccacccttcttggggaggagttggccagtgcagcagcagccagggaccgcaccatagccgaactacaccgcagccgcctggaagtggctgaagttaacggcaggctggctgagctcggtttgcacttgaaggaagaaaaatgccaatggagcaaggagcgggcagggctgctgcagagtgtggaggcagagaaggacaagatcctgaagctgagtgcagagatacttcgattggagaaggcagttcaggaggagaggacccaaaaccaagtgttcaagactgagctggcccgggagaaggattctagcctggtacagttgtcagaaagtaagcgggagctgacagagctgcggtcagccctgcgtgtgctccagaaggaaaaggagcagttacaggaggagaaacaggaattgctagagtacatgagaaagctagaggcccgcctggagaaggtggcagatgagaagtggaatgaggatgccaccacagaggatgaggaggccgctgtggggctgagctgcccggcagctctgacagactcagaggacgagtccccagaagacatgaggctcccaccctatggcctttgtgagcgtggagacccaggctcctctcctgctgggcctcgagaggcttctccccttgttgtcatcagccagccggctcccatttctcctcacctctctgggccagctgaggacagtagctctgactcggaggctgaagatgagaagtcagtcctgatggcagctgtgcagagtgggggtgaggaggccaacttactgcttcctgaactgggcagtgccttctatgacatggccagtggctttacagtgggtaccctgtcagaaaccagcactgggggccctgccacccccacatggaaggagtgtcctatctgtaaggagcgctttcctgctgagagtgacaaggatgccctggaggaccacatggatggacacttctttttcagcacccaggaccccttcacctttgagtgatcttactccctcgtacatgcacaaatacacactcatgcacacacacactcacacacatgcatacacttaggtttcatgcccattttctatcacactgggctccatgatattctgttccctaagaactgcttctgtgtgccctgttttcatccca

SEQ ID NO: 206456 - DNA, 2073 bp, Artificial Sequence
  derived and/or modified sequence
atggaggagagccccctgagcagagcccccagcagaggcggcgtgaacttcctgaacgtggccagaacctacatccccaacaccaaggtggagtgccactacaccctgccccccggcaccatgcccagcgccagcgactggatcggcatcttcaaggtggaggccgcctgcgtgagagactaccacaccttcgtgtggagcagcgtgcccgagagcaccaccgacggcagccccatccacaccagcgtgcagttccaggccagctacctgcccaagcccggcgcccagctgtaccagttcagatacgtgaacagacagggccaggtgtgcggccagagcccccccttccagttcagagagcccagacccatggacgagctggtgaccctggaggaggccgacggcggcagcgacatcctgctggtggtgcccaaggccaccgtgctgcagaaccagctggacgagagccagcaggagagaaacgacctgatgcagctgaagctgcagctggagggccaggtgaccgagctgagaagcagagtgcaggagctggagagagccctggccaccgccagacaggagcacaccgagctgatggagcagtacaagggcatcagcagaagccacggcgagatcaccgaggagagagacatcctgagcagacagcagggcgaccacgtggccagaatcctggagctggaggacgacatccagaccatcagcgagaaggtgctgaccaaggaggtggagctggacagactgagagacaccgtgaaggccctgaccagagagcaggagaagctgctgggccagctgaaggaggtgcaggccgacaaggagcagagcgaggccgagctgcaggtggcccagcaggagaaccaccacctgaacctggacctgaaggaggccaagagctggcaggaggagcagagcgcccaggcccagagactgaaggacaaggtggcccagatgaaggacaccctgggccaggcccagcagagagtggccgagctggagcccctgaaggagcagctgagaggcgcccaggagctggccgccagcagccagcagaaggccaccctgctgggcgaggagctggccagcgccgccgccgccagagacagaaccatcgccgagctgcacagaagcagactggaggtggccgaggtgaacggcagactggccgagctgggcctgcacctgaaggaggagaagtgccagtggagcaaggagagagccggcctgctgcagagcgtggaggccgagaaggacaagatcctgaagctgagcgccgagatcctgagactggagaaggccgtgcaggaggagagaacccagaaccaggtgttcaagaccgagctggccagagagaaggacagcagcctggtgcagctgagcgagagcaagagagagctgaccgagctgagaagcgccctgagagtgctgcagaaggagaaggagcagctgcaggaggagaagcaggagctgctggagtacatgagaaagctggaggccagactggagaaggtggccgacgagaagtggaacgaggacgccaccaccgaggacgaggaggccgccgtgggcctgagctgccccgccgccctgaccgacagcgaggacgagagccccgaggacatgagactgcccccctacggcctgtgcgagagaggcgaccccggcagcagccccgccggccccagagaggccagccccctggtggtgatcagccagcccgcccccatcagcccccacctgagcggccccgccgaggacagcagcagcgacagcgccgaggacgagaagagcgtgctgatggccgccgtgcagagcggcggcgaggaggccaacctgctgctgcccgagctgggcagcgccttctacgacatggccagcggcttcaccgtgggcaccctgagcgagaccagcaccggcggccccgccacccccacctggaaggagtgccccatctgcaaggagagattccccgccgagagcgacaaggacgccctggaggaccacatggacggccacttcttcttcagcacccaggaccccttcaccttcgagtag

SEQ ID NO: 206457 - protein, 1013 aa, Artificial Sequence
  derived and/or modified sequence
MPPPAEVTDPSHAPAVLRQLNEQRLRGLFCDVTLIAGDTKFPAHRSVLAASSPFFREALLTSAPLPLPPATGGAAPNPATTTAASSSSSSSSSSSSSSSSASSSSSSSSSSPPPASPPASSPPRVLELPGVPAAAFSDVLNFIYSARLALPGGGGDGAAVAEIGALGRRLGISRLQGLGEGGDAWVPPTPAPMATSQPEEDSFGPGPRPAGEWEGDRAEAQAPDLQCSLPRRPLPCPQCGKSFIHPKRLQTHEAQCRRGASTRGSTGLGAGGAGPGGPAGVDASALPPPVGFRGGPEHVVKVVGGHVLYVCAACERSYVTLSSLKRHSNVHSWRRKYPCRYCEKVFALAEYRTKHEVWHTGERRYQCIFCWETFVTYYNLKTHQRAFHGISPGLLASEKTPNGGYKPKLNTLKLYRLLPMRAAKRPYKTYSQGAPEAPLSPTLNTPAPVAMPASPPPGPPPAPEPGPPPSVITFAHPAPSVIVHGGSSSGGGGSGTASTGGSQAASVITYTAPPRPPKKREYPPPPPEPAATPTSPATAVSPATAAGPAMATTTEEAKGRNPRAGRTLTYTAKPVGGIGGGGGPPTGAGRGPSQLQAPPPLCQITVRIGEEAIVKRRISETDLRPGELSGEEMEESEEDEEEEDEEEEEEDEEESKAGGEDQLWRPYYSYKPKRKAGAAGGASVGGSGLPRGRRPPRWRQKLERRSWEETPAAESPAGRARTERRHRCGDCAQTFTTLRKLRKHQEAHGGGSHSSRAGRRPSTRFTCPHCAKVCKTAAALSRHGQRHAAERPGGTPTPVIAYSKGSAGTRPGDVKEEAPQEMQVSSSSGEAGGGSTAAEEASETASLQDPIISGGEEPPVVASGGSYVYPPVQEFPLALIGGGREPGGGRGKSGSEGPVGAGEGDRMEGIGAAKVTFYPEPYPLVYGPQLLAAYPYNFSNLAALPVALNMVLPDEKGAGALPFLPGVFGYAVNPQAAPPAPPTPPPPTLPPPIPPKGEGERAGVERTQKGDVG

SEQ ID NO: 206458 - DNA, 5961 bp, Artificial Sequence
  derived and/or modified sequence
agagtcgtgggtaaaccccccgctcgctggttgggcgaccttttgaagtgacagggagagaagaatttttttctttaatcccaccgcctctcctcgctgctcccttttgcactgaggcttaaggtttgaagactcgagggtaaaattgggccgctttcattctagtttggacaacggtttcatcttcagcaaaagcctctcattcgtagccccccccagctggaaaatggtctgctctgcgaatcgaaggaagaggcccagcagaagggactcgctgagccaccccccgccccactccatgttggctgtgctctcaggctggcaccatgcccccccctgcagaggtgacggacccgtcccatgcccccgccgtcctgcgccagctcaatgaacagcggctccgtggcctcttctgtgacgtcaccctcatagccggagacaccaagttccctgctcaccgcagcgtcctggctgcttcaagtcccttcttcagagaggccctgctcacttcagccccactaccccttccaccagctactgggggcgccgcacccaaccctgccaccaccacagctgcctcttcctcctcctcctcttcctcgtcttcttcctcttcttcctcctctgcttcttcttcttcttcctcttcctcttcctctccccctccagcctctccccctgcttcttccccaccccgggtcctggagttgccaggagtcccagcagctgcgttttctgatgtcctcaacttcatctacagcgcccggctcgcactgcctggtggtggaggggacggggcagctgtagcagagattggagctttggggcgccgtctgggcatctcccgccttcagggcctgggggagggaggtgatgcctgggtacctcctaccccagcccccatggccacctcgcagcctgaagaggacagctttgggcccgggcccaggccagctggggagtgggagggtgacagggctgaggcccaggcccctgacttgcagtgctccctgccccggcggcccctcccctgcccccagtgtggaaaaagcttcatccatcccaaacggctgcagacccatgaggcccagtgccgacgaggggccagcacgcgggggtctacagggctgggagctgggggcgctggccctggtggtcctgcaggggtggacgcctcagccctgcctccaccagtgggcttccgagggggccccgagcacgtggtgaaggtggtgggcggccacgtgctgtatgtgtgcgcggcctgcgagcgttcctacgtgaccctgtccagtctgaagagacacagcaatgtacactcgtggcggaggaagtacccctgccgctattgtgagaaagtgtttgctctggcggagtaccgcacgaagcatgaagtgtggcacacgggggagcgcaggtaccagtgcatcttctgttgggagacctttgtcacttactataacctgaagacccaccagcgagccttccacggcattagcccgggcctccttgccagtgagaagacacccaatggaggctacaagcccaagctcaatacactcaagctctaccgcctgctccccatgcgggcagccaagcggccctacaagacctacagccagggagccccggaggctcccctttctccaaccctcaacacaccggcccctgtggcaatgccagccagcccgccgcctgggcctccacctgccccagagcctggccctccaccctctgtcatcacttttgcccacccagccccctctgtcattgtccatgggggcagtagcagtggtggaggggggagtgggacggccagcacaggagggtcccaagctgcctcggttatcacttacactgctcccccgaggccacccaagaaacgagaatacccacctcctccccctgagcctgcagccacacccaccagcccagccacagcagtcagcccagccaccgctgcagggccagccatggccaccaccacggaggaggccaagggccggaatccacgggctggaaggactctgacttacacagccaagccagtgggcgggattggtggaggtgggggtccccccacaggggctggccggggcccctctcagctgcaggctccacctccactgtgtcagatcactgtgcgaataggggaggaggccatcgtcaagcgccgcatctcagagactgacctgcgtcctggggagctgagcggagaggagatggaggagagtgaggaggacgaagaggaggaggacgaagaggaggaggaggaggatgaggaggaatcaaaggctggtggggaggaccagctctggaggccctactactcctacaagcctaagcgcaaggctggagctgctggaggtgccagtgtggggggcagtgggctgccccgaggccgccggccaccacgttggaggcagaagctggaacggaggagctgggaggaaaccccagcggccgagagcccagcgggacgtgcccgcacagagcggaggcaccgatgcggggactgtgcccagaccttcaccaccctgagaaagctgcggaagcaccaagaggcccacggtgggggctcccacagctcccgggccggacggaggccctccacccgctttacctgcccccactgcgccaaggtgtgcaagaccgcagctgccctgagccgccacgggcagaggcatgctgctgagcggcccgggggcaccccaacccctgtcattgcctattccaagggcagcgctggcaccaggcccggggatgtcaaggaggaagccccccaagagatgcaagtctcctcatccagcggtgaggcaggtggcgggagcactgctgctgaggaagcttccgagaccgcctcactccaggaccctatcatttcagggggtgaggagcccccagtagtggcaagcgggggcagctatgtatacccacctgtgcaggaatttccactggccttgattgggggcggccgggaacctggcggtggcaggggaaaatctgggagtgaagggccagtgggggctggtgagggggaccggatggaggggataggggctgccaaagtcactttctaccctgagccctacccgctcgtctatggcccccagctccttgccgcctacccttacaacttcagtaacttggccgctctcccggttgctctcaacatggtcctacctgatgagaagggtgcgggggcccttcccttcctaccaggggtctttggctacgcagtgaatcctcaagcagcaccccctgccccaccaacaccacctcccccaactcttcctccaccaattccccctaagggagaaggggaaagggcaggggttgagagaacccagaagggcgatgtggggtgaaccctggggctcaatccccctttcaccagatgccaccctccctgaaccccccaccactaccagctccctggcctccctgccccttgggagccccttcacactcttgtgcagggacttgggggcccctggagctcaggggtcaggctgctttgtgtgagatgtagttttcccatctcctgggaagggatctttcgaggttcccctctcagtcttcctccagggaatggcctccatgaggggcagggccagcttccatcccttctccagcccttggggcaactgagcaatatacttaacctgaatctctactcacagcccccaccagctctgaatgtctaacctgctcccctgattcgtaaacctaggggaaaccatctctctcacctaatgacccgccttgttctgaagctttctctaagcccttcccagttgcttcctagcacattccattctttgtggcccagggcctggaccagaccattgtgatacctgaccccgcccacctgggagtgtggctttgggtttcatccttccccagcgtgggtctctacgtccctgtttcccttgtatcaagacaccttcctcagcttccatgcctttggatcttccatgttcctccccatattcctggacttcggagatggcctctcccaagccaggtcaaggaggtttgggggagggttgcccctctgcccctctgttctgtggctgagcactttcccagtccagggcagggaaatattggccctatcttgacccccaaatccagtgagctccagattcttccaaggcaaaagaggtaagcagatcacacctctttctgcctctacatatggcctattctgggctagaccagatttgggggccaggagggaagaactccatatgggatggagaagggaatctactttctccctgtttttttttcctgatggtttctcccagactagaccaaatagccagaaaaatgataggggtcggatgggtgggtaagcccaggatttgcacatgaccttccatccttacctgtattcccatctccccagtgtcactcccctcaccaatcactccagatggttttgggggaaccattctactcttctggtgggctttggggtatccccaccaactttcccttcaaaatagcaccttacaccccatctttgactcagttccccacacccaaagatcccagcctagggatggggtacagggactttaaatagtccctaatccctaatttgcactagttaaccctggtcagggtccctgtatttccttccagtgggggagataaatgtttgctcctaattctctttgaaaactgggcctccctgctctgtgattggataaatatttcccatcccacccacctccccccaaaaaatagctcacaaggggagagccagtatgggggagcaaatttgacaaatgggaattagaggagtgcagttttaaaaggaaaagttgctgtcatcaaaatggcagccttttccccagctactgtttttggggccaagatggctgccctagcagcaatcactgccaagggcaagatcatggcttttggagggaggtgagtttagggagggccaggaccatcctcctacccctcataccctcccagcatatacaaaaggggaggttttagacaggctccctgaatgttaaccacagaggagtcactccttcattcctcctctgtctctttgcacttttcttggtcttggccacagcctgagtgacgaatttcctactgaatgtaccaagttccaatttttaagggggggaaaggtttcaaatggggaaaaacacacaaaaaaaaaatcactaaaaattcccacaaatcttgtttctggcactttagaaaaactgcaaaaaaatacgtaataaagaatacatatatatatatctacacacaaattatatatctatctatctatacagcggaaccacaagagagactgaggaaggcctggaggcaggggcagaggtgacgacagtgcccctatatccttaacccatactcctctgaggcaaacaggcatgggaaaatggaagggttgaggatggaccggagaattggaacttcagaataggtcaaaattccaaaaccatggacatttttttttgggagaattgagattgtagacattttttttttcttaaatatgatcaaggaaaatagcttccagaatgtggtggttctgggcaacaaatgagattgtggcgacgtggagattaaaatatatgtatttgagctggggaatttgaatattgtgagtttcagatgttggaaatttgggattttgcagttttgtcttttgaaaatgatcaagtcttgtcagttcgtgccctctttccccatgttccctgggaagacgggtggtggcagagtgagaaggccactggttctgtgccgcagcacgcaaaatttagaattctacagactagctctatacgtagtgaggacccagatttagagaaactgaccaatatttatctccgcatttgtgtgtgtgtccaactctgtaggccaataaaccaacaagacaaatgaactgtgctccacaaaaaaaaaaaaaaaaaaaaa

SEQ ID NO: 206459 - DNA, 3042 bp, Artificial Sequence
  derived and/or modified sequence
atgcccccccccgccgaggtgaccgaccccagccacgcccccgccgtgctgagacagctgaacgagcagagactgagaggcctgttctgcgacgtgaccctgatcgccggcgacaccaagttccccgcccacagaagcgtgctggccgccagcagccccttcttcagagaggccctgctgaccagcgcccccctgcccctgccccccgccaccggcggcgccgcccccaaccccgccaccaccaccgccgccagcagcagcagcagcagcagcagcagcagcagcagcagcagcagcagcgccagcagcagcagcagcagcagcagcagcagccccccccccgccagcccccccgccagcagcccccccagagtgctggagctgcccggcgtgcccgccgccgccttcagcgacgtgctgaacttcatctacagcgccagactggccctgcccggcggcggcggcgacggcgccgccgtggccgagatcggcgccctgggcagaagactgggcatcagcagactgcagggcctgggcgagggcggcgacgcctgggtgccccccacccccgcccccatggccaccagccagcccgaggaggacagcttcggccccggccccagacccgccggcgagtgggagggcgacagagccgaggcccaggcccccgacctgcagtgcagcctgcccagaagacccctgccctgcccccagtgcggcaagagcttcatccaccccaagagactgcagacccacgaggcccagtgcagaagaggcgccagcaccagaggcagcaccggcctgggcgccggcggcgccggccccggcggccccgccggcgtggacgccagcgccctgcccccccccgtgggcttcagaggcggccccgagcacgtggtgaaggtggtgggcggccacgtgctgtacgtgtgcgccgcctgcgagagaagctacgtgaccctgagcagcctgaagagacacagcaacgtgcacagctggagaagaaagtacccctgcagatactgcgagaaggtgttcgccctggccgagtacagaaccaagcacgaggtgtggcacaccggcgagagaagataccagtgcatcttctgctgggagaccttcgtgacctactacaacctgaagacccaccagagagccttccacggcatcagccccggcctgctggccagcgagaagacccccaacggcggctacaagcccaagctgaacaccctgaagctgtacagactgctgcccatgagagccgccaagagaccctacaagacctacagccagggcgcccccgaggcccccctgagccccaccctgaacacccccgcccccgtggccatgcccgccagccccccccccggccccccccccgcccccgagcccggccccccccccagcgtgatcaccttcgcccaccccgcccccagcgtgatcgtgcacggcggcagcagcagcggcggcggcggcagcggcaccgccagcaccggcggcagccaggccgccagcgtgatcacctacaccgccccccccagaccccccaagaagagagagtaccccccccccccccccgagcccgccgccacccccaccagccccgccaccgccgtgagccccgccaccgccgccggccccgccatggccaccaccaccgaggaggccaagggcagaaaccccagagccggcagaaccctgacctacaccgccaagcccgtgggcggcatcggcggcggcggcggcccccccaccggcgccggcagaggccccagccagctgcaggcccccccccccctgtgccagatcaccgtgagaatcggcgaggaggccatcgtgaagagaagaatcagcgagaccgacctgagacccggcgagctgagcggcgaggagatggaggagagcgaggaggacgaggaggaggaggacgaggaggaggaggaggaggacgaggaggagagcaaggccggcggcgaggaccagctgtggagaccctactacagctacaagcccaagagaaaggccggcgccgccggcggcgccagcgtgggcggcagcggcctgcccagaggcagaagaccccccagatggagacagaagctggagagaagaagctgggaggagacccccgccgccgagagccccgccggcagagccagaaccgagagaagacacagatgcggcgactgcgcccagaccttcaccaccctgagaaagctgagaaagcaccaggaggcccacggcggcggcagccacagcagcagagccggcagaagacccagcaccagattcacctgcccccactgcgccaaggtgtgcaagaccgccgccgccctgagcagacacggccagagacacgccgccgagagacccggcggcacccccacccccgtgatcgcctacagcaagggcagcgccggcaccagacccggcgacgtgaaggaggaggccccccaggagatgcaggtgagcagcagcagcggcgaggccggcggcggcagcaccgccgccgaggaggccagcgagaccgccagcctgcaggaccccatcatcagcggcggcgaggagccccccgtggtggccagcggcggcagctacgtgtacccccccgtgcaggagttccccctggccctgatcggcggcggcagagagcccggcggcggcagaggcaagagcggcagcgagggccccgtgggcgccggcgagggcgacagaatggagggcatcggcgccgccaaggtgaccttctaccccgagccctaccccctggtgtacggcccccagctgctggccgcctacccctacaacttcagcaacctggccgccctgcccgtggccctgaacatggtgctgcccgacgagaagggcgccggcgccctgcccttcctgcccggcgtgttcggctacgccgtgaacccccaggccgccccccccgccccccccaccccccccccccccaccctgcccccccccatcccccccaagggcgagggcgagagagccggcgtggagagaacccagaagggcgacgtgggctag

SEQ ID NO: 206460 - DNA, 3042 bp, Artificial Sequence
  derived and/or modified sequence
atgcctcctcccgcggaagttacggatccatcacatgcacctgctgttcttagacagctgaatgagcaaagattgcgaggcctcttttgcgatgtgactttaattgccggggacaccaagtttcccgcgcaccggtctgtgttggctgctagctcgccctttttcagggaggcccttctgactagcgctcctttgcccttgccgccagccaccggaggcgctgcccctaatcccgccactaccacagccgcttcatcttcctcttcaagctcctcgtcttccagctcctcttcaagttctgccagttctagcagttcgagtagttcctcctcccctcctcctgctagtcctcccgcctcatcacctcctcgcgtcctcgagctgcccggggtcccggccgcggctttctcggatgtcctgaactttatctatagcgcgcggttggctctcccaggaggagggggtgacggcgccgcagttgctgagatcggcgctctgggacgaagactcggcatcagtagactgcagggcctgggtgagggcggagatgcctgggtcccacccaccccagctccaatggctaccagtcagccggaagaagactcattcggtcccggcccacgcccagcaggagaatgggagggggatagagctgaggcccaggcgcctgacttacaatgcagtcttccccgcaggccactcccttgccctcagtgtggtaaatcgtttattcatcctaagcggctgcagactcatgaggcccaatgtaggcggggagcatcaacacgggggtctactggtctcggcgctggcggggcaggcccaggtgggcccgctggtgtcgacgcgagtgccctgcctccccctgtgggattcaggggcgggccagagcacgtggtgaaagtagtggggggacacgtcctctacgtctgtgctgcgtgcgaaagaagctacgtgacccttagttctctgaaaaggcattctaatgtgcacagctggcgtaggaagtatccatgccgttactgtgaaaaagtgtttgcattagctgagtacaggacgaagcatgaggtatggcacacgggggagcgtagatatcagtgcattttctgttgggagactttcgtaacctactataatctcaaaacacatcagcgggctttccatggaattagccctggcttgctggcttctgagaaaaccccaaatggcggatacaagcccaagctgaacacccttaagttgtatcggctgctgcctatgcgggccgccaaaaggccctacaagacctattctcagggtgcacctgaggcgccccttagccctaccttgaacactcctgcacccgttgccatgccagccagtcccccacctgggcctccacccgcccccgaacccgggccacctccatctgtgataactttcgcccaccctgcaccaagcgttatcgtgcatggcgggtctagtagtgggggagggggaagcgggacagcgtccactggcgggtcgcaggctgccagcgtgattacatatacagcccctccccgtccacctaagaagcgagagtaccctcccccgccccctgaaccggctgctacacccacatcccccgccaccgcagtttccccggccacagcagctggaccggccatggcgaccacaactgaggaagccaaaggtcgaaaccctcgagctgggcggaccttgacctataccgccaagccagtagggggaatcggtggcggcgggggacctccgactggtgctggaagaggccctagtcagctacaggctcccccacccctctgccaaatcaccgtgcggattggggaagaagccatcgtgaagaggaggattagcgaaaccgatctccgaccaggcgagcttagtggtgaggaaatggaagagtctgaagaagatgaggaggaggaggacgaggaagaggaggaggaagacgaggaggagagcaaagcaggtggtgaggatcagctgtggagaccctattactcatataagcctaaacgaaaggccggggcagccggtggcgccagtgtcgggggcagcgggctgcctcgggggaggcgaccaccccgttggcggcagaagcttgaaaggcgtagctgggaagagacccctgccgccgagagcccagccggaagagctcgcacggagcgtagacacagatgtggggattgtgcacagacattcaccaccctgcgtaagttgaggaagcaccaggaggcccacggcggtgggtctcactcaagcagagctgggcgccgccctagcacccggttcacatgtccacactgtgcaaaggtatgcaagacggcggccgccctctctagacacggtcagagacacgccgcagagcggcccggcggtacaccaacccctgtgattgcatatagcaagggctcagccggcacccgcccaggcgatgtgaaggaggaagcccctcaggaaatgcaagtttctagcagcagcggagaggctgggggcggaagcactgccgccgaggaagcatccgagaccgcctccctgcaagatcccatcatatcaggcggggaggagcctccagtcgtggcctcaggggggtcttacgtgtacccacccgtccaggaattcccattagcattgattggaggaggcagggaacctggggggggtagaggaaagagcggatctgaggggcctgtgggagccggtgaaggcgatcggatggaagggataggagctgccaaggtcacattttatcccgaaccctaccccttggtgtacggcccccagctgctggccgcctatccctataatttctctaatctagcagccctgcctgtggccttaaatatggtgctacccgatgagaagggcgccggagctttgccattcttgccaggcgtgtttggctacgcagtgaatcctcaagccgctcctcccgcaccccccaccccaccgccaccgacacttcccccaccaattcctccgaaaggcgagggtgaaagagcaggcgtggaacgtacccagaaaggggatgttggctag

SEQ ID NO: 206461 - DNA, 3042 bp, Artificial Sequence
  derived and/or modified sequence
atgcctcctccagcagaggtaaccgacccaagtcatgctcctgccgtgcttcggcagctgaatgaacagcgcttgcgcggccttttttgtgacgtgaccctgatcgccggggatacaaagttccctgcgcatcgatctgttctcgccgcctcctccccctttttcagggaggccttgcttacatcggcgccattgcctcttcctcccgccacagggggggctgctccaaatccagctaccacaaccgctgcttcttcctctagctcttcatccagtagtagtagctcatcctcatcttccgcatcatcgtccagttctagctcctcgagctcccccccgcctgcctctccacctgcctctagccccccccgcgttcttgagctgcccggcgttcctgcagcagctttctccgacgtgcttaacttcatttacagcgctcgtttggccttgcccggaggtggaggtgatggcgcagcggtggcggagattggcgcactcggtagacgtctgggtatctcccggctacaaggactcggtgagggcggggatgcttgggtgccccctacccctgctcccatggctacatctcagccggaagaagattctttcggcccggggccccgaccagcaggcgagtgggaaggagatcgcgcagaggcccaggcgccagatttgcagtgctctctcccacgccggcccttaccttgtcctcaatgcgggaagtcatttatccaccctaaacgactgcagacccacgaggctcagtgccgaagaggcgcatccacaagaggatccacgggattaggggccggtggggccggacctggaggccctgccggggtcgatgcaagcgcccttccaccacctgtggggtttaggggcggccccgagcatgtggttaaggtggtcggaggtcacgttctatatgtttgtgcggcctgcgagaggtcatacgttacgttgtcaagcctcaaacgccatagtaacgtccactcctggcgccggaagtacccgtgtcgctattgcgaaaaggttttcgcactggctgaataccgaaccaagcacgaggtgtggcacaccggagaacgaagataccagtgcatcttctgttgggaaacatttgtaacatactataacttgaaaacccaccaacgtgctttccacggcatttcgccaggtctgctggcctcagagaaaacccccaatggtgggtacaaacctaaactcaacacccttaaactctatcgactgcttcccatgcgtgctgctaagcgtccttataagacatactcccaaggcgcccctgaagcgccgctctcccctaccttaaacacccctgcacctgttgccatgcccgcctcacccccaccagggccacccccagcccctgagccaggaccccctccctctgtcattacattcgctcaccccgccccttctgttatcgtgcacggcggcagctcaagcggcggtggggggagtgggactgctagcacagggggatcgcaggctgccagtgtgatcacctacacagcacctccaaggccacccaagaaacgggagtatccgcctccgcctcctgagccagcagctaccccgacatcgcccgctaccgcagtgagtccagctaccgccgccggcccagcaatggctacaacaactgaagaagcaaaagggcgtaatccgcgggccggccggactctgacatacaccgcaaagccagtgggtggcattggaggtgggggaggtccacccactggtgccggacgagggccttcacagctgcaggctcctccacccctctgtcagatcaccgtgagaataggcgaagaggcgatcgtgaaacggcgcatatccgagaccgacctaagaccaggcgagctctccggggaggagatggaggaatcagaggaagacgaagaagaagaggatgaagaagaagaagaagaagacgaagaggagtctaaggctggaggcgaggaccagctatggagaccatattactcatataaaccaaagcgcaaggcgggagcggccggcggtgcctcagtggggggaagtgggctgcctcggggaaggcgaccacctcgatggagacagaagctggagagacgctcctgggaggaaaccccagccgctgaatcccctgcggggagagctaggactgagcgtcgccatagatgcggggattgtgcccaaaccttcacaacactgagaaaactgcgcaagcaccaagaagcacacggagggggatctcactctagccgggccggaagacgtcctagcacacgctttacctgtccacactgcgcgaaggtatgcaaaacagcggctgctctctcccgacatggccagcggcacgcagcagaacgccccggtggaacaccaactcctgtgattgcctattctaaaggcagcgcaggaaccaggcccggcgacgtgaaggaggaggccccacaggaaatgcaggtttcaagctcctccggggaggccgggggtggaagtacagccgccgaagaggcatccgaaacggcatcactccaagaccctatcatctcgggcggagaggaaccaccggttgttgcgtctggaggttcatacgtatatccacccgtgcaagaatttcccctcgccctgatcggcggcggccgggagcccggcgggggaagaggaaaaagtggcagtgagggaccagttggagcaggggagggagatcgcatggaggggatcggggcagctaaagtgacgttttatcctgaaccctaccccctggtgtacggccctcagctcctcgctgcctatccctacaatttctcgaacttggccgccttgcctgtagccctgaatatggtcctccccgacgagaagggcgccggcgccctgcccttcttgccaggtgtgtttggctacgcagtcaatccccaagccgctccgcctgcgccaccaactccgcctccccccactctgcctccaccaattccccctaaaggcgaaggcgagagagcaggtgtcgagcggactcaaaaaggtgatgtcggctag

SEQ ID NO: 206462 - DNA, 90 bp, Artificial Sequence
  derived and/or modified sequence
atggccggccgggtgcccagcctgctggtgctgctggtgttccccagcagctgcctggccttccgcagccccctgagcgtcttcaagtag

SEQ ID NO: 206463 - DNA, 87 bp, Artificial Sequence
  derived and/or modified sequence
atggccggccgggtgcccagcctgctggtgctgctggtgttccccagcagctgcctggccttccgcagccccctgagcgtcttctag

SEQ ID NO: 206464 - DNA, 3042 bp, Artificial Sequence
  derived and/or modified sequence
atgcctcctcctgctgaggtgacagaccccagccacgccccagctgtgctgcggcagctgaatgagcagaggctgcggggcctcttctgtgatgtgaccctgattgctggggacaccaagtttcctgcccacaggtctgtgctggccgccagcagccccttcttccgggaggccctgctgaccagcgcccccctgcccctgcccccagccactggaggagctgcccccaacccagccaccaccacagctgccagcagcagcagcagcagcagcagcagcagcagcagcagcagcagcagcgccagcagcagcagcagcagcagcagcagcagccccccaccagccagccccccagccagcagccccccccgggtgctggagctgcccggggtgcctgctgctgccttcagtgatgtgctgaacttcatctacagcgcccggctggccctgcccggcggcggcggagatggagctgctgtggccgagattggagccctgggccggcggctgggcatcagccggctgcagggcctgggggagggcggagatgcctgggtgccccccaccccagcccccatggccaccagccagcctgaggaggacagctttggacctggccccaggcctgctggggagtgggagggggacagagctgaggcccaggccccagacctgcagtgcagcctgccccggcggcccctgccctgcccccagtgtgggaagagcttcatccaccccaagaggctgcagacccatgaggcccagtgcagaagaggagccagcacccggggcagcacaggcctgggcgctgggggcgccggccctgggggccctgctggggtggatgccagcgccctgcccccacctgtgggcttccggggcggccctgagcacgtggtgaaggtggtgggcggccacgtgctgtatgtgtgtgccgcctgtgagaggagctatgtgaccctgagcagcctgaagaggcacagcaatgtgcacagctggaggaggaagtacccctgccgctactgtgagaaggtgtttgccctggccgagtaccgcaccaagcatgaggtgtggcacactggagagcggcgctaccagtgcatcttctgctgggagacctttgtgacctactacaacctgaagacccaccagagggccttccacggcatcagccctggcctgctggccagcgagaagacccccaacggcggctacaagcccaagctgaacaccctgaagctgtaccgcctgctgcccatgagagctgccaagaggccctacaagacctacagccagggcgcccctgaggcccccctgagccccaccctgaacaccccagcccctgtggccatgcctgccagccccccacctggccccccaccagcccctgagcccggccccccacccagcgtcatcacctttgcccacccagcccccagcgtcatcgtgcacggcggcagcagcagcggcggcggcggcagcggcacagccagcactggaggcagccaggccgccagcgtcatcacctacacagccccaccccggccccccaagaagcgggagtacccacctcctcctcctgagcctgctgccacccccaccagccctgccacagctgtgtccccagccacagctgctggccctgccatggccaccaccacagaggaggccaagggcaggaacccccgggccggccgcaccctgacctacacagccaagcctgtgggcggcatcggcggcggcggcggcccccccaccggggccggccggggccccagccagctgcaggcccccccacccctgtgccagatcaccgtgcgcatcggggaggaggccatcgtgaagaggcgcatcagcgagacagacctgcggcctggagagctgtctggagaggagatggaggagagcgaggaggatgaggaggaggaggatgaggaggaggaggaggaggatgaggaggagagcaaggccggcggggaggaccagctgtggaggccctactacagctacaagcccaagaggaaggccggggctgctggaggagcctctgtgggcggcagcggcctgccccggggcagaagaccaccccgctggaggcagaagctggagcggcgctcctgggaggagaccccagctgctgagagccctgctggccgggccaggacagagcggcggcaccgctgtggggactgtgcccagaccttcaccaccctgaggaagctgaggaagcaccaggaggcccacggcggcggcagccacagcagcagagctggaagaagacccagcacccgcttcacctgcccccactgtgccaaggtgtgcaagacagctgctgccctgagcagacatggccagagacatgctgctgagaggcctgggggcacccccacccctgtgattgcctacagcaagggcagcgctggcaccaggcctggagatgtgaaggaggaggccccccaggagatgcaggtgagcagcagcagcggggaggccggcggcggcagcacagctgctgaggaggccagcgagacagccagcctgcaggaccccatcatctctggaggagaggagccccctgtggtggccagcggcggcagctatgtgtacccacctgtgcaggagttccccctggccctgattggaggcggccgggagcccggcggcggccggggcaagagcggcagcgagggccctgtgggcgctggggagggggacaggatggagggcatcggggccgccaaggtgaccttctacccagagccctaccccctggtgtatggcccccagctgctggccgcctacccctacaacttcagcaacctggccgccctgcctgtggccctgaacatggtgctgcctgatgagaagggggccggggccctgcccttcctgcccggggtgtttggctatgctgtgaacccccaggccgcccccccagccccacccaccccacctccacccaccctgcccccacccatcccccccaagggggagggggagcgggccggcgtggagaggacccagaagggagatgtgggctag

SEQ ID NO: 206465 - DNA, 3042 bp, Artificial Sequence
  derived and/or modified sequence
atgcccccccccgccgaggtgaccgaccccagccacgcccccgccgtgttgagacaactaaacgagcagaggttacgagggctattctgcgacgtgaccttaattgcgggagacacaaagttccctgcccatcgaagcgtgctggcggcatcatctccattctttcgcgaggccctgctcacttccgcacccctgccgctgcctcccgcaactgggggggcggcacccaatcccgccaccacgactgcggcttcttctagttcctcttcaagcagcagtagctcttcctcatcctcttccgctagttcttcctcatcatcatcgtcatcaagccctcccccagccagccccccagcctcctccccaccacgcgtgttagaactgcctggcgtcccagcagccgctttcagcgatgtattgaacttcatctactcagccaggcttgcactgcccggaggaggtggagacggggctgctgtggccgaaatcggcgccctggggaggaggcttggcatctcccggcttcagggccttggtgagggcggagacgcctgggtcccccctacacctgcccccatggcgacctcccaacccgaggaagattcatttggccctggaccacgacccgccggtgaatgggaaggcgaccgcgccgaggcgcaggcccctgatcttcaatgctccctcccacggcgtcctttgccttgtcctcagtgtggaaagagctttatccacccaaaaaggctgcagactcatgaagcacagtgtcggagaggggccagtactaggggctctaccggactcggcgctggcggtgcgggcccaggcggacctgccggggtggacgcgtccgcgctgccaccacccgtgggatttcgcggcggccctgaacacgtggttaaggttgtgggagggcacgtactttacgtttgtgctgcttgcgaacgttcatatgtcacactgtccagcttgaagagacactctaacgttcatagttggcgacgaaagtacccatgcaggtattgtgaaaaagtgttcgctttggctgaatataggacaaagcacgaggtgtggcacactggagaacgacgctatcagtgcatcttctgctgggaaacctttgtaacatactataatctgaagactcaccagagggcattccacggaatctcccccggactactggcatctgagaaaaccccaaatgggggatataagcccaagctaaataccttaaagctgtaccgactcttgcctatgcgagctgctaagaggccctataaaacctactcacagggtgcacctgaggctcccctgtcccctactctgaacacacctgcaccagttgccatgccagcctcccctcccccaggtcccccccccgctccagagcccggaccccccccctcagtgatcaccttcgcgcaccctgctccttctgtcattgtgcacggagggtcctcttccggcggaggagggtcaggcacagcatcaactgggggcagtcaggctgcctcagtgatcacatacacagcgcctccgcgaccccccaaaaaacgagagtaccccccacctcccccagagcctgccgctactcctaccagcccagctaccgcggtatcccccgccacagcagccggtcctgccatggctaccactacggaggaggcaaagggtcgtaaccctagggcaggacgcacgctcacctacacggcgaagcccgttggggggatcgggggaggcggtgggcctccaaccggggccggccgcggacctagccaactgcaggcgccccctccattgtgccaaatcacagtccggatcggggaggaggctatcgtgaaacggagaattagcgagacggatctgcgtcctggcgaactttcaggggaagaaatggaagagtcagaagaagatgaggaggaagaagatgaagaggaggaggaagaagacgaagaagaatccaaagcgggtggcgaagaccagctgtggcgaccttactatagctataagccaaaaaggaaagctggggcggcaggcggcgcctctgttggcggctcaggattacccagggggcggagaccccccagatggcgacaaaagttggagcggcgatcatgggaagagacacctgccgctgaatcacctgctggtcgcgccagaactgaacgccgtcatcgatgcggagactgcgctcagacgtttaccactctgcggaaactgagaaagcaccaggaggcccacggcggcggcagccactcatcccgggcaggccgtcggccttcaacccgatttacctgtccacactgtgccaaggtgtgtaaaaccgctgccgctctgtccagacacggccagcggcacgccgcagagagacccgggggaacccctacgcctgttattgcctattccaaaggttcagcagggactagaccgggcgacgtgaaggaagaagccccccaggagatgcaagtcagctcttccagtggcgaagcgggcggaggaagcactgccgccgaggaggccagtgaaacagcatctctgcaggatcccattatttcgggcggtgaggagccaccagtagtggcaagcgggggcagctacgtctatccacccgttcaggagttcccactcgcgctgattggcgggggccgcgagccagggggtggtcggggaaagtctggtagtgagggtcctgtgggggccggcgaaggagatcggatggagggaataggcgcggcgaaggtgaccttctacccggagccatacccactggtctatggcccccaattgctggcggcctatccctacaacttttccaacctggccgcacttccagtcgcattaaacatggtgctgcctgatgagaagggggcaggcgcgttgccctttctgcctggggtcttcggctacgcagttaatccacaggccgccccacccgcaccacccactccccccccaccaaccttaccgccccccatcccccccaaaggtgagggagaaagagccggcgtagagaggacacagaagggagacgtgggttag

SEQ ID NO: 206466 - DNA, 3042 bp, Artificial Sequence
  derived and/or modified sequence
atgcccccccccgccgaggtgaccgaccccagccacgcccccgccgtcctgcgacagctgaacgagcaaaggctgcgaggccttttttgcgatgtgactctgatagccggagacactaaattccccgctcacaggtccgttcttgctgcttcgtccccgttctttcgcgaagctctgctgaccagcgcccccctgcccctcccccccgctactgggggggcagctcccaatcctgcgacaacaaccgcagcgagcagcagctcttcatcttccagctcatcgagtagttcaagtagcagcgcgagctcatcatcaagctccagctcatctagccctccgcctgcctcaccacctgctagcagtcccccgagagtgctcgagttgcctggggtgcccgccgctgctttttcggacgtgctgaactttatctactctgcccggctagcgcttcctggagggggaggtgacggcgctgctgtggctgagatcggcgccttgggtaggaggctcggtatttcccggctgcagggcctcggagaagggggggatgcctgggttccacccacgccggccccaatggccactagtcagccagaggaagattcttttggccctggacctcggccagccggggaatgggagggcgaccgggctgaagctcaggcccccgatctgcagtgcagtctcccacgaaggccactcccttgcccccagtgtgggaaaagcttcatccacccaaaaaggcttcagactcatgaggcacagtgtcgacgtggcgcctcaaccaggggatcaaccggactcggagccggtggggccggaccaggcggccccgccggtgtcgatgcatcagcccttccccccccagtgggctttaggggcgggcctgaacacgttgtgaaggtcgtcggagggcacgtgttatacgtatgcgcggcatgcgaacggtcatacgtgactctgagttcactgaagcgacatagcaacgtgcacagctggaggagaaagtatccctgtagatactgcgagaaagttttcgccctggctgagtatcggaccaagcacgaggtgtggcacacgggggagagaagataccagtgcatcttttgttgggaaacattcgtgacgtattataacctgaagacgcaccagagggcatttcatggaattagccccggtctgctagcctctgagaaaactcccaatggggggtacaaacctaaactgaacacactgaaactttacagactgttacctatgcgagccgccaaaaggccttataaaacttacagccagggggcccctgaagcaccacttagtcctacattgaacacacccgcaccggtcgctatgccagcatccccacctccaggacctccccccgcaccagaacctggtccccccccctcggtcataacgttcgcacatcccgctcctagcgtgatcgtccacggcggcagttctagcggcggcggcgggagtggcaccgcttcaactggaggttctcaggcagcgagcgttattacttacactgctccaccaagaccccccaagaagagggagtaccctccccctccaccggagccggcggccacacctacatcccccgccaccgccgtttcccccgccacagcagcaggacccgccatggcaactaccacagaggaagccaagggaaggaaccccagggccggaaggaccctcacatataccgccaagccagtgggcggcatcgggggcggcggagggcctcccaccggggccgggagggggcccagccaactccaagcacctccacccttatgccagattacagtgagaatcggagaggaagccatagtaaaacggaggatttccgagaccgatctgcggcctggagagctgagtggcgaagaaatggaagagagcgaggaagacgaagaggaagaggacgaagaggaggaagaggaagatgaggaagagtctaaggcagggggtgaggaccagctgtggcggccatattatagttacaagcccaagcgaaaagctggagcagcaggcggtgcttcagttggtggctccggcctcccaagaggtaggcgtccaccgcgatggcgccagaaattggagagaaggtcctgggaggagacccccgccgcggagagtcccgccggtagggcccggaccgaacgccgacacaggtgtggcgactgtgcccaaacattcaccactctgcgaaagctgcgcaagcaccaggaagcacatggcggaggttctcacagttccagggctgggagacgaccttcaactcggttcacgtgtcctcattgtgcaaaagtctgcaagactgctgccgctctttcacggcatggacagcgtcacgccgcggagaggccaggaggcacacccacacccgtcattgcttactcaaaagggtcggccggcactcgccctggcgacgtgaaagaggaagcacctcaggaaatgcaggtttccagcagctccggtgaggctggtggggggtccaccgccgcagaagaggccagtgagacggcctctctacaagatcctattattagcggcggagaagagcccccagtagttgcaagcggagggtcatatgtctatcctcctgttcaagagttccctctcgctctgatcggtggaggacgtgagccagggggcgggaggggcaaatctgggagcgaaggtcccgtgggcgcaggagaaggagataggatggaggggataggagccgctaaagtcactttttaccctgagccttatcccctagtatacggtccccaactgctggcagcttatccctataattttagtaacctggcggctttgcctgtggccttgaacatggtcctgccagacgagaaaggagccggcgctctccccttcctacctggcgtgttcggttacgcagtaaacccccaggcggcccccccagccccgcccacacctccaccaccgactctgccaccaccaattcctccaaagggggagggcgagagagcaggagtcgaaagaacccagaagggagacgtgggctag

SEQ ID NO: 206467 - DNA, 3042 bp, Artificial Sequence
  derived and/or modified sequence
atgcctcccccagcagaagtgacagacccctctcatgctcccgctgtgctgagacaactcaacgaacagaggctgcggggactgttttgcgacgtcacactgatcgctggagacaccaagtttcctgcacatcgtagtgtactggccgcaagtagtcccttcttccgagaagctctgctcaccagtgcgccactgccacttcccccagctactgggggtgccgctccgaatcccgctacaactacggcagccagttcttctagcagtagctccagttcaagttctagctctagcagctccgcctcttcatcctcatcaagctcatcgtctagcccacctcctgccagtccaccagcaagctctcccccaagggtgctggagctgccaggagtccccgctgctgctttcagcgacgtgttgaatttcatatattctgcacggttggcgttgcccggaggaggcggagatggggctgcggttgctgaaattggagctttaggcaggaggttaggcatttccaggctccaggggttgggagaagggggagacgcatgggtccctcccactcccgcacccatggctacatcgcagccagaggaagactccttcggccctgggcctcggcctgcaggcgaatgggaaggagacagagccgaggcccaggccccagatctgcaatgcagcctcccgagaaggccgttaccatgtccacagtgcggcaagagtttcatccacccgaagcgtcttcagacacacgaggcccaatgtcgcagaggagcctcaactaggggctctacaggactcggcgctggaggggcaggacctggcggtccagctggcgtggatgcgtccgctctgcctccacccgttggattcaggggcggacctgagcatgtagtcaaggtagtgggagggcacgttctgtatgtttgtgccgcatgtgaacgctcttatgttaccttgtctagtcttaaaagacactccaatgtgcatagttggagacgcaaatacccgtgccggtactgcgaaaaggtattcgccctagccgagtaccggactaagcatgaggtgtggcacaccggtgagcgcagatatcaatgcatcttctgttgggaaactttcgtgacatattataatctcaagactcaccaacgggctttccatgggatctctccaggcttgctggcctccgaaaaaacccctaatgggggttataagcctaaattgaatactctcaagctgtatcgacttctccctatgagggccgcaaagaggccctacaagacgtattcccagggagcccctgaggctcctttgtcgcctacccttaacacacccgctcctgtagccatgcccgcttcacctccaccgggtcctccccctgcgccagagcctggacctcccccatccgttattacattcgctcaccctgccccatccgttattgtccacggcggttcaagcagcgggggaggcggtagcggtacagccagcactgggggaagccaggcggcttcagtgattacttacacagctcctccacggcctcctaaaaaaagggagtatccacctcctccacccgaacctgccgcaacccccacatctccagctactgcggtaagtcccgctactgctgccggaccagcgatggcaacaaccacagaggaggccaaaggaagaaatccaagagcgggaaggacgcttacatataccgccaaacccgtaggaggtattggcggaggtggcggacctccaactggggcaggtagaggcccatcacagctgcaagcccctccccctctgtgtcagatcacagtgcgaataggcgaagaagctattgtcaaacggcgaatctcagagactgatcttcgccctggagagctgtctggagaagagatggaagaatcagaagaggacgaggaggaagaggatgaagaggaagaagaagaagatgaggaagagagcaaggccggtggggaggatcagctgtggagaccctactattcctataagccaaaacgaaaagccggtgccgcaggaggtgcttctgtcgggggatcaggtctccctaggggcaggagacctcccaggtggcgccagaaattggaaagacgcagctgggaggagacccctgccgctgaaagtcctgcaggcagagctcggacagagaggagacaccggtgtggggattgtgcgcagactttcaccaccctgcgcaagctccggaagcaccaggaagctcatggaggaggctctcatagctcaagggcaggtcgcagaccaagcaccaggtttacttgccctcactgtgcgaaggtgtgcaagaccgccgcagcactcagtagacacgggcagaggcacgccgcagaacgacccggtggaactcctacccctgttatcgcatatagtaagggttctgccggtacccgtccaggagacgttaaagaggaggctccccaggagatgcaagtaagttcctcctcaggcgaagccggtggtggctctacggctgccgaggaggcaagcgagaccgccagtctgcaagatcctatcatcagcggtggggaggagccccctgttgtcgctagcggcggaagctatgtgtatcctccagtccaggagtttccactcgccctgattgggggagggagggaacctgggggagggagggggaagtctggttccgagggacctgttggagcgggagagggagaccggatggaaggcattggagcggcaaaggtgaccttttatccagagccttaccctctggtgtatgggcctcaacttttggcggcttatccgtacaatttctcaaatttagctgcactgccggtggcacttaatatggtgctcccggatgagaagggcgctggcgctctcccttttctccccggagtatttggctacgccgtgaacccccaagctgccccacctgccccaccaactcccccaccccctactctcccacctcccatacctccaaagggggagggcgagcgagccggtgtggagcggactcagaagggcgatgtgggctag

SEQ ID NO: 206468 - DNA, 3042 bp, Artificial Sequence
  derived and/or modified sequence
atgcccccaccagcagaggttactgatccttctcacgccccagccgtgctccgccaactgaacgaacaacgactgaggggcctgttttgcgatgtgactttgatagctggcgatactaagttccccgctcaccgcagcgtgctcgcagcctctagccctttctttcgggaagctcttctaacatcagcgccactgcccctgcccccagccaccggaggcgcagctcccaatcccgctacaactacggctgctagctcatcctcatcttcatcctcaagttccagtagtagctcctccagtgcgtcttctagttcgtcttccagctcctcttcccctccgccagccagcccccctgcctctagccctccaagggtgctagagctaccaggcgtcccggctgcggctttcagcgacgtccttaatttcatctatagcgcacggctggcactaccaggcggtgggggagatggagccgctgtggccgaaatcggtgcattaggcagaaggctgggcatctccagacttcagggcttaggtgagggaggtgacgcttgggtgcctcccactcccgcacccatggcgacaagtcagccagaagaagactcattcggtcctggtccaagaccagcaggtgaatgggaaggtgatcgcgctgaggctcaagcgccagaccttcagtgtagcctgcctcggagacctcttccctgcccacagtgtgggaaaagtttcatccacccgaagcgattacagacccatgaagcacagtgtcgacggggagctagtacaaggggctcaaccgggcttggggctggaggagccggacctggcggtcctgctggggtcgatgctagtgccctgccacccccagtcggtttccggggtggcccagaacatgtggtcaaggtggtcggaggccacgtgctttatgtctgcgctgcttgcgagcgttcttatgtgactctgtcttctctgaagcggcactctaacgtacattcttggcggagaaaatatccttgccgctactgcgagaaagttttcgctctagcagaatatcgaacaaagcatgaggtgtggcacaccggtgaacgcagatatcagtgtatcttttgctgggagactttcgttacctactacaaccttaagacccatcaaagagcattccatggcatttctccaggtcttttagctagtgagaagacaccaaacggcggatataagccaaaacttaacaccttgaaactttaccggctccttccgatgagagctgccaaaaggccttacaagacttatagtcaaggggcacctgaagctcccttgtctcccaccctgaatacacctgcacctgtggcgatgcccgcaagccccccacccggaccaccaccggctcctgaacctgggccacctccttccgtgataactttcgcgcatccagcacctagcgtcatcgtccatggtgggagctccagcgggggaggcggaagcgggacggcctcaactggtgggtcccaggccgcatccgtgataacatacactgctcctcctcggccacctaagaaacgagagtatcccccacctcctccagaaccagctgctaccccaacctcaccagcgacagccgtatcacctgccactgctgccggtcctgctatggccacaactaccgaggaagccaaagggcgtaaccctcgagcaggcaggacactcacatacacagctaagccagttgggggaattggcggaggaggtgggccacctacgggggcagggcgtgggccttctcaacttcaggcacctccgcctctctgccaaatcacagttcgcatcggagaggaggccatagtcaaaaggaggatatccgaaactgatctgcgtcctggagagttgtctggcgaggagatggaggaatccgaggaagatgaagaggaagaagacgaagaggaagaagaagaagatgaagaagagtcaaaggccggaggcgaagaccagctttggaggccttactactcctacaagccaaagaggaaggccggagcagccggtggcgctagcgtgggcggttccggcctcccccgaggtcgacgtcctcccaggtggcggcagaaactggaacgtcgcagctgggaggaaacccccgcagccgagtcaccagccggtcgagctaggaccgaacgtaggcatcgttgcggagactgcgcccagacgttcacgactttaaggaagctcagaaaacatcaagaggcccacggtggcggatcacatagcagccgcgctggtcggaggccttctaccaggtttacatgcccacactgtgccaaggtgtgcaagaccgcagcggctctttcacgccatggtcaacggcacgcagccgagaggcccggagggaccccgacccctgtgatcgcatactctaaaggtagcgccggaactaggccaggcgacgtgaaagaggaagctccacaagaaatgcaggtctctagttcgtccggggaagctgggggaggcagtactgctgccgaggaggccagcgaaaccgcgagcctgcaggacccgatcatcagcgggggtgaggagcctccagtcgttgcctccggcggttcttacgtttatcctcccgtgcaggagttccctctggctctcattggcggtggacgcgaacccggaggaggacgtggcaaatctggctctgaaggaccagtgggcgctggcgaaggggacagaatggaggggattggcgctgccaaagtgacgttctatcctgagccttatccattggtgtatggacctcagctcctggccgcatacccctacaactttagtaacctggcagccctccctgtggcacttaatatggtgcttccagatgagaagggggctggtgccctcccctttctgcccggagtattcggctacgccgtcaatccccaggcagctccacctgcccctcccacgccccctcctccaacactgccgccacctatcccccctaagggggagggggaacgcgctggggtagagagaacccagaagggagacgtgggttag

SEQ ID NO: 206469 - DNA, 5891 bp, Artificial Sequence
  derived and/or modified sequence
cagggagagaagaatttttttctttaatcccaccgcctctcctcgctgctcccttttgcactgaggcttaaggtttgaagactcgagggtaaaattgggccgctttcattctagtttggacaacggtttcatcttcagcaaaagcctctcattcgtagccccccccagctggaaaatggtctgctctgcgaatcgaaggaagaggcccagcagaagggactcgctgagccaccccccgccccactccatgttggctgtgctctcaggctggcaccatgcccccccctgcagaggtgacggacccgtcccatgcccccgccgtcctgcgccagctcaatgaacagcggctccgtggcctcttctgtgacgtcaccctcatagccggagacaccaagttccctgctcaccgcagcgtcctggctgcttcaagtcccttcttcagagaggccctgctcacttcagccccactaccccttccaccagctactgggggcgccgcacccaaccctgccaccaccacagctgcctcttcctcctcctcctcttcctcgtcttcttcctcttcttcctcctctgcttcttcttcttcttcctcttcctcttcctctccccctccagcctctccccctgcttcttccccaccccgggtcctggagttgccaggagtcccagcagctgcgttttctgatgtcctcaacttcatctacagcgcccggctcgcactgcctggtggtggaggggacggggcagctgtagcagagattggagctttggggcgccgtctgggcatctcccgccttcagggcctgggggagggaggtgatgcctgggtacctcctaccccagcccccatggccacctcgcagcctgaagaggacagctttgggcccgggcccaggccagctggggagtgggagggtgacagggctgaggcccaggcccctgacttgcagtgctccctgccccggcggcccctcccctgcccccagtgtggaaaaagcttcatccatcccaaacggctgcagacccatgaggcccagtgccgacgaggggccagcacgcgggggtctacagggctgggagctgggggcgctggccctggtggtcctgcaggggtggacgcctcagccctgcctccaccagtgggcttccgagggggccccgagcacgtggtgaaggtggtgggcggccacgtgctgtatgtgtgcgcggcctgcgagcgttcctacgtgaccctgtccagtctgaagagacacagcaatgtacactcgtggcggaggaagtacccctgccgctattgtgagaaagtgtttgctctggcggagtaccgcacgaagcatgaagtgtggcacacgggggagcgcaggtaccagtgcatcttctgttgggagacctttgtcacttactataacctgaagacccaccagcgagccttccacggcattagcccgggcctccttgccagtgagaagacacccaatggaggctacaagcccaagctcaatacactcaagctctaccgcctgctccccatgcgggcagccaagcggccctacaagacctacagccagggagccccggaggctcccctttctccaaccctcaacacaccggcccctgtggcaatgccagccagcccgccgcctgggcctccacctgccccagagcctggccctccaccctctgtcatcacttttgcccacccagccccctctgtcattgtccatgggggcagtagcagtggtggaggggggagtgggacggccagcacaggagggtcccaagctgcctcggttatcacttacactgctcccccgaggccacccaagaaacgagaatacccacctcctccccctgagcctgcagccacacccaccagcccagccacagcagtcagcccagccaccgctgcagggccagccatggccaccaccacggaggaggccaagggccggaatccacgggctggaaggactctgacttacacagccaagccagtgggcgggattggtggaggtgggggtccccccacaggggctggccggggcccctctcagctgcaggctccacctccactgtgtcagatcactgtgcgaataggggaggaggccatcgtcaagcgccgcatctcagagactgacctgcgtcctggggagctgagcggagaggagatggaggagagtgaggaggacgaagaggaggaggacgaagaggaggaggaggaggatgaggaggaatcaaaggctggtggggaggaccagctctggaggccctactactcctacaagcctaagcgcaaggctggagctgctggaggtgccagtgtggggggcagtgggctgccccgaggccgccggccaccacgttggaggcagaagctggaacggaggagctgggaggaaaccccagcggccgagagcccagcgggacgtgcccgcacagagcggaggcaccgatgcggggactgtgcccagaccttcaccaccctgagaaagctgcggaagcaccaagaggcccacggtgggggctcccacagctcccgggccggacggaggccctccacccgctttacctgcccccactgcgccaaggtgtgcaagaccgcagctgccctgagccgccacgggcagaggcatgctgctgagcggcccgggggcaccccaacccctgtcattgcctattccaagggcagcgctggcaccaggcccggggatgtcaaggaggaagccccccaagagatgcaagtctcctcatccagcggtgaggcaggtggcgggagcactgctgctgaggaagcttccgagaccgcctcactccaggaccctatcatttcagggggtgaggagcccccagtagtggcaagcgggggcagctatgtatacccacctgtgcaggaatttccactggccttgattgggggcggccgggaacctggcggtggcaggggaaaatctgggagtgaagggccagtgggggctggtgagggggaccggatggaggggataggggctgccaaagtcactttctaccctgagccctacccgctcgtctatggcccccagctccttgccgcctacccttacaacttcagtaacttggccgctctcccggttgctctcaacatggtcctacctgatgagaagggtgcgggggcccttcccttcctaccaggggtctttggctacgcagtgaatcctcaagcagcaccccctgccccaccaacaccacctcccccaactcttcctccaccaattccccctaagggagaaggggaaagggcaggggttgagagaacccagaagggcgatgtggggtgaaccctggggctcaatccccctttcaccagatgccaccctccctgaaccccccaccactaccagctccctggcctccctgccccttgggagccccttcacactcttgtgcagggacttgggggcccctggagctcaggggtcaggctgctttgtgtgagatgtagttttcccatctcctgggaagggatctttcgaggttcccctctcagtcttcctccagggaatggcctccatgaggggcagggccagcttccatcccttctccagcccttggggcaactgagcaatatacttaacctgaatctctactcacagcccccaccagctctgaatgtctaacctgctcccctgattcgtaaacctaggggaaaccatctctctcacctaatgacccgccttgttctgaagctttctctaagcccttcccagttgcttcctagcacattccattctttgtggcccagggcctggaccagaccattgtgatacctgaccccgcccacctgggagtgtggctttgggtttcatccttccccagcgtgggtctctacgtccctgtttcccttgtatcaagacaccttcctcagcttccatgcctttggatcttccatgttcctccccatattcctggacttcggagatggcctctcccaagccaggtcaaggaggtttgggggagggttgcccctctgcccctctgttctgtggctgagcactttcccagtccagggcagggaaatattggccctatcttgacccccaaatccagtgagctccagattcttccaaggcaaaagaggtaagcagatcacacctctttctgcctctacatatggcctattctgggctagaccagatttgggggccaggagggaagaactccatatgggatggagaagggaatctactttctccctgtttttttttcctgatggtttctcccagactagaccaaatagccagaaaaatgataggggtcggatgggtgggtaagcccaggatttgcacatgaccttccatccttacctgtattcccatctccccagtgtcactcccctcaccaatcactccagatggttttgggggaaccattctactcttctggtgggctttggggtatccccaccaactttcccttcaaaatagcaccttacaccccatctttgactcagttccccacacccaaagatcccagcctagggatggggtacagggactttaaatagtccctaatccctaatttgcactagttaaccctggtcagggtccctgtatttccttccagtgggggagataaatgtttgctcctaattctctttgaaaactgggcctccctgctctgtgattggataaatatttcccatcccacccacctccccccaaaaaatagctcacaaggggagagccagtatgggggagcaaatttgacaaatgggaattagaggagtgcagttttaaaaggaaaagttgctgtcatcaaaatggcagccttttccccagctactgtttttggggccaagatggctgccctagcagcaatcactgccaagggcaagatcatggcttttggagggaggtgagtttagggagggccaggaccatcctcctacccctcataccctcccagcatatacaaaaggggaggttttagacaggctccctgaatgttaaccacagaggagtcactccttcattcctcctctgtctctttgcacttttcttggtcttggccacagcctgagtgacgaatttcctactgaatgtaccaagttccaatttttaagggggggaaaggtttcaaatggggaaaaacacacaaaaaaaaaaatcactaaaaattcccacaaatcttgtttctggcactttagaaaaactgcaaaaaaatacgtaataaagaatacatatatatatatctacacacaaattatatatctatctatctatacagcggaaccacaagagagactgaggaaggcctggaggcaggggcagaggtgacgacagtgcccctatatccttaacccatactcctctgaggcaaacaggcatgggaaaatggaagggttgaggatggaccggagaattggaacttcagaataggtcaaaattccaaaaccatggacatttttttttgggagaattgagattgtagacattttttttttcttaaatatgatcaaggaaaatagcttccagaatgtggtggttctgggcaacaaatgagattgtggcgacgtggagattaaaatatatgtatttgagctggggaatttgaatattgtgagtttcagatgttggaaatttgggattttgcagttttgtcttttgaaaatgatcaagtcttgtcagttcgtgccctctttccccatgttccctgggaagacgggtggtggcagagtgagaaggccactggttctgtgccgcagcacgcaaaatttagaattctacagactagctctatacgtagtgaggacccagatttagagaaactgaccaatatttatctccgcatttgtgtgtgtgtccaactctgtaggccaataaaccaacaagacaaatgaactgtgctccaca

SEQ ID NO: 206470 - DNA, 5863 bp, Artificial Sequence
  derived and/or modified sequence
gtcagcggcggcggcggcggcggcagcggggccgggccggggccaggcgctgggggggccagggccggagctggagccggagccggagctggaggcgggcaaaaccggagcggccgggggcggccacggtgatgagccgggcctggcggacgcggcgccatcgcagtcagaaggaagaggcccagcagaagggactcgctgagccaccccccgccccactccatgttggctgtgctctcaggctggcaccatgcccccccctgcagaggtgacggacccgtcccatgcccccgccgtcctgcgccagctcaatgaacagcggctccgtggcctcttctgtgacgtcaccctcatagccggagacaccaagttccctgctcaccgcagcgtcctggctgcttcaagtcccttcttcagagaggccctgctcacttcagccccactaccccttccaccagctactgggggcgccgcacccaaccctgccaccaccacagctgcctcttcctcctcctcctcttcctcgtcttcttcctcttcttcctcctctgcttcttcttcttcttcctcttcctcttcctctccccctccagcctctccccctgcttcttccccaccccgggtcctggagttgccaggagtcccagcagctgcgttttctgatgtcctcaacttcatctacagcgcccggctcgcactgcctggtggtggaggggacggggcagctgtagcagagattggagctttggggcgccgtctgggcatctcccgccttcagggcctgggggagggaggtgatgcctgggtacctcctaccccagcccccatggccacctcgcagcctgaagaggacagctttgggcccgggcccaggccagctggggagtgggagggtgacagggctgaggcccaggcccctgacttgcagtgctccctgccccggcggcccctcccctgcccccagtgtggaaaaagcttcatccatcccaaacggctgcagacccatgaggcccagtgccgacgaggggccagcacgcgggggtctacagggctgggagctgggggcgctggccctggtggtcctgcaggggtggacgcctcagccctgcctccaccagtgggcttccgagggggccccgagcacgtggtgaaggtggtgggcggccacgtgctgtatgtgtgcgcggcctgcgagcgttcctacgtgaccctgtccagtctgaagagacacagcaatgtacactcgtggcggaggaagtacccctgccgctattgtgagaaagtgtttgctctggcggagtaccgcacgaagcatgaagtgtggcacacgggggagcgcaggtaccagtgcatcttctgttgggagacctttgtcacttactataacctgaagacccaccagcgagccttccacggcattagcccgggcctccttgccagtgagaagacacccaatggaggctacaagcccaagctcaatacactcaagctctaccgcctgctccccatgcgggcagccaagcggccctacaagacctacagccagggagccccggaggctcccctttctccaaccctcaacacaccggcccctgtggcaatgccagccagcccgccgcctgggcctccacctgccccagagcctggccctccaccctctgtcatcacttttgcccacccagccccctctgtcattgtccatgggggcagtagcagtggtggaggggggagtgggacggccagcacaggagggtcccaagctgcctcggttatcacttacactgctcccccgaggccacccaagaaacgagaatacccacctcctccccctgagcctgcagccacacccaccagcccagccacagcagtcagcccagccaccgctgcagggccagccatggccaccaccacggaggaggccaagggccggaatccacgggctggaaggactctgacttacacagccaagccagtgggcgggattggtggaggtgggggtccccccacaggggctggccggggcccctctcagctgcaggctccacctccactgtgtcagatcactgtgcgaataggggaggaggccatcgtcaagcgccgcatctcagagactgacctgcgtcctggggagctgagcggagaggagatggaggagagtgaggaggacgaagaggaggaggacgaagaggaggaggaggaggatgaggaggaatcaaaggctggtggggaggaccagctctggaggccctactactcctacaagcctaagcgcaaggctggagctgctggaggtgccagtgtggggggcagtgggctgccccgaggccgccggccaccacgttggaggcagaagctggaacggaggagctgggaggaaaccccagcggccgagagcccagcgggacgtgcccgcacagagcggaggcaccgatgcggggactgtgcccagaccttcaccaccctgagaaagctgcggaagcaccaagaggcccacggtgggggctcccacagctcccgggccggacggaggccctccacccgctttacctgcccccactgcgccaaggtgtgcaagaccgcagctgccctgagccgccacgggcagaggcatgctgctgagcggcccgggggcaccccaacccctgtcattgcctattccaagggcagcgctggcaccaggcccggggatgtcaaggaggaagccccccaagagatgcaagtctcctcatccagcggtgaggcaggtggcgggagcactgctgctgaggaagcttccgagaccgcctcactccaggaccctatcatttcagggggtgaggagcccccagtagtggcaagcgggggcagctatgtatacccacctgtgcaggaatttccactggccttgattgggggcggccgggaacctggcggtggcaggggaaaatctgggagtgaagggccagtgggggctggtgagggggaccggatggaggggataggggctgccaaagtcactttctaccctgagccctacccgctcgtctatggcccccagctccttgccgcctacccttacaacttcagtaacttggccgctctcccggttgctctcaacatggtcctacctgatgagaagggtgcgggggcccttcccttcctaccaggggtctttggctacgcagtgaatcctcaagcagcaccccctgccccaccaacaccacctcccccaactcttcctccaccaattccccctaagggagaaggggaaagggcaggggttgagagaacccagaagggcgatgtggggtgaaccctggggctcaatccccctttcaccagatgccaccctccctgaaccccccaccactaccagctccctggcctccctgccccttgggagccccttcacactcttgtgcagggacttgggggcccctggagctcaggggtcaggctgctttgtgtgagatgtagttttcccatctcctgggaagggatctttcgaggttcccctctcagtcttcctccagggaatggcctccatgaggggcagggccagcttccatcccttctccagcccttggggcaactgagcaatatacttaacctgaatctctactcacagcccccaccagctctgaatgtctaacctgctcccctgattcgtaaacctaggggaaaccatctctctcacctaatgacccgccttgttctgaagctttctctaagcccttcccagttgcttcctagcacattccattctttgtggcccagggcctggaccagaccattgtgatacctgaccccgcccacctgggagtgtggctttgggtttcatccttccccagcgtgggtctctacgtccctgtttcccttgtatcaagacaccttcctcagcttccatgcctttggatcttccatgttcctccccatattcctggacttcggagatggcctctcccaagccaggtcaaggaggtttgggggagggttgcccctctgcccctctgttctgtggctgagcactttcccagtccagggcagggaaatattggccctatcttgacccccaaatccagtgagctccagattcttccaaggcaaaagaggtaagcagatcacacctctttctgcctctacatatggcctattctgggctagaccagatttgggggccaggagggaagaactccatatgggatggagaagggaatctactttctccctgtttttttttcctgatggtttctcccagactagaccaaatagccagaaaaatgataggggtcggatgggtgggtaagcccaggatttgcacatgaccttccatccttacctgtattcccatctccccagtgtcactcccctcaccaatcactccagatggttttgggggaaccattctactcttctggtgggctttggggtatccccaccaactttcccttcaaaatagcaccttacaccccatctttgactcagttccccacacccaaagatcccagcctagggatggggtacagggactttaaatagtccctaatccctaatttgcactagttaaccctggtcagggtccctgtatttccttccagtgggggagataaatgtttgctcctaattctctttgaaaactgggcctccctgctctgtgattggataaatatttcccatcccacccacctccccccaaaaaatagctcacaaggggagagccagtatgggggagcaaatttgacaaatgggaattagaggagtgcagttttaaaaggaaaagttgctgtcatcaaaatggcagccttttccccagctactgtttttggggccaagatggctgccctagcagcaatcactgccaagggcaagatcatggcttttggagggaggtgagtttagggagggccaggaccatcctcctacccctcataccctcccagcatatacaaaaggggaggttttagacaggctccctgaatgttaaccacagaggagtcactccttcattcctcctctgtctctttgcacttttcttggtcttggccacagcctgagtgacgaatttcctactgaatgtaccaagttccaatttttaagggggggaaaggtttcaaatggggaaaaacacacaaaaaaaaaaatcactaaaaattcccacaaatcttgtttctggcactttagaaaaactgcaaaaaaatacgtaataaagaatacatatatatatatctacacacaaattatatatctatctatctatacagcggaaccacaagagagactgaggaaggcctggaggcaggggcagaggtgacgacagtgcccctatatccttaacccatactcctctgaggcaaacaggcatgggaaaatggaagggttgaggatggaccggagaattggaacttcagaataggtcaaaattccaaaaccatggacatttttttttgggagaattgagattgtagacattttttttttcttaaatatgatcaaggaaaatagcttccagaatgtggtggttctgggcaacaaatgagattgtggcgacgtggagattaaaatatatgtatttgagctggggaatttgaatattgtgagtttcagatgttggaaatttgggattttgcagttttgtcttttgaaaatgatcaagtcttgtcagttcgtgccctctttccccatgttccctgggaagacgggtggtggcagagtgagaaggccactggttctgtgccgcagcacgcaaaatttagaattctacagactagctctatacgtagtgaggacccagatttagagaaactgaccaatatttatctccgcatttgtgtgtgtgtccaactctgtaggccaataaaccaacaagacaaatgaactgtgctcc

SEQ ID NO: 206471 - protein, 1648 aa, Artificial Sequence
  derived and/or modified sequence
MDDDSLDELVARSPGPDGHPQVGPADPAGDFEESSVGSSGDSGDDSDSEHGDGTDGEDEGASEEEDLEDRSGSEDSEDDGETLLEVAGTQGKLEAAGSFNSDDDAESCPICLNAFRDQAVGTPENCAHYFCLDCIVEWSKNANSCPVDRTLFKCICIRAQFGGKILRKIPVENTKASEEEEDPTFCEVCGRSDREDRLLLCDGCDAGYHMECLDPPLQEVPVDEWFCPECAAPGVVLAADAGPVSEEEVSLLLADVVPTTSRLRPRAGRTRAIARTRQSERVRATVNRNRISTARRVQHTPGRLGSSLLDEAIEAVATGLSTAVYQRPLTPRTPARRKRKTRRRKKVPGRKKTPSGPSAKSKSSATRSKKRQHRVKKRRGKKVKSEATTRSRIARTLGLRRPVHSSCIPSVLKPVEPSLGLLRADIGAASLSLFGDPYELDPFDSEELSANPLSPLSAKRRALSRSALQSHQPVARPVSVGLSRRRLPAAVPEPDLEEEPVPDLLGSILSGQSLLMLGSSDVIIHRDGSLSAKRAAPVSFQRNSGSLSRGEEGFKGCLQPRALPSGSPAQGPSGNRPQSTGLSCQGRSRTPARTAGAPVRLDLPAAPGAVQARNLSNGSVPGFRQSHSPWFNGTNKHTLPLASAASKISSRDSKPPCRSVVPGPPLKPAPRRTDISELPRIPKIRRDDGGGRRDAAPAHGQSIEIPSACISRLTGREGTGQPGRGTRAESEASSRVPREPGVHTGSSRPPAPSSHGSLAPLGPSRGKGVGSTFESFRINIPGNMAHSSQLSSPGFCNTFRPVDDKEQRKENPSPLFSIKKTKQLRSEVYDPSDPTGSDSSAPGSSPERSGPGLLPSEITRTISINSPKAQTVQAVRCVTSYTVESIFGTEPEPPLGPSSAMSKLRGAVAAEGASDTEREEPTESQGLAARLRRPSPPEPWDEEDGASCSTFFGSEERTVTCVTVVEPEAPPSPDVLQAATHRVVELRPPSRSRSTSSSRSRKKAKRKRVSREHGRTRSGTRSESRDRSSRSASPSVGEERPRRQRSKAKSRRSSSDRSSSRERAKRKKAKDKSREHRRGPWGHSRRTSRSRSGSPGSSSYEHYESRKKKKRRSASRPRGRECSPTSSLERLCRHKHQRERSHERPDRKESVAWPRDRRKRRSRSPSSEHRAREHRRPRSREKWPQTRSHSPERKGAVREASPAPLAQGEPGREDLPTRLPALGEAHVSPEVATADKAPLQAPPVLEVAAECEPDDLDLDYGDSVEAGHVFDDFSSDAVFIQLDDMSSPPSPESTDSSPERDFPLKPALPPASLAVAAIQREVSLMHDEDPSQPPPLPEGTQEPHLLRPDAAEKAEAPSSPDVAPAGKEDSPSASGRVQEAARPEEVVSQTPLLRSRALVKRVTWNLQESESSAPAEDRAPRAPLHRPQKPREGAWDMEDVAPTGVRQVFSELPFPSHVLPEPGFPDTDPSQVYSPGLPPAPAQPSSIPPCALVSQPTVQFILQGSLPLVGCGAAQTLAPVPAALTPASEPASQATAASNSEEKTPAPRLAAEKTKKEEYMKKLHMQERAVEEVKLAIKPFYQKREVTKEEYKDILRKAVQKICHSKSGEINPVKVANLVKAYVDKYRHMRRHKKPEAGEEPPTQGAEG

SEQ ID NO: 206472 - DNA, 4947 bp, Artificial Sequence
  derived and/or modified sequence
atggatgatgacagcctggacgagctggtcgcccggtctcctggccccgacggacatcctcaggtgggccccgctgaccctgccggggactttgaagaatcttccgtggggagtagtggcgactcaggcgatgactctgattccgagcacggcgacggaacggatggagaagacgagggggcatccgaagaggaggacttagaggaccggagcggatcggaagacagtgaagatgatggtgagacactgctcgaggttgcgggcacacagggaaagttagaggcggcaggaagcttcaactcggatgatgacgcggagtcttgtcctatttgcctgaatgcgttcagagaccaagccgttggaactccagagaactgtgcacactacttttgcctggactgtatcgtcgagtggtccaagaacgccaatagctgccccgtggacagaactctgttcaagtgcatttgcatcagggctcagttcggaggcaagatcttgcgcaagattccggtagagaacaccaaggcatctgaagaagaggaggatcccacattctgtgaggtgtgcggacgatccgatcgcgaggacaggttgctcctgtgcgatggatgcgacgctggataccacatggagtgcctggatccgcctctgcaggaagtcccagtggacgaatggttctgtcctgaatgtgctgctcccggagttgtgttagccgccgacgcaggacctgttagcgaggaggaagtgagtttgctgctcgctgacgttgtaccaaccacttctcggctccgacctcgtgcagggcgcacccgggccatagcgcgaaccagacagagcgaaagggtgcgggctaccgtgaaccgcaacaggatctccactgcacgaagagtgcaacacacacctggtcgtctgggatcctcactgctggacgaggcaattgaagcagtggccaccggactgtccacagcagtgtatcagcgacctctgaccccgcgaacacccgcaaggaggaagcgcaagactcgccgacgtaagaaagtgcccggccgaaaaaaaacaccatccggaccttctgcaaaatcaaaaagctcagccacaagatcaaagaagaggcagcaccgcgtgaagaagaggcggggcaagaaggtcaaatcagaggcgactactcgatcccgtatcgcccgcactctgggtctacggcgtcctgttcattcaagctgcatccctagtgtcttgaagcctgttgaacccagcctgggcctcttgcgtgccgacatcggtgcggcctctctgtccttgttcggcgatccctacgagctggaccctttcgacagtgaagagctcagtgccaaccctctttcccccctgagcgcaaaaagacgtgctctgtcgagatccgcgctacagtcacatcagcctgtggcccgacccgttagcgtgggcttaagtcgcaggaggttgcccgccgccgttccagagcctgacttggaagaagagcctgttccggacctcctgggtagcattttatcgggccagagtctgcttatgctcggctcatctgacgttattatccaccgggacggaagcttatctgctaaacgcgctgctccagtttcgttccaacggaatagcgggtctctgagccgcggcgaggaggggtttaagggctgcttacaacccagggcactaccgtctggctcacccgcacaaggacccagcgggaacaggccccaaagtaccgggctgagctgtcagggaagatccaggaccccagctcgtactgctggggccccagttcgcctggacctaccagcagcccctggtgctgttcaggctcggaacctgtcgaacggctctgtccctggctttagacagtcccactccccttggttcaatggcacaaacaaacatactttgcctctcgcatctgccgccagcaagatcagtagcagagactccaagcccccttgcaggtccgttgtccctggacctccgttgaaaccggcccctcgccgaacagacatttccgaactaccccggatccctaaaatccgaagggatgatgggggggggagacgggacgccgccccagcccatggccagtcaatagagatcccatccgcctgcattagcagactaaccggcagggaaggaactgggcagccaggccgagggacgcgggccgagtctgaagctagctccagagtgcccagagaacctggagtgcatacaggcagctcacggccgcccgctccctcctcccacggatccctcgcccctctgggcccttcaaggggaaagggagtaggctcaacgtttgagagttttcgaataaatatccctgggaacatggcacactcctcccagctgagttcccctggcttttgtaatacattcaggcccgttgatgataaagagcagcgtaaagagaatccctccccactcttcagcattaagaagactaagcaactgagatcggaggtttacgaccctagtgaccctaccgggagtgactcctccgcacctggcagctcacccgagaggtccggcccaggcctgctcccttctgagatcacccggacgatcagtattaactcgccaaaggcacagaccgtccaggccgtgaggtgcgtaacttcatacacggttgagagtattttcggcaccgaaccggagccgcctctggggccaagcagcgcaatgagcaagctgcgcggggctgtagccgccgagggggccagcgataccgagagagaagagccaactgagtcacaagggctggcagcacgcctccgcaggccatccccgcctgaaccatgggacgaagaagacggcgcctcctgttcgacattctttggctcagaggagcgtaccgtgacatgtgtgactgtggtcgagcctgaggcccccccaagtcccgatgtgcttcaggctgcgactcaccgagtggttgaactacggccacctagtaggagccggtctacctcaagctcgagaagccggaaaaaagctaagcgtaagcgggtatcgagggagcatggaaggacacgctctgggactagatcagagtcccgcgacagatccagcagaagtgctagcccgagcgtgggggaggaacgccctcgtcgacagcgatctaaagcaaagtctcgccgtagcagctcagataggagtagtagccgcgagcgagctaagcgcaaaaaggccaaggacaaatcacgtgaacataggagaggtccatgggggcatagtaggagaactagtcggtctcgaagcggaagtcctgggtcttcctcctatgaacactatgaaagccggaaaaagaagaagaggaggtcggcaagtagacctcgtggtcgggagtgtagccctacaagtagcctcgaaaggctatgcaggcataagcatcagcgggaaaggtcccatgagagacccgaccgtaaagaatccgtcgcgtggccccgagaccggcgtaaacgtcggtcaagatcgccttcttctgagcatcgcgccagagaacataggagaccaaggagcagagaaaaatggccacagacgaggagccactccccagagcggaagggggctgttagggaagctagtcccgccccacttgctcagggtgaacccggtagagaagatctccctacccgcttaccagccctgggcgaagcacatgtaagtccagaggtagccacggccgataaagcccctcttcaggccccccccgtgctggaggtcgccgccgagtgtgagcccgatgatctggatctagattacggggacagcgttgaggcaggccacgtctttgacgatttttcatccgacgctgtttttatccagctcgatgatatgagcagcccccccagcccggaatcgacagactcctcccccgagcgagactttcctctcaaacccgccctcccgccagccagcctagctgtggcagcaatacagagagaggtgagcttgatgcatgacgaagatccctcacagcctcctccactccctgaagggacccaggagccacatctactgcgaccggatgccgccgagaaggctgaggctccatcttccccggatgtggctcccgccggaaaagaggacagtccctccgcttccggcagagtacaggaagctgcgagacccgaggaggtggtttcccaaacacctctgttgcgctctcgcgctctggtgaagcgggtcacctggaacctgcaggagtcggagtcatcagcaccagccgaggatagagctcccagggctcccttgcatagaccacagaaaccgcgggaaggggcgtgggacatggaagacgtcgcaccgaccggagttcggcaggtgttttcagagctgccgtttccaagccacgtcctcccagaaccaggatttcctgatactgaccccagccaggtctactccccaggactccctcctgcccccgctcaacccagttctatccccccatgtgctctggtcagccaacccacagtccagtttattctccaggggtctctacccctggtcggatgtggcgcggcacagacactagccccagtaccagccgctctcacccccgctagcgaaccggctagtcaggccacagccgcgagcaacagcgaggagaagacaccagccccgagattggctgccgagaagactaaaaaggaagagtacatgaagaaactccacatgcaagaacgagcagtcgaggaagtgaagctggctatcaagcctttctaccaaaaacgggaggtcacaaaggaagagtataaggacatacttagaaaggcagtccagaagatctgccacagcaagagcggcgaaatcaatcccgtcaaggtcgccaacctggtgaaagcctacgttgacaagtatagacacatgcgtagacataagaaacccgaagccggggaagagccccctacgcagggtgcagagggctag

SEQ ID NO: 206473 - DNA, 5227 bp, Artificial Sequence
  derived and/or modified sequence
gcctaggagcgactctcggtcgtgcagcggcggcgagcgctcgcgagcggctgcgggacgcgaggtttccggagctgagctcaatgtgcagcaatggatgacgacagcctggatgagcttgtggcccggagcccagggccggatggacacccacaggtcggccctgcggacccggcaggtgactttgaagaaagcagcgtgggcagcagtggggactctggggacgacagtgacagcgagcatggagatggcacagacggagaagacgagggggcgtctgaggaggaagacctggaagacagatctggttccgaggattctgaagacgacggggagacattgctggaggtagcgggtactcaggggaaactggaagccgctggctctttcaattctgatgatgatgcagagagctgcccaatctgtctcaacgcattcagagaccaggccgtggggacgccggagaactgtgcccattacttctgcctggactgcattgtcgaatggtccaagaatgccaattcctgtccagttgatcgaactctatttaagtgcatttgtattcgagctcaatttggtggtaaaatcttaagaaagatcccagtggagaacaccaaagcgagcgaggaggaggaggacccgaccttctgtgaggtgtgcggcaggagcgaccgtgaggacaggcttttgctctgcgacggctgcgatgcggggtaccacatggaatgcttggacccccctctccaggaggtgccggtggacgagtggttctgcccggaatgtgctgcgcctggtgttgtccttgccgctgatgcgggtcccgtgagtgaggaggaggtctccctgctcttggctgatgtggtgcccaccaccagcaggcttcggcctcgagcaggtaggacccgggcgatagccaggacacggcagagtgagagagtgagagcaaccgtgaaccggaaccggatctccacggccaggagggtccagcacacaccagggcgcctcgggtcttccctgctggatgaagccatcgaggctgtggcgactggcctgagcactgccgtgtatcagcgccccctgacgccgcgcactcccgcccgacggaagaggaagacaagaagacggaagaaagtgccgggaagaaagaaaaccccgtccggaccatccgcaaaaagtaagagctcagcgacaagatctaagaaacgccaacatcgagtgaagaagagaagagggaagaaggtaaagagtgaagccaccactcgctctcgaatcgcgcggacgctgggcctgcgcaggcctgttcacagcagctgcatcccgtcagtgttgaagccagtggagccctctttggggctgctgagagcggatattggagctgcctctctgtctctgtttggagatccttatgagctggatcccttcgacagtgaagagctttctgcaaaccctctttcccctctgagtgccaagagacgggctctgtcccggtcagccctgcagtcccaccagcccgtggccaggcccgtctccgtggggctttccaggaggcgcctccctgccgcggtgccagagccagacttggaggaggagccagtgcctgacctgctgggcagcatcctgtcgggccagagcctcctgatgctgggcagcagtgatgtcatcatccaccgcgacggctccctcagcgccaagagggcggctccagtttcttttcagcgaaactcaggcagtctgtccagaggggaagaaggattcaagggctgcctgcagccccgagcactgccctccgggagcccggcccaaggcccgtcaggaaacaggccacagagcacagggctcagctgtcaaggcaggtcccgcacccccgcccgcaccgcgggggcgcctgtgaggctggacttgccagcagcccctggggcggttcaggctcggaacttgtcaaatgggagtgtgcctggcttcagacagagccacagcccctggttcaacggcaccaacaagcacaccttgccccttgcctctgccgcgtctaagatctcaagcagagattctaagcccccatgtcgcagtgtggtgccggggcctcccctgaagccagcgcccagaagaacagacatctctgagctacccaggataccaaagatcaggagagatgacggtggtggcagacgggatgcggccccggcccacgggcagagcattgagatccccagtgcctgcatcagccgactgactggcagggagggcaccgggcagccagggcgaggcacacgggcagagagcgaggccagcagcagggtgccccgggagcccggggtgcacacgggcagctcccggcccccagcccccagctcccatggcagtttggccccactgggaccatcaagagggaaaggggtcgggtcgacctttgagagcttccggatcaatattcctggaaacatggcacattccagccagctctccagccctggcttctgtaacacgttccggcctgtggacgataaggagcagaggaaggagaacccctcacccctcttctccatcaagaagacgaagcagctgcggagcgaggtctacgacccatccgaccccaccggctccgactccagcgcccctggcagcagccccgagaggtctggccccggcctcctgccctctgagatcacacgaaccatctccatcaacagcccgaaggcccagacggtgcaggctgtgcgctgcgtcacctcctacacggtggagagcatctttggtacagagcccgaaccccctctcggaccgtcctccgccatgtccaagctccggggtgcagtggctgccgagggggcctctgacacggagcgagaggagcccacagagagccagggcctggctgcccggctgcggaggccatcccccccagagccctgggatgaggaggatggggcgtcttgcagcaccttctttggctctgaggagcggacggtgacctgtgtgactgtcgtggagccggaagccccacccagcccggacgtgctgcaggctgccacccacagagtcgtggagctcaggcccccttcccggtcccgctccacatccagctcccgcagcaggaagaaggccaagaggaagagggtgtccagggagcacggacggacgcgctctgggacgcgctctgaatccagggacaggagctcgaggtcagcgtcaccatcagtgggtgaggagcgccccaggaggcagcggtccaaggccaagagccggcggtcctccagtgaccgctccagcagccgagagcgagctaagaggaagaaagccaaggacaagagcagggagcacaggcggggcccctggggccacagccggaggacgtcccggtcgcggtcggggagccctggcagctcttcctatgagcactatgagagtaggaagaagaagaaaaggagatcagcgtccagacctcggggaagggagtgctcccccaccagcagcctggagaggctctgcaggcacaagcatcagcgggaacgcagccacgagcggccagacaggaaggagagtgtggcgtggccccgagaccggaggaagcggaggtcccggtccccaagctcggagcacagggcacgggagcacaggcggcctcggtcccgtgagaagtggccgcagacccggtcccattccccagagaggaagggggctgtgagggaggcttccccagcgccccttgcacagggggagccagggcgggaagacctccccaccaggttgccagccttgggggaagcacatgtctcgccggaggtggctacggccgacaaggcccccctgcaggctccccctgtcctggaggtggcagctgagtgtgagccggacgacctggacctggattatggcgactccgtggaggccggacacgtctttgatgatttctcaagcgacgccgttttcatccagctcgatgacatgagctcgccaccttctcccgaaagcacagactcttccccggagcgagacttcccactgaagcctgcgttgcccccagccagcctggccgtggccgccatccagagggaggtgtcattgatgcacgatgaagacccttcgcagcccccacccctgccagagggcacccaggagccacatttgctcaggccggacgcggctgagaaggctgaggcacccagttccccggatgtggcgcctgcggggaaggaagacagcccctctgcgagtgggagggtacaggaggcagcccggcctgaggaggtggtttcgcagacccccctgctgcggtccagagccctggtgaagcgggtcacctggaacctgcaggagtcggagagcagcgcccccgccgaggacagagccccccgggcaccacttcacaggccacagaagccccgagaaggagcctgggacatggaggatgtggcccccacaggggtcaggcaggtgttctccgagctgccctttcccagtcacgtgcttccggaacccgggttcccagacacagacccctctcaggtttacagccccggcctgccgcctgccccggcccagccctcaagcatcccaccctgcgcactggtcagccagcccacggtccagttcatccttcaggggagcctgccgctagtgggctgtggggcagcacagaccctggccccagtgcccgctgccctgaccccagcctcagagccagccagtcaagccactgcagccagcaactcggaggagaagaccccggcccccaggctagctgcggagaaaaccaagaaggaggagtacatgaagaagctgcacatgcaggagcgtgctgtggaggaggtgaagctggccatcaagcccttctaccagaagagggaggtgaccaaggaggagtacaaggacatcctgcgcaaggccgtgcagaagatctgccacagcaagagtggagagatcaaccccgtgaaggtggccaacctggtgaaggcgtacgtggacaagtacaggcacatgcgcaggcacaagaaaccagaggccggggaggagccgcccacgcagggggccgagggctgaggccaggcaatcacgggctatgcccggggagctgtcgggagtggcgggaatcggggccatgcccggggagctgtcgggagtggcgggaatcggggccatgcccggggagctgtcgggagtggcgggaaatggggggcatcaccatgcctgccgtcgggttcctgcgctgacacctggtctgtgcacc

SEQ ID NO: 206474 - DNA, 4947 bp, Artificial Sequence
  derived and/or modified sequence
atggatgatgacagcctggatgagctggtggcccggagccctggcccagatggccacccccaggtgggccctgctgaccctgctggggactttgaggagagctctgtgggcagcagcggggacagcggagatgacagcgacagcgagcacggagatggaacagatggagaagatgagggcgccagcgaggaggaggacctggaggacagaagtggcagcgaggacagtgaagatgatggagagaccctgctggaggtggccggcacccagggcaagctggaggccgccggcagcttcaacagtgatgatgatgctgagagctgccccatctgcctgaatgccttccgggaccaggccgtgggcaccccagagaactgtgcccactacttctgcctggactgcatcgtggagtggagcaagaatgccaacagctgccctgtggacaggaccctcttcaagtgcatctgcatccgggcccagtttggaggcaagatcctgaggaagatccctgtggagaacaccaaggccagcgaggaggaggaggaccccaccttctgtgaggtgtgtggccgcagtgacagagaagatcggctgctgctgtgtgatggctgtgatgctggctaccacatggagtgcctggacccccccctgcaggaggtgcctgtggatgagtggttctgcccagaatgtgccgcccctggggtggtgctggccgcagatgctggccctgtgtctgaggaggaggtgtccctgctgctggctgatgtggtgcccaccaccagccggctgcggcccagggctggccgcacccgggccatcgcccggacccggcagagcgagcgggtgcgggccaccgtgaacagaaaccgcatcagcacagccaggagagtgcagcacaccccaggccgcctgggcagcagcctgctggatgaggccattgaagctgtggccaccggcctgagcacagctgtgtaccagaggcccctgacccccaggaccccagcccggaggaagaggaagaccaggaggaggaagaaggtgcccggcaggaagaagaccccatctggccccagcgccaagagcaagagcagcgccaccaggagcaagaagaggcagcaccgggtgaagaagaggcggggcaagaaggtgaagtctgaggccaccaccaggagcagaattgcccggaccctgggcctgcggcggcctgtgcacagcagctgcatccccagcgtgctgaagcctgtggagcccagcctgggcctgctgcgggctgacatcggggccgccagcctgagcctgtttggagacccctatgagctggacccctttgattctgaggagctgagcgccaaccccctgagccccctgagcgccaagaggcgggccctgagccgcagcgccctgcagagccaccagcctgtggcccggcctgtgtctgtgggcctgagcagaagaaggctgcctgctgctgtgcctgagccagacctggaggaggagcctgtgcctgacctgctgggcagcatcctgagcggccagagcctgctgatgctgggcagcagtgatgtgatcatccacagagatggcagcctgagcgccaagagagctgcccctgtgtccttccagaggaacagcggcagcctgagcagaggagaggagggcttcaagggctgcctgcagccccgggccctgcccagcggcagccctgcccagggccccagcggcaaccggccccagagcacaggcctgagctgccagggccgcagcaggaccccagccaggacagctggggcccctgtgcggctggacctgcctgctgcccctggagctgtgcaggccaggaacctgagcaatggatctgtgcccggcttccggcagagccacagcccctggttcaacggcaccaacaagcacaccctgcccctggccagcgctgccagcaagatcagcagccgggacagcaagccaccctgccgctctgtggtgcccggcccccccctgaagccagcccccaggagaacagacatcagcgagctgccccgcatccccaagatcagaagagatgatggcggcggcagaagagatgctgccccagcccacggccagagcattgagatccccagcgcctgcatcagccggctgaccggccgggagggcaccggccagcccggccggggcaccagggctgagagcgaggccagcagccgggtgccccgggagcccggggtgcacacaggcagcagccggcccccagcccccagcagccacggcagcctggcccccctgggccccagccggggcaaaggagtgggcagcacctttgagagcttccgcatcaacatccctggcaacatggcccacagcagccagctgagcagccctggcttctgcaacaccttccggcctgtggatgacaaggagcagaggaaggagaaccccagccccctcttcagcatcaagaagaccaagcagctgcggtctgaggtgtatgaccccagcgaccccactggaagtgacagcagcgcccctggcagcagccctgagaggagcggccctggcctgctgcccagcgagatcaccaggaccatcagcatcaacagccccaaggcccagacagtgcaggccgtgcgctgtgtgaccagctacacagtggagagcatctttggaacagagcctgagccccccctgggccccagcagcgccatgagcaagctgcggggagctgtggccgctgagggcgccagtgacacagagcgggaggagcccacagagagccagggcctggccgcccggctgcggcggcccagccccccagagccctgggatgaagaagatggagccagctgcagcaccttcttcggcagcgaggagaggacagtgacctgtgtgacagtggtggagcctgaggccccacccagcccagatgtgctgcaggccgccacccaccgggtggtggagctgcggccccccagccgcagccgcagcaccagcagcagccgcagcaggaagaaggccaagaggaagagggtgtcccgggagcacggccgcaccaggagcggcaccaggtctgagagccgggacaggagcagccgcagcgccagccccagcgtgggggaggagcggccccggcggcagaggagcaaggccaagagcagaagaagcagcagtgacaggagcagcagccgggagcgggccaagaggaagaaggccaaggacaagagccgggagcacagaagaggcccctggggccacagcaggaggaccagccgcagccgcagcggcagccctggcagcagcagctatgagcactatgagagcaggaagaagaagaagagaagaagtgccagccggccccggggcagagaatgtagccccaccagcagcctggagcggctgtgccgccacaagcaccagcgggagaggagccatgagaggccagacaggaaggagagcgtggcctggccccgggacaggaggaagaggaggagccgcagccccagcagcgagcaccgggcccgggagcacagaagacccaggagccgggagaagtggccccagaccaggagccacagccctgagaggaaaggagctgtgcgggaggccagccctgcccccctggcccagggcgagcccggccgggaggacctgcccacccggctgcctgccctgggggaggcccacgtgtccccagaggtggccacagctgacaaggcccccctgcaggcccctcctgtgctggaggtggccgcagaatgtgagccagatgacctggacctggactatggagacagcgtggaggccggccacgtgtttgatgacttcagcagtgatgctgtgttcatccagctggatgacatgagcagcccccccagccctgagagcacagacagcagccctgagcgggacttccccctgaagccagccctgcccccagccagcctggccgtggccgccatccagcgggaggtgtccctgatgcatgatgaggaccccagccagcccccacccctgcctgagggcacccaggagccccacctgctgcggccagatgctgctgagaaggccgaggcccccagcagcccagatgtggccccagctgggaaggaggacagccccagcgccagcggccgggtgcaggaggccgcccggcctgaggaggtggtgtcccagacccccctgctgcggagccgggccctggtgaagagggtgacctggaacctgcaggagagcgagagcagcgccccagctgaggaccgggccccccgggcccccctgcaccggccccagaagccccgggagggcgcctgggacatggaggatgtggcccccactggagtgcggcaggtgttcagcgagctgcccttccccagccacgtgctgcctgagcccggcttcccagacacagaccccagccaggtgtacagccctggcctgcccccagccccagcccagcccagcagcatccccccctgtgccctggtgtcccagcccaccgtgcagttcatcctgcagggcagcctgcccctggtgggctgtggggccgcccagaccctggcccctgtgcctgctgccctgaccccagccagcgagcccgccagccaggccacagctgccagcaacagcgaggagaagaccccagccccccggctggccgctgagaagaccaagaaggaggagtacatgaagaagctgcacatgcaggagagagctgtggaggaggtgaagctggccatcaagcccttctaccagaagcgggaggtgaccaaggaggagtacaaggacatcctgaggaaggctgtgcagaagatctgccacagcaagtctggagagatcaaccctgtgaaggtggccaacctggtgaaggcctacgtggacaagtaccgccacatgaggaggcacaagaagccagaggccggggaggagccccccacccagggcgctgagggctag

SEQ ID NO: 206475 - DNA, 4947 bp, Artificial Sequence
  derived and/or modified sequence
atggacgacgacagcctggacgagctggtggcccggagccccggcccggacgggcacccccaggtggggcccgctgaccctgcgggcgactttgaagagtcttctgtggggtctagcggagacagcggggatgactctgattccgagcacggcgatggaaccgacggagaggatgagggtgcttcagaggaagaagatctggaggacagatccggaagcgaggacagcgaggatgacggcgagaccctgctggaggtggctggaacccagggtaaattggaagccgccgggagcttcaactccgatgatgacgcagaatcttgtccgatatgtttaaacgcttttagggatcaggctgtcggcacccctgagaattgtgcccactacttctgcctggactgcatcgtggaatggagcaaaaacgccaattcttgcccagtcgaccgtaccttatttaagtgcatatgcattcgggcccaatttggcggaaagattctgcgtaagatcccagtcgagaataccaaagcctccgaggaggaggaagaccccacattctgtgaagtgtgcggacggagcgaccgagaagaccgtctgctactgtgcgatggctgtgatgcagggtatcatatggagtgccttgaccctccgctgcaggaagttcccgtggacgaatggttctgccctgagtgtgccgcgccaggagtggtgctggcagccgacgccggaccagtgagcgaggaggaagtgtctctcttattagcagatgtggtccccacaacgagccgtttaagacctagagcaggcagaacaagggccatcgcccggacgcggcagtccgaacgggttcgcgcaacagtgaaccgcaatcgcataagcacagctcgacgtgtgcagcatactcccggccgactcggttcttccctgctggacgaggcaattgaggcagtagccacaggtctgagcactgccgtctatcagagaccactgacaccacggactccggccaggcggaagcgaaaaaccaggcggcgcaagaaagttcctggtagaaaaaagacccctagcgggccgagcgcaaagtcaaagtcaagtgccacacgcagcaaaaagaggcagcatcgcgtaaaaaaaagaagaggaaagaaagtgaagagcgaagcaacgaccaggagtagaatagctcgcaccctcggcctgagacgacctgtgcactcatcctgtataccaagtgtgctcaagccagtcgagccttcgctagggctgctgcgagctgacataggagcagcttcactcagcctcttcggtgatccatacgagctggatcccttcgatagcgaggagttaagcgccaaccctctgtcgccactctccgccaagcgacgcgctttgagcaggtcggctctgcaaagtcatcagccggtcgccaggcccgtgtccgtgggactctctagaagacgcctgcctgctgctgtccccgaaccggatctggaggaggagcccgttcctgatttactcggcagcatcttgtccggccagtctctattgatgctcggctcatccgatgtgattatccacagagatggttcattgtctgctaaacgcgccgcacctgtgagtttccaaagaaatagtggctccctcagcaggggagaagagggatttaaaggctgtctgcagccacgagctctcccgagcggaagtccagcgcaagggccatcaggaaaccgtccacagagcacaggcctgtcgtgccaagggagatcgcggactcccgcacgaacagcgggagcccccgttagactggacctgcctgctgcacccggggcggtgcaggctagaaatctatctaatgggtccgttcctggttttcgtcagtcccatagtccttggtttaacgggactaacaaacacacgctcccactcgcaagtgcagctagcaagattagctcgagggactctaagccgccctgtaggtctgtcgtgcctggtcctccgctgaaacccgcacctcgaagaacggacatatcagaactcccacgtatacctaaaattcggcgggatgatgggggcggcaggcgcgacgcggcccccgcgcatggccagtcaattgaaatcccgagtgcatgcatctctaggctgaccggacgcgagggtacagggcagcctggcaggggaacgagagcagagtcggaggcatcatctcgggttccgcgagaacctggagtgcacaccgggagtagtcgaccccccgcgccgagctctcacggctctctcgctcccttgggcccttcaagggggaagggagtggggtccacattcgaatctttccggattaatattcccggtaatatggcacactcctcacagttaagtagcccaggtttctgcaacacatttcgtcctgtcgatgataaagagcagaggaaggaaaatccctccccattgttctccatcaagaagaccaaacaactgaggtctgaagtctatgatccctccgatcctactggttcggacagctccgccccagggtcctcaccagagcggtctggaccaggtctcctgccatcagagattacacggaccatttcaataaattctcccaaggcacagacagtacaggcggtcagatgcgtgaccagttatactgtggaatcaatcttcggcacagaacctgagccccccttggggccttcctccgcaatgtcaaaattacggggcgcagtagcagctgagggtgctagcgatacagaacgcgaagaacctacagaatcacagggtttggcggctaggctgcgccgacctagcccgcccgagccatgggatgaagaagatggcgcctcctgctccaccttcttcggcagcgaagaacggaccgtcacctgcgtaaccgtggtcgagccagaagctccaccttccccagatgtcctgcaagccgctacccacagggtagtcgagctgaggcccccttcaagatcccgctcaaccagctccagcagatcaaggaaaaaagccaagcggaagcgcgtgagccgagagcatggcagaactcggtcaggcactagatccgaaagcagggataggagtagcaggagtgcatcgccctctgttggcgaggagcggccaagaaggcagcgttcaaaggcaaaatccaggcgcagcagctctgacaggtctagcagcagggagcgtgccaaacgtaaaaaagcaaaggataaaagcagagaacaccgccgcgggccatggggacactcgcggcggacctctcgcagtaggtccggcagcccgggttcatcctcttatgagcactacgaaagtcggaagaagaagaagagaaggagcgccagtaggcctcgagggcgcgaatgctcaccaacaagttctcttgagagactgtgcaggcataaacaccaacgagagaggagccacgagaggcccgaccgtaaagaatcggtcgcttggcctcgtgaccgcagaaagcgtaggtcacgcagccccagttccgagcatcgggcccgagagcaccgtcgtccgcgttcccgcgagaaatggcctcaaactaggtcccacagtccggagaggaagggtgccgtccgagaggcttcaccagcccccctcgcgcaaggtgagccagggagggaagacttgccgacaagattaccagccctcggcgaggcccacgtgagccctgaagtagccaccgccgacaaggcccctctacaagccccccccgtgcttgaggtggctgctgagtgcgagcctgacgacctggatctcgattacggtgactctgttgaggccgggcatgtgtttgatgattttagtagtgacgctgtcttcattcagctggacgacatgagtagccccccatcaccagagtctactgacagctctccagagagagacttcccgctgaagccagcgcttccacctgcttccctggccgtcgccgcaatacagcgtgaggtgtctcttatgcatgacgaagaccctagccagcctccccccctgcctgagggcacccaagaaccacatctgctaagaccagacgcagccgagaaagccgaggccccatcttcccccgacgtcgcaccagccggcaaggaagactctccctccgctagcggacgcgtgcaagaggctgctcgcccagaagaggtggtgtcccagacaccacttctgcgatccagggctctggtcaagagggtgacatggaatctccaggagagtgagtcttcggccccagccgaggatagggcgccccgggcaccgctccacagaccacaaaaaccgcgtgagggggcctgggatatggaagatgtcgcccccacgggcgtaaggcaggtgttttcagagttacctttcccttcccatgtcctgccggagcctggatttcctgataccgacccttcacaggtatactccccggggcttccacctgctcctgcacagccctcctccattccaccatgtgcattggttagccagcccaccgtacagtttattcttcagggctccctccctctggtggggtgcggcgctgcacagactctggcccctgtgcctgcggcgctgaccccagcaagtgaacccgcttcccaggcaaccgctgccagcaactctgaggaaaaaaccccagcccccagactggctgctgaaaagaccaagaaagaggaatatatgaaaaaactccatatgcaggagcgggcagtagaggaggtgaagctggccataaaacccttctaccagaagcgagaagtgactaaggaagaatacaaggacatattaaggaaagccgtgcagaagatctgtcactcaaaatcgggcgagattaatcccgtgaaggtcgcgaacttggtgaaggcatatgtggacaagtaccggcacatgagacgccacaagaaacccgaggctggagaggagcccccgacacagggtgctgagggatag

SEQ ID NO: 206476 - DNA, 4947 bp, Artificial Sequence
  derived and/or modified sequence
atggacgacgactctctcgacgagctggtggcacgaagtcctggcccagatgggcatccccaagtgggacctgctgacccagctggtgatttcgaggaatcgagtgtcggatccagcggcgacagcggcgacgacagtgattctgagcacggcgacgggacagacggcgaggatgagggtgcttccgaggaggaagatctggaagacagaagcggcagcgaggactccgaagacgacggagaaacacttctggaagtggcgggaacccagggtaagctggaggctgcagggagtttcaacagcgatgatgacgcggaatcatgcccaatttgcctgaatgccttcagagaccaagctgtcggaacacctgagaattgcgctcattatttttgcctggattgtattgtggagtggtcaaaaaacgccaactcctgccctgttgacaggaccttgtttaaatgtatatgcatcagggcacagttcgggggaaaaatactgcgcaaaattccggtcgaaaacactaaggctagtgaggaggaagaggatcccaccttctgtgaagtgtgcggtaggtcggaccgagaggatcgcctgctactgtgcgacggctgtgatgccggttatcacatggaatgcctggatccacccctccaggaggtgccagtggacgaatggttctgcccagagtgcgcggcacctggtgtcgtgctggcggcagatgccggacctgtgagtgaggaggaagtcagcctgctgctggcagatgtcgttcctactacatcccgcctccgacctagggccggaaggactcgggctatagcaagaaccagacagtctgagcgagttagggcaacggtgaaccggaacagaatctctaccgcgcgtagagtacaacacacacccggacgcctgggcagttccctgctggacgaagccatcgaggccgttgcgactgggctgtccaccgcagtttatcagcgccctttgacccccagaacgcccgcaagaaggaaacgaaagactagacggcgaaagaaggtccccggtaggaagaaaacaccttcaggtccctccgcaaagagtaagagtagtgctacccgctccaaaaaaagacagcacagagtgaagaaacggcgtggaaagaaggtgaagagcgaggccacgacaaggtcacgcatcgcccgaacgctgggtctcagacgaccggtgcactcatcatgcattccatccgtccttaagcctgtggaaccgtcccttggactgcttagggcagacatcggtgccgcttccttgagcctattcggcgacccctacgagcttgatccttttgactctgaggaacttagcgctaacccattgtcgcccttgtctgcgaagcgcagggctctgagccggtccgccctacaatctcatcagcccgtggccaggccagtatccgtgggtctctctagaagacgccttcctgctgctgtacccgagcctgatttagaagaggagccagtcccagacttactggggagcatactgagtggacagtccctgttgatgctgggctcctcagatgtcatcatacatagggatgggtctctgagcgccaaacgcgctgcccctgtgagcttccagcgtaatagcggttcactgtctaggggagaggaggggttcaaaggctgtttacagcccagggccttgccatctgggtctcccgctcagggtccttctggcaatcgcccacagagtaccggcctaagttgtcagggaagatctcgcactccggctagaaccgcgggagcacctgttagactggatctgccagctgctccgggagccgttcaggcgcgtaatctttccaatggtagcgtgccgggattccgacagtcccattcaccctggtttaatggtacgaacaagcatactctgcccctcgcctccgccgctagcaagattagcagccgggactctaaacccccttgcaggtctgtcgtgcccggacctccgctaaaaccagcccctcggaggacagacattagcgagctgccacgaatccccaagatccgtcgggatgacgggggagggagacgggatgctgcacctgcacacggtcagtcaatagagatccctagcgcctgcataagccgcttgacggggagggaaggaacgggccaacccggtcgtggtacacgggctgaatcagaagccagttccagggtccctcgcgaaccaggggttcatactggttcatctaggccgccagccccatcttcacacggcagcctcgccccactgggaccctcccgcggaaagggcgtgggatcaactttcgaaagcttccgcatcaacattccaggcaatatggcccatagctcacagctcagctctcctggtttttgtaacacttttagaccagtcgatgacaaggaacagcggaaagagaatcctagcccactcttctcaatcaaaaagactaaacaacttcgctcagaggtttacgacccaagtgatcctactggatccgacagttcagcgcctgggtcttctccagaacggtccgggcctgggctgctgccaagcgagattacgcgcactatttcaatcaactcacccaaagctcagaccgtccaggccgtgcgctgtgtgacgtcctatacggtcgaatctatttttgggaccgaaccagaacctcccctgggcccatcttcagccatgagcaagttgaggggcgcagttgctgctgagggagcctccgacaccgagcgcgaggagccaaccgaatcacagggcctggctgctaggctccggcgaccttccccacccgagccttgggacgaagaggacggcgctagctgcagtaccttttttgggtctgaagagaggaccgtgacctgcgtgactgtggtggagcccgaggctcctccaagtccagatgtcttgcaggcagctacccacagagtggtggagttgcgcccaccatccagaagccggagcacgtcaagctctaggagtagaaaaaaggccaagaggaagagagtttctagagaacacggcagaactaggtctggaacacgcagcgaatccagggacagaagttctagatctgcctcccctagcgtgggcgaggaacgcccacggagacagagaagcaaagcgaaaagtcggagatcctccagtgaccgaagctcgagtagggagcgggctaaaaggaagaaagcgaaagataaaagccgcgaacataggcggggaccctgggggcacagcaggagaaccagccgtagtagatccgggagtcccggttcatcctcatatgaacactatgagtcgagaaagaagaaaaagagacgctccgccagcaggcctcgcggtcgggagtgcagtcccacctcttcacttgagagactatgccgccacaaacaccagcgggagagaagccacgagaggcctgaccgcaaagaatccgtagcatggcctcgggaccggagaaagcgtcgttctagatcccctagttctgagcatagagcccgagagcacagacggccacgcagtagggagaagtggcctcagacccggagccattcgcctgagaggaaaggagccgtccgtgaagcatcccccgcacccctggcgcagggcgagcccggacgggaggacctgcctacgagacttcctgcactcggcgaagctcatgtgagccctgaggttgccacagccgataaggcccctctgcaggcaccaccggtactggaggtagctgctgaatgtgagcctgatgatctagatctggactatggggactccgtcgaagccggacatgtcttcgacgacttctcttctgatgctgtgttcatccagctcgatgatatgagttctcctccgtcccccgaatcaaccgacagtagcccagagcgggacttccccctgaaacccgctctgcccccagcctctctcgccgtggccgctatccagagagaagtgtctctgatgcacgatgaagaccctagtcagcctcccccactgccagagggcacccaggaaccacatttactcaggcccgatgctgccgaaaaagctgaggccccatcaagccccgatgttgcgcctgctgggaaggaggattccccttcagcatcagggcgagtccaggaggcggctcgcccagaagaagtcgttagtcagactcctctcttgagaagtcgcgctctggtcaagcgagtgacatggaacctgcaggagagtgagagtagcgcccctgccgaggacagggctcccagagctccattgcatagaccacagaaacccagagagggcgcttgggacatggaggacgtcgcacctaccggcgtccgccaagtattctctgaattacctttcccctcacatgtgctgcctgaacctggcttccctgacacagacccgagtcaggtttacagccctggtctgccaccagctcccgctcagcctagctccataccgccttgcgccttggtctcccagccaaccgttcagtttatcctgcaaggcagccttcccttagtgggctgcggcgctgcacagaccttagctcccgtcccggcagctcttaccccagcttccgagcctgcgagccaagcgaccgccgcttccaatagcgaggaaaagaccccggcacctcggctggccgctgagaagaccaagaaggaagaatacatgaagaagctccatatgcaggaaagggcggtggaggaggtgaagctagccattaagccgttttaccagaagcgagaagtcaccaaagaggagtacaaagacattctgcggaaggccgtgcagaaaatatgtcattcaaaaagcggcgagataaaccctgtgaaagtggcaaacctggtcaaggcatatgtggataaataccgccatatgcgcaggcacaaaaagccagaagcaggcgaagagccacccactcaaggcgctgaggggtag

SEQ ID NO: 206477 - DNA, 4947 bp, Artificial Sequence
  derived and/or modified sequence
atggacgacgacagcctggacgagctggtggccagaagccccggccccgacggccacccccaggtgggccccgccgaccccgccggcgacttcgaggagagcagcgtgggcagcagcggcgacagcggcgacgacagcgacagcgagcacggcgacggcaccgacggcgaggacgagggcgccagcgaggaggaggacctggaggacagaagcggcagcgaggacagcgaggacgacggcgagaccctgctggaggtggccggcacccagggcaagctggaggccgccggcagcttcaacagcgacgacgacgccgagagctgccccatctgcctgaacgccttcagagaccaggccgtgggcacccccgagaactgcgcccactacttctgcctggactgcatcgtggagtggagcaagaacgccaacagctgccccgtggacagaaccctgttcaagtgcatctgcatcagagcccagttcggcggcaagatcctgagaaagatccccgtggagaacaccaaggccagcgaggaggaggaggaccccaccttctgcgaggtgtgcggcagaagcgacagagaggacagactgctgctgtgcgacggctgcgacgccggctaccacatggagtgcctggacccccccctgcaggaggtgcccgtggacgagtggttctgccccgagtgcgccgcccccggcgtggtgctggccgccgacgccggccccgtgagcgaggaggaggtgagcctgctgctggccgacgtggtgcccaccaccagcagactgagacccagagccggcagaaccagagccatcgccagaaccagacagagcgagagagtgagagccaccgtgaacagaaacagaatcagcaccgccagaagagtgcagcacacccccggcagactgggcagcagcctgctggacgaggccatcgaggccgtggccaccggcctgagcaccgccgtgtaccagagacccctgacccccagaacccccgccagaagaaagagaaagaccagaagaagaaagaaggtgcccggcagaaagaagacccccagcggccccagcgccaagagcaagagcagcgccaccagaagcaagaagagacagcacagagtgaagaagagaagaggcaagaaggtgaagagcgaggccaccaccagaagcagaatcgccagaaccctgggcctgagaagacccgtgcacagcagctgcatccccagcgtgctgaagcccgtggagcccagcctgggcctgctgagagccgacatcggcgccgccagcctgagcctgttcggcgacccctacgagctggaccccttcgacagcgaggagctgagcgccaaccccctgagccccctgagcgccaagagaagagccctgagcagaagcgccctgcagagccaccagcccgtggccagacccgtgagcgtgggcctgagcagaagaagactgcccgccgccgtgcccgagcccgacctggaggaggagcccgtgcccgacctgctgggcagcatcctgagcggccagagcctgctgatgctgggcagcagcgacgtgatcatccacagagacggcagcctgagcgccaagagagccgcccccgtgagcttccagagaaacagcggcagcctgagcagaggcgaggagggcttcaagggctgcctgcagcccagagccctgcccagcggcagccccgcccagggccccagcggcaacagaccccagagcaccggcctgagctgccagggcagaagcagaacccccgccagaaccgccggcgcccccgtgagactggacctgcccgccgcccccggcgccgtgcaggccagaaacctgagcaacggcagcgtgcccggcttcagacagagccacagcccctggttcaacggcaccaacaagcacaccctgcccctggccagcgccgccagcaagatcagcagcagagacagcaagcccccctgcagaagcgtggtgcccggcccccccctgaagcccgcccccagaagaaccgacatcagcgagctgcccagaatccccaagatcagaagagacgacggcggcggcagaagagacgccgcccccgcccacggccagagcatcgagatccccagcgcctgcatcagcagactgaccggcagagagggcaccggccagcccggcagaggcaccagagccgagagcgaggccagcagcagagtgcccagagagcccggcgtgcacaccggcagcagcagaccccccgcccccagcagccacggcagcctggcccccctgggccccagcagaggcaagggcgtgggcagcaccttcgagagcttcagaatcaacatccccggcaacatggcccacagcagccagctgagcagccccggcttctgcaacaccttcagacccgtggacgacaaggagcagagaaaggagaaccccagccccctgttcagcatcaagaagaccaagcagctgagaagcgaggtgtacgaccccagcgaccccaccggcagcgacagcagcgcccccggcagcagccccgagagaagcggccccggcctgctgcccagcgagatcaccagaaccatcagcatcaacagccccaaggcccagaccgtgcaggccgtgagatgcgtgaccagctacaccgtggagagcatcttcggcaccgagcccgagccccccctgggccccagcagcgccatgagcaagctgagaggcgccgtggccgccgagggcgccagcgacaccgagagagaggagcccaccgagagccagggcctggccgccagactgagaagacccagcccccccgagccctgggacgaggaggacggcgccagctgcagcaccttcttcggcagcgaggagagaaccgtgacctgcgtgaccgtggtggagcccgaggccccccccagccccgacgtgctgcaggccgccacccacagagtggtggagctgagaccccccagcagaagcagaagcaccagcagcagcagaagcagaaagaaggccaagagaaagagagtgagcagagagcacggcagaaccagaagcggcaccagaagcgagagcagagacagaagcagcagaagcgccagccccagcgtgggcgaggagagacccagaagacagagaagcaaggccaagagcagaagaagcagcagcgacagaagcagcagcagagagagagccaagagaaagaaggccaaggacaagagcagagagcacagaagaggcccctggggccacagcagaagaaccagcagaagcagaagcggcagccccggcagcagcagctacgagcactacgagagcagaaagaagaagaagagaagaagcgccagcagacccagaggcagagagtgcagccccaccagcagcctggagagactgtgcagacacaagcaccagagagagagaagccacgagagacccgacagaaaggagagcgtggcctggcccagagacagaagaaagagaagaagcagaagccccagcagcgagcacagagccagagagcacagaagacccagaagcagagagaagtggccccagaccagaagccacagccccgagagaaagggcgccgtgagagaggccagccccgcccccctggcccagggcgagcccggcagagaggacctgcccaccagactgcccgccctgggcgaggcccacgtgagccccgaggtggccaccgccgacaaggcccccctgcaggccccccccgtgctggaggtggccgccgagtgcgagcccgacgacctggacctggactacggcgacagcgtggaggccggccacgtgttcgacgacttcagcagcgacgccgtgttcatccagctggacgacatgagcagcccccccagccccgagagcaccgacagcagccccgagagagacttccccctgaagcccgccctgccccccgccagcctggccgtggccgccatccagagagaggtgagcctgatgcacgacgaggaccccagccagcccccccccctgcccgagggcacccaggagccccacctgctgagacccgacgccgccgagaaggccgaggcccccagcagccccgacgtggcccccgccggcaaggaggacagccccagcgccagcggcagagtgcaggaggccgccagacccgaggaggtggtgagccagacccccctgctgagaagcagagccctggtgaagagagtgacctggaacctgcaggagagcgagagcagcgcccccgccgaggacagagcccccagagcccccctgcacagaccccagaagcccagagagggcgcctgggacatggaggacgtggcccccaccggcgtgagacaggtgttcagcgagctgcccttccccagccacgtgctgcccgagcccggcttccccgacaccgaccccagccaggtgtacagccccggcctgccccccgcccccgcccagcccagcagcatccccccctgcgccctggtgagccagcccaccgtgcagttcatcctgcagggcagcctgcccctggtgggctgcggcgccgcccagaccctggcccccgtgcccgccgccctgacccccgccagcgagcccgccagccaggccaccgccgccagcaacagcgaggagaagacccccgcccccagactggccgccgagaagaccaagaaggaggagtacatgaagaagctgcacatgcaggagagagccgtggaggaggtgaagctggccatcaagcccttctaccagaagagagaggtgaccaaggaggagtacaaggacatcctgagaaaggccgtgcagaagatctgccacagcaagagcggcgagatcaaccccgtgaaggtggccaacctggtgaaggcctacgtggacaagtacagacacatgagaagacacaagaagcccgaggccggcgaggagccccccacccagggcgccgagggctag

SEQ ID NO: 206478 - protein, 336 aa, Artificial Sequence
  derived and/or modified sequence
MAVATAAAVLAALGGALWLAARRFVGPRVQRLRRGGDPGLMHGKTVLITGANSGLGRATAAELLRLGARVIMGCRDRARAEEAAGQLRRELRQAAECGPEPGVSGVGELIVRELDLASLRSVRAFCQEMLQEEPRLDVLINNAGIFQCPYMKTEDGFEMQFGVNHLGHFLLTNLLLGLLKSSAPSRIVVVSSKLYKYGDINFDDLNSEQSYNKSFCYSRSKLANILFTRELARRLEGTNVTVNVLHPGIVRTNLGRHIHIPLLVKPLFNLVSWAFFKTPVEGAQTSIYLASSPEVEGVSGRYFGDCKEEELLPKAMDESVARKLWDISEVMVGLLK

SEQ ID NO: 206479 - DNA, 1011 bp, Artificial Sequence
  derived and/or modified sequence
atggccgtggccaccgccgccgccgtgctggccgccctgggcggcgccctgtggctggccgccagaagattcgtgggccccagagtgcagagactgagaagaggcggcgaccccggcctgatgcacggcaagaccgtgctgatcaccggcgccaacagcggcctgggcagagccaccgccgccgagctgctgagactgggcgccagagtgatcatgggctgcagagacagagccagagccgaggaggccgccggccagctgagaagagagctgagacaggccgccgagtgcggccccgagcccggcgtgagcggcgtgggcgagctgatcgtgagagagctggacctggccagcctgagaagcgtgagagccttctgccaggagatgctgcaggaggagcccagactggacgtgctgatcaacaacgccggcatcttccagtgcccctacatgaagaccgaggacggcttcgagatgcagttcggcgtgaaccacctgggccacttcctgctgaccaacctgctgctgggcctgctgaagagcagcgcccccagcagaatcgtggtggtgagcagcaagctgtacaagtacggcgacatcaacttcgacgacctgaacagcgagcagagctacaacaagagcttctgctacagcagaagcaagctggccaacatcctgttcaccagagagctggccagaagactggagggcaccaacgtgaccgtgaacgtgctgcaccccggcatcgtgagaaccaacctgggcagacacatccacatccccctgctggtgaagcccctgttcaacctggtgagctgggccttcttcaagacccccgtggagggcgcccagaccagcatctacctggccagcagccccgaggtggagggcgtgagcggcagatacttcggcgactgcaaggaggaggagctgctgcccaaggccatggacgagagcgtggccagaaagctgtgggacatcagcgaggtgatggtgggcctgctgaagtag

SEQ ID NO: 206480 - DNA, 1011 bp, Artificial Sequence
  derived and/or modified sequence
atggcagttgccaccgccgcagctgtgttagctgcgctcggcggggccctgtggctggcagctcgaaggttcgtgggaccccgggtccaaaggctgagacgcggtggcgaccccgggctgatgcatggaaagacagtactgatcactggagccaactcgggcctcgggcgcgccacagcagcggaacttcttcggcttggggcccgggttatcatggggtgccgggaccgggccagagccgaggaagcggccggacagctcaggagggagctccgacaggcggccgagtgcggaccggagcccggggtcagtggcgtaggagagttaattgttagggagctggacctagcatcacttcgcagcgtgcgggcattttgtcaagaaatgctgcaggaggagcctaggttggacgtgctgattaacaacgccggcatcttccagtgcccttatatgaaaacagaggatggctttgaaatgcagttcggggttaaccatcttggacattttctgttgacaaacttactcctcggactgctgaaaagtagcgcaccgagccgaatagttgtagtctcatcgaaactttacaagtatggcgatataaacttcgacgacctgaattcagagcagtcttataacaagagcttctgctatagccgatcgaagcttgctaacatcctcttcactcgcgaactggcaaggaggctggaaggaacaaatgtaactgtgaacgtgcttcacccaggcatcgtgcgtaccaacctcggcagacatattcatatcccactgctggtgaaaccactgtttaatctggtcagttgggctttctttaagactcccgtcgaaggagcacagactagcatttatcttgccagctcgccagaggtcgaaggggtgtctggacgatattttggcgactgtaaagaggaggaattacttcccaaagccatggatgagtcagtcgctaggaagttgtgggatatcagcgaggtgatggtgggccttttgaagtag

SEQ ID NO: 206481 - DNA, 1011 bp, Artificial Sequence
  derived and/or modified sequence
atggctgtggccacagctgctgctgtgctggccgccctgggcggggccctgtggctggccgccaggagatttgtgggcccccgggtgcagaggctgcggcggggcggggaccccggcctgatgcacggcaagacagtgctgatcactggagccaacagcggcctgggccgggccacagctgctgagctgctgcggctgggcgcccgggtcatcatgggctgccgggaccgggcccgggcagaggaggccgccggccagctgcggcgggagctgcggcaggccgcagaatgtggccctgagcccggggtgtctggagtgggggagctgattgtgcgggagctggacctggccagcctgcggtctgtgcgggccttctgccaggagatgctgcaggaggagccccggctggatgtgctgatcaacaatgccggcatcttccagtgcccctacatgaagacagaagatggctttgagatgcagtttggagtgaaccacctgggccacttcctgctgaccaacctgctgctgggcctgctgaagagcagcgcccccagcagaattgtggtggtgagcagcaagctgtacaagtatggagacatcaactttgatgacctgaacagcgagcagagctacaacaagagcttctgctacagccgcagcaagctggccaacatcctcttcacccgggagctggcccggcggctggagggcaccaacgtgacagtgaatgtgctgcaccctggcatcgtgaggaccaacctgggccgccacatccacatccccctgctggtgaagcccctcttcaacctggtgtcctgggccttcttcaagacccctgtggagggcgcccagaccagcatctacctggccagcagccctgaggtggagggcgtgtctggccgctactttggagactgcaaggaggaggagctgctgcccaaggccatggatgaatctgtggccaggaagctgtgggacatcagcgaggtgatggtgggcctgctgaagtag

SEQ ID NO: 206482 - DNA, 1011 bp, Artificial Sequence
  derived and/or modified sequence
atggccgtggccaccgccgccgccgtgctggccgccctgggcggcgccctgtggctagccgccaggcgattcgtgggcccaagagtgcagcgacttcggaggggcggtgaccccggactaatgcacgggaagacagtgctcatcactggcgctaattcgggcctgggaagagctactgctgccgagctgttgcgactgggggctcgtgtcattatggggtgcagggacagggccagggcggaagaagcggcaggacagttgcgccgcgagctgaggcaggccgccgaatgtggtcccgaacccggtgtctcgggtgtgggtgaacttatcgtgagagagctcgatctggcttcattaaggagcgtacgggcattttgtcaggaaatgctgcaggaagagcctcgacttgatgttctgatcaataacgcaggtatctttcagtgcccctatatgaagaccgaggatggctttgagatgcagttcggggtcaatcatctggggcatttcctgcttaccaatctattattgggtctgctgaaatctagtgcacccagccgaattgtggtggtgtcaagcaaactgtataagtacggcgacattaactttgacgaccttaattccgaacagagctataataaatccttttgttattcccggagcaaacttgctaatatcttgtttaccagagagctggcaagaagactagagggcacaaatgtgaccgtcaatgtgttgcaccctgggatcgtccgcacaaaccttggcagacacatccatatccccctactggtgaagccactgttcaacttagtctcgtgggctttctttaagaccccagtggagggagctcaaacgtctatctaccttgcaagtagtccagaggtggagggggtcagtggccggtattttggagattgtaaagaggaagaactgctgccaaaggccatggacgagagtgttgcgagaaaactatgggatatatccgaggtaatggttgggctgctgaaatag

SEQ ID NO: 206483 - DNA, 1011 bp, Artificial Sequence
  derived and/or modified sequence
atggctgtcgctacagctgccgcagtgttggccgctctcggaggagctctctggctcgctgccagacgcttcgttggccctcgcgtccagcgactgcggcgtggtggcgaccctggactcatgcacggaaaaactgtgctgatcaccggcgcaaacagcggactgggtagagccacagcagcagagctgctacgtctcggagctagagtcataatgggttgtagagatcgcgcacgagctgaggaagccgcagggcagctgagacgagagttacgacaggcggcagagtgtggacccgagccaggggttagcggggtgggggaactgattgtcagagaactggacttagcttccctcagaagcgtgcgcgcattttgtcaggagatgctgcaagaggagccgaggctcgacgtgttaatcaataacgccggtattttccagtgcccctatatgaaaactgaggatggcttcgagatgcaattcggagtcaaccacttgggacacttcctactgacgaacttgctgctgggactactaaagagcagcgctccatccaggatcgtagtagttagctcgaaactgtataagtacggcgacattaattttgacgatctgaacagtgagcagtcttacaacaagagcttttgctactcgaggagcaaactggcaaacatcctgtttaccagggagctcgctcggagacttgagggaactaacgtcacagtcaacgtactgcatcccggaatcgtgcgcaccaatctgggaaggcatatccatatcccacttctggtaaagcccctcttcaacttagtgagttgggcatttttcaagacccccgtggagggggctcaaacctctatctatctggcatctagccccgaggtggaaggcgtgagcggcagatacttcggcgattgcaaggaagaagagctgctccccaaagccatggatgaatcagtggcgaggaagctttgggatatcagtgaggttatggtcggactgctgaagtag

SEQ ID NO: 206484 - DNA, 1587 bp, Artificial Sequence
  derived and/or modified sequence
gacccgccgcgccccagcgttctccgcgtacaggtggtctcttgggttccggtaaggcggcggctgcggaactcccgtggaggggccggtgggccctcgggcctgacgatggcagtggccactgcggcggcagtactggccgctctgggcggggcgctgtggctggcggcccgccggttcgtggggcccagggtccagcggctgcgcagaggcggggaccccggcctcatgcacgggaagactgtgctgatcaccggggcgaacagcggcctgggccgcgccacggccgccgagctactgcgcctgggagcgcgggtgatcatgggctgccgggaccgcgcgcgcgccgaggaggcggcgggtcagctccgccgcgagctccgccaggccgcggagtgcggcccagagcctggcgtcagcggggtgggcgagctcatagtccgggagctggacctcgcctcgctgcgctcggtgcgcgccttctgccaggaaatgctccaggaagagcctaggctggatgtcttgatcaataacgcagggatcttccagtgcccttacatgaagactgaagatgggtttgagatgcagttcggagtgaaccatctggggcactttctactcaccaatcttctccttggactcctcaaaagttcagctcccagcaggattgtggtagtttcttccaaactttataaatacggagacatcaattttgatgacttgaacagtgaacaaagctataataaaagcttttgttatagccggagcaaactggctaacattctttttaccagggaactagcccgccgcttagaaggcacaaatgtcaccgtcaatgtgttgcatcctggtattgtacggacaaatctggggaggcacatacacattccactgttggtcaaaccactcttcaatttggtgtcatgggcttttttcaaaactccagtagaaggtgcccagacttccatttatttggcctcttcacctgaggtagaaggagtgtcaggaagatactttggggattgtaaagaggaagaactgttgcccaaagctatggatgaatctgttgcaagaaaactctgggatatcagtgaagtgatggttggcctgctaaaataggaacaaggagtaaaagagctgtttataaaactgcatatcagttatatctgtgatcaggaatggtgtggattgagaacttgttacttgaagaaaaagaattttgatattggaatagcctgctaagaggtacatgtgggtattttggagttactgaaaaattatttttgggataagagaatttcagcaaagatgttttaaatatatatagtaagtataatgaataataagtacaatgaaaaatacaattatattgtaaaattataactgggcaagcatggatgacatattaatatttgtcagaattaagtgactcaaagtgctatcgagaggtttttcaagtatctttgagtttcatggccaaagtgttaactagttttactacaatgtttggtgtttgtgtggaaattatctgcctggtgtgtgcacacaagtcttacttggaataaatttactggtacaaattcttaa

SEQ ID NO: 206485 - protein, 760 aa, Artificial Sequence
  derived and/or modified sequence
MYPQGRHPAPHQPGQPGFKFTVAESCDRIKDEFQFLQAQYHSLKVEYDKLANEKTEMQRHYVMYYEMSYGLNIEMHKQTEIAKRLNTILAQIMPFLSQEHQQQVAQAVERAKQVTMTELNAIIGQQQLQAQHLSHATHGPPVQLPPHPSGLQPPGIPPVTGSSSGLLALGALGSQAHLTVKDEKNHHELDHRERESSANNSVSPSESLRASEKHRGSADYSMEAKKRKAEEKDSLSRYDSDGDKSDDLVVDVSNEDPATPRVSPAHSPPENGLDKARSLKKDAPTSPASVASSSSTPSSKTKDLGHNDKSSTPGLKSNTPTPRNDAPTPGTSTTPGLRSMPASALRTPISITSSYAAPFAMMSHHEMNGSLTSPGAYAGLHNIPPQMSAAAAAAAAAYGRSPMVSFGAVGFDPHPPMRATGLPSSLASIPGGKPAYSFHVSADGQMQPVPFPHDALAGPGIPRHARQINTLSHGEVVCAVTISNPTRHVYTGGKGCVKIWDISQPGSKSPISQLDCLNRDNYIRSCKLLPDGRTLIVGGEASTLTIWDLASPTPRIKAELTSSAPACYALAISPDAKVCFSCCSDGNIAVWDLHNQTLVRQFQGHTDGASCIDISHDGTKLWTGGLDNTVRSWDLREGRQLQQHDFTSQIFSLGYCPTGEWLAVGMESSNVEVLHHTKPDKYQLHLHESCVLSLKFAYCGKWFVSTGKDNLLNAWRTPYGASIFQSKESSSVLSCDISADDKYIVTGSGDKKATVYEVIY

SEQ ID NO: 206486 - DNA, 2283 bp, Artificial Sequence
  derived and/or modified sequence
atgtacccccagggcagacaccccgccccccaccagcccggccagcccggcttcaagttcaccgtggccgagagctgcgacagaatcaaggacgagttccagttcctgcaggcccagtaccacagcctgaaggtggagtacgacaagctggccaacgagaagaccgagatgcagagacactacgtgatgtactacgagatgagctacggcctgaacatcgagatgcacaagcagaccgagatcgccaagagactgaacaccatcctggcccagatcatgcccttcctgagccaggagcaccagcagcaggtggcccaggccgtggagagagccaagcaggtgaccatgaccgagctgaacgccatcatcggccagcagcagctgcaggcccagcacctgagccacgccacccacggcccccccgtgcagctgcccccccaccccagcggcctgcagccccccggcatcccccccgtgaccggcagcagcagcggcctgctggccctgggcgccctgggcagccaggcccacctgaccgtgaaggacgagaagaaccaccacgagctggaccacagagagagagagagcagcgccaacaacagcgtgagccccagcgagagcctgagagccagcgagaagcacagaggcagcgccgactacagcatggaggccaagaagagaaaggccgaggagaaggacagcctgagcagatacgacagcgacggcgacaagagcgacgacctggtggtggacgtgagcaacgaggaccccgccacccccagagtgagccccgcccacagcccccccgagaacggcctggacaaggccagaagcctgaagaaggacgcccccaccagccccgccagcgtggccagcagcagcagcacccccagcagcaagaccaaggacctgggccacaacgacaagagcagcacccccggcctgaagagcaacacccccacccccagaaacgacgcccccacccccggcaccagcaccacccccggcctgagaagcatgcccgccagcgccctgagaacccccatcagcatcaccagcagctacgccgcccccttcgccatgatgagccaccacgagatgaacggcagcctgaccagccccggcgcctacgccggcctgcacaacatccccccccagatgagcgccgccgccgccgccgccgccgccgcctacggcagaagccccatggtgagcttcggcgccgtgggcttcgacccccacccccccatgagagccaccggcctgcccagcagcctggccagcatccccggcggcaagcccgcctacagcttccacgtgagcgccgacggccagatgcagcccgtgcccttcccccacgacgccctggccggccccggcatccccagacacgccagacagatcaacaccctgagccacggcgaggtggtgtgcgccgtgaccatcagcaaccccaccagacacgtgtacaccggcggcaagggctgcgtgaagatctgggacatcagccagcccggcagcaagagccccatcagccagctggactgcctgaacagagacaactacatcagaagctgcaagctgctgcccgacggcagaaccctgatcgtgggcggcgaggccagcaccctgaccatctgggacctggccagccccacccccagaatcaaggccgagctgaccagcagcgcccccgcctgctacgccctggccatcagccccgacgccaaggtgtgcttcagctgctgcagcgacggcaacatcgccgtgtgggacctgcacaaccagaccctggtgagacagttccagggccacaccgacggcgccagctgcatcgacatcagccacgacggcaccaagctgtggaccggcggcctggacaacaccgtgagaagctgggacctgagagagggcagacagctgcagcagcacgacttcaccagccagatcttcagcctgggctactgccccaccggcgagtggctggccgtgggcatggagagcagcaacgtggaggtgctgcaccacaccaagcccgacaagtaccagctgcacctgcacgagagctgcgtgctgagcctgaagttcgcctactgcggcaagtggttcgtgagcaccggcaaggacaacctgctgaacgcctggagaaccccctacggcgccagcatcttccagagcaaggagagcagcagcgtgctgagctgcgacatcagcgccgacgacaagtacatcgtgaccggcagcggcgacaagaaggccaccgtgtacgaggtgatctactag

SEQ ID NO: 206487 - DNA, 2283 bp, Artificial Sequence
  derived and/or modified sequence
atgtacccacagggcaggcatccagcaccccaccagcccggtcagcccgggtttaaatttaccgtggcagaaagttgcgatcgaattaaagacgagtttcagttcctgcaggcccagtatcattctcttaaagtcgagtacgataagctggccaacgaaaagaccgagatgcagcggcattacgtgatgtactacgaaatgagttatggcctcaatatcgagatgcacaagcagaccgaaatcgccaagcgattaaacaccatccttgctcaaattatgccttttttgtctcaggagcaccaacagcaggtggcgcaggcagttgagcgcgcaaaacaggttaccatgaccgaactcaatgctatcattggacagcagcagttgcaggcacagcatctgagccacgctactcacggacctcccgtccagctgccaccacaccccagcggactgcaacccccaggtatcccacctgtgaccggctcatcctccggcttgcttgccctcggggccttgggaagtcaggctcaccttaccgtgaaagacgagaagaatcatcatgaactggatcatcgtgaaagggaatcctcagctaataactccgtcagtcctagtgaatccctgcgtgccagcgagaaacacaggggcagtgctgattattctatggaagctaaaaaaaggaaagctgaggaaaaagactctctctccaggtacgattccgacggcgacaaatccgatgatctggtagtcgatgtcagtaatgaggaccccgcgacaccccgcgtatcaccagcccactcccctcccgagaatggcctcgacaaagcccgaagtttaaaaaaggacgccccgacaagccctgcctcagtggctagctcgagttccacgccgtctagcaaaactaaagatctcggtcacaatgacaaaagcagtactccaggcctgaaatctaacacaccaacgcctcgcaacgacgctcccactcccggtacatccaccactcccggattacgatccatgccagcctctgccttgcgaacaccaatctccatcacttcttcatacgctgctcctttcgcaatgatgtctcatcatgagatgaatgggtcactgacttcccctggggcctatgctggcctccacaacattccaccgcaaatgtcagcagccgctgcagccgcggcagccgcttatgggagaagccccatggtctcatttggggccgtggggttcgaccctcacccacctatgagggccacaggactgccctcatcccttgcatccattcctgggggcaagcccgcctactctttccacgtgtcagctgacgggcaaatgcagccagtccccttccctcatgacgctttagctggtcccgggatacctagacatgctcgccaaattaataccctcagccacggggaggtggtatgtgctgtgactatctccaatccaacacggcatgtttacaccgggggaaagggatgcgttaagatctgggatatatctcagcctggtagcaaaagtcctatctctcaactggattgtttaaatcgagacaactacatcaggagctgcaagctcctgccagacggaaggactctaatcgttggcggcgaggcttcaactctgactatttgggacctggccagcccaacaccaaggataaaagccgagttaacatcctccgctcccgcctgctatgccctggctatatcacccgacgcaaaagtctgtttctcgtgctgttctgatgggaacatcgcagtgtgggatctgcataatcagaccttggtcaggcagtttcagggccacacagatggggctagctgcatagacattagccacgacggcactaaactttggacaggcgggctggataacacggtgagatcctgggacctgcgggaaggccgccagcttcaacaacacgactttacgagtcaaatcttctctctggggtattgccctacgggtgaatggctcgctgtcgggatggagtcctcaaatgtggaagtgctgcaccacaccaaaccagacaaataccaactccacctccacgagtcctgtgtcctgagcctgaagttcgcatattgtgggaaatggtttgtttccacagggaaggataatttgcttaatgcctggcgcactccttatggggcttcaatttttcaaagcaaagagagctcatccgtacttagttgcgatatttctgctgacgataagtatattgttaccggcagcggtgacaagaaggctacagtgtacgaggtgatctactag

SEQ ID NO: 206488 - DNA, 2283 bp, Artificial Sequence
  derived and/or modified sequence
atgtacccccagggccgccacccagccccccaccagcccggccagcccggcttcaagttcaccgtggccgagagctgtgaccgcatcaaggatgagttccagttcctgcaggcccagtaccacagcctgaaggtggagtatgacaagctggccaatgagaagacagagatgcagaggcactacgtgatgtactatgagatgtcctatggcctgaacatcgagatgcacaagcagacagaaattgccaagaggctgaacaccatcctggcccagatcatgcccttcctgagccaggagcaccagcagcaggtggcccaggccgtggagcgggccaagcaggtgaccatgacagagctgaatgccatcatcggccagcagcagctgcaggcccagcacctgagccacgccacccacggcccccctgtgcagctgcccccccaccccagcggcctgcagcccccaggcatcccccctgtgacaggcagcagcagcggcctgctggccctgggcgccctgggcagccaggcccacctgactgtgaaggatgagaagaaccaccacgagctggaccaccgggagcgggagagcagcgccaacaacagcgtgagccccagcgagagcctgcgggccagcgagaagcaccggggcagcgctgactacagcatggaggccaagaagaggaaggccgaggagaaggacagcctgagccgctatgacagtgatggagacaagagtgatgacctggtggtggatgtgtccaatgaagatcctgccaccccccgggtgtccccagcccacagccccccagaaaatggcctggacaaggcccggagcctgaagaaggatgcccccaccagccctgcctctgtggccagcagcagcagcacccccagcagcaagaccaaggacctgggccacaatgacaagagcagcaccccaggcctgaagagcaacacccccaccccaagaaatgatgcccccaccccaggcaccagcaccaccccaggcctgcgctccatgcctgccagcgccctgcggacccccatcagcatcaccagcagctatgctgccccctttgccatgatgagccaccacgagatgaatggcagcctgaccagccctggggcctatgccggcctgcacaacatccccccccagatgtctgctgctgctgctgctgctgctgctgcctacggccgcagccccatggtgtcctttggagctgtgggctttgacccccacccccccatgagggccaccggcctgcccagcagcctggccagcatccctgggggcaagccagcctacagcttccacgtgtctgcagatggccagatgcagcctgtgcccttcccccatgatgccctggccggccctggcatccccaggcatgcccggcagatcaacaccctgagccatggagaggtggtgtgtgctgtgaccatcagcaaccccaccaggcatgtgtacacaggaggcaagggctgtgtgaagatctgggacatcagccagcccggcagcaagagccccatcagccagctggactgcctgaacagagacaactacatccgcagctgcaagctgctgcctgatggccgcaccctcatcgtgggcggggaggccagcaccctgaccatctgggacctggccagccccaccccccgcatcaaggccgagctgaccagcagcgccccagcctgctacgccctggccatcagcccagatgccaaggtgtgcttcagctgctgcagtgatggcaacattgctgtgtgggacctgcacaaccagaccctggtgcggcagttccagggccacacagatggagccagctgcatcgacatcagccatgatggcaccaagctgtggacaggaggcctggacaacacagtgcgctcctgggacctgcgggagggccggcagctgcagcagcacgacttcaccagccagatcttcagcctgggctactgccccaccggggagtggctggccgtgggcatggagagcagcaatgtggaggtgctgcaccacaccaagccagacaagtaccagctgcacctgcacgagagctgtgtgctgagcctgaagtttgcctactgcggcaagtggtttgtgtccacaggcaaggacaacctgctgaatgcctggaggaccccctatggagccagcatcttccagagcaaggagagcagctctgtgctgagctgtgacatctctgcagatgacaagtacatcgtgacaggcagcggggacaagaaggccaccgtgtatgaggtgatctactag

SEQ ID NO: 206489 - DNA, 2283 bp, Artificial Sequence
  derived and/or modified sequence
atgtacccccagggccggcaccccgccccccaccagcccggccagccagggttcaaattcaccgtggctgaatcctgcgacaggatcaaggatgaattccagtttctccaagcgcagtaccacagtctgaaagtcgaatatgacaagctggccaacgagaagactgaaatgcaaaggcattatgttatgtattacgagatgtcttatgggttgaatattgagatgcacaagcaaaccgaaatcgcaaaacggctgaacacaatccttgcccaaatcatgccatttctaagccaggagcaccaacagcaggtggcccaggccgtggagcgcgctaagcaagttaccatgactgagctgaacgctataataggacagcaacaactgcaggcccagcacttgagccatgccacgcatggccctcctgttcagctgcctcctcacccgtcgggactccagccacccggcatcccccctgttacgggcagctcctctggactcctggcactgggagcacttggcagccaggcccaccttaccgtgaaggatgaaaaaaaccatcatgagttagaccatagggagcgtgagtcaagcgcgaataattcggtttcccctagtgagtctctccgagccagtgagaagcaccggggtagcgccgattatagtatggaggccaaaaagcgcaaggccgaggagaaggactcactatcgcgatatgattccgatggcgacaaatctgacgatctggtggtggacgtctctaatgaagatcccgctactcctcgggtgtccccagcacattcccctcccgaaaacggccttgataaagcacgctcactgaaaaaggatgctcctacttcccctgcgagcgtggcctcctccagctccacaccaagtagtaaaacgaaagacctagggcataatgataagtcctcaacgccaggcctcaaatccaatacgcccactcccagaaacgatgcgcccacacctggaaccagtacaacacctggactgaggtccatgccggccagcgctctgaggacccccatctcgattacgagctcttacgccgcgccatttgcaatgatgagccatcacgagatgaatggctcgcttacatcccctggcgcttatgccggactgcacaatatcccccctcaaatgtcggccgcggccgcggccgcggccgcagcttacggtagatccccgatggtgtcctttggcgcagtgggctttgacccccatccacccatgcgagccacaggcttgcccagctccctggcatccatccccggaggcaagcccgcatacagcttccatgtgagtgccgatggccaaatgcagccggtgcctttcccacacgatgcacttgcaggccccggaattcctaggcacgcaaggcagatcaacacactgtcccacggggaagttgtgtgcgccgtgacaatatccaatcctacccgtcatgtctataccgggggaaaaggttgcgtgaaaatctgggatatatcgcagccgggatctaaatcacccatttctcaactggactgcctgaatagagacaattacattagaagttgtaagcttctccccgatgggcggaccctgatcgtcggtggcgaggcttctaccttaactatatgggacttggcaagccccacccccagaatcaaagccgagcttaccagcagtgcccccgcatgctacgccctggctatatcccccgacgcaaaggtctgtttctcttgctgttccgacgggaacatcgcagtgtgggacttacataatcagacgttagtccgacagttccaggggcacacagatggagccagctgcatcgacatcagccacgatggaacgaaactctggacaggcggtctggacaatactgtgagaagctgggacctccgcgagggaagacaactccaacagcatgacttcacctcacagatttttagcctcggctactgccctaccggggagtggctcgcggtgggcatggaatcctcgaacgtggaagtcctgcatcataccaagcccgataaataccagcttcatcttcacgagtcttgtgtgctcagccttaagtttgcctactgcggtaagtggtttgttagtacaggtaaagataatctgctcaacgcttggcgcactccatatggcgcatcaatcttccaaagcaaggaaagctccagcgtgctgagttgtgatatatccgccgacgacaagtatatcgtaactgggtctggcgataagaaagctactgtctacgaagtcatttactag

SEQ ID NO: 206490 - DNA, 2283 bp, Artificial Sequence
  derived and/or modified sequence
atgtatccccaaggtcggcatcctgcccctcaccagcctggccagcctggctttaaattcaccgtagctgagtcatgtgaccgaatcaaggatgaattccagttccttcaagcgcaatatcatagtctgaaggtagagtacgacaagctggccaacgagaagaccgaaatgcaacgtcattacgtgatgtactacgagatgagctatgggctaaatatagagatgcataaacaaacagaaatagccaagagattaaatactattctcgcccagatcatgcctttcttgagtcaggagcatcagcaacaggtggctcaggccgtggagagggctaaacaggtcacgatgacggaactcaatgctattatcggacaacagcagttacaggcacagcatctctctcacgctacacacggcccacctgtccagctgccccctcatccttccggcttacagcctcctgggatccctcctgtaacaggatcctcttcaggccttctagccctgggggcactgggctcacaagctcacctgaccgttaaggacgagaaaaatcaccacgaactggatcatcgcgagcgcgaatcatctgccaataattccgtcagtccttctgagtccctccgcgcttctgaaaaacacagaggttccgccgactatagcatggaggccaaaaagcggaaagctgaggagaaggactcactttctagatatgatagtgacggagacaagagcgacgacttggtggttgacgtttctaacgaggaccccgcaaccccccgagtgagccccgctcactcacccccagaaaacggactggacaaagcacggtccctgaagaaggatgccccaactagtcctgcttccgtggcgagctcctcatctacaccttctagcaagaccaaagatttgggccacaacgataagagctccacgcccggactaaaaagcaacacgccgacccctcggaacgacgctccaactcccggtacctccactactcctgggctgcgatcaatgcctgcatccgctttacgcactcctatctcgattacttcaagttatgccgcacctttcgccatgatgtcacatcacgagatgaacgggagtctgacctcacctggggcttatgccggacttcataatatcccgcctcagatgtctgctgctgccgcagcagccgctgcagcctacggcagatccccaatggtgtctttcggcgcagtggggtttgatccccaccctcctatgcgagccacggggctcccatcttcattggcatcaattcccggaggcaagccagcttacagcttccatgtgagtgctgacgggcagatgcagcccgtgccgtttccacatgacgctctggccggtcccggaattcccaggcacgccaggcagataaacacgctctcacatggggaggtggtgtgcgcggtgaccatttcaaatcccacgagacacgtgtacacaggaggaaaggggtgtgtgaaaatctgggacatcagtcagcccggatctaagtctcccatctctcagttggactgcctaaacagggacaactacattcgaagctgcaagttactgcccgacggtcggaccctgatcgtcggtggagaagcgagcaccttaaccatctgggatttggcctctcctacacccaggataaaggctgagctgacatcttccgctccagcctgttacgccttggctatctcacccgatgctaaagtttgtttctcttgttgctctgatggtaacattgcagtgtgggacctccacaaccagactttggttcggcagtttcagggccacactgatggcgctagctgcatagatatatcacacgatggcacgaagttgtggaccgggggactggataatacagtgcgatcatgggacttgagggaagggcgacagctgcagcagcacgacttcacaagccagatcttctccctcgggtattgtcccaccggggaatggctagctgtgggtatggaaagcagtaatgtagaagtattgcatcatactaagcccgataagtatcagcttcacctgcatgagtcctgtgtcctgtctctgaagttcgcctactgtggtaaatggttcgtgtcaaccggaaaggacaatctgctcaacgcctggcggacgccttatggagccagcatctttcagtcgaaggaatcctccagtgtcctatcctgcgatatatcggccgacgacaagtatattgtgacagggtctggcgacaaaaaggccactgtgtatgaagtgatctactag

SEQ ID NO: 206491 - DNA, 5207 bp, Artificial Sequence
  derived and/or modified sequence
gctctcgcggcagttcagacctcgtgctcgtccccttcgcctgtctgtgtgtggtatccgtaggtccggggcacttttttttttggtgtgtgtgtgtgtgcgtgcgcgcgtgtgtgtgtgttgggtgtgtgtgttttgggggtttgccggggcgcggagaggagagccgggccgaggggaaggaaggaagccgtagagctccccggtctcgggctgcgtctcccctccagcgctctcctgcctgtgcgctccgacgcggcagcggcggtggcgctgagcgctcctcggtggggacgcggtgctcaagctgggagcagcgagaaccctttgcggaggcttcccgtgcccgctggacttaggatgccagggcgtttgatttgcacctactgagcccggagttcctccccggccctgggaagggcttgcagcggcggcggcggcggcggcagcggcagtagcagacggaacagcaggctctcctctccgagggggggcgtcgaagcgcccgcgccgggctcccgccctcaccctccggcgctcctgcggccccaagccaccacctcgtagcccgcctccttcctcttctcgccgcgagccccaggcccggacgcctctaggatcggacccgcgcgccccggatgcttggggctgccccggcgcgcccccctacaggcgcgacccgctgagtgacccggagggggcccgagctcgccccaggaggggcccccggcctcgggaccccgcgccggacctgctggggagccgacgatgtccgcgcagtcccaggcattgacgcgctcgacgcagcccagggaaggcggccggccgctgcccgccgagccctaggcgcacaaagcccgcgcccgccgcccggccccggcgcccgccgacgactttgccgcctgctccgcggctctttgtctccacttggggcgggcgcccgactctgggatttcgctgcgagaacgagctgggggggccgggggcgagctctcggtttcccggccgccccccgctcgggctcggctcccccctcccccgcacctccccggcccgggctctcggcgcttccacgctctcggaatcacgacccctccctgccatgtatccgcagggcagacatccggctccccatcaacccgggcagccgggatttaaattcacggtggctgagtcttgtgacaggatcaaagacgaattccagttcctgcaagctcagtatcacagcctcaaagtggagtacgacaagctggcaaacgagaagacggagatgcagcgccattatgtgatgtactatgagatgtcctatggcttgaacattgaaatgcacaagcagacagagattgcgaagagactgaacacaattttagcacagatcatgcctttcctgtcacaagagcaccagcagcaggtggcgcaggcagtggagcgcgccaagcaggtcaccatgacggagctgaacgccatcatcgggcagcagcagctccaggcgcagcacctctcccatgccacacacggccccccggtccagttgccaccccacccgtcaggtctccagcctccaggaatccccccagtgacagggagcagctccgggctgctggcactgggcgccctgggcagccaggcccatctgacggtgaaggatgagaagaaccaccatgaactcgatcacagagagagagaatccagtgcgaataactctgtgtcaccctcggaaagcctccgggccagtgagaagcaccggggctctgcggactacagcatggaagccaagaagcggaaggcggaggagaaggacagcttgagccgatacgacagtgatggagacaagagtgatgatctggtggtggatgtttccaatgaggaccccgcaacgccccgggtcagcccggcacactcccctcctgaaaatgggctggacaaggcccgtagcctgaaaaaagatgcccccaccagccctgcctcggtggcctcttccagtagcacaccttcctccaagaccaaagaccttggtcataacgacaaatcctccacccctgggctcaagtccaacacaccaaccccaaggaacgacgccccaactccaggcaccagcacgaccccagggctcaggtcgatgccggcctcggctctgcgcacgcccatctccatcaccagctcctatgcggcgcccttcgccatgatgagccaccatgagatgaacggctccctcaccagtcctggcgcctacgccggcctccacaacatcccaccccagatgagcgccgccgccgctgctgcagccgctgcctatggccgatcgccaatggtgagctttggagctgttggttttgaccctcaccccccgatgcgggccacaggcctcccctcaagcctggcctccattcctggaggaaaaccagcgtactcattccatgtgagtgctgatgggcagatgcagcccgtgcccttcccccacgacgccctggcaggccccggcatcccgaggcacgcccggcagatcaacacactcagccacggggaggtggtgtgtgccgtgaccatcagcaaccccacgaggcacgtctacacaggtggcaagggctgcgtgaagatctgggacatcagccagccaggcagcaagagccccatctcccagctggactgcctgaacagggacaattacatccgctcctgcaagctgctccctgatgggcgcacgctcatcgtgggcggcgaggccagcacgctcaccatctgggacctggcctcgcccacgccccgcatcaaggccgagctgacgtcctcggctcccgcctgttatgccctggccattagccctgacgccaaagtctgcttctcctgctgcagcgatgggaacattgctgtctgggacctgcacaaccagaccctggtcaggcagttccagggccacacagatggggccagctgcatagacatctcccatgatggcaccaaactgtggacagggggcctggacaacacggtgcgctcctgggacctgcgggagggccgacagctacagcagcatgacttcacttcccagatcttctcgctgggctactgccccactggggagtggctggctgtgggcatggagagcagcaacgtggaggtgctgcaccacaccaagcctgacaagtaccagctgcacctgcacgagagctgcgtgctctccctcaagttcgcctactgcggcaagtggttcgtgagcactgggaaagataaccttctcaacgcctggaggacgccttatggagccagcatattccagtctaaagaatcctcgtctgtcttgagttgtgacatttcagcggatgacaaatacattgtaacaggctctggtgacaagaaggccacagtttatgaggtcatctactaaacaagaactccagcagggctgtcaaactctgggagaaaccgactcggctctgacagggagacccccaggcgaggggccccgaggatggcggaggatgggccgcaggcagccgagcgttcagggctgcgctccggccggctgagagggcacgtgccccgtcacagtctggactcctgggcctggattgatgtgtctcacagactcggaagggttctgctcctcctcctccccctgaacaatgctggcagttgctacaaatagatttattggaggcttatggctccggttcccccacagacccgctcatgagtctctgtttgttcttcccttttcttttgccctgtccctcaccttgggtcgggggtgctggagtggaccacaatgttgtgctgggggatgggggggtctctctttgccgattgtgcagtgcacaagatttgtgaaaaatgtaaataacagactcctattgcggactgatcagtgggagaggaggccccttcccaccggaaactctgagtgtgtatttcgcctgctgtatttgtaatccactcgtggtggtggcttttttttttttttttttttaaataaacagatgctctcacctgggaagaggagacagggaggggaaccaattgaagaaagaggagaaaagtcttagagtgtggaaaaggcaaccaggttggccgtaaggtgcctgctggaatgcgtgtgcctccacacgggtctgggcatccggactgataaccagccggccagactgagggatggaaggcactgagatgggggcccgtccaggcggacacccgcagaaatggagctttctgtggtctcttgcactctggctgcctcttgccctctctgtgtctctctttcttggtctctccctctctcctcctcagcctggtctttctctttggtgcacacttagttattgttgtgagcaatggaagttcaaaggaactccctctccagctcttctgaatcttgggacacagcctaaaaaggacaaaaagttagaagacagcatagcaactcagctcagggagctaccagagaaaaatagcaactgatgtgggtgctttttttttttttttaatttgaataaaaagaattagaagtgatgtccttttataaaatgccttctcccccttcccgcctacagtctcttcctctccccttagaggggggaaagtgtataaacctacagggttgtgagtctgaaaagaggatccccctcacccccaccctgggcagagcagtgggggttggggggtgggagagggggacacagatcctggcacactgtggatatttcttgcagattgcagtctcttgtggcccaaacaggttaggtagactatcgcctctggcaggtgccaccttttggtaccaacatgttctgaggtgttaggatttgggttgggttttttttgtttgttttttttttccttttggtctttttttttttctccttttaaagaaaagctaaaggccgctgtgagtcctggtggcaggctctccatggatgtagcatatcgaagataatttttatactgcatttttatggattattttgtaatgtgtgattccgtctgctgaggaggtgggaggggctccagggaaagccacccaccttcagtgaggttgctccccagctgagcgcaccgggcatgggatgtggaggctggcgacacaccctgtgcctctccaaggctgggcgcgtggggcgtccagagtctctctgggtctcagatgtccatctgccacctcttgttaaggctctagccagaagggagggtgagggtagaagaaagttattccc

SEQ ID NO: 206492 - protein, 1884 aa, Artificial Sequence
  derived and/or modified sequence
MHCTNPALIFLIDELSPEQHNLSLYSMELVLKKSTGHSAAQVALTETAPGSQHSSPLHVTAPPSATTFDTAFFNQGKQTKSTADPSIFVATYVSVTSKEVAVNDDEMDNFLPDTHWTTPRMVSPIQYITVSPPGLPREALEPMLTPSLPMVSLQDEEVTSGWQNTTRQPAAYAESASHFHTFRSAFRTSEGIVPTPGRNLVLYPTDAYSHLSSRTLPEIVASLTEGVETTLFLSSRSLMPQPLGDGITIPLPSLGEVSQPPEEVWATSADRYTDVTTVLSQSLEETISPRTYPTVTASHAALAFSRTHSPLLSTPLAFASSASPTDVSSNPFLPSDSSKTSELHSNSALPGPVDNTHILSPVSSFRPYTWCAACTVPSPQQVLATSLMEKDVGSGDGAETLCMTVLEESSISLMSSVVADFSEFEEDPQVFNTLFPSRPIVPLSSRSMEISETSVGISAEVDMSSVTTTQVPPAHGRLSVPASLDPTAGSLSVAETQVTPSSVTTAFFSVITSILLDSSFSVIANKNTPSLAVRDPSVFTPYSLVPSVESSLFSDQERSSFSEHKPRGALDFASSFFSTPPLELSGSISSPSEAPASLSLMPSDLSPFTSQSFSPLVETFTLFDSSDLQSSQLSLPSSTNLEFSQLQPSSELPLNTIMLLPSRSEVSPWSSFPSDSLEFVEASTVSLTDSEAHFTSAFIETTSYLESSLISHESAVTALVPPGSESFDILTAGIQATSPLTTVHTTPILTESSLFSTLTPPDDQISALDGHVSVLASFSKAIPTGTVLITDAYLPSGSSFVSEATPFPLPTELTVVGPSLTPTEVPLNTSTEVSTTSTGAATGGPLDSTLMGDAASQSPPESSAAPPLPSLRPVTAFTLEATVDTPTLATAKPPYVCDITVPDAYLITTVLARRAVQEYIITAIKEVLRIHFNRAVELKVYELFTDFTFLVTSGPFVYTAISVINVLINSKLVRDQTPLILSVKPSFLVPESRFQVQTVLQFVPPSVDTGFCNFTQRIEKGLMTALFEVRKHHQGTYNLTVQILNITISSSRVTPRRGPVNIIFAVKSTQGFLNGSEVSELLRNLSVVEFSFYLGYPVLQIAEPFQYPQLNLSQLLKSSWVRTVLLGVMEKQLQNEVFQAEMERKLAQLLSEVSTRRRMWRRATVAAGNSVVQVVNVSRLEGDDNPVQLIYFVEDQDGERLSAVKSSDLINKMDLQRAAIILGYRIQGVIAQPVDRVKRPSPESQSNNLWVIVGVVIPVLVVMVIVVILYWKLCRTDKLDFQPDTVANIQQRQKLQIPSVKGFDFAKQHLGQHNKDDILIIHEPAPLPGPLKDHTTPSENGDVPSPKSKIPSKNVRHRGRVSPSDADSTVSEESSERDAGDKTPGAVNDGRSHRAPQSGPPLPSSGNEQHSSASIFEHVDRISRPPEASRRVPSKIQLIAMQPIPAPPVQRPSPADRVAESNKINKEIQTALRHKSEIEHHRNKIRLRAKRRGHYEFPVVDDLSSGDTKERHRVYRRAQMQIDKILDPTASVPSVFIEPRKSSRIKRSPKPRRKHQVNGCPADAEKDRLITTDSDGTYRRPPGVHNSAYIGCPSDPDLPADVQTPSSVELGRYPALPFPASQYIPPQPSIEEARQTMHSLLDDAFALVAPSSQPASTAGVGPGVPPGLPANSTPSQEERRATQWGSFYSPAQTANNPCSRYEDYGMTPPTGPLPRPGFGPGLLQSTELVPPDPQQPQASAEAPFAARGIYSEEMPSVARPRPVGGTTGSQIQHLTQVGIASRIGAQPVEIPPSRGSQYGGPGWPSYGEDEAGRREAVPRTSGREPSAPSGNLPHRGLQGPGLGYPTSSTEDLQPGHSSASLIKAIREELLRLSQKQSTVQNFHS

SEQ ID NO: 206493 - protein, 1934 aa, Artificial Sequence
  derived and/or modified sequence
MPGARRRRRGAAMEGKPRAGVALAPGPSGRRPSARCARRRRPGLLLPGLWLLLLARPASCAPDELSPEQHNLSLYSMELVLKKSTGHSAAQVALTETAPGSQHSSPLHVTAPPSATTFDTAFFNQGKQTKSTADPSIFVATYVSVTSKEVAVNDDEMDNFLPDTHWTTPRMVSPIQYITVSPPGLPREALEPMLTPSLPMVSLQDEEVTSGWQNTTRQPAAYAESASHFHTFRSAFRTSEGIVPTPGRNLVLYPTDAYSHLSSRTLPEIVASLTEGVETTLFLSSRSLMPQPLGDGITIPLPSLGEVSQPPEEVWATSADRYTDVTTVLSQSLEETISPRTYPTVTASHAALAFSRTHSPLLSTPLAFASSASPTDVSSNPFLPSDSSKTSELHSNSALPGPVDNTHILSPVSSFRPYTWCAACTVPSPQQVLATSLMEKDVGSGDGAETLCMTVLEESSISLMSSVVADFSEFEEDPQVFNTLFPSRPIVPLSSRSMEISETSVGISAEVDMSSVTTTQVPPAHGRLSVPASLDPTAGSLSVAETQVTPSSVTTAFFSVITSILLDSSFSVIANKNTPSLAVRDPSVFTPYSLVPSVESSLFSDQERSSFSEHKPRGALDFASSFFSTPPLELSGSISSPSEAPASLSLMPSDLSPFTSQSFSPLVETFTLFDSSDLQSSQLSLPSSTNLEFSQLQPSSELPLNTIMLLPSRSEVSPWSSFPSDSLEFVEASTVSLTDSEAHFTSAFIETTSYLESSLISHESAVTALVPPGSESFDILTAGIQATSPLTTVHTTPILTESSLFSTLTPPDDQISALDGHVSVLASFSKAIPTGTVLITDAYLPSGSSFVSEATPFPLPTELTVVGPSLTPTEVPLNTSTEVSTTSTGAATGGPLDSTLMGDAASQSPPESSAAPPLPSLRPVTAFTLEATVDTPTLATAKPPYVCDITVPDAYLITTVLARRAVQEYIITAIKEVLRIHFNRAVELKVYELFTDFTFLVTSGPFVYTAISVINVLINSKLVRDQTPLILSVKPSFLVPESRFQVQTVLQFVPPSVDTGFCNFTQRIEKGLMTALFEVRKHHQGTYNLTVQILNITISSSRVTPRRGPVNIIFAVKSTQGFLNGSEVSELLRNLSVVEFSFYLGYPVLQIAEPFQYPQLNLSQLLKSSWVRTVLLGVMEKQLQNEVFQAEMERKLAQLLSEVSTRRRMWRRATVAAGNSVVQVVNVSRLEGDDNPVQLIYFVEDQDGERLSAVKSSDLINKMDLQRAAIILGYRIQGVIAQPVDRVKRPSPESQSNNLWVIVGVVIPVLVVMVIVVILYWKLCRTDKLDFQPDTVANIQQRQKLQIPSVKGFDFAKQHLGQHNKDDILIIHEPAPLPGPLKDHTTPSENGDVPSPKSKIPSKNVRHRGRVSPSDADSTVSEESSERDAGDKTPGAVNDGRSHRAPQSGPPLPSSGNEQHSSASIFEHVDRISRPPEASRRVPSKIQLIAMQPIPAPPVQRPSPADRVAESNKINKEIQTALRHKSEIEHHRNKIRLRAKRRGHYEFPVVDDLSSGDTKERHRVYRRAQMQIDKILDPTASVPSVFIEPRKSSRIKRSPKPRRKHQVNGCPADAEKDRLITTDSDGTYRRPPGVHNSAYIGCPSDPDLPADVQTPSSVELGRYPALPFPASQYIPPQPSIEEARQTMHSLLDDAFALVAPSSQPASTAGVGPGVPPGLPANSTPSQEERRATQWGSFYSPAQTANNPCSRYEDYGMTPPTGPLPRPGFGPGLLQSTELVPPDPQQPQASAEAPFAARGIYSEEMPSVARPRPVGGTTGSQIQHLTQVGIASRIGAQPVEIPPSRGSQYGGPGWPSYGEDEAGRREAVPRTSGREPSAPSGNLPHRGLQGPGLGYPTSSTEDLQPGHSSASLIKAIREELLRLSQKQSTVQNFHS

SEQ ID NO: 206494 - DNA, 5655 bp, Artificial Sequence
  derived and/or modified sequence
atgcactgtactaatccagctttgatctttctgatagatgagttaagtccagagcagcataacctatctctgtattctatggagctggtgctgaagaagagcaccggacattcagctgcacaagtcgctctcaccgagacggcccccggtagtcagcattccagcccactccatgtgactgcccccccatctgcaaccacatttgacactgccttcttcaaccaggggaaacaaactaaatccacggccgaccctagcattttcgtcgccacttacgtctcagttacgtcaaaggaagtcgccgtgaacgacgacgagatggacaactttctgccggatacgcactggacaacaccgaggatggtgtcaccaatccaatatatcactgtcagcccacccggcctgcctcgagaagcgctcgagccaatgctaaccccttctctgcccatggttagtttgcaagatgaggaagtcaccagtgggtggcagaacaccacacggcagccagccgcttatgccgagagcgcgtctcattttcacacatttcggagcgcatttcggactagcgaggggatcgtgcccacgccagggcggaacttagtgttgtacccgaccgacgcctatagtcacctatccagtaggacattgccagaaattgtggccagcctaacggagggcgtggagactaccctgttcctgagctctaggagcctcatgccacaacctttgggagatggaatcacgatccccctaccatcattaggagaagtgagccagccaccagaagaagtctgggccacatcggcagacaggtacaccgacgtcacgaccgtactatctcagagtctggaggagaccatatccccgaggacctaccctacagtgactgccagtcacgccgcgttggcttttagcaggacgcactcacccttattatcgacccccctggcatttgcaagctcagcatcgcctactgacgtgtcttcgaatcctttcctgcccagcgatagctccaagacttcagagctgcatagcaattccgcacttcccgggccagttgacaacacccacattttgtcccctgtcagcagtttcagaccatacacatggtgcgctgcctgcacagtacctagccctcaacaagtgttggccacttcgttaatggaaaaggacgtcggctcaggggacggagccgaaacactttgtatgaccgtgctggaggagtcttctattagcctgatgagcagtgttgtggccgatttcagtgagtttgaggaagacccacaagtattcaatacactttttccatctaggcctatcgtgcctctaagcagcagatctatggagatctctgagaccagcgtgggcatatccgcagaggttgacatgtcctcagtgacgaccactcaagtgccaccggcccacggaaggctctctgtgcccgcaagcctggatcctaccgcaggctcattgtcagtcgcagagactcaggtgactccctccagtgttaccaccgccttcttcagcgtcataacttctatcctattggacagctcgttttcagtgattgccaataagaacaccccaagcctggctgttcgggacccctcagtttttacaccttattccttagtcccctcagtagaatcttcactcttctctgatcaggaacgcagtagcttcagcgaacataagccacggggtgccctcgatttcgcttcatccttctttagtacgcctcccctggagctttctggatcaatctccagtccatctgaggcccctgctagcctctcattgatgccctctgacctaagccccttcacaagtcagtcattttcccccctggttgaaacgtttacactcttcgactcatctgatctgcagtcttcccaactctccttaccaagcagtactaatctagaattctcccagctgcagcccagcagcgaattacccttgaacactatcatgttattacccagtaggtccgaggtgagcccatggtcctcattcccatctgactctcttgagttcgtggaggccagcacagtttctctgaccgacagtgaggcccacttcacgtccgcctttatcgagacaacatcctacctggagtcttccttgatctctcacgagtccgctgttacagctctcgtgccgccagggtcggaatcttttgacattcttacagctggaatccaagcgacgagccctctcaccacggtgcatacaacccccatattaaccgagtcctctttattttccacgctgacccctcctgacgatcagatctcagcattagacggacatgtatctgtgctagctagcttcagcaaagcgatccccactgggactgtgctgatcaccgatgcctacctgccatctggtagctcttttgtgtctgaggccacccctttccccttacctaccgagctgacggttgtagggccttctctcacacccaccgaagttcccctgaacacaagtactgaggtaagcacaacatccaccggcgctgctaccgggggccccctcgactcaactctgatgggagacgccgcgtcccagagccctccagaatcctccgctgctccccccctgccttccctgcggcccgtgaccgcatttaccctggaggcaactgtcgatactcccaccctggcgacagcgaagcccccttacgtgtgtgacattaccgtccctgacgcctacctgattacaacagtgctggctcgacgggctgttcaagaatacattatcacagctatcaaggaagtccttaggatccatttcaaccgggcagttgaattgaaagtctatgagctgtttactgactttaccttccttgtcacaagcggcccttttgtgtatactgcgatctccgtaatcaatgttcttataaattctaagctggtacgtgatcagacaccgctgattctgagtgtcaaacccagcttcctggtgccagaaagccggttccaggtgcagaccgtcctgcagttcgttccccccagtgttgacacgggtttttgtaacttcacgcagaggattgaaaaggggctgatgaccgcgctctttgaagtgagaaagcatcaccagggaacatataacctaaccgtgcagattctgaatatcaccatcagctcttcccgcgtaacacccagacgtggccccgttaatatcattttcgccgtcaagtctacgcaggggttcctcaatgggtccgaagtctctgagctcctgaggaacctatcggtggtggaatttagtttctatctcggctaccccgtattacagatcgcagagcccttccagtatcctcagctgaacctctcgcagctcctcaaatcgagctgggttcgcacagttctgctgggggtgatggaaaagcaacttcaaaacgaggtgtttcaggctgagatggagcggaagttggcccagctgctgagcgaagtgtcgacgcgacgccgcatgtggagacgtgctacagtggcagctggaaactccgttgtacaggtcgtaaacgttagcagacttgagggggacgataaccctgtccagctgatttatttcgttgaagaccaggatggtgagcggctgtctgctgtgaaatctagtgatctgatcaataaaatggatttgcaacgcgccgccataatccttggctataggatccaaggtgtcattgcgcaacccgtcgaccgagtaaagagaccatcaccagagagccaatcaaataatctgtgggtgattgtgggcgtggtgattcctgtgcttgtcgtcatggtgatcgtggtgattctttactggaaactctgtcgaacagataaactggactttcaacccgacacagttgcaaatatccagcagagacagaagctccagatcccctccgtgaaagggtttgacttcgccaagcaacacctgggacaacataacaaagatgacatcctcataatccatgagccagcaccactgccagggccactgaaagaccataccactccatctgaaaacggggatgtgccatccccgaaatctaagattccttctaaaaacgtgaggcaccggggacgagtgagcccttcagacgcagactcaaccgtgagcgaggaaagctccgagcgcgatgctggagataaaacgccgggcgcggtcaacgatggaagaagtcacagagccccccagtcaggacctcccttgcctagctcaggcaatgagcagcattctagcgcatccatttttgagcacgtcgatagaataagcagacctccggaagcctccaggagagtgccgtccaaaatacaattgatcgccatgcagccaattccggcgcctcctgtccagcggccgtccccagctgatagagtggccgagtctaacaaaattaacaaggaaattcaaacagctcttcgtcacaaatctgagattgaacaccaccggaacaagatcagactcagagcgaaacgcagaggccattatgagtttcccgtggtagacgacctgagtagcggagacacgaaagagcgacatcgcgtttatcgcagagcccagatgcagattgacaagatcctagatcccacggcctctgtcccatctgtctttatcgaacccagaaaaagctcacgcatcaagcggagcccaaaaccacgcaggaagcaccaagtgaacggatgtcccgcggacgccgagaaagaccgactaatcaccactgacagcgacgggacttatcgcagacctccaggtgtacacaacagtgcatatattgggtgtccgagtgatccggacttgccagccgacgtacaaacaccgtcctctgtcgaacttgggaggtatccagcactgccgttccctgcatcccagtatatacctccacagcccagcattgaggaagctcgccagacaatgcattccctgctcgatgatgcctttgcgcttgtagccccatccagccagcccgcatcaacagccggcgtcgggcccggcgtgccacctggcctgccagctaattctaccccttcacaggaggagcgacgggctactcaatgggggagtttctattcgcccgcccaaactgctaataatccatgctccaggtacgaggattatggaatgacccctcccacgggccctctcccgagacctggcttcggcccaggcctactgcagtccaccgaactcgtaccgcccgatccacagcagccacaggcttctgccgaggcccccttcgcagcacgcggtatttatagcgaggaaatgccctccgttgcgagacctaggcctgtcggaggaacaacaggctctcaaatccagcatctgactcaagtcggaattgccagcaggattggggcccagccagtcgaaataccgcccagccgcggctctcagtatggcgggcctggctggccctcctatggagaggacgaggctgggcgaagggaggctgtaccccggactagtgggcgcgagccgtctgccccttcaggaaacctgccccatcgcggcctgcagggacccggcttggggtatcctacaagtagcactgaagacctgcagccagggcattcttcagcgagcttgattaaggctatcagggaagagcttctgcgcctgtcccagaagcagtccaccgtgcagaatttccattcatag

SEQ ID NO: 206495 - DNA, 5805 bp, Artificial Sequence
  derived and/or modified sequence
atgcctggtgccaggcgacgcagaagaggggcagccatggaaggaaaacctcgagccggggtggctctcgcgcccgggccctccggccgccgcccgagcgcacgctgtgcgcgccgcagaagacctggtctcctgttgcccggtctgtggctcctgctcttggcccgccccgcttcatgcgcaccagacgagctgagccccgagcaacataatcttagtttatacagtatggagcttgtgctcaagaagtctaccggccactccgccgcgcaggtggcccttacagaaacagcacccggctcccagcactcctcccctctgcacgttactgcacctccaagtgccacgacttttgacactgctttctttaaccagggaaagcagactaagtcaacagccgatccgtcaatcttcgtggccacttatgttagcgtgactagtaaggaggttgcagtgaacgacgacgagatggacaatttcctccccgacactcactggaccacacctagaatggtttcacctattcagtacatcaccgtcagtcctcccggactgcctagagaagcattagagccaatgctgaccccgtcactgccaatggtgtcccttcaagatgaggaagtgacaagcggctggcagaacaccacacgacagcctgccgcatacgccgagagcgctagtcatttccacacctttcgcagtgccttccggactagcgaggggattgttcctacgccaggcaggaacctggtactgtaccctacagatgcttattcacacttgtcttctagaaccttgccggagattgtggcctctcttactgaaggtgtggagaccacattgtttctgagctcaagatctctgatgcctcagcctctgggggatggtatcactatccctctgccgagtctgggggaggttagtcagcctcctgaggaggtatgggccactagtgccgaccggtatacggacgtgaccaccgtactgtcacagagcctggaagaaaccatatccccccgtacgtatcctactgtgaccgcgagccacgcagcactggcattttctaggacacattcccccctcttatctacgcctctcgccttcgcaagcagcgcctcgcccaccgacgttagcagcaatccgttcttaccgtcagactcttcaaaaacctctgagttacactcaaactctgcacttcctggaccagtagacaacacccacattttgtcccccgtcagtagctttcgaccatacacgtggtgcgccgcctgcaccgtcccatctcctcagcaagtgctggctacatcactgatggaaaaagatgttgggagcggagacggcgcggagacattgtgcatgacagtgctagaagaatcctctatctcactgatgagctcagttgttgctgacttcagcgagttcgaggaagatccccaagtgttcaacacgttattcccaagtcggcctattgtccccctgtctagcagaagcatggaaatttcagagacgagcgtgggcatcagcgccgaagtcgacatgtcaagtgtgaccactacacaagtccctcccgctcacggcaggttgtccgtaccggctagtcttgaccccactgctgggtctttgtccgtcgcggaaacacaagtcacccccagcagcgtgaccaccgcattcttctcagtgatcacttcaattctattggatagcagcttctccgtcatcgctaacaagaacacaccttctcttgctgttcgggacccatccgtttttacaccatatagcctcgtaccctctgttgagtcaagtttgtttagcgaccaggagcggtcctctttctcagaacataaaccccgcggggctctcgattttgcttcatctttcttctctactccaccattagagctgtctggcagcataagcagccctagtgaagccccagcttccctcagcttgatgccgtccgatctctctccgttcacctcacaatccttttcacccctggtagaaacatttacactgtttgactcttccgatctgcagagttcccagctttccctgccctccagcaccaacctcgaattctctcaactgcagccatcttctgaattgcctttgaacactattatgctgttaccttcccgcagcgaagtgagcccttggagctctttcccaagtgacagtctggagtttgttgaggcatccaccgtctccctcaccgatagcgaggcccacttcacaagtgcctttatcgagacaacttcatatctggaaagcagcctgatcagtcatgagtccgcagtcacagcgctggtgccccccgggtccgagtcttttgacattctcaccgccggtattcaggctactagtccgctcacaaccgtccatacaacccctattttgacagaaagcagcttattttcaaccctcacaccaccggatgaccagatcagtgccctggatgggcatgttagcgtactcgcctcctttagtaaagctatacccacaggaacggtgctcattactgacgcctacttgccatcgggaagctcctttgtcagtgaggccaccccgtttccattgcccactgagctgacagttgtggggccctcccttacacccactgaggtgcccctgaacacaagtaccgaggtatcaacaactagcactggcgccgccacggggggacccttggattctacactgatgggcgacgccgcctcacagtcccctccggaatccagtgcggccccacccttaccctcacttcgtccggtgacagcttttacccttgaggctacagtagatacaccaacgctcgctaccgccaagcctccatatgtatgtgatattactgtgcctgacgcctacctgataacaaccgtgcttgcgcgcagggcagtgcaggagtacattataactgctatcaaagaagtgctcaggattcactttaatagggcagtggagttgaaggtgtatgaactgtttactgatttcacttttctcgtaactagcgggcccttcgtgtacaccgcaatttctgtcattaacgtgctgatcaattccaagctagtacgggaccaaacccctttgatcctgtctgtgaagcctagcttcctggtgcccgagtcccggtttcaggtgcaaactgtgcttcagttcgtgcccccctcagtggacactggattctgtaatttcacccagcgtatcgaaaaagggctgatgacagccttatttgaggtccgcaagcaccatcagggaacctacaatttaacagttcaaatcctcaacatcacgatctcttcatctcgagtgacaccacgacgcgggccggtaaacatcatatttgctgtcaagtcaactcagggatttcttaacggatccgaggtgtctgagctcctgcgcaatctgtcagttgtggaatttagcttctatctgggatacccagtgcttcagatagctgagccttttcagtatccccagctgaacctgagccagctgctcaagagttcatgggtgaggacggttctgctgggcgttatggagaaacaactgcaaaatgaagtgttccaggctgagatggaacgcaaattggcccagctactgagcgaggtgagcacccgcaggaggatgtggcggcgagccacggtagctgccggcaattccgtggttcaagtggttaacgtgtcacgcctggagggggacgacaaccctgtgcagcttatctacttcgtggaagaccaggatggcgagagactgtcagccgtgaagtcgtcggacttaattaataaaatggatctgcagcgggctgccatcatcctgggatatcggattcaaggcgttatcgcacaacccgtggatagggtgaagcggccatctccagagtcgcagagcaacaatctgtgggtaatcgtaggcgttgtgatccccgtgcttgtggttatggtgatcgtcgtaatactgtattggaaactttgtcggactgacaagctcgattttcagccagacacagtcgccaatatccaacagcggcagaaactacagatccctagtgttaagggtttcgactttgccaagcaacatctaggacagcacaacaaggacgacatactgattatccatgagcccgcccccttgcctggaccgctcaaagaccatactactccctctgaaaatggagacgtaccaagtccaaaaagtaagattcctagtaagaatgtacggcaccgcgggagagtgagtccttctgacgctgactccactgtgtcagaggagagctcagaacgggacgccggggacaagacaccaggcgctgtaaacgatggacgctcacacagggccccacagtcaggccctcccttgccctcctcagggaacgagcagcactcaagcgccagtattttcgagcacgttgacagaattagtaggcctcctgaggcgtcgaggagagtgccttcaaagattcagctgatagctatgcagcccattcccgccccgccagtgcagcgaccatcacccgctgatcgtgtagcggagtcaaacaaaatcaataaggagatacagacagcactgcgccacaagtcagagatcgaacatcaccgtaataagatacgcctcagagccaagaggcgcggccattacgagtttccagtggtggacgatctctcctctggcgataccaaagagaggcatcgggtgtaccggcgagctcaaatgcagatcgataagattctcgaccctaccgcaagtgtaccttcagtgttcattgagccaagaaagtcgagccgtattaagaggtcaccaaagcctcggcgcaagcaccaagtaaatggttgccccgcggatgccgagaaagaccgcctcatcaccaccgattcagatggaacatacaggcgacctccaggtgttcacaacagtgcatatattggatgtccgtctgatcctgacttaccagcggacgtccagactccgtccagcgtggagctgggtcgttatcctgcccttcctttccccgcgagccagtacatcccccctcagccctctatagaagaggctcgccaaacaatgcacagcctgttagacgatgccttcgctttggtcgccccctccagccagccggcttccacagctggagtgggtcccggagttcccccgggcctccctgcaaattcaaccccgtcacaggaggagaggagggccacccagtggggatctttttacagccccgcgcagacagccaataacccttgcagccgatacgaggactatggaatgaccccacccacgggtccgctgcctcgccccggatttggccccgggttgctgcaaagcacagaactagtgccccctgacccccagcagccacaagcctctgccgaggccccctttgccgccaggggtatctattccgaggagatgcccagtgtggcacgccctaggcccgtgggaggaacgacaggcagccagatccagcatctgacccaggttggcatcgcatcacgtatcggggcgcagccagtggaaattcctcccagcaggggttcccaatacggcggaccagggtggccatcatacggagaagatgaagccggacgccgtgaggccgtgcccagaacatccggtcgagagccatccgccccatccggcaacttgccgcatagaggtctacaagggcccggcctggggtacccaacaagttctaccgaggatctgcagcctgggcacagctccgcttcactgattaaagccatccgcgaagagttactacgactgtcccagaagcagtcaacagtccagaatttccactcttag

SEQ ID NO: 206496 - DNA, 5655 bp, Artificial Sequence
  derived and/or modified sequence
atgcactgcaccaacccagccctgatcttcctgattgatgagctgagccctgagcagcacaacctgagcctgtacagcatggagctggtgctgaagaagagcacaggccacagcgctgcccaggtggccctgacagaaacagcccctggcagccagcacagcagccccctgcacgtgacagccccacccagcgccaccacctttgacacagccttcttcaaccagggcaagcagaccaagagcacagctgaccccagcatctttgtggccacctacgtgtctgtgaccagcaaggaggtggccgtgaatgatgatgagatggacaacttcctgcctgacacccactggaccacccccaggatggtgagccccatccagtacatcaccgtgagccccccaggcctgccccgggaggccctggagcccatgctgacccccagcctgcccatggtgtccctgcaggatgaggaggtgaccagcggctggcagaacaccacccggcagcctgctgcctatgcagagagcgccagccacttccacaccttccgcagcgccttccgcaccagcgagggcatcgtgcccaccccaggcaggaacctggtgctgtaccccacagatgcctacagccacctgagcagcaggaccctgcctgagatcgtggccagcctgacagagggcgtggagaccaccctcttcctgagcagccgcagcctgatgccccagcccctgggagatggcatcaccatccccctgcccagcctgggggaggtgtcccagcccccagaggaggtgtgggccaccagcgctgaccgctacacagatgtgaccaccgtgctgagccagagcctggaggagaccatcagccccaggacctaccccaccgtgacagccagccacgccgccctggccttcagcaggacccacagccccctgctgagcacccccctggcctttgccagcagcgccagccccacagatgtgagcagcaaccccttcctgcccagcgacagcagcaagaccagcgagctgcacagcaacagcgccctgcccggccctgtggacaacacccacatcctgagccctgtgagcagcttccggccctacacctggtgtgccgcctgcaccgtgcccagcccccagcaggtgctggccaccagcctgatggagaaggatgtgggcagcggagatggagctgagaccctgtgcatgacagtgctggaggagagcagcatcagcctgatgagctctgtggtggccgacttcagcgagtttgaggaggacccccaggtgttcaacaccctcttccccagccggcccatcgtgcccctgagcagccgctccatggagatcagcgagacctctgtgggcatctctgctgaggtggacatgagctctgtgaccaccacccaggtgcccccagcccacggccgcctgtctgtgcctgccagcctggaccccacagctggcagcctgtctgtggccgagacccaggtgacccccagctctgtgaccacagccttcttcagcgtcatcaccagcatcctgctggacagcagcttctctgtgattgccaacaagaacacccccagcctggccgtgcgggaccccagcgtcttcaccccctacagcctggtgcccagcgtggagagcagcctcttcagtgaccaggagaggagcagcttcagcgagcacaagcccaggggggccctggactttgccagcagcttcttcagcaccccacccctggagctgagcggcagcatcagcagccccagcgaggccccagccagcctgagcctgatgcccagcgacctgagccccttcaccagccagagcttcagccccctggtggagaccttcaccctgtttgacagcagtgacctgcagagcagccagctgagcctgcccagcagcaccaacctggagttcagccagctgcagcccagcagcgagctgcccctgaacaccatcatgctgctgcccagccgctctgaggtgagcccctggagcagcttccccagcgacagcctggagtttgtggaggccagcacagtgtccctgacagacagcgaggcccacttcaccagcgccttcatcgagaccaccagctacctggagagcagcctcatcagccatgagagcgctgtgacagccctggtgcccccaggcagcgagagctttgacatcctgacagctggcatccaggccaccagccccctgaccaccgtgcacaccacccccatcctgacagagagcagcctcttcagcaccctgaccccaccagatgaccagatcagcgccctggatggccacgtgtctgtgctggccagcttcagcaaggccatccccaccggcaccgtgctgatcacagatgcctacctgcccagcggcagcagctttgtgtctgaggccacccccttccccctgcccacagagctgactgtggtgggccccagcctgacccccacagaggtgcccctgaacaccagcacagaggtgtccaccaccagcactggagctgccaccggcggccccctggacagcaccctgatgggagatgctgccagccagagccccccagagagcagcgctgccccacccctgcccagcctgcggcctgtgacagccttcaccctggaggccaccgtggacacccccaccctggccacagccaagccaccctacgtgtgtgacatcaccgtgcctgatgcctacctgatcaccaccgtgctggccaggagagctgtgcaggagtacatcatcacagccatcaaggaggtgctgcgcatccacttcaacagagctgtggagctgaaggtgtatgagctgttcacagacttcaccttcctggtgaccagcggcccctttgtgtacacagccatcagcgtcatcaacgtgctgatcaacagcaagctggtgcgggaccagacccccctcatcctgtctgtgaagcccagcttcctggtgcctgagagccgcttccaggtgcagacagtgctgcagtttgtgccccccagcgtggacaccggcttctgcaacttcacccagagaattgagaagggcctgatgacagccctgtttgaggtgaggaagcaccaccagggcacctacaacctgactgtgcagatcctgaacatcaccatcagcagcagccgggtgaccccccggcggggccctgtgaacatcatctttgctgtgaagagcacccagggcttcctgaatggcagcgaggtgtctgagctgctgaggaacctgtctgtggtggagttctccttctacctgggctaccctgtgctgcagattgctgagcccttccagtacccccagctgaacctgagccagctgctgaagagctcctgggtgaggacagtgctgctgggcgtgatggagaagcagctgcagaatgaggtgttccaggccgagatggagaggaagctggcccagctgctgtctgaggtgtccaccaggaggaggatgtggaggcgggccaccgtggccgccggcaacagcgtggtgcaggtggtgaatgtgtcccggctggagggagatgacaaccctgtgcagctgatctactttgtggaggaccaggatggagagcggctgtctgctgtgaagagcagtgacctgatcaacaagatggacctgcagagagctgccatcatcctgggctaccgcatccagggcgtcatcgcccagcctgtggacagagtgaagaggcccagccctgagagccagagcaacaacctgtgggtgattgtgggcgtggtgattcctgtgctggtggtgatggtgattgtggtgatcctgtactggaagctgtgcaggacagacaagctggacttccagcctgacacagtggccaacatccagcagaggcagaagctgcagatccccagcgtgaagggctttgattttgccaagcagcacctgggccagcacaacaaggatgacatcctgatcatccacgagcccgcccccctgcccggccccctgaaggaccacaccacccccagtgaaaatggagatgtgcccagccccaagagcaagatccccagcaagaatgtgcgccaccggggccgggtgagccccagtgatgctgacagcacagtgtctgaggagagcagcgagagagatgctggggacaagaccccaggagctgtgaatgatggccgcagccaccgggccccccagagcggcccccccctgcccagcagtggaaatgagcagcacagcagcgccagcatctttgagcacgtggaccgcatcagcaggcctcctgaggccagccggcgggtgcccagcaagatccagctgattgccatgcagcccatcccagcccctcctgtgcagaggcccagccctgctgacagagtggccgagagcaacaagatcaacaaggagatccagacagccctgcggcacaagtcagaaattgagcaccacaggaacaagatccggctgcgggccaagagaagaggccactatgagttccctgtggtggatgacctgagcagcggggacaccaaggagcggcaccgggtgtaccgccgggcccagatgcagattgacaagatcctggaccccacagcctctgtgcccagcgtcttcatcgagcccaggaagagcagccgcatcaagaggagccccaagcccaggaggaagcaccaggtgaatggctgcccagcagatgctgagaaggacaggctcatcaccacagacagtgatggcacctacagaagacctcctggggtgcacaacagcgcctacatcggctgccccagcgaccctgacctgcctgcagatgtgcagacccccagctctgtggagctgggccgctacccagccctgcccttccctgccagccagtacatccccccccagcccagcattgaggaggcccggcagaccatgcacagcctgctggatgatgcctttgccctggtggcccccagcagccagcctgccagcacagctggggtgggccctggggtgcccccaggcctgcctgccaacagcacccccagccaggaggagcggcgggccacccagtggggcagcttctacagccctgcccagacagccaacaacccctgcagccgctatgaggactatggcatgaccccacccaccggccccctgccccggcccggcttcggccctggcctgctgcagagcacagagctggtgcccccagacccccagcagccccaggccagcgctgaggccccctttgctgcccggggcatctacagcgaggagatgcccagcgtggcccggcccaggcctgtgggcggcaccaccggcagccagatccagcacctgacccaggtgggcatcgccagcagaattggagcccagcctgtggagatcccccccagccggggcagccagtatggaggccctggctggcccagctatggagaagatgaagctggaagaagagaggccgtgcccaggaccagcggccgggagcccagcgcccccagcggcaacctgccccaccggggcctgcagggccctggcctgggctaccccaccagcagcacagaggacctgcagcccggccacagcagcgccagcctcatcaaggccatccgggaggagctgctgcggctgagccagaagcagagcacagtgcagaacttccacagctag

SEQ ID NO: 206497 - DNA, 5805 bp, Artificial Sequence
  derived and/or modified sequence
atgcctggggccaggagaagaagaagaggagctgccatggagggcaagcccagggctggggtggccctggcccctggccccagcggccggcggcccagcgcccgctgtgccaggagaagaagacctggcctgctgctgcccggcctgtggctgctgctgctggcccggcctgccagctgtgccccagatgagctgagccctgagcagcacaacctgagcctgtacagcatggagctggtgctgaagaagagcacaggccacagcgctgcccaggtggccctgacagaaacagcccctggcagccagcacagcagccccctgcacgtgacagccccacccagcgccaccacctttgacacagccttcttcaaccagggcaagcagaccaagagcacagctgaccccagcatctttgtggccacctacgtgtctgtgaccagcaaggaggtggccgtgaatgatgatgagatggacaacttcctgcctgacacccactggaccacccccaggatggtgagccccatccagtacatcaccgtgagccccccaggcctgccccgggaggccctggagcccatgctgacccccagcctgcccatggtgtccctgcaggatgaggaggtgaccagcggctggcagaacaccacccggcagcctgctgcctatgcagagagcgccagccacttccacaccttccgcagcgccttccgcaccagcgagggcatcgtgcccaccccaggcaggaacctggtgctgtaccccacagatgcctacagccacctgagcagcaggaccctgcctgagatcgtggccagcctgacagagggcgtggagaccaccctcttcctgagcagccgcagcctgatgccccagcccctgggagatggcatcaccatccccctgcccagcctgggggaggtgtcccagcccccagaggaggtgtgggccaccagcgctgaccgctacacagatgtgaccaccgtgctgagccagagcctggaggagaccatcagccccaggacctaccccaccgtgacagccagccacgccgccctggccttcagcaggacccacagccccctgctgagcacccccctggcctttgccagcagcgccagccccacagatgtgagcagcaaccccttcctgcccagcgacagcagcaagaccagcgagctgcacagcaacagcgccctgcccggccctgtggacaacacccacatcctgagccctgtgagcagcttccggccctacacctggtgtgccgcctgcaccgtgcccagcccccagcaggtgctggccaccagcctgatggagaaggatgtgggcagcggagatggagctgagaccctgtgcatgacagtgctggaggagagcagcatcagcctgatgagctctgtggtggccgacttcagcgagtttgaggaggacccccaggtgttcaacaccctcttccccagccggcccatcgtgcccctgagcagccgctccatggagatcagcgagacctctgtgggcatctctgctgaggtggacatgagctctgtgaccaccacccaggtgcccccagcccacggccgcctgtctgtgcctgccagcctggaccccacagctggcagcctgtctgtggccgagacccaggtgacccccagctctgtgaccacagccttcttcagcgtcatcaccagcatcctgctggacagcagcttctctgtgattgccaacaagaacacccccagcctggccgtgcgggaccccagcgtcttcaccccctacagcctggtgcccagcgtggagagcagcctcttcagtgaccaggagaggagcagcttcagcgagcacaagcccaggggggccctggactttgccagcagcttcttcagcaccccacccctggagctgagcggcagcatcagcagccccagcgaggccccagccagcctgagcctgatgcccagcgacctgagccccttcaccagccagagcttcagccccctggtggagaccttcaccctgtttgacagcagtgacctgcagagcagccagctgagcctgcccagcagcaccaacctggagttcagccagctgcagcccagcagcgagctgcccctgaacaccatcatgctgctgcccagccgctctgaggtgagcccctggagcagcttccccagcgacagcctggagtttgtggaggccagcacagtgtccctgacagacagcgaggcccacttcaccagcgccttcatcgagaccaccagctacctggagagcagcctcatcagccatgagagcgctgtgacagccctggtgcccccaggcagcgagagctttgacatcctgacagctggcatccaggccaccagccccctgaccaccgtgcacaccacccccatcctgacagagagcagcctcttcagcaccctgaccccaccagatgaccagatcagcgccctggatggccacgtgtctgtgctggccagcttcagcaaggccatccccaccggcaccgtgctgatcacagatgcctacctgcccagcggcagcagctttgtgtctgaggccacccccttccccctgcccacagagctgactgtggtgggccccagcctgacccccacagaggtgcccctgaacaccagcacagaggtgtccaccaccagcactggagctgccaccggcggccccctggacagcaccctgatgggagatgctgccagccagagccccccagagagcagcgctgccccacccctgcccagcctgcggcctgtgacagccttcaccctggaggccaccgtggacacccccaccctggccacagccaagccaccctacgtgtgtgacatcaccgtgcctgatgcctacctgatcaccaccgtgctggccaggagagctgtgcaggagtacatcatcacagccatcaaggaggtgctgcgcatccacttcaacagagctgtggagctgaaggtgtatgagctgttcacagacttcaccttcctggtgaccagcggcccctttgtgtacacagccatcagcgtcatcaacgtgctgatcaacagcaagctggtgcgggaccagacccccctcatcctgtctgtgaagcccagcttcctggtgcctgagagccgcttccaggtgcagacagtgctgcagtttgtgccccccagcgtggacaccggcttctgcaacttcacccagagaattgagaagggcctgatgacagccctgtttgaggtgaggaagcaccaccagggcacctacaacctgactgtgcagatcctgaacatcaccatcagcagcagccgggtgaccccccggcggggccctgtgaacatcatctttgctgtgaagagcacccagggcttcctgaatggcagcgaggtgtctgagctgctgaggaacctgtctgtggtggagttctccttctacctgggctaccctgtgctgcagattgctgagcccttccagtacccccagctgaacctgagccagctgctgaagagctcctgggtgaggacagtgctgctgggcgtgatggagaagcagctgcagaatgaggtgttccaggccgagatggagaggaagctggcccagctgctgtctgaggtgtccaccaggaggaggatgtggaggcgggccaccgtggccgccggcaacagcgtggtgcaggtggtgaatgtgtcccggctggagggagatgacaaccctgtgcagctgatctactttgtggaggaccaggatggagagcggctgtctgctgtgaagagcagtgacctgatcaacaagatggacctgcagagagctgccatcatcctgggctaccgcatccagggcgtcatcgcccagcctgtggacagagtgaagaggcccagccctgagagccagagcaacaacctgtgggtgattgtgggcgtggtgattcctgtgctggtggtgatggtgattgtggtgatcctgtactggaagctgtgcaggacagacaagctggacttccagcctgacacagtggccaacatccagcagaggcagaagctgcagatccccagcgtgaagggctttgattttgccaagcagcacctgggccagcacaacaaggatgacatcctgatcatccacgagcccgcccccctgcccggccccctgaaggaccacaccacccccagtgaaaatggagatgtgcccagccccaagagcaagatccccagcaagaatgtgcgccaccggggccgggtgagccccagtgatgctgacagcacagtgtctgaggagagcagcgagagagatgctggggacaagaccccaggagctgtgaatgatggccgcagccaccgggccccccagagcggcccccccctgcccagcagtggaaatgagcagcacagcagcgccagcatctttgagcacgtggaccgcatcagcaggcctcctgaggccagccggcgggtgcccagcaagatccagctgattgccatgcagcccatcccagcccctcctgtgcagaggcccagccctgctgacagagtggccgagagcaacaagatcaacaaggagatccagacagccctgcggcacaagtcagaaattgagcaccacaggaacaagatccggctgcgggccaagagaagaggccactatgagttccctgtggtggatgacctgagcagcggggacaccaaggagcggcaccgggtgtaccgccgggcccagatgcagattgacaagatcctggaccccacagcctctgtgcccagcgtcttcatcgagcccaggaagagcagccgcatcaagaggagccccaagcccaggaggaagcaccaggtgaatggctgcccagcagatgctgagaaggacaggctcatcaccacagacagtgatggcacctacagaagacctcctggggtgcacaacagcgcctacatcggctgccccagcgaccctgacctgcctgcagatgtgcagacccccagctctgtggagctgggccgctacccagccctgcccttccctgccagccagtacatccccccccagcccagcattgaggaggcccggcagaccatgcacagcctgctggatgatgcctttgccctggtggcccccagcagccagcctgccagcacagctggggtgggccctggggtgcccccaggcctgcctgccaacagcacccccagccaggaggagcggcgggccacccagtggggcagcttctacagccctgcccagacagccaacaacccctgcagccgctatgaggactatggcatgaccccacccaccggccccctgccccggcccggcttcggccctggcctgctgcagagcacagagctggtgcccccagacccccagcagccccaggccagcgctgaggccccctttgctgcccggggcatctacagcgaggagatgcccagcgtggcccggcccaggcctgtgggcggcaccaccggcagccagatccagcacctgacccaggtgggcatcgccagcagaattggagcccagcctgtggagatcccccccagccggggcagccagtatggaggccctggctggcccagctatggagaagatgaagctggaagaagagaggccgtgcccaggaccagcggccgggagcccagcgcccccagcggcaacctgccccaccggggcctgcagggccctggcctgggctaccccaccagcagcacagaggacctgcagcccggccacagcagcgccagcctcatcaaggccatccgggaggagctgctgcggctgagccagaagcagagcacagtgcagaacttccacagctag

SEQ ID NO: 206498 - DNA, 5655 bp, Artificial Sequence
  derived and/or modified sequence
atgcactgcaccaaccccgccctgatcttcctgatcgacgagctgtccccggagcaacataatctgtcgctgtactcaatggaactagtgctgaaaaaatcgaccggccattccgcggcccaagtagctctgacagaaaccgctccgggatcccagcatagctctcccctgcacgtgacggcacctccatctgctaccacctttgacacagcgttttttaaccaggggaaacagactaagagcactgccgatccgtccatatttgttgccacctatgtctcggtgaccagtaaggaggtcgccgtcaatgacgacgaaatggacaatttcctgccagacacacattggacgactcctaggatggtatctccaatccagtatataacggtgtcgccacccggcctgccacgcgaagccttggagcccatgctgacgccaagcttgcccatggtgtctctgcaggacgaggaggtgacttcaggctggcagaacaccacccggcagccagctgcctatgccgaatcagcctctcacttccatactttcagaagcgcattccgcacatccgagggaatcgttcctactccagggaggaatctggttctgtatcctactgatgcttattcccatttaagctccaggaccctgccagagattgtggcttctctgaccgaaggagttgagactaccctcttcctttcctcccgaagcctaatgccacagccactgggagacggcataaccatccctctgccgtctctgggggaggtctctcagcctcccgaggaggtgtgggccaccagcgccgatagatacaccgatgtgacaacagtgttgtctcagagtctcgaggaaacaataagcccccgcacgtaccccactgtgaccgctagccatgctgcgttagccttctcccgtacccacagtccactgctgtccactcctctggcatttgctagcagcgcctctccgacggacgtctccagtaatccgttcctccccagtgacagctctaaaacatctgaactccactctaactccgcactccccgggccggtggataacactcacattctctcccccgtttcttcattccggccttacacctggtgtgccgcctgcaccgtaccaagcccacagcaggtcctggctacgtccctcatggaaaaagacgttggctctggagacggagcagagaccctgtgcatgacggtgctggaggaatcatccattagcttgatgtcatcagtggtggccgacttcagcgagtttgaagaagatccacaggtcttcaacaccctgttcccaagcaggcccattgtccccctaagctctaggagcatggaaatcagcgaaacatcagtgggaataagcgccgaagtggacatgtcatccgttacgacaactcaggtccccccagctcacgggaggctgtccgtgcccgcctctcttgatcctacagcagggagtctctctgtggccgagactcaggtaacaccatcaagcgttacaacagccttttttagcgttatcacatcaattttactggactcctccttctctgtgatagctaacaagaacaccccaagcctagccgtaagggacccatctgtgtttactccctactctctggtgccaagcgtggagagttccctcttttccgaccaggagaggtcctccttctctgagcacaagccgaggggagccttagactttgcttcctcatttttctcgacgcccccactagaactgtctgggagcatctcgtccccgtccgaagctcccgcatccttaagcctaatgcctagcgacctgtctccatttactagccagtcattcagccctcttgtagagacatttaccctcttcgacagcagcgacctccagagctcccagttgtctctgccttcctccacaaacctggagttcagtcagctccaaccctccagtgaactccctttgaatacaatcatgctcctcccctcacgatcagaggttagtccttggtcaagctttcccagcgattctttggaattcgtggaagctagcacggtgtccctcactgattcggaagctcatttcactagcgcgttcatcgagactacaagctatctagaaagctcactgatttcccatgaatcagccgtgaccgccctagtgcctccagggtctgagagtttcgacatccttaccgccggaatacaggccaccagcccactcacgacagtgcacacaacacctattcttacagagagctccctcttttccacgctgacgccccctgacgaccagattagtgctctcgatgggcacgtttctgttttggcctctttcagcaaggctatccctacaggcacagtcctaattaccgacgcatatctcccctctggcagcagcttcgtaagtgaggccacacccttccccctccccactgaattaaccgtcgtaggaccatcgctaacgccaacagaggttccacttaatacatctaccgaggtaagtaccaccagcaccggagctgctactggtgggccattggactcgacactcatgggtgatgctgcatcccagagccctcccgaaagtagtgccgcccctccgctgccctctctgcggccggtgactgcatttaccctggaggcaactgtggacactccaacactagccaccgccaagcccccctacgtatgtgacattacagtccctgacgcctatcttatcactacagtgcttgctcgccgggccgtccaggagtacatcatcacggcaatcaaggaagtgctgagaatccactttaaccgcgccgtggaactcaaagtgtatgagctctttaccgatttcacttttctcgtaacgtccggaccatttgtatataccgccatttctgttataaacgtattaattaacagcaaactggttagagatcagacgcccctcattttgagcgtcaaaccttcttttcttgtccccgagagtcgtttccaggttcaaaccgtgctccagtttgtgcctccctcagtagacacaggtttttgtaacttcacacaaaggatcgagaaaggcctcatgacggcactgtttgaggtgcgcaaacaccatcagggcacctataatttgaccgtgcaaatcctgaatataacaatatctagctcccgagtgacaccccggagaggcccagtgaacataatttttgctgtcaaaagtactcaaggtttcttaaacgggagcgaagtgagtgagctgcttcggaacctctctgtagtcgagttctccttttacctgggttatccggttctgcaaattgctgaacctttccagtacccacaactgaatctgagccagctgctgaagtcctcttgggttcgaactgtgctgctgggagtgatggagaagcaacttcagaacgaagtgtttcaagccgaaatggagaggaagttggcccaactcctaagcgaagtgtccacacgacggcgaatgtggcgacgcgcgaccgttgcagccggcaattccgtcgtgcaggtcgttaatgtctcacggcttgagggggacgacaatccagtccaactgatctacttcgtggaggatcaggacggagaaaggttaagtgcagtgaaatcgagtgatctgatcaacaaaatggatctgcagcgcgccgcaatcatattaggatatcggatacagggcgtaatcgctcagcctgtggacagggtaaagaggcctagcccagaatcacaatccaataacctgtgggtgatcgttggcgtggtgatccctgtactcgtggtaatggtcatagtggtgatcctttactggaagctttgccgaacagataaactggacttccaaccagacacagtcgctaacatccaacagcgtcaaaagctccagatcccatcggtgaaaggcttcgactttgccaagcaacacctgggccaacacaataaagatgacatcctgataatccatgaaccggcaccattgcccggtcctctgaaggatcacacaacccctagcgagaacggcgacgtgccatcacctaagtctaagatcccatcaaagaacgtcagacaccgaggcagagttagtcccagtgacgccgatagcactgtgtctgaagaatcatcggagagggatgctggggacaaaactccaggcgccgtaaacgatggtagaagtcatagagcaccacaatccggacctccgctgccctcgtccgggaacgagcagcactccagcgcctccatcttcgagcatgtggatagaatctctagaccacctgaagccagtcgacgcgtaccatcaaaaatacagctgatcgccatgcagccaatccctgctccgcccgttcagagaccatctccagccgatcgcgtggccgagagtaacaagattaataaggagatccagacagccctcagacacaagtccgagatagagcaccataggaacaaaatccgtctgcgggcaaaaagaagggggcattacgaatttcctgtggtcgatgacttgtcctcaggggacaccaaggagcggcatagggtgtacaggagagcccaaatgcagattgataaaattttagaccccactgcttcggtgcccagcgttttcatagagccacggaaaagctcccgcattaagcgcagtcctaaacctcgccgcaagcaccaggtgaatggatgtccggccgatgcagagaaagacaggctgatcactactgacagtgatggtacatacaggcggccccccggtgtccacaacagcgcctacattggctgtccctccgaccccgacctgcccgccgatgtgcagacgccttcttcggtggagttgggcaggtaccccgcattgccatttccagcctcacagtatatccccccccagcctagcatcgaggaagcccgccagactatgcattccctcctcgacgacgcttttgcgttagtcgcaccatcatctcagcccgcctccaccgctggcgtgggcccgggggtgccccctggactgcctgctaactcaactcccagtcaagaagaacgaagggcaacgcaatggggctccttttattccccagcccaaaccgcgaataatccttgtagcaggtacgaggattacggaatgacccccccaaccggtccactgcccagacctggattcggtcccggcctcctgcagagcacggagttggtaccccccgatccccaacaaccacaggcgagcgcagaagcgccttttgccgctaggggtatctactccgaggagatgccatctgtggcccggcctaggcccgtgggaggcactaccggttctcagatccagcatctgacccaggtggggatagccagcaggatcggggctcaacctgtggaaattccaccttccagaggatctcagtatgggggcccaggctggccttcttacggcgaagatgaggcgggccgaagagaggctgtaccaaggacaagtgggcgtgagcctagtgccccttcaggcaacctcccacataggggtctgcagggtcctgggcttggctacccgacaagtagtaccgaagaccttcagcctggacactccagtgcatccctgatcaaagctattagagaggagctgctgcggttgtctcaaaagcagagtacggttcagaactttcattcctag

SEQ ID NO: 206499 - DNA, 5805 bp, Artificial Sequence
  derived and/or modified sequence
atgcccggcgcccggcggcggcggcggggcgccgccatggagggcaagccccgcgctggggtcgcccttgctcctggcccctctggccgaagaccgtctgcacgctgtgcccggaggcgccggcctgggttgctgcttccagggctgtggcttcttctcctcgcgcgacctgcctcttgcgcacctgatgaactgtctcccgaacagcacaatctctccttatactcgatggagctggttctgaagaagtctacagggcactcagcagcccaggtggcacttactgagacagcccccggctcccagcattcctctcccctccatgtgacagccccaccatcagcaaccacatttgacacagctttcttcaatcagggaaagcaaacaaagagtacggccgacccctctatcttcgttgcaacttatgtctcagtaactagcaaagaggtggctgtgaacgacgatgagatggataactttctgccagacacccactggactaccccccggatggtcagcccaatacagtacatcacggtttcccctcctgggctgccaagggaggcactggagcctatgttgacgccatccctgcccatggtcagccttcaggatgaggaggttacatcaggatggcagaataccacacggcaaccagccgcttatgcggaaagcgcaagccacttccacacatttcgatctgcatttcgaacctccgagggtattgtccctactcccggtcggaacttagtgctgtaccccactgatgcttatagtcacctctcatcccgaaccctacccgaaattgtggctagtctcacagagggcgtcgagactaccctgtttttaagtagcagatctctgatgccacagcccttgggtgatggtatcactatcccgctgccttctctgggtgaggtctcccagcctccagaagaggtatgggccacaagcgccgatcggtatactgatgtaacaacggttcttagtcagtctctggaagaaacgatttccccgcgcacataccctactgtcacagcctcccacgccgcgctcgctttctcacggacgcatagcccattactcagtacaccgttagctttcgcttcgagtgcttccccaacggacgtttccagcaacccattcctccccagcgatagtagcaagacgagcgaactccatagtaattctgcactccctggtcctgtggacaacactcatatcctgagtcccgtctcgtcttttcgcccctacacctggtgcgccgcatgcaccgtaccctctccccaacaagttttggctacctcactcatggagaaggatgtcggatcgggagatggggctgagaccttgtgtatgactgtgctggaggagtctagtattagtctgatgtcttctgtcgtggctgacttctctgagttcgaggaagatccccaggttttcaatacgctgtttccttctagaccaatcgtccctcttagcagtagatcgatggagatatctgagacctccgtagggatttcagccgaggtcgatatgtcaagcgtgactaccactcaagtccctcccgcccatggaaggttatctgtccctgccagcctcgaccctacagccggatctctgtcggtcgccgagactcaggtcacaccaagctctgtcactaccgccttcttcagcgtaattacgagtattctactcgatagctcatttagtgtaatcgctaacaagaacactcccagcttggctgtgagggacccatccgtgttcaccccctactccctggttccaagcgtggagtcttcactattctctgaccaagaaagaagttcctttagcgaacacaagccacggggtgccttagactttgcttcaagctttttttctacgcctcctctggagcttagcgggagcataagctccccttccgaggccccagcttccctgtcacttatgccgtcagatctgtcacctttcacctcacagagttttagtcctctggtggaaacatttactctctttgattcatctgacctccagtccagccaactgtcgctgccttcctcgaccaatcttgagttcagccagctgcaaccgtcaagtgaattgcctctgaacacgataatgttgttgccttcgcggagtgaagttagcccatggtcctcttttccctcagattccctcgagttcgtagaggcctccaccgtgtccctgacggactcagaggcacatttcacttctgcctttatcgaaaccaccagttacctcgaaagtagcttgatcagccacgagtccgccgtgaccgccctcgtcccgcccggctccgaatcatttgatattcttacggccggcatccaggcaacctctcccctgaccaccgtacacaccaccccaatactcactgagtcatccctgtttagcaccctgacccctccagacgaccaaattagtgccctagacggccacgtcagcgtactggcaagtttctcgaaggcaatacccactggcactgtgctgataaccgacgcctacctacccagcggtagtagttttgtttccgaagcaacaccttttcctctgcctacggaattgaccgtcgtaggtccctccctaactccaactgaagttccactgaatacaagtactgaggtgagcacaacaagcactggtgccgctactgggggaccactcgactccactcttatgggcgatgccgcttcacaatcaccacccgaaagctctgcagcgccaccattaccttccctgaggcccgtcactgcatttactctggaagcaactgtggacaccccgacactcgcaacagccaagcccccctatgtctgtgatattacggtgcctgatgcgtacttgattacaacggtattggctagaagggccgtacaggaatatataataacagcaataaaagaggttctgaggatccatttcaatagagccgtagagctaaaggtctatgagctgttcactgacttcactttcctggtcacttccggaccattcgtgtatacggctattagcgtaattaatgttctaatcaacagcaagctggtgagggatcagacaccactcattctcagcgttaagcccagttttctggtgccggagtcccgattccaggtacagactgtcctccaattcgtcccaccctccgttgacaccggcttttgcaacttcacacaaagaattgagaagggtctgatgacagcactgtttgaagtgcgcaaacaccatcaaggcacctataacctcaccgtgcaaatcctgaacataaccatcagttcatcaagagtgacgcccaggagaggacccgtgaatattatcttcgccgtgaaaagtactcagggttttttgaacggctctgaggtgagtgagctgctcagaaatctctccgttgtggaattcagcttttacctgggatacccagtgctgcaaatcgccgagccgttccagtatcctcaacttaacctcagtcagctgctgaagagctcatgggtcaggacagtgctgctaggagtcatggagaaacagctgcagaatgaggtttttcaggccgagatggagcgaaaactcgcacagctgctttccgaagttagcaccagaaggaggatgtggcgcagggcaactgtggcagccgggaacagcgtcgtgcaggtggtaaatgtgtcacggctagagggtgatgataatcccgtgcagttgatatacttcgtggaggatcaggatggagagcgtctcagcgctgtgaaaagcagcgatctgattaacaagatggacctacaacgggcagccataattcttgggtataggatacagggtgtgatcgcgcagcccgtcgatcgcgttaagcggccctcgccagaaagtcagtcaaacaatttatgggtgattgtgggcgtggtgattccagtgctcgtggtgatggtgattgtggtcatcttatattggaaattgtgcaggacagacaagctcgactttcaacctgataccgttgcgaacatccagcagagacagaaactgcagatcccctctgtcaagggctttgactttgccaagcagcacctgggccagcataacaaagacgacatcctaataattcacgagcccgctccacttccagggcctctcaaagatcacaccacaccatctgaaaatggtgatgtgccaagccctaaatcaaaaatcccttctaagaacgtacgacatcggggcagagtttctcccagtgacgccgactctaccgtcagcgaggagagttccgagagagatgccggcgacaaaacgcctggagctgttaacgacggaaggagccatcgcgccccccagagtgggcccccgctaccctcctctgggaatgaacagcacagttctgctagcatctttgagcacgtcgaccgtatcagtaggccccccgaagcaagcagacgggttcccagtaagatccagttgattgcaatgcagccaatacccgccccgcctgtgcaacgcccctcccctgccgacagagtggcagaatctaataagatcaacaaggagatccagactgcattgcggcacaagtccgaaattgagcatcataggaacaagattcgtctgcgggccaagcgtcggggacattatgaattcccagtcgtggacgaccttagttccggagataccaaagagcggcacagggtctatcggagagcccaaatgcaaatcgacaaaatcctcgatccaacagccagtgtgccgtccgtgtttatagaacctaggaaatcatctagaattaaacgttctccgaagccccgccgaaaacatcaagtaaacggctgcccagccgacgccgagaaggacagacttatcacgaccgatagcgacggaacctatcgcaggccgcccggggtgcataattccgcctacattggttgtccttcggaccccgacctgcccgccgacgttcagactccaagttcggtggaacttgggagataccccgcactgccatttcccgcctcacagtacataccgcctcagccgtctattgaagaagccagacaaactatgcatagtctcctcgacgatgcgtttgcccttgtggctccctctagtcagcctgcctccactgccggtgtggggcccggagttccacctggcctgcctgccaattccaccccctcccaggaagaaaggagggctacccagtggggctcattctattccccagctcagactgcaaacaacccatgttctagatacgaagattatggtatgacccctcccactggcccgttgccgaggcctggattcggccccggtttgctccagtctactgaactggtccctccggatccacagcagccacaagcatcggctgaagcccccttcgcagctcggggcatctattccgaagagatgccaagtgtcgcaaggcccagaccagtgggcggcacaaccggcagtcaaattcagcacctgacgcaggttggcatcgcctctagaattggcgctcagcccgtagaaattcccccaagccgcgggagtcagtacgggggtcccgggtggcctagctatggcgaagatgaagcaggccgccgggaagcagtgccacggacaagtgggagggagccatcggccccaagtggaaatctgcctcacaggggactccagggtccaggactggggtaccctacaagtagtactgaagaccttcaacctggacattccagcgcctccctgataaaagccatccgtgaagaattgctgcggctttcccaaaagcagagcaccgtccaaaactttcactcttag

SEQ ID NO: 206500 - DNA, 5655 bp, Artificial Sequence
  derived and/or modified sequence
atgcactgcactaaccctgccctgatctttctgatagacgagcttagcccagagcagcacaatctatccttgtacagcatggaactggtgctaaagaagtcgaccgggcattctgctgctcaggtcgccctgacggaaacagcaccagggtctcagcattcatcgcctctgcacgttactgctcccccttcagccaccacatttgatacggcttttttcaaccagggtaagcagaccaagtctacggcggatcctagcatcttcgttgctacctatgtctcagtgacttcaaaggaggtcgcggtcaacgatgatgagatggacaatttcctgcctgacacccactggacaactcccaggatggtgagccctatccaatatatcaccgtgtctcctcctggcctgcctcgcgaggctctggagcctatgctcacgcccagtctgccaatggtaagcctgcaggacgaagaagttactagtgggtggcagaacacaacccgtcaaccggcagcatacgcggagtctgcaagccatttccatacatttaggtccgctttccgcactagtgagggcatcgtgcccaccccaggtaggaatttagttctgtatccgactgatgcttacagccatctctcaagtcgaaccttgcccgagattgtcgcttcgctgacagaaggggtggaaaccacgctgttcctcagctcacgttccctgatgcctcagccgttgggcgacgggatcactatccccctgccttccctgggcgaggtgagtcagccaccagaggaagtgtgggccacaagtgcagataggtacaccgatgtgacaacagtgctaagtcagtcgttggaggaaacaatctcccccagaacatacccaacggtaacggccagtcacgccgctctggcattttcccgcacccatagcccgttgttgtcaactccacttgccttcgcaagctccgcctcacctaccgacgtcagttctaacccattcttgccttccgactcctccaaaaccagcgaacttcattcaaatagcgccttgccagggcctgtcgacaacacccacatcctgagtccggtcagcagcttccgcccatacacctggtgtgcagcctgcaccgtcccatcaccccaacaggttctagcgacctccttaatggagaaggatgtaggctcgggggatggtgccgaaacactctgcatgactgtccttgaagagagctctatttccctgatgtcttcggtggtggctgatttttctgaatttgaggaggatcctcaggtgtttaatacactgttcccctcaagaccgattgtccccctgtctagtaggtcaatggagattagtgagacctcagttggcatctctgcagaggtcgacatgtcttcagtaacgacaacccaggtgcccccagcacacggtcgtttatccgtgccagcctccctggaccccacggctggctccctctctgttgccgaaacgcaagtgacaccgtcctccgtcacaacagcattcttcagcgtcatcacgtcaatcctgctcgactctagcttttcagtgatcgcaaataaaaacacgccctccctggcagttcgggatccttctgtgtttaccccttacagcttggtgccatccgtggaatcgagccttttttccgaccaggaacgcagttcgttcagcgagcacaagccgagaggcgcacttgatttcgcgagttcattcttttctacgcctcctcttgagctctcaggctccatctcctccccctccgaggctcctgcctccctgtccctgatgccgtccgatctatctccctttactagccagtcatttagcccactcgtagaaacctttaccctgtttgatagctccgacttgcagagcagccagctttcgttaccctcctctacaaacttggagttcagccaattacagcccagctctgaattgcccttaaacaccatcatgctgctgccaagccgctctgaagttagcccctggtcaagctttccgagcgactctctcgaatttgtggaagcttccacagtgtccctaacagactccgaagcccacttcactagtgcttttattgagactacgtcctacctagaatctagtctcatatcccatgagagcgccgtgaccgccctcgtccccccagggtctgagagctttgacatcctcactgccggtatccaagcgacaagcccgctcaccacagtgcataccacccccattctgacggagtcaagcctgttttcgacactcaccccgccagatgaccaaatatccgcccttgatgggcacgtgtctgttttggcttcgttcagtaaggccattcccacggggacagtacttatcactgatgcatacctcccatctggctcctcctttgtctccgaggccacccccttcccactgccaaccgagctaactgtcgtaggtccttcactcacgccaacagaggtgcctctgaatacttctacagaagtttctacaacttcaaccggtgccgctacaggcggaccgttggatagtacccttatgggggatgcagcttctcagtctcccccagaaagcagcgcagcccctcctctccccagtcttaggccggttaccgcgtttacattggaagccaccgtggatacaccaactctggcaacagcgaaaccgccttatgtgtgtgacatcactgttcctgacgcctacctcattaccacagtcctcgcgcgtagagcagtgcaggagtatatcatcactgcaataaaagaagtgctacggatacacttcaatagggcggtcgaactgaaggtgtatgaactttttacggactttacattcctggtcacatccggcccattcgtgtacaccgctatatcagtgataaacgttctgataaactcaaaactggtaagagatcagacccccctgatcctctctgtcaagccgagctttctcgtgccagagagtcgctttcaggtccaaacggtgctccaattcgtgccaccaagtgtcgacactgggttttgcaactttacgcagagaatagagaagggcctcatgaccgcattgttcgaggtgcgtaagcatcatcagggcacatacaacctgaccgtgcaaattctgaatataaccatttcctcgagtcgcgtcactccgagacgtggaccggtcaacatcatcttcgctgttaaaagtactcagggattcctgaatgggtcagaggtatctgagcttttaagaaatctcagcgtcgtagagttcagcttctacctcggctacccggtcctgcaaatcgccgaaccatttcagtatccccagttgaatctaagtcaactcctcaagtctagctgggtgagaaccgtgctgttgggcgtcatggagaagcagctccaaaacgaagtgtttcaggccgagatggagcgcaaactggctcagctgctcagtgaagtgtccactaggcgccgaatgtggaggcgggcaaccgtggccgctggcaactccgtggtgcaggttgtaaacgtgtctaggttggaaggagatgataatccggttcagctgatctactttgtcgaggatcaggatggggagaggttgtccgctgtgaagtcttctgatctgattaacaaaatggatttgcaaagagccgcaattattctcggctaccgtatccagggagtgatagcccagcctgtagatcgagttaagagaccatcccctgagtcacagtcaaataatttgtgggttattgttggggttgtgataccggttctcgtggtcatggttatagtggtcattctgtactggaaactgtgccgtaccgacaagctcgactttcagccagacactgttgcaaacatccaacaaaggcaaaagctgcaaatcccctctgtgaagggcttcgactttgccaagcagcacctcggtcagcataataaggatgacatacttattatacatgaaccggctccccttcctgggcctttaaaggaccacaccaccccaagcgagaacggggacgtgccaagtccaaaatctaagattccaagtaagaacgtgaggcacagagggcgtgtctctccgtctgatgccgattccaccgtatctgaagagagttcagagagagatgccggagacaagacacccggtgctgtcaacgacgggaggtcccacagggccccacagtccggcccaccactgccgtcctcaggcaatgagcagcacagctccgcatcaatcttcgagcatgtggatcgcatctcacggccaccagaggcttcccggagagtgccctcaaagatacagctaattgctatgcagcccatcccagcacccccagtccagcgcccaagccctgcagaccgcgtcgccgagagtaataaaatcaataaagagatacagacggccctaaggcataagtctgagattgaacatcatcgcaacaagatcaggttgagagcgaaacggagaggccattacgagttcccggtggtggacgatttgtctagcggcgataccaaagaacgacaccgcgtgtataggcgagcgcagatgcagatagataagattttggaccccacagcgtcagtgccatccgtgttcatagaacccaggaaaagcagccgcataaaaagaagccccaagcctaggcggaaacaccaggtcaacggatgtccagctgacgccgagaaagatcggttgattacaactgattcggatggaacctataggagaccacctggggtgcacaacagtgcctacataggctgcccgtccgaccctgacctgccggctgatgtccaaaccccgagttctgtggagctcggacgataccccgcactgccattcccggcaagtcagtatatccccccacaaccctctattgaggaggccaggcagactatgcactctctgttggatgacgccttcgcattagtcgcaccatcctcccagcccgcatccaccgccggtgttgggcctggggtaccaccgggactaccggctaattccacccccagccaggaggagcgacgtgccactcaatggggtagtttctactcccctgctcagacagctaacaacccttgtagccgttacgaggattatggtatgacccctccgacaggcccacttccacgacctggtttcggtccagggctgttgcagagcaccgaactggtgcccccagaccctcagcaacctcaggcctcggcagaagctcccttcgctgccaggggaatctattctgaggaaatgcccagtgttgcacgtccacgacccgtagggggaacaaccgggtcccagatccagcatcttactcaggtgggcattgcctctcgcattggggcacaaccagttgagataccacctagtagagggagccagtacggcggtcctgggtggccttcatacggcgaggatgaggccggacgcagagaggcggtaccccgaacttctggaagggaaccctctgccccttccggtaatcttccccaccgtggtttgcagggaccgggtttgggctacccaacttcatccacagaggaccttcagcccggtcacagtagtgcaagtcttattaaggccattagagaagagctgctcaggttgagtcagaagcagagtactgtacagaacttccattcttat

SEQ ID NO: 206501 - DNA, 5804 bp, Artificial Sequence
  derived and/or modified sequence
atgccgggagctcgcagacggcgtagaggggcagccatggaaggcaagcctagagctggggtggcactcgccccaggccctagcggcagacgccctagtgcaagatgtgctcggagacggaggccgggtcttctgctccccggtctgtggctgctgttattggccagacccgcttcctgcgctcccgacgagcttagccccgagcagcacaacctaagcttatattccatggagctggtcctgaaaaagagcacgggccatagcgcggctcaggtggcacttaccgagaccgctccaggctctcagcactctagcccactgcacgtcacggcccctccctcagccactacctttgatactgcatttttcaatcagggtaaacaaactaaatcaacagccgatcctagcattttcgtggcgacatacgtttctgtcacatcgaaggaagtggccgtgaacgacgatgaaatggacaacttcctccctgacactcattggaccaccccacgtatggtgtctcccatccagtacattacagtgtcccccccaggactaccccgtgaggccctggagccaatgctaacccctagcttgcctatggtgagcctccaggatgaagaggtcacctccggatggcagaatacgacacgccagccagcggcatatgctgaatcagcgagtcactttcataccttcaggagtgctttccgaacctccgaggggatagtgcctacccccggacgaaacttggtgctgtatccaaccgacgcgtattctcacttgtcctccagaaccttacccgagattgtggcaagcctgacagagggcgttgaaaccactctttttctgagcagccgcagtcttatgcctcagccactgggcgacggcattaccatccctcttccctccttgggggaggtcagccagccacctgaggaagtctgggccacctctgcagacaggtatactgatgtcaccaccgtcttatcacaaagcctcgaagagaccatatcacctcggacttatcctacggtaaccgcatcccacgcagctttagccttcagtagaacgcactcaccactcctgtcaacccctctggcctttgctagttctgcctctccaaccgatgtctcttcaaaccctttcctcccctcggatagcagcaagacatctgagctgcactctaattctgccctgccaggccctgtagacaacacgcatattctgtcccctgtgtcgagcttccgaccatatacctggtgcgctgcctgtacagtgccctctccccaacaggtcctagccactagcctgatggagaaggatgtgggctctggagacggggctgagacactgtgcatgaccgtcctggaggaaagcagcatatctctcatgagttccgtggtggccgatttctctgaattcgaggaggacccccaagtgttcaacaccctctttccttcacgcccaatcgtccctctctcctcacgctccatggaaatatccgagacctccgttggaatttccgccgaggtggacatgtcatctgtgacgactacacaggtcccgccagcccatggacggctgtctgtacccgcatccctggacccaactgccggatctctaagtgtggccgaaacccaggtcactccctcaagcgtgacgaccgcctttttctccgttatcacttctattttacttgatagctcgttttcggtgatcgcaaataaaaatactccctcgctagcagtccgggatccatccgtgttcaccccgtacagcctcgttccatcagtcgaatctagccttttcagcgaccaagagagatctagtttttccgaacataagccacgcggagcgctggactttgcttcctcgttttttagcactccccctcttgagttgtcagggtctatctcttccccaagcgaggcaccagcctctctgtctctgatgccgagcgacctcagtccctttaccagtcagtctttcagtcccctggtcgaaacctttactctgttcgactcttccgatctgcagagcagccagctgagcttgcctagctccactaaccttgaattcagccaattgcagcctagttctgagttgcctctcaacactataatgctcctgcccagcagatctgaggtaagtccttggtccagtttcccaagtgactcactcgagtttgtggaagcctccaccgtgagtctgaccgactctgaggcccattttacctccgcatttatcgaaaccacaagctacctggaaagttctctcataagccacgaaagcgccgtaacggcattggtacccccagggagcgagtccttcgacattttgacggccggaattcaggccacctctcccctaactacagtgcacaccacccccatactcactgagtctagtctcttcagtaccctcactccacccgatgaccagataagcgcactcgacggccatgtgagcgtgttggctagcttctccaaagcgattcctacgggtacagtgctgatcactgacgcgtatctccccagtggctcctcttttgtctcggaagccaccccatttccattgcccactgagctgacagtggtgggaccatctcttacaccaactgaagtgcccttgaatacgtccacagaagtgagtaccacttctaccggggctgccactggcggtcccctagattccacgttaatgggggatgccgcaagtcagtcaccaccggagtcttccgccgctcctccacttccttcactacgcccagtgactgcatttacactcgaagctactgtagacactcctacgctagccacagcaaaacccccatacgtatgtgatatcaccgtcccagacgcgtacctgataaccaccgtgctggcccgtcgtgcggtgcaggaatatatcatcacggctatcaaggaagtgctgcgaatccattttaacagggctgttgaactgaaagtttatgagttgtttacagatttcaccttcctcgtgactagcggtcccttcgtgtacactgccatatccgttatcaatgtcctgattaattcaaagttggtgagggaccaaacccctttgatcctgagcgtgaagccttcattcctcgtcccagaatccaggttccaggtacagaccgttctgcagttcgtaccccctagcgtcgacacaggattttgtaactttacccagcgcatcgaaaaagggcttatgacggcattatttgaggtccgtaaacatcatcaggggacttacaatctgacagtgcagattttaaacataacaatcagcagttcccgcgtgacccccagaagagggccagttaacatcatcttcgctgtcaaaagcactcaggggtttctaaatggctccgaggtgtccgagttgcttcgaaacctctccgtggttgagttctccttctatctggggtaccccgtccttcagatagccgaacccttccagtaccctcagttgaatctttcccagcttcttaagtcgagctgggtgcgtactgtgttgctgggcgtcatggaaaagcagctgcagaacgaagtctttcaagctgagatggagaggaagttggcccaacttctgtcagaggtatctacgcggcgacggatgtggaggcgggctacagtggctgcaggcaatagcgtcgtgcaggtggttaacgtgtctaggcttgagggtgatgataatcccgtgcaactgatttactttgtggaggaccaggatggagaacgcctctccgcagtaaagagctcggatttaattaacaagatggacctacaacgtgcagcgattatactggggtataggatccaaggcgtcattgcccagcctgtagacagagttaaacggccatcccctgaatcacagagtaataatctgtgggtgatcgtcggtgttgtcatccccgtgctagtcgtcatggttattgttgtaattctgtactggaaactctgtcgcacagacaaattggactttcaacccgatacagtggccaacatccaacagagacagaagctgcagataccctctgtaaagggctttgactttgcaaaacagcacctggggcaacataataaggacgacatcctcatcattcacgagccggctccactcccagggcctttaaaggaccataccacgccgagtgaaaacggcgatgtaccttcaccgaagagcaagatcccttcgaaaaatgtgaggcatcggggtcgcgtctcaccatcagacgctgattccactgtctctgaggagtcctcagaaagggatgccggagacaagaccccaggggcagtgaatgatggcagaagccatcgcgctccccagtccggacccccactgccatcttctgggaacgagcagcattcctctgcttccatcttcgagcacgtcgacagaatatctcggccaccagaggctagtcggagagtgcccagtaaaatccagctgatcgcaatgcaaccaatccccgcacctcctgtgcagagaccaagccctgccgaccgcgtggcagaatcaaacaagatcaacaaagaaatacagacggccctgagacacaagtctgagattgaacatcacaggaataaaatcaggttgagggccaaaaggagaggccattacgagttccccgtggtggacgatctgtcttcgggtgacacaaaggagcgccacagagtttaccggagagctcagatgcagatcgataagatcctcgaccctaccgcaagcgtcccctccgtttttattgaacccagaaagtcaagccggattaagaggtcaccaaagcctcggcgaaaacaccaagtgaacggctgtcctgctgacgctgagaaggatcgcctcataacaacagacagcgatggcacctaccgaagacctcctggagttcataactcggcttacattggatgtccatcagacccagacctgccagcagatgtccaaacccccagttccgtggagctgggccgatatccggctttacccttccctgcgtctcagtatattcctccgcagccctcgattgaagaagcacgccagacaatgcactccctgttggacgacgcctttgccctcgtagcccctagttctcagcctgcttcgacagccggtgttggacctggtgtgccaccgggtttgcctgctaattcgacgccatcccaagaagaacggagggcgacccagtggggtagcttctactctcctgcacagacagcaaacaatccctgcagcagatacgaagattatggaatgacacccccaacaggcccacttccacgcccagggtttggcccaggcctgctgcagagtactgaacttgttccaccggacccccagcaaccacaggctagcgcagaagcaccatttgcagcacgaggcatctattccgaagaaatgccatcggtagcccgtcctcggcctgttggagggacaaccgggagtcagattcaacatctcactcaggtaggaatagcctcaaggatcggggctcaaccagtagaaattcccccatcccgcggttctcaatatggcggacctggctggccatcctacggcgaggacgaagcaggcaggagagaagctgtgccaaggacgagcggccgagagccatccgccccatcaggcaaccttccacacaggggcctgcagggccctggactcggctacccaacctcttctacagaagatcttcagcctggccattcctccgcatcacttataaaggctatccgcgaagagttgcttagactaagtcagaaacagagtacagtccagaatttccactccta

SEQ ID NO: 206502 - DNA, 12180 bp, Artificial Sequence
  derived and/or modified sequence
atgcattgcactaacccagctctgattttcttgatagatgagctctctccggaacagcacaacctttctttatactccatggagctcgtgctgaagaaaagcactgggcacagcgctgcacaagtggccttaacagaaactgctcccggctcccagcacagcagtcctctccatgtcacagccccgccgtctgccactacttttgatacagccttttttaaccaaggaaaacagaccaaaagtacagcagatcccagcatctttgtggcaacttacgtgtcagtgacgagtaaagaggtggccgtcaatgacgatgagatggataactttctgccagatactcactggaccactccacggatggtttctccaatacagtatatcacagtcagcccaccagggctgcccagggaagcattagaacctatgctcactccatcattacccatggtttctttacaagatgaagaagtgacatcgggctggcagaacacaacgcgacaaccagcggcatatgctgagtccgccagtcatttccacacctttcggtcagcttttcgcacctctgagggcatcgttccaactcctggcaggaatttggtgctttatcctactgatgcttacagtcatttatcaagcaggactctgccagagattgtggcttccctaacagagggtgtggaaaccaccctttttttaagctcccggtctttaatgccacagccgttaggcgacggcattactataccgttgccctccttgggggaggtctcacagcctccagaggaggtttgggccacaagtgcagacagatacactgatgtgaccactgtgttgagtcaaagcctagaagaaaccatctctccaagaacataccccactgtgactgcatcgcacgcagcccttgcattcagcaggacacattctccattgctttcaactcctcttgcatttgcgtcctctgcttcaccaactgatgtttcatctaacccctttctccctagcgactccagcaaaacatccgaattgcatagcaattcagccctccccggtcctgtggacaacactcatatcctgagcccggtgtcctcattcagaccatacacttggtgtgcggcctgcactgtgccttcacctcagcaagttctggccacgagcctcatggagaaagacgtgggatcaggggatggtgccgagactctgtgcatgaccgtgctggaagaaagcagcatctctctaatgagtagcgtcgtagcagacttctctgaatttgaggaagatcctcaagtatttaatacgcttttcccctccagacctatcgtcccactttcttctagatccatggaaatctcagagacgagtgttggcatttctgccgaggtggatatgagtagtgttacaaccacacaggttccccctgcccacggccgcctctctgtgccggcgtcacttgatcctactgctggctccttgtctgttgctgaaacccaagtgacgccatccagcgtgaccactgcatttttctcggtcatcaccagcattctccttgactcatctttctctgtcatagcaaacaaaaacacaccgtcgcttgccgtcagagacccgagtgtttttacgccttatagtctggttccttcagtggagtcttcacttttctctgaccaagaacgttccagtttttctgagcataaacccagaggtgctttggattttgcatccagctttttctcaacacccccgctggaactcagcggctccatctcttcgccttcggaagcacctgcgtctctgtctctgatgccgagtgacttgtcccccttcacatctcagtctttttctcccttggttgagacatttacattgtttgactctagtgatctgcagtcatctcagctgtctcttcccagttccacaaatcttgagttttcgcagctccagccaagttccgagctgcctttaaacaccatcatgttgctacctagccgttctgaggtgtcaccatggtcaagcttcccttctgattctctcgagtttgttgaagcgtctacggtttcactgacggattcagaagctcattttacctcagctttcattgaaactacctcctatcttgagtcttcactcatttcccatgaatccgcagtcactgcactggtgccccccggctctgagtcttttgacattttgactgccgggattcaagcaacatcaccattgaccactgtccacacaacgcccattttaactgagtcttctttgttctcaactctgacacctcctgacgaccaaatcagtgctctagacggtcacgtgtctgtcctggcctctttctccaaagccattcccactggtacggtgttgatcactgacgcgtacctgccatcaggatcctcgtttgtttctgaagcaacccccttccctctgcccacagagctgaccgtcgtgggcccatcactcacacccacagaggtgccactgaacacctccacggaagtgagcacaaccagcaccggtgctgccactggtggtcccctcgactccaccctgatgggtgacgccgcaagtcagagccccccagagagtagtgctgctcctcccctgccatccctgcgtcccgtgactgccttcactctcgaagcaacagtcgacacaccaacactggctactgccaagccgccatatgtttgtgatatcacagtccccgatgcctatctgatcacaactgtgctggccagaagagctgtgcaggagtacatcattacagcaatcaaagaagtactgaggattcacttcaaccgtgcagtggaactgaaggtttacgaactatttactgacttcacttttctggtaacatccggtcctttcgtttacacggcaatatccgtcataaatgtgcttataaacagtaagcttgtccgtgaccagactcctttaatcctgtctgtgaaaccttctttccttgtgccagagtccaggttccaagttcaaacagtacttcagtttgtgcctccgagtgtggatactggcttctgcaacttcacccagcgcattgagaaaggcctaatgacagctctctttgaagtgagaaaacaccaccagggaacgtataacctcacggtgcagatcttgaatatcaccatcagttcctcaagggtgactcctcggcggggcccggtgaatatcatctttgcggttaaaagcacacagggatttttgaatgggtcggaagtgagcgagctgctcagaaacttgagtgtggtggagttcagtttctatctgggatacccagtgctgcagatcgcagagcccttccagtatccacagctcaacttatctcagttgctgaagtcctcttgggtcagaacagttctcctgggcgtcatggagaagcaactccagaatgaagtgtttcaagccgagatggaacgcaagctggcccagctgctcagcgaggtttccaccagaaggcggatgtggagaagggccactgtagctgcagggaacagtgtggtgcaggtggtaaatgtgtcgaggctggagggagatgacaatccggtacagctcatctactttgtggaggatcaagatggagaaagactcagtgcagtcaagtcttcggacctgattaacaaaatggacctccagagagcagccatcatcttgggttaccgaattcaaggtgtcattgcccagcctgtcgacagggtgaagaggccgtctccggaatcccagagcaacaacttgtgggtcattgttggcgtggtcatcccagtgctggtggtgatggtgattgttgtcatcctctactggaaactatgccgcacagacaagctagactttcagcctgacactgtggccaacattcagcagcgtcagaagctgcagatccctagtgtgaagggcttcgattttgctaagcagcatctgggtcagcacaataaagacgacatattgattattcatgagccagcgccactgccaggacctctgaaggaccacaccacgccctcggaaaatggagacgtgccaagccccaagtcaaagatcccttccaagaatgttcgtcacagaggaagagtttctccctcagatgctgactctacggtcagtgaagagtccagcgagagggacgcaggagataagacgccgggagccgtcaacgatggcaggtcccacagagctccgcagagcgggccaccactgcccagttcgggaaatgagcagcactcatcagcctccatcttcgagcacgtggacaggatctcccgccccccggaggctagccggcgggtccccagtaagatccagcttatcgccatgcagccgatcccggcacctcccgtccagcgcccctccccagccgaccgagtggcggaaagcaataaaatcaacaaagagattcagaccgcgctgcggcacaagtctgagatcgagcaccatcgcaacaagatccgcctgcgcgccaagcgccgcgggcactacgagttcccggtggtagacgacctgtcctcgggcgacactaaggagcgacaccgggtgtaccgcagggcacagatgcagatcgacaagatcctggaccccacggccagcgtgccctccgtgttcatagagcccaggaagagctcacggataaaacgttctcccaagcctcgccggaaacaccaggtcaacggctgtcctgccgacgctgagaaggaccggctcatcaccacagacagcgatggcacctacaggaggccccccggcgtccacaactcagcctacatcggatgcccatcggatcctgacctcccagccgatgtgcagacaccatcctcggtggaactggggaggtatccagcccttcccttcccggcctcccagtacatcccaccccagccgtccatcgaggaggcacgccagaccatgcactccctcctggacgacgcctttgccctcgtggcccccagcagccagcctgccagcaccgcaggtgtaggccccggagtcccacccggcctgcccgcaaacagcaccccttcccaggaagagaggcgagccacccagtgggggtccttctacagcccagcccagacggccaacaatccctgcagtagatacgaagactatggaatgactcccccgacgggtccattgccaagaccaggttttggccccggtttgctgcagtctacagagctggtgccccctgaccctcagcagccacaggcctccgccgaagccccatttgctgccagagggatctactcggaggagatgccgtcggtggcccggcctcggcctgtcgggggtaccacaggctcccagatccagcacctgacacaggtggggattgccagcagaattggagctcagccagtggaaatcccgccaagcagaggcagccagtatggggggccaggctggccttcgtacggggaggacgaagcggggcgaagagaggccgtgccaaggacttcaggcagggagccctcagctccttccgggaacctcccccaccggggactgcagggccctgggctgggttaccccaccagctccacggaagacctccagcctggccactcctcggcctctctcatcaaagcaatccgcgaggagctcctccggctctcccagaaacagagcaccgtgcagaacttccacagctgatcggcctcgcctcgcagatttgccaagtatccgcttcctgtggaagcaagaccaaaaggaaatcaactgagtgggtgtttggaagaggaaggagcaactctcgggcagcctgcccaagggagggagcaagttgcaatttagaagatgccatacgtcgtgtgacagctcatgagcctttcactgggctggcaattgtctgaacacttgggttcagttgaaatatatgtattttggccaaaagccagcagcacttcacaaaaacaaaacacaaacctaagctaacaaaatgactgcattcgtctcttttttaaaggtagagattaaactgtatagacagcatagggatgaaaggaaccaagcgtttctgtgggattgagactggtacgtgtacgatgaacctgctgctttgttttctgagaagaggtttgaagacattttattaacagcttaatttttctcttttactccataggaacttattttaatagtaacattaacaacaagaatactaagactgtttgggaattttaaaaagctactagtgagaaaccaaatgataggttgtagagcctgatgactccaaacaaagccatcacccgcattcttcctccttcttctggtgctacagctccaagggcccttcaccttcatgtctgaaatggaactttggctttttcagtggaagaatatgttgaaggtttcattttgttctagaaaaaaaaaatccctcccaaagtggggcaaaaagctttatatttatttgattatccaaaatacagatcaaagtttagatctacattcttcattgtatttgctgtttcttaattgggcacacacaactcctggtcatgtcccagttcagcaccgatcgctaaggccgatcctgtagaatgcggctttcaagaggtcctaactgatcctttcttccactttgctgttgatttgttcacaaattatgtctgaatgagaaatcttctgtaagcagaagttatttaataattcccagcaccacgaaattgttatacatacatccctaccagtcacattccctgtgttcagagcctggaaatgaaattgagttcagttcagcctctctgtaatgaatcaagaaatgtaaaagagctttgagaccccaagggaaaggagagagttgcttctcatttctgattttattgtgctgttactctgtcgagtggctattaaaattgtcttatgctctttgggctaagaggggatcatctcgcttaagatgtactcctgatgtaaacatttcccccactttccaaataatggtaaagaaaacagtggcaagggctgttctgttttctggtacctgagtgaaactcagaagaaaagcaggcttagctaagagattttcactattaacctgtttttattagatcagcgaagacagtcatgcatcgcttaatgatggggatgcattctgagaaatgtgtcattaggctgttttgttgctgtgccaacatcctagattgtacttacacaacctacatggtatagcctactacacacctgggctgtgtggcatggcctattcctcttaggctacaaacctgtacagcatgttactgtactgaacacaatggtaagtatttgtgtatctaaacatagctaaacatagaaaaggtatggtaaaaatacaattttataatcttatgggactaccatcaatatgtagaccgtcattgaccaaaacatcctgatgtgtgcatgactgtacttttcattaaataacagataaggggctatagaatttggggctctgactgatcaaaacctgtgtatctgtgtcaagttttaagacccctgaaacagctaaaacaggtttccaaagtgtaatcactggatttcaaaaccatgttttagcccttcattaatgaagcctgttgtacagatttagagtcttacaatatgagggaagttggttctgggaaggtaagatgtagccagttttcatctgggcacctctgaaagagaaggagtgcaggagagtaagtctctcaaggacgttcaacaaaggaccagcagcatcttatcaggcgatcctcagaggctccaaggagcattggagagaatgcccctttctgggcttgatgtcttggttttggtttaataccaaatttctcttggtcttggtttaatacccgactcctcccaaattgaacgattatctttgtatgtcactcaaaaataccaggtttcctgaatatgttattaagaatttcagatatccaagcagaattttattatggacaccttgtaatgaattcaaatcgtgtgacagcaaacgggataaatggccccttctcacccagttccgctcagggccatacaggcttgcacatagagtgtgctaaaaatggtaacctcctttgagcattgcagaaagagggttctgtttcaaattgggctgaccgtaaaagcaattttgatgtctttcaaactaccataaagggattttaactgtatttttattcttagaaacaatacacctttaaacagatgtcaagaccaaagatgatgtataataaacagccggtggttatggtgtggtgtgagcaggcccccggatcaccagccctctgctggtggtcataaagcacacacagtttgtacttgcttcctctcgacgcctgccacaacagttttgccagtcaccaaactcagaaaaaactagctgtgtgagcagcaccgtaccctagcggtcttcagacattaagttcacgtcatccactgaaaggaagggtccttgcgttgacagcgtgtggctttggagtccgtttatggaagcactctacaatgaacagttgaattttatgtctattcttttttcctattttaaaagttctagtggtaacacaaactgtaaatttgagtcagaatgtttggagaaatgttgtttttttttttttcagagactactttgtcactcactgaccatgtctggttccttctctgaacttcattctccccataagccaaacaagaacagacctcccccgccacctcccaggcaccgtagttgtgagaatcagatgtgatcatgtgtgcagatgtcctgtgaggagggagcataaagcactgtgaaaatgtagcatgctgtctatgtggacgccctaggatgagtgatgtgaaacgctgcactactgcggtgaatgggttcacacatgggtaatgagcaaaaccgaaagctcggtgtgactcagtttcctcactcccattttgctttaatttcacttccttcaccaattttccgattgcatttattaagcatctttctgctcccgactttctggtgtctctggcaccaaataacccagcagacatgagccttgccttctgagattttagaatctaagatagcacgagtgggtatagaagatggaagataccgataaataacatggtttaagtgtcaataaaattcattcgaagagatcaggcgcggtggctcacgcctgtaatcccagcattttgggaggctgaggcaggtggatcacttgagatcaagagcttaaaaccagcccaggcaacatggcaaaaccccgtctctacaaaaaaatacaaaaactagctgggtgtggtggcgcatgcctgtagtcccagctgaggcacgataattgcttgaacccggggggtggaggttgcagtgagctgagattgcaccactgtactccaacctgggcgacagagcaagactgtgtctcaaaaagaaaaaaatttgttcaaaagacataaatgaattaggcacccagaagaagttgcatgtttggaaatgcaatatcttggggagacgtcaacttctgaagtgactttgaaggcagggcagctacccaggcaaatggcgtggaaggaagagctgagagtgggcctgggaaaggctgtagggaaggagtgaagctgtcactgaaatgaacttgatcttgatctgctttgatatggggacagaatccccgactgcactattgagggagtttcagaagagaaggaagaggtgctggaaggatgcttttgcagtcatgcagcaaggaaacgaccagggctgtgaagatctacagaggaagtactccagtgtgggggaggcaagggaagaggacgaaaatgatgagaatgacactgaggtcattgtttagagcagatctcaagcagccgtttggccacgccatatcctttgtggagcatagtgggttatctatctgtctgtctgtctatgtatctgtctatctatctatatatatattcagcttctttactgctacctacacatttttctccaaattttattaatttcatagtgttttgatttgggtggcagatgacttttaagcagtgggtgtttgccggccagatctttcctggcatgcggactgtgaggcaaagcacgggtgaaggtaggcgctaaaggctttgggctaaagccagcacgcggttctgtgctataggagtctcccgtttcccgtggacaggttcagcgttccttctttcgcacaacttttttctaagtgttccagtgaccaagccagtcattcggacactgatttgcagtgcattggcagtaattcacaaattagttgttatataagtctctctcatccctttcacactagattctcagacatgaatgaatttgtcgtttggaaggaaagctgggtaacgttttgggcacaggggaaggaggactccggtcttaactcccacgctaactttagctcaagtggagttttcaccgtggtcatttctacctccggagcaaggtgccagcgccagtactagagcctgcttatccacatttgccctggacaggagcaggaggaagtccacttctgtaccggcagacagagcatgtgaacacaaaacacatttctatggcatagtcaactgaacttcatttttacatttaatctaacatgttaacacgttctaacagggtttctatgagcagctgctgtaacatactcatcaactatgatagacttaacacttgttacctaatgaacaaggaggatgtgcatttcgggtttcttttgatattcgtggaggtgattgtcagtgtttaaacaggactactttctccactatgaagatgacttggaaatcgcaacatcatggtacattgctaagtccatgcttgtgtgtgtgacagtaggcttgataatttatcttaaaacacagcagcattgaaatttaggaaaagaatattaaatgcctttggaaacatgaaacaaagttaggagccagtaagaaagtgacagaagcaatgaatgtcttaatgcagtatagttaaaatggcttcccacagggtagataattatccaggatccttccttttccttcttcctccaggtttttcaggggtcacttcacatttctaaagaaagagtgaataggctgggcatggtggctcaagcctctaatctcaacgctttgggaggctgaggcaggaggatcgcttgaggccaggagtttgagaccaccttgggcaacataacgagaccccgtctctacaaaaaaaatttaaaaattagctgagcatggtggcatgtgccagtagtcccagctactcgaaaggctaagactggaggatcgcttgagccaatgagttggaggctgcagtgagctataatcacgccactgcactccagcctgggctgcagggtgaggtcctgtctctggaaaaaaaaaaaaaaaaaaaaggaataggtaaaagggacagaggtgaaattttgagtgacttgagtctcttgcagtccctgattacacagaacctttctgggctacttggagcatcacgaatagtctttcctgtacttaccagatttcaagtattcataacttgactccctaagtgtacaagttgggaatagtacagggccaagttcaagtcgcatatgctgtactgttcctcctgcaaatgtggggaaagaagagggagatactagaggaactgaggctccacccattcattcagttgctctaagcaccagaggacttgtttcagaaaaggggagtgggaacgccctcgactttgccctcctccggagcatctctgggacgcagggagtctggctagcgttaataggaaaggttgctcggcagagctgccctggagtactgacttgtctctccctcctttgtcaaggtccatgtttttctggctcttcctgcacactcatccctagattatgagcgttaatgtacgaaatgtgcagagcaaattgaggccaactgtggcatcaatactgcaacttaaacttgacaatcatggtttgctggtcctcaaacaggcactgaaatctcagtatgggtatacgatttaataatcggcccctcccttctatttgtcggttttatgtttctatccttcaatagctgcactgttttctaatgtgctgtagagtttttgaaataatttatgcaagtatttggtttccatgtttacaatttatacagctttcctagcattttaaatggaaatgtcaataaatgctatgaattggtgtcaaa

SEQ ID NO: 206503 - DNA, 12379 bp, Artificial Sequence
  derived and/or modified sequence
gacccgagagccgctgagccgcgaggccgggccggggcgccggccgggaatgccgggggcgcggcgccgacgccgaggcgcggccatggaggggaagccccgcgccggggtcgcgctggccccggggccgagcggccgacggccttccgcccgctgcgcccgccgccgccgcccggggctgctgcttcctggcctctggctgctgctgctggcccggccggcctcgtgcgccccagatgagctctctccggaacagcacaacctttctttatactccatggagctcgtgctgaagaaaagcactgggcacagcgctgcacaagtggccttaacagaaactgctcccggctcccagcacagcagtcctctccatgtcacagccccgccgtctgccactacttttgatacagccttttttaaccaaggaaaacagaccaaaagtacagcagatcccagcatctttgtggcaacttacgtgtcagtgacgagtaaagaggtggccgtcaatgacgatgagatggataactttctgccagatactcactggaccactccacggatggtttctccaatacagtatatcacagtcagcccaccagggctgcccagggaagcattagaacctatgctcactccatcattacccatggtttctttacaagatgaagaagtgacatcgggctggcagaacacaacgcgacaaccagcggcatatgctgagtccgccagtcatttccacacctttcggtcagcttttcgcacctctgagggcatcgttccaactcctggcaggaatttggtgctttatcctactgatgcttacagtcatttatcaagcaggactctgccagagattgtggcttccctaacagagggtgtggaaaccaccctttttttaagctcccggtctttaatgccacagccgttaggcgacggcattactataccgttgccctccttgggggaggtctcacagcctccagaggaggtttgggccacaagtgcagacagatacactgatgtgaccactgtgttgagtcaaagcctagaagaaaccatctctccaagaacataccccactgtgactgcatcgcacgcagcccttgcattcagcaggacacattctccattgctttcaactcctcttgcatttgcgtcctctgcttcaccaactgatgtttcatctaacccctttctccctagcgactccagcaaaacatccgaattgcatagcaattcagccctccccggtcctgtggacaacactcatatcctgagcccggtgtcctcattcagaccatacacttggtgtgcggcctgcactgtgccttcacctcagcaagttctggccacgagcctcatggagaaagacgtgggatcaggggatggtgccgagactctgtgcatgaccgtgctggaagaaagcagcatctctctaatgagtagcgtcgtagcagacttctctgaatttgaggaagatcctcaagtatttaatacgcttttcccctccagacctatcgtcccactttcttctagatccatggaaatctcagagacgagtgttggcatttctgccgaggtggatatgagtagtgttacaaccacacaggttccccctgcccacggccgcctctctgtgccggcgtcacttgatcctactgctggctccttgtctgttgctgaaacccaagtgacgccatccagcgtgaccactgcatttttctcggtcatcaccagcattctccttgactcatctttctctgtcatagcaaacaaaaacacaccgtcgcttgccgtcagagacccgagtgtttttacgccttatagtctggttccttcagtggagtcttcacttttctctgaccaagaacgttccagtttttctgagcataaacccagaggtgctttggattttgcatccagctttttctcaacacccccgctggaactcagcggctccatctcttcgccttcggaagcacctgcgtctctgtctctgatgccgagtgacttgtcccccttcacatctcagtctttttctcccttggttgagacatttacattgtttgactctagtgatctgcagtcatctcagctgtctcttcccagttccacaaatcttgagttttcgcagctccagccaagttccgagctgcctttaaacaccatcatgttgctacctagccgttctgaggtgtcaccatggtcaagcttcccttctgattctctcgagtttgttgaagcgtctacggtttcactgacggattcagaagctcattttacctcagctttcattgaaactacctcctatcttgagtcttcactcatttcccatgaatccgcagtcactgcactggtgccccccggctctgagtcttttgacattttgactgccgggattcaagcaacatcaccattgaccactgtccacacaacgcccattttaactgagtcttctttgttctcaactctgacacctcctgacgaccaaatcagtgctctagacggtcacgtgtctgtcctggcctctttctccaaagccattcccactggtacggtgttgatcactgacgcgtacctgccatcaggatcctcgtttgtttctgaagcaacccccttccctctgcccacagagctgaccgtcgtgggcccatcactcacacccacagaggtgccactgaacacctccacggaagtgagcacaaccagcaccggtgctgccactggtggtcccctcgactccaccctgatgggtgacgccgcaagtcagagccccccagagagtagtgctgctcctcccctgccatccctgcgtcccgtgactgccttcactctcgaagcaacagtcgacacaccaacactggctactgccaagccgccatatgtttgtgatatcacagtccccgatgcctatctgatcacaactgtgctggccagaagagctgtgcaggagtacatcattacagcaatcaaagaagtactgaggattcacttcaaccgtgcagtggaactgaaggtttacgaactatttactgacttcacttttctggtaacatccggtcctttcgtttacacggcaatatccgtcataaatgtgcttataaacagtaagcttgtccgtgaccagactcctttaatcctgtctgtgaaaccttctttccttgtgccagagtccaggttccaagttcaaacagtacttcagtttgtgcctccgagtgtggatactggcttctgcaacttcacccagcgcattgagaaaggcctaatgacagctctctttgaagtgagaaaacaccaccagggaacgtataacctcacggtgcagatcttgaatatcaccatcagttcctcaagggtgactcctcggcggggcccggtgaatatcatctttgcggttaaaagcacacagggatttttgaatgggtcggaagtgagcgagctgctcagaaacttgagtgtggtggagttcagtttctatctgggatacccagtgctgcagatcgcagagcccttccagtatccacagctcaacttatctcagttgctgaagtcctcttgggtcagaacagttctcctgggcgtcatggagaagcaactccagaatgaagtgtttcaagccgagatggaacgcaagctggcccagctgctcagcgaggtttccaccagaaggcggatgtggagaagggccactgtagctgcagggaacagtgtggtgcaggtggtaaatgtgtcgaggctggagggagatgacaatccggtacagctcatctactttgtggaggatcaagatggagaaagactcagtgcagtcaagtcttcggacctgattaacaaaatggacctccagagagcagccatcatcttgggttaccgaattcaaggtgtcattgcccagcctgtcgacagggtgaagaggccgtctccggaatcccagagcaacaacttgtgggtcattgttggcgtggtcatcccagtgctggtggtgatggtgattgttgtcatcctctactggaaactatgccgcacagacaagctagactttcagcctgacactgtggccaacattcagcagcgtcagaagctgcagatccctagtgtgaagggcttcgattttgctaagcagcatctgggtcagcacaataaagacgacatattgattattcatgagccagcgccactgccaggacctctgaaggaccacaccacgccctcggaaaatggagacgtgccaagccccaagtcaaagatcccttccaagaatgttcgtcacagaggaagagtttctccctcagatgctgactctacggtcagtgaagagtccagcgagagggacgcaggagataagacgccgggagccgtcaacgatggcaggtcccacagagctccgcagagcgggccaccactgcccagttcgggaaatgagcagcactcatcagcctccatcttcgagcacgtggacaggatctcccgccccccggaggctagccggcgggtccccagtaagatccagcttatcgccatgcagccgatcccggcacctcccgtccagcgcccctccccagccgaccgagtggcggaaagcaataaaatcaacaaagagattcagaccgcgctgcggcacaagtctgagatcgagcaccatcgcaacaagatccgcctgcgcgccaagcgccgcgggcactacgagttcccggtggtagacgacctgtcctcgggcgacactaaggagcgacaccgggtgtaccgcagggcacagatgcagatcgacaagatcctggaccccacggccagcgtgccctccgtgttcatagagcccaggaagagctcacggataaaacgttctcccaagcctcgccggaaacaccaggtcaacggctgtcctgccgacgctgagaaggaccggctcatcaccacagacagcgatggcacctacaggaggccccccggcgtccacaactcagcctacatcggatgcccatcggatcctgacctcccagccgatgtgcagacaccatcctcggtggaactggggaggtatccagcccttcccttcccggcctcccagtacatcccaccccagccgtccatcgaggaggcacgccagaccatgcactccctcctggacgacgcctttgccctcgtggcccccagcagccagcctgccagcaccgcaggtgtaggccccggagtcccacccggcctgcccgcaaacagcaccccttcccaggaagagaggcgagccacccagtgggggtccttctacagcccagcccagacggccaacaatccctgcagtagatacgaagactatggaatgactcccccgacgggtccattgccaagaccaggttttggccccggtttgctgcagtctacagagctggtgccccctgaccctcagcagccacaggcctccgccgaagccccatttgctgccagagggatctactcggaggagatgccgtcggtggcccggcctcggcctgtcgggggtaccacaggctcccagatccagcacctgacacaggtggggattgccagcagaattggagctcagccagtggaaatcccgccaagcagaggcagccagtatggggggccaggctggccttcgtacggggaggacgaagcggggcgaagagaggccgtgccaaggacttcaggcagggagccctcagctccttccgggaacctcccccaccggggactgcagggccctgggctgggttaccccaccagctccacggaagacctccagcctggccactcctcggcctctctcatcaaagcaatccgcgaggagctcctccggctctcccagaaacagagcaccgtgcagaacttccacagctgatcggcctcgcctcgcagatttgccaagtatccgcttcctgtggaagcaagaccaaaaggaaatcaactgagtgggtgtttggaagaggaaggagcaactctcgggcagcctgcccaagggagggagcaagttgcaatttagaagatgccatacgtcgtgtgacagctcatgagcctttcactgggctggcaattgtctgaacacttgggttcagttgaaatatatgtattttggccaaaagccagcagcacttcacaaaaacaaaacacaaacctaagctaacaaaatgactgcattcgtctcttttttaaaggtagagattaaactgtatagacagcatagggatgaaaggaaccaagcgtttctgtgggattgagactggtacgtgtacgatgaacctgctgctttgttttctgagaagaggtttgaagacattttattaacagcttaatttttctcttttactccataggaacttattttaatagtaacattaacaacaagaatactaagactgtttgggaattttaaaaagctactagtgagaaaccaaatgataggttgtagagcctgatgactccaaacaaagccatcacccgcattcttcctccttcttctggtgctacagctccaagggcccttcaccttcatgtctgaaatggaactttggctttttcagtggaagaatatgttgaaggtttcattttgttctagaaaaaaaaaatccctcccaaagtggggcaaaaagctttatatttatttgattatccaaaatacagatcaaagtttagatctacattcttcattgtatttgctgtttcttaattgggcacacacaactcctggtcatgtcccagttcagcaccgatcgctaaggccgatcctgtagaatgcggctttcaagaggtcctaactgatcctttcttccactttgctgttgatttgttcacaaattatgtctgaatgagaaatcttctgtaagcagaagttatttaataattcccagcaccacgaaattgttatacatacatccctaccagtcacattccctgtgttcagagcctggaaatgaaattgagttcagttcagcctctctgtaatgaatcaagaaatgtaaaagagctttgagaccccaagggaaaggagagagttgcttctcatttctgattttattgtgctgttactctgtcgagtggctattaaaattgtcttatgctctttgggctaagaggggatcatctcgcttaagatgtactcctgatgtaaacatttcccccactttccaaataatggtaaagaaaacagtggcaagggctgttctgttttctggtacctgagtgaaactcagaagaaaagcaggcttagctaagagattttcactattaacctgtttttattagatcagcgaagacagtcatgcatcgcttaatgatggggatgcattctgagaaatgtgtcattaggctgttttgttgctgtgccaacatcctagattgtacttacacaacctacatggtatagcctactacacacctgggctgtgtggcatggcctattcctcttaggctacaaacctgtacagcatgttactgtactgaacacaatggtaagtatttgtgtatctaaacatagctaaacatagaaaaggtatggtaaaaatacaattttataatcttatgggactaccatcaatatgtagaccgtcattgaccaaaacatcctgatgtgtgcatgactgtacttttcattaaataacagataaggggctatagaatttggggctctgactgatcaaaacctgtgtatctgtgtcaagttttaagacccctgaaacagctaaaacaggtttccaaagtgtaatcactggatttcaaaaccatgttttagcccttcattaatgaagcctgttgtacagatttagagtcttacaatatgagggaagttggttctgggaaggtaagatgtagccagttttcatctgggcacctctgaaagagaaggagtgcaggagagtaagtctctcaaggacgttcaacaaaggaccagcagcatcttatcaggcgatcctcagaggctccaaggagcattggagagaatgcccctttctgggcttgatgtcttggttttggtttaataccaaatttctcttggtcttggtttaatacccgactcctcccaaattgaacgattatctttgtatgtcactcaaaaataccaggtttcctgaatatgttattaagaatttcagatatccaagcagaattttattatggacaccttgtaatgaattcaaatcgtgtgacagcaaacgggataaatggccccttctcacccagttccgctcagggccatacaggcttgcacatagagtgtgctaaaaatggtaacctcctttgagcattgcagaaagagggttctgtttcaaattgggctgaccgtaaaagcaattttgatgtctttcaaactaccataaagggattttaactgtatttttattcttagaaacaatacacctttaaacagatgtcaagaccaaagatgatgtataataaacagccggtggttatggtgtggtgtgagcaggcccccggatcaccagccctctgctggtggtcataaagcacacacagtttgtacttgcttcctctcgacgcctgccacaacagttttgccagtcaccaaactcagaaaaaactagctgtgtgagcagcaccgtaccctagcggtcttcagacattaagttcacgtcatccactgaaaggaagggtccttgcgttgacagcgtgtggctttggagtccgtttatggaagcactctacaatgaacagttgaattttatgtctattcttttttcctattttaaaagttctagtggtaacacaaactgtaaatttgagtcagaatgtttggagaaatgttgtttttttttttttcagagactactttgtcactcactgaccatgtctggttccttctctgaacttcattctccccataagccaaacaagaacagacctcccccgccacctcccaggcaccgtagttgtgagaatcagatgtgatcatgtgtgcagatgtcctgtgaggagggagcataaagcactgtgaaaatgtagcatgctgtctatgtggacgccctaggatgagtgatgtgaaacgctgcactactgcggtgaatgggttcacacatgggtaatgagcaaaaccgaaagctcggtgtgactcagtttcctcactcccattttgctttaatttcacttccttcaccaattttccgattgcatttattaagcatctttctgctcccgactttctggtgtctctggcaccaaataacccagcagacatgagccttgccttctgagattttagaatctaagatagcacgagtgggtatagaagatggaagataccgataaataacatggtttaagtgtcaataaaattcattcgaagagatcaggcgcggtggctcacgcctgtaatcccagcattttgggaggctgaggcaggtggatcacttgagatcaagagcttaaaaccagcccaggcaacatggcaaaaccccgtctctacaaaaaaatacaaaaactagctgggtgtggtggcgcatgcctgtagtcccagctgaggcacgataattgcttgaacccggggggtggaggttgcagtgagctgagattgcaccactgtactccaacctgggcgacagagcaagactgtgtctcaaaaagaaaaaaatttgttcaaaagacataaatgaattaggcacccagaagaagttgcatgtttggaaatgcaatatcttggggagacgtcaacttctgaagtgactttgaaggcagggcagctacccaggcaaatggcgtggaaggaagagctgagagtgggcctgggaaaggctgtagggaaggagtgaagctgtcactgaaatgaacttgatcttgatctgctttgatatggggacagaatccccgactgcactattgagggagtttcagaagagaaggaagaggtgctggaaggatgcttttgcagtcatgcagcaaggaaacgaccagggctgtgaagatctacagaggaagtactccagtgtgggggaggcaagggaagaggacgaaaatgatgagaatgacactgaggtcattgtttagagcagatctcaagcagccgtttggccacgccatatcctttgtggagcatagtgggttatctatctgtctgtctgtctatgtatctgtctatctatctatatatatattcagcttctttactgctacctacacatttttctccaaattttattaatttcatagtgttttgatttgggtggcagatgacttttaagcagtgggtgtttgccggccagatctttcctggcatgcggactgtgaggcaaagcacgggtgaaggtaggcgctaaaggctttgggctaaagccagcacgcggttctgtgctataggagtctcccgtttcccgtggacaggttcagcgttccttctttcgcacaacttttttctaagtgttccagtgaccaagccagtcattcggacactgatttgcagtgcattggcagtaattcacaaattagttgttatataagtctctctcatccctttcacactagattctcagacatgaatgaatttgtcgtttggaaggaaagctgggtaacgttttgggcacaggggaaggaggactccggtcttaactcccacgctaactttagctcaagtggagttttcaccgtggtcatttctacctccggagcaaggtgccagcgccagtactagagcctgcttatccacatttgccctggacaggagcaggaggaagtccacttctgtaccggcagacagagcatgtgaacacaaaacacatttctatggcatagtcaactgaacttcatttttacatttaatctaacatgttaacacgttctaacagggtttctatgagcagctgctgtaacatactcatcaactatgatagacttaacacttgttacctaatgaacaaggaggatgtgcatttcgggtttcttttgatattcgtggaggtgattgtcagtgtttaaacaggactactttctccactatgaagatgacttggaaatcgcaacatcatggtacattgctaagtccatgcttgtgtgtgtgacagtaggcttgataatttatcttaaaacacagcagcattgaaatttaggaaaagaatattaaatgcctttggaaacatgaaacaaagttaggagccagtaagaaagtgacagaagcaatgaatgtcttaatgcagtatagttaaaatggcttcccacagggtagataattatccaggatccttccttttccttcttcctccaggtttttcaggggtcacttcacatttctaaagaaagagtgaataggctgggcatggtggctcaagcctctaatctcaacgctttgggaggctgaggcaggaggatcgcttgaggccaggagtttgagaccaccttgggcaacataacgagaccccgtctctacaaaaaaaatttaaaaattagctgagcatggtggcatgtgccagtagtcccagctactcgaaaggctaagactggaggatcgcttgagccaatgagttggaggctgcagtgagctataatcacgccactgcactccagcctgggctgcagggtgaggtcctgtctctggaaaaaaaaaaaaaaaaaaaaggaataggtaaaagggacagaggtgaaattttgagtgacttgagtctcttgcagtccctgattacacagaacctttctgggctacttggagcatcacgaatagtctttcctgtacttaccagatttcaagtattcataacttgactccctaagtgtacaagttgggaatagtacagggccaagttcaagtcgcatatgctgtactgttcctcctgcaaatgtggggaaagaagagggagatactagaggaactgaggctccacccattcattcagttgctctaagcaccagaggacttgtttcagaaaaggggagtgggaacgccctcgactttgccctcctccggagcatctctgggacgcagggagtctggctagcgttaataggaaaggttgctcggcagagctgccctggagtactgacttgtctctccctcctttgtcaaggtccatgtttttctggctcttcctgcacactcatccctagattatgagcgttaatgtacgaaatgtgcagagcaaattgaggccaactgtggcatcaatactgcaacttaaacttgacaatcatggtttgctggtcctcaaacaggcactgaaatctcagtatgggtatacgatttaataatcggcccctcccttctatttgtcggttttatgtttctatccttcaatagctgcactgttttctaatgtgctgtagagtttttgaaataatttatgcaagtatttggtttccatgtttacaatttatacagctttcctagcattttaaatggaaatgtcaataaatgctatgaattggtgtcaaa

SEQ ID NO: 206504 - DNA, 5655 bp, Artificial Sequence
  derived and/or modified sequence
atgcactgcaccaaccccgccctgatcttcctgatcgacgagctgagccccgagcagcacaacctgagcctgtacagcatggagctggtgctgaagaagagcaccggccacagcgccgcccaggtggccctgaccgagaccgcccccggcagccagcacagcagccccctgcacgtgaccgccccccccagcgccaccaccttcgacaccgccttcttcaaccagggcaagcagaccaagagcaccgccgaccccagcatcttcgtggccacctacgtgagcgtgaccagcaaggaggtggccgtgaacgacgacgagatggacaacttcctgcccgacacccactggaccacccccagaatggtgagccccatccagtacatcaccgtgagcccccccggcctgcccagagaggccctggagcccatgctgacccccagcctgcccatggtgagcctgcaggacgaggaggtgaccagcggctggcagaacaccaccagacagcccgccgcctacgccgagagcgccagccacttccacaccttcagaagcgccttcagaaccagcgagggcatcgtgcccacccccggcagaaacctggtgctgtaccccaccgacgcctacagccacctgagcagcagaaccctgcccgagatcgtggccagcctgaccgagggcgtggagaccaccctgttcctgagcagcagaagcctgatgccccagcccctgggcgacggcatcaccatccccctgcccagcctgggcgaggtgagccagccccccgaggaggtgtgggccaccagcgccgacagatacaccgacgtgaccaccgtgctgagccagagcctggaggagaccatcagccccagaacctaccccaccgtgaccgccagccacgccgccctggccttcagcagaacccacagccccctgctgagcacccccctggccttcgccagcagcgccagccccaccgacgtgagcagcaaccccttcctgcccagcgacagcagcaagaccagcgagctgcacagcaacagcgccctgcccggccccgtggacaacacccacatcctgagccccgtgagcagcttcagaccctacacctggtgcgccgcctgcaccgtgcccagcccccagcaggtgctggccaccagcctgatggagaaggacgtgggcagcggcgacggcgccgagaccctgtgcatgaccgtgctggaggagagcagcatcagcctgatgagcagcgtggtggccgacttcagcgagttcgaggaggacccccaggtgttcaacaccctgttccccagcagacccatcgtgcccctgagcagcagaagcatggagatcagcgagaccagcgtgggcatcagcgccgaggtggacatgagcagcgtgaccaccacccaggtgccccccgcccacggcagactgagcgtgcccgccagcctggaccccaccgccggcagcctgagcgtggccgagacccaggtgacccccagcagcgtgaccaccgccttcttcagcgtgatcaccagcatcctgctggacagcagcttcagcgtgatcgccaacaagaacacccccagcctggccgtgagagaccccagcgtgttcaccccctacagcctggtgcccagcgtggagagcagcctgttcagcgaccaggagagaagcagcttcagcgagcacaagcccagaggcgccctggacttcgccagcagcttcttcagcaccccccccctggagctgagcggcagcatcagcagccccagcgaggcccccgccagcctgagcctgatgcccagcgacctgagccccttcaccagccagagcttcagccccctggtggagaccttcaccctgttcgacagcagcgacctgcagagcagccagctgagcctgcccagcagcaccaacctggagttcagccagctgcagcccagcagcgagctgcccctgaacaccatcatgctgctgcccagcagaagcgaggtgagcccctggagcagcttccccagcgacagcctggagttcgtggaggccagcaccgtgagcctgaccgacagcgaggcccacttcaccagcgccttcatcgagaccaccagctacctggagagcagcctgatcagccacgagagcgccgtgaccgccctggtgccccccggcagcgagagcttcgacatcctgaccgccggcatccaggccaccagccccctgaccaccgtgcacaccacccccatcctgaccgagagcagcctgttcagcaccctgaccccccccgacgaccagatcagcgccctggacggccacgtgagcgtgctggccagcttcagcaaggccatccccaccggcaccgtgctgatcaccgacgcctacctgcccagcggcagcagcttcgtgagcgaggccacccccttccccctgcccaccgagctgaccgtggtgggccccagcctgacccccaccgaggtgcccctgaacaccagcaccgaggtgagcaccaccagcaccggcgccgccaccggcggccccctggacagcaccctgatgggcgacgccgccagccagagcccccccgagagcagcgccgccccccccctgcccagcctgagacccgtgaccgccttcaccctggaggccaccgtggacacccccaccctggccaccgccaagcccccctacgtgtgcgacatcaccgtgcccgacgcctacctgatcaccaccgtgctggccagaagagccgtgcaggagtacatcatcaccgccatcaaggaggtgctgagaatccacttcaacagagccgtggagctgaaggtgtacgagctgttcaccgacttcaccttcctggtgaccagcggccccttcgtgtacaccgccatcagcgtgatcaacgtgctgatcaacagcaagctggtgagagaccagacccccctgatcctgagcgtgaagcccagcttcctggtgcccgagagcagattccaggtgcagaccgtgctgcagttcgtgccccccagcgtggacaccggcttctgcaacttcacccagagaatcgagaagggcctgatgaccgccctgttcgaggtgagaaagcaccaccagggcacctacaacctgaccgtgcagatcctgaacatcaccatcagcagcagcagagtgacccccagaagaggccccgtgaacatcatcttcgccgtgaagagcacccagggcttcctgaacggcagcgaggtgagcgagctgctgagaaacctgagcgtggtggagttcagcttctacctgggctaccccgtgctgcagatcgccgagcccttccagtacccccagctgaacctgagccagctgctgaagagcagctgggtgagaaccgtgctgctgggcgtgatggagaagcagctgcagaacgaggtgttccaggccgagatggagagaaagctggcccagctgctgagcgaggtgagcaccagaagaagaatgtggagaagagccaccgtggccgccggcaacagcgtggtgcaggtggtgaacgtgagcagactggagggcgacgacaaccccgtgcagctgatctacttcgtggaggaccaggacggcgagagactgagcgccgtgaagagcagcgacctgatcaacaagatggacctgcagagagccgccatcatcctgggctacagaatccagggcgtgatcgcccagcccgtggacagagtgaagagacccagccccgagagccagagcaacaacctgtgggtgatcgtgggcgtggtgatccccgtgctggtggtgatggtgatcgtggtgatcctgtactggaagctgtgcagaaccgacaagctggacttccagcccgacaccgtggccaacatccagcagagacagaagctgcagatccccagcgtgaagggcttcgacttcgccaagcagcacctgggccagcacaacaaggacgacatcctgatcatccacgagcccgcccccctgcccggccccctgaaggaccacaccacccccagcgagaacggcgacgtgcccagccccaagagcaagatccccagcaagaacgtgagacacagaggcagagtgagccccagcgacgccgacagcaccgtgagcgaggagagcagcgagagagacgccggcgacaagacccccggcgccgtgaacgacggcagaagccacagagccccccagagcggcccccccctgcccagcagcggcaacgagcagcacagcagcgccagcatcttcgagcacgtggacagaatcagcagaccccccgaggccagcagaagagtgcccagcaagatccagctgatcgccatgcagcccatccccgccccccccgtgcagagacccagccccgccgacagagtggccgagagcaacaagatcaacaaggagatccagaccgccctgagacacaagagcgagatcgagcaccacagaaacaagatcagactgagagccaagagaagaggccactacgagttccccgtggtggacgacctgagcagcggcgacaccaaggagagacacagagtgtacagaagagcccagatgcagatcgacaagatcctggaccccaccgccagcgtgcccagcgtgttcatcgagcccagaaagagcagcagaatcaagagaagccccaagcccagaagaaagcaccaggtgaacggctgccccgccgacgccgagaaggacagactgatcaccaccgacagcgacggcacctacagaagaccccccggcgtgcacaacagcgcctacatcggctgccccagcgaccccgacctgcccgccgacgtgcagacccccagcagcgtggagctgggcagataccccgccctgcccttccccgccagccagtacatccccccccagcccagcatcgaggaggccagacagaccatgcacagcctgctggacgacgccttcgccctggtggcccccagcagccagcccgccagcaccgccggcgtgggccccggcgtgccccccggcctgcccgccaacagcacccccagccaggaggagagaagagccacccagtggggcagcttctacagccccgcccagaccgccaacaacccctgcagcagatacgaggactacggcatgaccccccccaccggccccctgcccagacccggcttcggccccggcctgctgcagagcaccgagctggtgccccccgacccccagcagccccaggccagcgccgaggcccccttcgccgccagaggcatctacagcgaggagatgcccagcgtggccagacccagacccgtgggcggcaccaccggcagccagatccagcacctgacccaggtgggcatcgccagcagaatcggcgcccagcccgtggagatcccccccagcagaggcagccagtacggcggccccggctggcccagctacggcgaggacgaggccggcagaagagaggccgtgcccagaaccagcggcagagagcccagcgcccccagcggcaacctgccccacagaggcctgcagggccccggcctgggctaccccaccagcagcaccgaggacctgcagcccggccacagcagcgccagcctgatcaaggccatcagagaggagctgctgagactgagccagaagcagagcaccgtgcagaacttccacagctag

SEQ ID NO: 206505 - DNA, 5805 bp, Artificial Sequence
  derived and/or modified sequence
atgcccggcgccagaagaagaagaagaggcgccgccatggagggcaagcccagagccggcgtggccctggcccccggccccagcggcagaagacccagcgccagatgcgccagaagaagaagacccggcctgctgctgcccggcctgtggctgctgctgctggccagacccgccagctgcgcccccgacgagctgagccccgagcagcacaacctgagcctgtacagcatggagctggtgctgaagaagagcaccggccacagcgccgcccaggtggccctgaccgagaccgcccccggcagccagcacagcagccccctgcacgtgaccgccccccccagcgccaccaccttcgacaccgccttcttcaaccagggcaagcagaccaagagcaccgccgaccccagcatcttcgtggccacctacgtgagcgtgaccagcaaggaggtggccgtgaacgacgacgagatggacaacttcctgcccgacacccactggaccacccccagaatggtgagccccatccagtacatcaccgtgagcccccccggcctgcccagagaggccctggagcccatgctgacccccagcctgcccatggtgagcctgcaggacgaggaggtgaccagcggctggcagaacaccaccagacagcccgccgcctacgccgagagcgccagccacttccacaccttcagaagcgccttcagaaccagcgagggcatcgtgcccacccccggcagaaacctggtgctgtaccccaccgacgcctacagccacctgagcagcagaaccctgcccgagatcgtggccagcctgaccgagggcgtggagaccaccctgttcctgagcagcagaagcctgatgccccagcccctgggcgacggcatcaccatccccctgcccagcctgggcgaggtgagccagccccccgaggaggtgtgggccaccagcgccgacagatacaccgacgtgaccaccgtgctgagccagagcctggaggagaccatcagccccagaacctaccccaccgtgaccgccagccacgccgccctggccttcagcagaacccacagccccctgctgagcacccccctggccttcgccagcagcgccagccccaccgacgtgagcagcaaccccttcctgcccagcgacagcagcaagaccagcgagctgcacagcaacagcgccctgcccggccccgtggacaacacccacatcctgagccccgtgagcagcttcagaccctacacctggtgcgccgcctgcaccgtgcccagcccccagcaggtgctggccaccagcctgatggagaaggacgtgggcagcggcgacggcgccgagaccctgtgcatgaccgtgctggaggagagcagcatcagcctgatgagcagcgtggtggccgacttcagcgagttcgaggaggacccccaggtgttcaacaccctgttccccagcagacccatcgtgcccctgagcagcagaagcatggagatcagcgagaccagcgtgggcatcagcgccgaggtggacatgagcagcgtgaccaccacccaggtgccccccgcccacggcagactgagcgtgcccgccagcctggaccccaccgccggcagcctgagcgtggccgagacccaggtgacccccagcagcgtgaccaccgccttcttcagcgtgatcaccagcatcctgctggacagcagcttcagcgtgatcgccaacaagaacacccccagcctggccgtgagagaccccagcgtgttcaccccctacagcctggtgcccagcgtggagagcagcctgttcagcgaccaggagagaagcagcttcagcgagcacaagcccagaggcgccctggacttcgccagcagcttcttcagcaccccccccctggagctgagcggcagcatcagcagccccagcgaggcccccgccagcctgagcctgatgcccagcgacctgagccccttcaccagccagagcttcagccccctggtggagaccttcaccctgttcgacagcagcgacctgcagagcagccagctgagcctgcccagcagcaccaacctggagttcagccagctgcagcccagcagcgagctgcccctgaacaccatcatgctgctgcccagcagaagcgaggtgagcccctggagcagcttccccagcgacagcctggagttcgtggaggccagcaccgtgagcctgaccgacagcgaggcccacttcaccagcgccttcatcgagaccaccagctacctggagagcagcctgatcagccacgagagcgccgtgaccgccctggtgccccccggcagcgagagcttcgacatcctgaccgccggcatccaggccaccagccccctgaccaccgtgcacaccacccccatcctgaccgagagcagcctgttcagcaccctgaccccccccgacgaccagatcagcgccctggacggccacgtgagcgtgctggccagcttcagcaaggccatccccaccggcaccgtgctgatcaccgacgcctacctgcccagcggcagcagcttcgtgagcgaggccacccccttccccctgcccaccgagctgaccgtggtgggccccagcctgacccccaccgaggtgcccctgaacaccagcaccgaggtgagcaccaccagcaccggcgccgccaccggcggccccctggacagcaccctgatgggcgacgccgccagccagagcccccccgagagcagcgccgccccccccctgcccagcctgagacccgtgaccgccttcaccctggaggccaccgtggacacccccaccctggccaccgccaagcccccctacgtgtgcgacatcaccgtgcccgacgcctacctgatcaccaccgtgctggccagaagagccgtgcaggagtacatcatcaccgccatcaaggaggtgctgagaatccacttcaacagagccgtggagctgaaggtgtacgagctgttcaccgacttcaccttcctggtgaccagcggccccttcgtgtacaccgccatcagcgtgatcaacgtgctgatcaacagcaagctggtgagagaccagacccccctgatcctgagcgtgaagcccagcttcctggtgcccgagagcagattccaggtgcagaccgtgctgcagttcgtgccccccagcgtggacaccggcttctgcaacttcacccagagaatcgagaagggcctgatgaccgccctgttcgaggtgagaaagcaccaccagggcacctacaacctgaccgtgcagatcctgaacatcaccatcagcagcagcagagtgacccccagaagaggccccgtgaacatcatcttcgccgtgaagagcacccagggcttcctgaacggcagcgaggtgagcgagctgctgagaaacctgagcgtggtggagttcagcttctacctgggctaccccgtgctgcagatcgccgagcccttccagtacccccagctgaacctgagccagctgctgaagagcagctgggtgagaaccgtgctgctgggcgtgatggagaagcagctgcagaacgaggtgttccaggccgagatggagagaaagctggcccagctgctgagcgaggtgagcaccagaagaagaatgtggagaagagccaccgtggccgccggcaacagcgtggtgcaggtggtgaacgtgagcagactggagggcgacgacaaccccgtgcagctgatctacttcgtggaggaccaggacggcgagagactgagcgccgtgaagagcagcgacctgatcaacaagatggacctgcagagagccgccatcatcctgggctacagaatccagggcgtgatcgcccagcccgtggacagagtgaagagacccagccccgagagccagagcaacaacctgtgggtgatcgtgggcgtggtgatccccgtgctggtggtgatggtgatcgtggtgatcctgtactggaagctgtgcagaaccgacaagctggacttccagcccgacaccgtggccaacatccagcagagacagaagctgcagatccccagcgtgaagggcttcgacttcgccaagcagcacctgggccagcacaacaaggacgacatcctgatcatccacgagcccgcccccctgcccggccccctgaaggaccacaccacccccagcgagaacggcgacgtgcccagccccaagagcaagatccccagcaagaacgtgagacacagaggcagagtgagccccagcgacgccgacagcaccgtgagcgaggagagcagcgagagagacgccggcgacaagacccccggcgccgtgaacgacggcagaagccacagagccccccagagcggcccccccctgcccagcagcggcaacgagcagcacagcagcgccagcatcttcgagcacgtggacagaatcagcagaccccccgaggccagcagaagagtgcccagcaagatccagctgatcgccatgcagcccatccccgccccccccgtgcagagacccagccccgccgacagagtggccgagagcaacaagatcaacaaggagatccagaccgccctgagacacaagagcgagatcgagcaccacagaaacaagatcagactgagagccaagagaagaggccactacgagttccccgtggtggacgacctgagcagcggcgacaccaaggagagacacagagtgtacagaagagcccagatgcagatcgacaagatcctggaccccaccgccagcgtgcccagcgtgttcatcgagcccagaaagagcagcagaatcaagagaagccccaagcccagaagaaagcaccaggtgaacggctgccccgccgacgccgagaaggacagactgatcaccaccgacagcgacggcacctacagaagaccccccggcgtgcacaacagcgcctacatcggctgccccagcgaccccgacctgcccgccgacgtgcagacccccagcagcgtggagctgggcagataccccgccctgcccttccccgccagccagtacatccccccccagcccagcatcgaggaggccagacagaccatgcacagcctgctggacgacgccttcgccctggtggcccccagcagccagcccgccagcaccgccggcgtgggccccggcgtgccccccggcctgcccgccaacagcacccccagccaggaggagagaagagccacccagtggggcagcttctacagccccgcccagaccgccaacaacccctgcagcagatacgaggactacggcatgaccccccccaccggccccctgcccagacccggcttcggccccggcctgctgcagagcaccgagctggtgccccccgacccccagcagccccaggccagcgccgaggcccccttcgccgccagaggcatctacagcgaggagatgcccagcgtggccagacccagacccgtgggcggcaccaccggcagccagatccagcacctgacccaggtgggcatcgccagcagaatcggcgcccagcccgtggagatcccccccagcagaggcagccagtacggcggccccggctggcccagctacggcgaggacgaggccggcagaagagaggccgtgcccagaaccagcggcagagagcccagcgcccccagcggcaacctgccccacagaggcctgcagggccccggcctgggctaccccaccagcagcaccgaggacctgcagcccggccacagcagcgccagcctgatcaaggccatcagagaggagctgctgagactgagccagaagcagagcaccgtgcagaacttccacagctag

SEQ ID NO: 206506 - protein, 1657 aa, Artificial Sequence
  derived and/or modified sequence
MDSKKRSSTEAEGSKERGLVHIWQAGSFPITPERLPGWGGKTVLQAALGVKHGVLLTEDGEVYSFGTLPWRSGPVEICPSSPILENALVGQYVITVATGSFHSGAVTDNGVAYMWGENSAGQCAVANQQYVPEPNPVSIADSEASPLLAVRILQLACGEEHTLALSISREIWAWGTGCQLGLITTAFPVTKPQKVEHLAGRVVLQVACGAFHSLALVQCLPSQDLKPVPERCNQCSQLLITMTDKEDHVIISDSHCCPLGVTLTESQAENHASTALSPSTETLDRQEEVFENTLVANDQSVATELNAVSAQITSSDAMSSQQNVMGTTEISSARNIPSYPDTQAVNEYLRKLSDHSVREDSEHGEKPVPSQPLLEEAIPNLHSPPTTSTSALNSLVVSCASAVGVRVAATYEAGALSLKKVMNFYSTTPCETGAQAGSSAIGPEGLKDSREEQVKQESMQGKKSSSLVDIREEETEGGSRRLSLPGLLSQVSPRLLRKAARVKTRTVVLTPTYSGEADALLPSLRTEVWTWGKGKEGQLGHGDVLPRLQPLCVKCLDGKEVIHLEAGGYHSLALTAKSQVYSWGSNTFGQLGHSDFPTTVPRLAKISSENGVWSIAAGRDYSLFLVDTEDFQPGLYYSGRQDPTEGDNLPENHSGSKTPVLLSCSKLGYISRVTAGKDSYLALVDKNIMGYIASLHELATTERRFYSKLSDIKSQILRPLLSLENLGTTTTVQLLQEVASRFSKLCYLIGQHGASLSSFLHGVKEARSLVILKHSSLFLDSYTEYCTSITNFLVMGGFQLLAKPAIDFLNKNQELLQDLSEVNDENTQLMEILNTLFFLPIRRLHNYAKVLLKLATCFEVASPEYQKLQDSSSCYECLALHLGRKRKEAEYTLGFWKTFPGKMTDSLRKPERRLLCESSNRALSLQHAGRFSVNWFILFNDALVHAQFSTHHVFPLATLWAEPLSEEAGGVNGLKITTPEEQFTLISSTPQEKTKWLRAISQAVDQALRGMSDLPPYGSGSSVQRQEPPISRSAKYTFYKDPRLKDATYDGRWLSGKPHGRGVLKWPDGKMYSGMFRNGLEDGYGEYRIPNKAMNKEDHYVGHWKEGKMCGQGVYSYASGEVFEGCFQDNMRHGHGLLRSGKLTSSSPSMFIGQWVMDKKAGYGVFDDITRGEKYMGMWQDDVCQGNGVVVTQFGLYYEGNFHLNKMMGNGVLLSEDDTIYEGEFSDDWTLSGKGTLTMPNGDYIEGYFSGEWGSGIKITGTYFKPSLYESDKDRPKVFRKLGNLAVPADEKWKAVFDECWRQLGCEGPGQGEVWKAWDNIAVALTTSRRQHRDSPEILSRSQTQTLESLEFIPQHVGAFSVEKYDDIRKYLIKACDTPLHPLGRLVETLVAVYRMTYVGVGANRRLLQEAVKEIKSYLKRIFQLVRFLFPELPEEGSTIPLSAPLPTERKSFCTGKSDSRSESPEPGYVVTSSGLLLPVLLPRLYPPLFMLYALDNDREEDIYWECVLRLNKQPDIALLGFLGVQRKFWPATLSILGESKKVLPTTKDACFASAVECLQQISTTFTPSDKLKVIQQTFEEISQSVLASLHEDFLWSMDDLFPVFLYVVLRARIRNLGSEVHLIEDLMDPYLQHGEQGIMFTTLKACYYQIQREKLN

SEQ ID NO: 206507 - DNA, 4974 bp, Artificial Sequence
  derived and/or modified sequence
atggactccaagaagcggtcgtcaactgaagccgagggctccaaggaaaggggcttagtccacatctggcaagccgggagcttccccataactcccgagcggctccccggttggggcgggaagacagtgttgcaggccgcgcttggggtgaaacacggagtgctgctcactgaggacggggaagtctactctttcggcactctgccatggcgatcaggccccgttgaaatctgcccatcttcgccaattctggaaaacgcgctggtcgggcagtatgtcattactgtcgccacgggctccttccactccggagccgtcaccgacaacggcgtggcatatatgtggggggagaacagcgcaggacagtgcgccgtggccaatcagcagtacgttccagaaccgaatcccgtgtctatagccgactcggaggcctctcctttgctcgctgtcagaattctccaattagcctgtggcgaagagcacactttggctctcagcatttctcgcgagatttgggcctggggcactgggtgtcagttaggcctgatcaccacagcattccccgtcacaaaacctcaaaaggtcgagcacttggcgggccgagtggtgctacaggtcgcatgcggtgctttccactctctggcccttgttcagtgtctgccgagccaggatttgaagcccgtgccagaaaggtgtaaccagtgctctcaattgctgatcaccatgacggataaggaggaccacgtgataataagtgattcgcactgttgtcccttgggggttactcttactgaaagtcaagctgaaaaccatgccagtaccgcactgagcccttccacggaaaccctggatagacaggaagaagtattcgaaaacactctggtggccaacgaccagagtgtcgccactgaactcaacgctgtttccgctcagatcacaagcagcgacgccatgtcttcacaacagaacgttatggggacaacagaaataagctctgctcggaatattccatcctaccccgacacacaggccgtgaatgaatacctgcggaagttgtccgaccactcagtgcgcgaagacagcgagcatggggagaaacctgttccgagtcagcccctcctggaggaggcaatccctaacctgcacagcccaccaacaacttcaacgagtgcactaaattctttggtcgtgtcatgtgcaagtgccgttggagtcagagtcgcagccacttatgaggcaggcgcactgtccctcaagaaggtcatgaacttttatagtacgacaccttgcgaaacgggcgctcaggcaggctctagcgctatcggccctgaggggttaaaggactccagagaggaacaggtgaaacaagaatccatgcagggcaagaagtccagctcactcgtggacataagggaagaggaaaccgagggcgggtcccgacggctgtcccttcctggattacttagtcaggtttccccgcgcctgctgcggaaagctgcccgcgtgaagactcgaactgtggttctaactccgacctattcaggagaagctgatgccttgctcccttccctgcggacggaggtttggacctggggaaagggaaaggagggccagctgggacacggcgatgtgctaccacgactacagcctctgtgtgtcaagtgcctcgacgggaaggaagtcattcatctggaggcgggaggatatcatagcctcgctttaaccgccaagtcacaggtgtatagctggggctccaatacctttggacagctgggtcacagcgatttcccgactaccgtgcctaggctggccaagatctcgagcgagaatggggtgtggtccatagcagccggacgtgactactcccttttcttggttgacaccgaggattttcagccaggcctctattattccggaagacaagacccaaccgaaggggacaaccttcctgagaaccactccggctccaaaactccagtcctactaagctgcagcaagctgggttatattagtcgggtgacagctggtaaagattcctatttggcactggtcgacaagaatataatgggctatatcgcctcactccacgagctggcaaccaccgagagacggttttattctaagttgagcgacatcaaaagccaaatcttgagacctctcctgagcctggagaacctcgggactacaacaacagtccagctgctccaggaggtcgcttctagatttagcaagttatgttatctgattggccaacatggggcctccctgtcttcttttctccatggggtgaaagaggcgcgctccttggtcatccttaagcattcttccctctttctggacagctacacagagtactgtacatcgatcaccaatttccttgtcatgggaggattccaactcttagccaaaccagcaattgacttcctgaataagaatcaggagttgttgcaagatttgtctgaggtcaatgacgaaaatactcagctgatggagatcctgaatactctattttttcttcccatacggcggcttcacaactacgccaaggtgttattgaagttggccacttgtttcgaggttgcctcccctgagtatcagaaactgcaggacagttcctcttgctatgaatgcctggcactccacctgggccgaaagcggaaggaagccgagtataccctgggtttttggaaaaccttccccgggaaaatgactgatagcttgcgaaaacccgagaggcggctgctctgtgaatcttctaatcgcgccctgtccctgcagcacgccgggagattctcggtgaactggttcatcttattcaatgatgcgctggtacacgcccaatttagtacccaccatgtgtttcccctggcaacgctttgggccgaaccactatcagaagaggccggtggggtgaacgggctcaaaatcacgacacctgaagaacagtttacgttgatttcctctaccccacaggaaaaaacaaagtggctgcgcgccatcagccaggctgtggaccaggccttaaggggcatgagtgatttacccccatatgggtcggggagcagcgtgcagcgccaggagccaccaatttctagatcagcaaaatatactttctacaaggaccccagacttaaggatgcgacttacgacggcagatggctcagtggaaagccacacgggagaggagtgctgaaatggcccgacgggaaaatgtattccggcatgtttaggaacggtctggaggacggatatggcgagtaccgcattcccaacaaagctatgaacaaggaagaccactacgttgggcactggaaagaaggaaaaatgtgcggccaaggtgtgtatagctatgcatccggagaggttttcgagggctgcttccaggataatatgcgccatggccatggcctcctacgcagcgggaagttgaccagttcctcaccctctatgttcattgggcagtgggttatggacaaaaaagcggggtacggagtcttcgatgacatcacccgtggtgagaagtacatggggatgtggcaggacgatgtgtgtcaggggaacggtgtggttgtgactcagtttgggctgtactacgaggggaattttcacctcaacaagatgatggggaacggcgtgctccttagcgaagacgatactatctatgagggggaattcagtgacgattggacgcttagcggcaaggggacgctcactatgcccaacggcgactatattgagggctatttctcaggggagtggggcagtggtatcaaaatcactggcacctatttcaagccttctctatacgaatcagataaggataggccaaaggtatttcgcaagctgggcaatctggccgtgcctgccgacgaaaagtggaaagccgtatttgacgagtgctggaggcagctgggctgtgagggtccaggccagggcgaggtttggaaagcgtgggacaacattgctgtggccctgacaacttcacgtcgccagcaccgcgattctcccgagatcttgtcgcgtagccaaactcagaccttagaatctctagaattcataccccagcacgtaggagccttttcagttgagaagtatgacgacatacgaaagtacttgatcaaagcttgcgacaccccactgcatcccttgggaagattggtggaaactctcgtggctgtctacaggatgacctatgtgggagtaggggccaatcggcgtctgctgcaggaagctgtgaaagagatcaagtcttatctgaagcgaatctttcaactggtgaggtttctgtttccagagttacctgaagaaggatcaacaatccctctgtccgctcctctgcctaccgaaagaaaaagcttttgtaccggcaaaagcgattcccggtccgaatcacccgagcctggatacgtggtcacttcctcgggcctactgctgcctgtgttgctgcctcgcctttaccctccattgttcatgctgtacgctctggataatgaccgtgaagaggacatatactgggagtgcgtccttcggctaaataagcaaccggacatcgctctgctcggcttcctcggggtccagagaaaattctggccagcaacgctgtcaatccttggagaaagcaaaaaagttctgcctacaaccaaggatgcgtgtttcgcctcggctgtcgagtgtcttcagcagatctccacaaccttcacaccgtctgacaaacttaaagtcattcagcagacattcgaggaaattagccagagtgtcctggcttcactccacgaggattttttatggagtatggacgacctcttccccgtgttcctgtacgtggtgctcagggcacgtatccgaaaccttggcagcgaggtgcatctcatcgaagatctgatggatccctacttacagcacggagaacaaggcatcatgttcaccactctgaaagcttgttactatcagattcagcgcgagaaattaaattag

SEQ ID NO: 206508 - DNA, 1758 bp, Artificial Sequence
  derived and/or modified sequence
tgacttgccctcgtcgacaaaaatataatggggtatatagcatccctccacgaactggcaacaaccgagcgccggttttactccaagctgagcgacatcaaatcccaaatcctcaggccactgctaagcctggagaatctgggaacgaccacgaccgttcaactgttgcaggaggtggccagcaggttttccaagctctgctatcttatcggtcaacatggtgcgtccctgtcgtccttcctgcacggggttaaagaagccagatctctggtgattctgaaacacagttcactctttctggacagctataccgagtactgtactagtattaccaactttctagtgatgggtggtttccagctgttagccaagcctgcgatcgacttcttgaacaaaaaccaggagctgttacaagatctctcggaagttaacgatgaaaacacccagttaatggaaatccttaacacccttttcttcttaccgatccgtagacttcataactatgcgaaggtgctgctgaagttggccacgtgcttcgaagtggctagtcccgaataccagaaactccaggattccagtagctgctatgagtgcctagcgcttcatcttgggcggaaaagaaaggaagcggaatacacattaggattctggaaaacatttcccgggaaaatgactgacagtctgcgcaaacctgaacggagactcctttgcgaaagttccaatagggccctctccctgcagcacgcggggcgattctctgtgaattggttcatattgtttaatgacgcattggtgcacgcccagtttagcacacatcacgtcttccctctcgcaacactctgggccgagccactgagcgaggaggccggaggggtgaatggattgaaaattacaacaccagaagaacagtttacacttatatcctcgacgcctcaggaaaaaaccaagtggcttagagccatctcccaggccgttgatcaggcccttcggggcatgtctgacttgccgccctacgggagcgggagttcagtgcagagacaggagccgcccatctcaagatcagccaaatacactttctataaagaccccagactgaaagacgccacttacgatggacgatggctctctggaaagcctcacggacgcggagtcctgaagtggcctgatggcaaaatgtatagtggcatgttcagaaatgggcttgaggacggctacggggagtaccggattccaaataaagcaatgaataaggaggatcactatgtggggcactggaaggaggggaaaatgtgcggccagggcgtatattcttatgcctccggcgaagttttcgagggatgtttccaggataatatgcggcatgggcacggcttgctgcgttctggaaagctaacttcctctagcccttcaatgttcatcgggcagtgggttatggacaagaaagccggctatggagtgtttgacgacattacccgcggtgagaagtatatgggcatgtggcaagatgacgtgtgccaggggaatggcgtcgtagtgacccaattcggattgtactacgaaggaaatttccacctgaacaaaatgatgggaaatggcgttttgctctccgaggacgataccatttacgaaggagagttctcagatgactggacactgtccggaaaggacaacagcgggctcattgagcaggtcggaaagtgcagtctcctgccttacttcttgaaggtttgtgaggctctagttctgttcctgctgtag

SEQ ID NO: 206509 - DNA, 1731 bp, Artificial Sequence
  derived and/or modified sequence
atgggctacatcgcttccctacacgagcttgcaactacagagcggcgcttttacagcaagctgagtgatataaagagtcaaattctccgccccctgttgtcactcgagaatctggggaccacgacaacagtgcagctgcttcaggaagtggctagtcgtttttctaaactctgttacctgatcgggcagcacggtgcctctttgagcagctttctccacggcgtcaaagaggccaggagtttggttattctgaagcacagttccttgttcctggacagctacactgagtactgtacatccatcaccaattttttggtgatgggaggcttccaactcctggcgaaaccagccattgactttctcaacaagaaccaggaactgcttcaggatctgagcgaagtcaacgacgagaatacccagctgatggaaatacttaatacattgttctttctgccgattaggcgactgcataattatgctaaggtgctattgaagttggccacctgtttcgaggttgcctcacccgagtatcagaaacttcaggatagctcatcatgttatgaatgtctggctctacatttgggccgcaaacggaaagaagccgagtacacactaggattttggaagaccttccccggaaaaatgactgattcccttcgcaagccagaacggcgattgctctgcgaaagtagtaacagagctctctctctgcagcatgcaggccggttctccgtgaattggtttatactgttcaacgacgccctcgtgcatgcccagttttctacgcaccacgtattccccctcgctacactgtgggccgagcccctgtcagaagaggcaggaggggtcaacggactgaaaataacgacccccgaggagcagtttactcttatatcctcaacaccccaagagaaaaccaaatggttgagggcgatcagccaggccgtcgaccaggccctgaggggcatgagcgatctgcccccatacggctccggatcatccgtgcagaggcaggagccacccatctctcggtccgccaagtacactttttacaaagatccacgtctgaaggacgctacctatgacggacgatggctctccgggaaacctcacggccggggagtgttgaagtggccagacggaaagatgtattcaggaatgtttaggaacggcctggaagacggctacggagagtaccgaatcccaaataaggcgatgaacaaggaagatcattatgttggccactggaaggagggaaagatgtgcgggcagggcgtatatagctatgcatccggtgaggtttttgaggggtgctttcaggacaacatgagacacggtcacggcctgctcagatcaggcaagctgacatcttcttcccctagtatgtttattggccagtgggtgatggacaaaaaagcgggttacggggtctttgacgatatcacgagaggcgagaaatatatggggatgtggcaagatgacgtgtgccagggcaacggcgtggtggtgacgcagtttggcctgtattacgaaggaaactttcacctgaacaagatgatgggtaatggtgtgctgctcagcgaagacgacacgatctacgagggtgagttttctgacgactggacactgagcggcaaggacaacagcggcctgatcgaacaggtgggcaaatgttcgctgctaccatacttcttgaaggtatgtgaagccctggtgctgttcttgctttag

SEQ ID NO: 206510 - DNA, 4974 bp, Artificial Sequence
  derived and/or modified sequence
atggacagcaagaagaggagcagcacagaagctgagggcagcaaggagcggggcctggtgcacatctggcaggccggcagcttccccatcaccccagagcggctgcccggctggggcggcaagacagtgctgcaggccgccctgggcgtgaagcacggcgtgctgctgacagaagatggagaggtgtacagctttggcaccctgccctggaggagcggccctgtggagatctgccccagcagccccatcctggagaatgccctggtgggccagtatgtgatcaccgtggccaccggcagcttccacagcggggctgtgacagacaatggagtggcctacatgtggggagaaaattctgctggccagtgtgctgtggccaaccagcagtatgtgcctgagcccaaccctgtgtccattgctgacagcgaggccagccccctgctggccgtgcgcatcctgcagctggcctgtggggaggagcacaccctggccctgagcatcagccgggagatctgggcctggggcaccggctgccagctgggcctcatcaccacagccttccctgtgaccaagccccagaaggtggagcacctggccggccgggtggtgctgcaggtggcctgtggggccttccacagcctggccctggtgcagtgcctgcccagccaggacctgaagcctgtgcctgagcgctgcaaccagtgcagccagctgctgatcaccatgacagacaaggaggaccacgtgatcatcagtgacagccactgctgccccctgggcgtgaccctgacagagagccaggctgaaaatcatgccagcacagccctgagccccagcacagagaccctggaccggcaggaggaggtgtttgagaacaccctggtggccaatgaccagagcgtggccacagagctgaatgctgtgtctgcccagatcaccagcagtgatgccatgagcagccagcagaatgtgatgggcaccacagagatcagcagcgccaggaacatccccagctacccagacacccaggccgtgaatgagtacctgaggaagctgagtgaccacagcgtgagagaagattctgaacatggagagaagcctgtgcccagccagcccctgctggaggaggccatccccaacctgcacagcccccccaccaccagcaccagcgccctgaacagcctggtggtgtcctgtgccagcgctgtgggcgtgcgggtggccgccacctatgaagctggggccctgagcctgaagaaggtgatgaacttctacagcaccaccccctgtgagaccggggcccaggccggcagcagcgccatcggccctgagggcctgaaggacagccgggaggagcaggtgaagcaggagagcatgcagggcaagaagagcagcagcctggtggacatccgggaggaggagacagaaggaggcagccggcggctgagcctgcccggcctgctgagccaggtgagcccccggctgctgaggaaggccgcccgggtgaagaccaggacagtggtgctgacccccacctacagcggggaggctgatgccctgctgcccagcctgaggacagaggtgtggacctggggcaagggcaaggagggccagctgggccatggagatgtgctgccccggctgcagcccctgtgtgtgaagtgcctggatggcaaggaggtgatccacctggaggccggcggctaccacagcctggccctgacagccaagagccaggtgtacagctggggcagcaacaccttcggccagctgggccacagcgacttccccaccaccgtgccccggctggccaagatcagcagtgaaaatggagtgtggagcattgctgctggccgggactacagcctcttcctggtggacacagaggacttccagcccggcctgtactacagcggccggcaggaccccacagaaggagacaacctgcctgagaaccacagcggcagcaagacccctgtgctgctgagctgcagcaagctgggctacatcagccgggtgacagctgggaaggacagctacctggccctggtggacaagaacatcatgggctacatcgccagcctgcacgagctggccaccacagaaagacgcttctacagcaagctgagtgacatcaagagccagatcctgcggcccctgctgagcctggagaacctgggcaccaccaccaccgtgcagctgctgcaggaggtggccagccgcttcagcaagctgtgctacctgattggccagcacggggccagcctgagcagcttcctgcatggagtgaaggaggcccggagcctggtgatcctgaagcacagcagcctcttcctggacagctacacagagtactgcaccagcatcaccaacttcctggtgatgggcggcttccagctgctggccaagccagccatcgacttcctgaacaagaaccaggagctgctgcaggacctgtctgaggtgaatgatgagaacacccagctgatggagatcctgaacaccctcttcttcctgcccatccggcggctgcacaactatgccaaggtgctgctgaagctggccacctgctttgaggtggccagccctgagtaccagaagctgcaggacagcagcagctgctatgagtgcctggccctgcacctgggcaggaagaggaaggaggccgagtacaccctgggcttctggaagaccttccctgggaagatgacagacagcctgaggaagccagagcggcggctgctgtgtgagagcagcaacagagccctgagcctgcagcacgccggccgcttctctgtgaactggttcatcctcttcaatgatgccctggtgcacgcccagttcagcacccaccacgtgttccccctggccaccctgtgggccgagcccctgtctgaggaggccggcggcgtgaatggcctgaagatcaccaccccagaggagcagttcaccctcatcagcagcaccccccaggagaagaccaagtggctgcgggccatcagccaggccgtggaccaggccctgcggggcatgtctgacctgcccccctacggcagcggcagctctgtgcagaggcaggagccccccatcagccgcagcgccaagtacaccttctacaaggacccccggctgaaggatgccacctatgatggccgctggctgagcggcaagccccacggccggggcgtgctgaagtggccagatggcaagatgtacagcggcatgttcagaaatggcctggaggatggctacggggagtaccgcatccccaacaaggccatgaacaaggaggaccactacgtgggccactggaaggagggcaagatgtgtggccagggcgtgtacagctatgccagcggggaggtgtttgagggctgcttccaggacaacatgagacatggccacggcctgctgcggagcggcaagctgaccagcagcagccccagcatgttcatcggccagtgggtgatggacaagaaggccggctatggagtgtttgatgacatcaccagaggagagaagtacatgggcatgtggcaggatgatgtgtgccagggcaatggagtggtggtgacccagtttggcctgtactatgagggcaacttccacctgaacaagatgatgggaaatggagtgctgctgtctgaagatgacaccatctatgaaggagagttcagtgatgactggaccctgagcggcaagggcaccctgaccatgcccaatggagactacatcgagggctacttcagcggggagtggggcagcggcatcaagatcaccggcacctacttcaagcccagcctgtatgaaagtgacaaggaccggcccaaggtgttcaggaagctgggcaacctggccgtgcctgcagatgagaagtggaaggctgtgtttgatgagtgctggaggcagctgggctgtgagggccctggccagggcgaggtgtggaaggcctgggacaacattgctgtggccctgaccaccagccggcggcagcaccgggacagccctgagatcctgagccgcagccagacccagaccctggagagcctggagttcatcccccagcacgtgggcgccttctctgtggagaagtatgatgacatcaggaagtacctgatcaaggcctgtgacacccccctgcaccccctgggccgcctggtggagaccctggtggccgtgtacaggatgacctacgtgggcgtgggcgccaacagaaggctgctgcaggaggccgtgaaggagatcaagagctacctgaagaggatcttccagctggtgcgcttcctgtttcctgagctgcctgaggagggcagcaccatccccctgagcgcccccctgcccacagagaggaagagcttctgcaccgggaagagtgacagccgctctgagagccctgagcccggctacgtggtgaccagcagcggcctgctgctgcctgtgctgctgccccggctgtacccacccctcttcatgctgtatgccctggacaatgaccgggaggaggacatctactgggagtgtgtgctgcggctgaacaagcagcctgacatcgccctgctgggcttcctgggcgtgcagaggaagttctggccagccaccctgagcatcctgggggagagcaagaaggtgctgcccaccaccaaggatgcctgctttgccagcgctgtggagtgcctgcagcagatcagcaccaccttcacccccagcgacaagctgaaggtgatccagcagacctttgaggagatcagccagagcgtgctggccagcctgcacgaggacttcctgtggagcatggatgacctcttccctgtgttcctgtatgtggtgctgcgggcccgcatccggaacctgggcagcgaggtgcacctgattgaggacctgatggacccctacctgcagcacggggagcagggcatcatgttcaccaccctgaaggcctgctactaccagatccagcgggagaagctgaactag

SEQ ID NO: 206511 - DNA, 1758 bp, Artificial Sequence
  derived and/or modified sequence
tgactggccctggtggacaagaacatcatgggctacatcgccagcctgcacgagctggccaccacagagcggcgcttctacagcaagctgagtgacatcaagagccagatcctgcggcccctgctgagcctggagaacctgggcaccaccaccaccgtgcagctgctgcaggaggtggccagccgcttcagcaagctgtgctacctgattggccagcacggggccagcctgagcagcttcctgcacggcgtgaaggaggcccggagcctggtgatcctgaagcacagcagcctcttcctggacagctacacagagtactgcaccagcatcaccaacttcctggtgatgggcggcttccagctgctggccaagccagccatcgacttcctgaacaagaaccaggagctgctgcaggacctgtctgaggtgaatgatgagaacacccagctgatggagatcctgaacaccctcttcttcctgcccatccggcggctgcacaactatgccaaggtgctgctgaagctggccacctgctttgaggtggccagccctgagtaccagaagctgcaggacagcagcagctgctatgaatgtctggccctgcacctgggcaggaagaggaaggaggccgagtacaccctgggcttctggaagaccttccctgggaagatgacagacagcctgaggaagccagagcggcggctgctgtgtgagagcagcaacagagccctgagcctgcagcacgccggccgcttctctgtgaactggttcatcctcttcaatgatgccctggtgcacgcccagttcagcacccaccacgtgttccccctggccaccctgtgggccgagcccctgtctgaggaggccggcggcgtgaatggcctgaagatcaccaccccagaggagcagttcaccctcatcagcagcaccccccaggagaagaccaagtggctgcgggccatcagccaggccgtggaccaggccctgcggggcatgtctgacctgcccccctacggcagcggcagctctgtgcagaggcaggagccccccatcagccgcagcgccaagtacaccttctacaaggacccccggctgaaggatgccacctatgatggccgctggctgagcggcaagccccacggccggggcgtgctgaagtggccagatggcaagatgtacagcggcatgttcagaaatggcctggaggatggctatggagagtaccgcatccccaacaaggccatgaacaaggaggaccactacgtgggccactggaaggagggcaagatgtgtggccagggcgtgtacagctatgccagcggggaggtgtttgagggctgcttccaggacaacatgagacatggccacggcctgctgcggagcggcaagctgaccagcagcagccccagcatgtttattggccagtgggtgatggacaagaaggccggctacggcgtgtttgatgacatcaccagaggagagaagtacatgggcatgtggcaggatgatgtgtgccagggcaatggagtggtggtgacccagtttggcctgtactatgagggcaacttccacctgaacaagatgatgggaaatggagtgctgctgtctgaagatgacaccatctatgaaggagagttcagtgatgactggaccctgagcggcaaggacaacagcggcctgattgagcaggtgggcaagtgcagcctgctgccctacttcctgaaggtgtgtgaggccctggtgctcttcctgctgtag

SEQ ID NO: 206512 - DNA, 1731 bp, Artificial Sequence
  derived and/or modified sequence
atgggctacatcgccagcctgcacgagctggccaccacagaaagacgcttctacagcaagctgagtgacatcaagagccagatcctgcggcccctgctgagcctggagaacctgggcaccaccaccaccgtgcagctgctgcaggaggtggccagccgcttcagcaagctgtgctacctgattggccagcacggggccagcctgagcagcttcctgcatggagtgaaggaggcccggagcctggtgatcctgaagcacagcagcctcttcctggacagctacacagagtactgcaccagcatcaccaacttcctggtgatgggcggcttccagctgctggccaagccagccatcgacttcctgaacaagaaccaggagctgctgcaggacctgtctgaggtgaatgatgagaacacccagctgatggagatcctgaacaccctcttcttcctgcccatccggcggctgcacaactatgccaaggtgctgctgaagctggccacctgctttgaggtggccagccctgagtaccagaagctgcaggacagcagcagctgctatgagtgcctggccctgcacctgggcaggaagaggaaggaggccgagtacaccctgggcttctggaagaccttccctgggaagatgacagacagcctgaggaagccagagcggcggctgctgtgtgagagcagcaacagagccctgagcctgcagcacgccggccgcttctctgtgaactggttcatcctcttcaatgatgccctggtgcacgcccagttcagcacccaccacgtgttccccctggccaccctgtgggccgagcccctgtctgaggaggccggcggcgtgaatggcctgaagatcaccaccccagaggagcagttcaccctcatcagcagcaccccccaggagaagaccaagtggctgcgggccatcagccaggccgtggaccaggccctgcggggcatgtctgacctgcccccctacggcagcggcagctctgtgcagaggcaggagccccccatcagccgcagcgccaagtacaccttctacaaggacccccggctgaaggatgccacctatgatggccgctggctgagcggcaagccccacggccggggcgtgctgaagtggccagatggcaagatgtacagcggcatgttcagaaatggcctggaggatggctacggggagtaccgcatccccaacaaggccatgaacaaggaggaccactacgtgggccactggaaggagggcaagatgtgtggccagggcgtgtacagctatgccagcggggaggtgtttgagggctgcttccaggacaacatgagacatggccacggcctgctgcggagcggcaagctgaccagcagcagccccagcatgttcatcggccagtgggtgatggacaagaaggccggctatggagtgtttgatgacatcaccagaggagagaagtacatgggcatgtggcaggatgatgtgtgccagggcaatggagtggtggtgacccagtttggcctgtactatgagggcaacttccacctgaacaagatgatgggaaatggagtgctgctgtctgaagatgacaccatctatgaaggagagttcagtgatgactggaccctgagcggcaaggacaacagcggcctcatcgagcaggtgggcaagtgcagcctgctgccctacttcctgaaggtgtgtgaggccctggtgctcttcctgctgtag

SEQ ID NO: 206513 - DNA, 4974 bp, Artificial Sequence
  derived and/or modified sequence
atggacagcaagaagcggagcagcaccgaggccgagggcagcaaggaaaggggcctggtgcatatctggcaggccggctcttttcccattactcctgagaggctgcctgggtggggcggaaagacggtgctgcaagcagccctcggggtaaaacatggtgtcctattgacggaggatggcgaagtgtattccttcgggacactcccctggcggtccgggccagttgaaatctgcccttctagtcctattctggaaaatgcccttgttgggcagtacgttattactgtggctacagggtcgtttcacagtggggcagtgacagataacggtgtcgcttacatgtggggcgaaaattcagccggccagtgcgcggtggcaaatcagcagtatgtgcccgagcctaaccccgttagtatcgccgactctgaggcttccccactgctggcagtgcgcatcctgcagttggcgtgcggagaggagcatacgctggccctgtcaatctcccgcgaaatctgggcctggggcacaggctgtcagcttggcctcattaccacagcattccccgtgaccaagccacagaaagtggaacatcttgcaggccgggtggtgctgcaggtggcttgcggtgcctttcactccctcgccctggtacaatgtctccccagtcaggatttaaagcctgtccccgagcgatgcaaccagtgctcccaactactcatcacaatgaccgacaaagaggatcatgttatcattagtgactcacactgttgccccttgggggtcactttgacagagagtcaggctgaaaatcatgccagtactgccctgagccccagcaccgagactctggaccggcaggaagaagtgtttgagaatacccttgtggctaatgaccagtccgtcgctaccgaacttaatgctgtctcagcacagatcacttccagcgatgccatgtctagccaacagaacgtaatgggaacaactgagatctcatccgctcgtaatatccctagttatcccgacacgcaggccgtcaacgaatatttgcgcaaattgtccgatcattccgtgagggaagatagtgaacacggggagaagcccgtgccctcacagccgttactcgaagaggctatccccaacctgcacagcccccccactaccagtaccagcgctttgaacagcctcgtagtgagttgtgctagcgctgtgggagtacgggtggcagcaacttacgaagctggcgctctctccctaaagaaagtcatgaatttctattccaccacaccctgcgaaacgggggctcaggccgggagttccgccattggccctgaaggactcaaggacagtcgggaggagcaggttaagcaggaaagcatgcaaggaaagaagagtagcagtcttgtggacatccgcgaagaggagactgaaggtggtagcaggagactctccctgcctggactgctgagtcaagtgagccctcggttgttaagaaaagccgctagggtaaagacaaggactgttgtattgacgcctacttattcaggagaagctgatgccctccttccaagcctccggaccgaagtgtggacgtggggcaagggcaaagagggacagttgggtcatggggatgtactacctcggctacaaccactgtgtgttaagtgtctggatggaaaagaagttatccacctcgaggctgggggttaccacagcctggctctgacagcaaaatcgcaggtgtacagctggggttctaatacatttggccagttgggacacagcgactttcccacaaccgtaccgagactggccaaaattagctccgagaatggagtttggtcgatcgccgccggccgggattattcattgttcctggtcgataccgaggatttccagccagggctgtactacagtggtagacaggatcctactgaaggggacaacttgcctgaaaaccattcaggatccaagactcctgtgctgctgtcgtgctcaaaactgggatatatcagcagagtgaccgccggtaaggacagctatctggctcttgtggacaagaatataatggggtacatagcgagcctgcacgagttggcgaccacagaacggaggttttatagtaaactgtccgatattaaatcccagatcttgagacccttgctctccctggaaaatcttggcacaaccacaacagtgcaactccttcaggaagtcgcctccaggttttccaaactgtgttatctcattggacaacacggggctagcttatcttctttcttacatggcgtgaaagaagccaggtcactggtgatcctcaagcatagctcgttgtttcttgacagctacacggaatactgcacctctatcacaaattttcttgtcatgggcggatttcagctcttagcgaaacctgctattgacttcctaaataagaatcaggagctgttacaagacctcagcgaagttaacgacgagaacactcagcttatggagatacttaataccttgttcttcttacctatcagacgcttgcataactatgcaaaggtcctgctgaaactggcaacctgctttgaagtggcatcccctgagtatcaaaagctgcaagactcatctagttgttacgagtgcctggctctgcatctcggtcggaagagaaaggaagcagagtatactctcgggttctggaaaacgtttcctggaaagatgaccgactctctgcgcaagcccgaaaggaggctcctttgtgagtcgtccaatcgcgctctgtcactacagcatgcaggccggttctccgttaactggtttatcctctttaatgacgcgttagtgcatgctcagttctctacccaccacgtttttcccctggcaactctgtgggcagaacccctatctgaagaagcagggggcgtgaacggcctgaaaatcaccactccagaggagcaattcaccctcatttccagcacacctcaggaaaagaccaagtggctccgagctatttctcaggctgtggatcaggcgttgaggggcatgtctgatctaccgccatatggatcagggagctctgtccaaaggcaggagccgcctatttcccggtctgccaaatatacattttataaggatcctcggctcaaggacgctacatacgatggacggtggctgtcaggcaagccccacgggaggggcgttctcaagtggcctgatggaaaaatgtacagcggaatgttcaggaacgggttagaggacggctacggggagtataggattcccaataaagcaatgaacaaggaggatcattatgtgggacactggaaagagggaaaaatgtgtggacagggagtctattcatatgcatccggagaagtgttcgagggttgcttccaggacaacatgcgccacggacacggacttttacgatcaggaaaactgacatcctccagtccatcgatgttcatcggccagtgggtcatggataaaaaagccgggtacggagtattcgacgacattactaggggggagaaatatatgggcatgtggcaggatgacgtctgccagggaaatggtgtcgtggtgacgcagtttggcctgtactacgagggcaacttccacctcaataagatgatgggcaacggcgtgctgctttcagaggacgataccatatacgagggcgagttctcagacgattggaccctaagcggcaagggtactctgacaatgcccaatggtgactatatagagggctatttttccggagagtggggttcagggatcaagatcaccggaacgtattttaaacctagcctttatgagagtgacaaggatcgcccgaaagtcttccgcaagcttggaaacctcgcggtgccagcagacgagaagtggaaggccgtatttgacgagtgctggaggcagctgggctgtgagggaccaggtcagggcgaggtgtggaaggcttgggataacatagctgtggctttaacaacctcacgcaggcagcatcgcgattctcctgagatcctgtccagatcacagacccagacgctggagagcctagaattcatacctcagcatgtgggtgcctttagcgtcgaaaaatatgacgacattagaaagtatcttattaaggcctgtgacactccactccacccccttgggagactcgtggaaaccctcgtagctgtgtaccgaatgacatatgttggtgtcggggcgaatcgtcgtctcctgcaagaggccgtgaaagagattaaatcatacctgaagcgaatttttcagctagtccggtttctgtttccagaactaccggaggaggggagtaccattccattatctgcacctctccccaccgaacggaagagtttttgtacgggaaaaagcgactccaggtccgaatcaccggagcccggttacgtggtcacttcctcaggactcctcttacctgtgctccttccccgtttatatcctccgctgtttatgctgtatgccctcgataatgatcgggaggaggatatttattgggagtgtgtgctgaggttgaacaaacagcccgatatcgcgctgctgggattcctgggcgtacagaggaagttttggcctgccaccctgtcaatattgggcgagtccaagaaagtcctgcctactaccaaggacgcgtgctttgcctccgccgtggaatgccttcagcagatctccacaacattcactccctcagacaagctcaaagtaatccagcagacgttcgaggagatatcacagagcgttttggcttccctgcatgaagacttcctgtggtctatggacgatctgttccccgtttttctgtacgtggttttgagagccaggatacgcaacttgggaagcgaagttcacctcatcgaagatttgatggatccgtacctgcaacacggcgagcagggtatcatgttcactactcttaaagcatgttattatcagatacaaagggagaaattaaactag

SEQ ID NO: 206514 - DNA, 1758 bp, Artificial Sequence
  derived and/or modified sequence
tgactggccctggtggacaagaacatcatgggctacatcgccagcctgcacgagctagctaccaccgagagacgcttttattcaaagctaagcgacattaagtcacagatcctccgaccactgctctcactggagaaccttggcactaccaccaccgtgcagttactgcaagaagtggcctctagattctccaagctgtgttacttgatcggccaacacggggcctctcttagttcttttctgcatggggtgaaagaagccagaagcttggtgattctgaaacatagtagcctcttcttggattcatatacagagtactgtacaagcataaccaatttcctggtcatggggggcttccagctgttggctaaacccgccatcgattttctcaacaaaaaccaggagctgctgcaggatctgtccgaagtaaacgacgagaacacacagcttatggaaatcctgaatacattattctttttgcctataaggcggctgcacaactacgcaaaggtcctactaaagcttgccacatgctttgaagtcgctagccccgagtaccagaagctgcaagattcaagctcttgctacgaatgcctggctctacatctgggccgtaagcgaaaggaagccgagtatacattgggtttctggaaaaccttccccggtaaaatgacggattcactgagaaaacccgagcgacggctcctgtgcgaatcctccaatcgtgccttgagcctgcagcatgccgggcggttcagtgtcaactggtttattttgtttaatgatgcactggtccacgcccagttcagtacacatcatgtcttccctctggcaactctgtgggcggaaccgctgtcagaagaagctggtggggtcaacggccttaagatcacaacgcctgaggaacagttcactcttatttcttctactccccaagaaaaaaccaagtggctgcgcgctatctcccaagctgtggaccaggccctaaggggtatgtccgatctgccaccgtacggctctggaagttctgttcagagacaggaaccccctatttctaggagcgcaaaatacactttctacaaagaccctagacttaaagatgctacttatgatgggagatggctgtcaggcaagccgcacgggcgcggtgttctcaaatggcccgacgggaagatgtactcagggatgtttaggaacggtttggaagatggatacggagagtacaggatcccaaataaggctatgaataaggaggatcattatgttggacactggaaggaaggtaagatgtgcgggcagggcgtatattcgtatgccagcggtgaagttttcgaaggctgttttcaagataatatgcgccacggtcatggcctgctcagatcgggcaagcttacctcctcgtccccatccatgtttatcgggcagtgggtcatggataaaaaagccgggtacggggtatttgatgacataactcgaggagaaaagtacatggggatgtggcaggacgacgtctgtcagggcaacggcgtggtggtgacacagtttggtctatattacgaaggaaactttcacctgaacaagatgatgggcaacggggtcctgcttagtgaggacgacacaatctacgaaggagagttcagtgacgactggactctgtcaggaaaagacaactcaggcctcatcgaacaggtggggaaatgtagcctcctcccctacttcctaaaagtgtgtgaggcactcgtgttatttcttctgtag

SEQ ID NO: 206515 - DNA, 1731 bp, Artificial Sequence
  derived and/or modified sequence
atgggctacatcgccagcctgcacgagctggccaccaccgagcggcgattctattcaaaactgtccgacatcaaatctcaaattctgcgcccccttttgtcattggagaacttaggcaccaccactaccgttcagctgctgcaggaagtggcctctcggttttctaagttgtgctatttgatcggacagcacggggcttccctctcatccttcctgcacggcgtgaaggaagcacggagcttggtcattctgaagcactcatcactgtttctggattcgtacaccgagtattgcacgtccatcaccaacttcttggtgatgggaggattccagttgttggccaagcctgccatcgattttctgaacaagaatcaggagctgttgcaagacctcagcgaggtgaacgatgagaacacgcagttgatggagattctcaacaccttatttttcctgcccatccgtcgtttgcataattacgctaaagtgctgctcaagctggcgacttgttttgaagtggcaagtcccgaatatcagaagctgcaagacagctcttcctgttatgaatgccttgcccttcaccttgggcggaagagaaaagaggctgaatatacacttggcttctggaaaacatttcccggcaagatgactgatagcctacgaaagcctgaacgtagactgttgtgcgagtcctctaaccgcgccctctctttgcaacatgccggtcggttcagtgtcaactggtttattttatttaacgacgcacttgtacacgcccagttttccacgcatcacgtatttcccctcgccactctgtgggccgaaccactgagcgaggaggctggcggtgtaaatggattaaaaataactacccctgaggagcagttcactctgatttcatctacgccccaggaaaaaaccaagtggcttcgggcaattagtcaggctgtcgatcaggccctcaggggcatgtccgatctgcccccttacggcagtggcagctccgtccagaggcaggagccgcccatttcccggagtgctaaatataccttttacaaggacccaaggctgaaggatgccacctatgatggtaggtggttgtcaggcaaaccacacgggcgaggcgtgctgaaatggccggacggcaagatgtactctggaatgtttcgcaacggactcgaggacgggtatggtgagtaccggattccaaataaggctatgaacaaggaagatcactacgttggacattggaaggagggcaaaatgtgtggtcagggcgtatacagctacgcgtcaggagaagtgttcgaaggatgcttccaagataatatgagacatggacatggcttattgagaagtggcaaactcacctctagttctcctagcatgttcattggccagtgggtgatggataagaaagccgggtatggcgtctttgacgatatcactcgaggagaaaaatacatgggcatgtggcaggacgacgtatgtcagggaaatggcgtcgtggtgacccaattcgggctgtactacgaaggcaattttcacctgaacaaaatgatgggaaatggcgtcttgctgagtgaagatgatacaatttatgaaggcgaattcagtgatgattggacactttcagggaaggataattccggtctgatcgagcaggtgggaaagtgtagcctgctcccctatttcctgaaagtctgtgaagccctagtgttatttctgctgtag

SEQ ID NO: 206516 - DNA, 6644 bp, Artificial Sequence
  derived and/or modified sequence
aagcgcatctcaggactgatagctccgccctaaactaagggagagactgtgctcccaagtacgtagcctgcagtgcctaacgcattctcagcaattttgacccccaacagacgccgtcgacagtctcccaagaacaattcccaggagctcggattccaagagccgcccgcgccctcgtttaccttcgctagtcgccctgcagccccgccctgtccggaggccccgccctccatgaatcagctgatcccgcggacccactgggttgccaagctcgcgccggatgcggagcgcggtgctgccggtggagcttcaggtcttgatagactttctgtaaagaaggaatgatttggtgatggagtgttcccactgaccgatggactcaaagaagagaagctcaacagaggcagaaggatccaaggaaagaggcctggtccatatctggcaggcaggatcctttcccataacaccagagagattgccaggctggggaggaaagactgttttgcaggcagccctcggagtgaaacatggagttcttctgactgaagatggtgaggtctacagctttgggactcttccctggagaagtggaccagtggagatttgtccaagtagccccattctagaaaatgccctggttgggcaatatgttattactgtggcaacaggaagcttccatagtggagcagtgacagacaatggtgtcgcgtacatgtggggagagaattctgctggccagtgtgcagtagccaaccagcagtatgtgccggaaccaaatcctgtcagcattgctgattctgaggccagccctttgttagcagtcaggattttacagttggcgtgtggcgaggagcacactctggcattgtcaataagcagagagatttgggcatggggtaccggttgtcagttgggtctcattaccactgccttcccagtgacaaagccgcaaaaggtagaacatcttgctgggcgagtggtgcttcaagttgcctgtggtgctttccacagcttagcccttgtacaatgcctcccttcccaggatctgaagccagtcccagaacgatgcaaccagtgcagccagctcttgattactatgactgacaaagaagaccatgtgattatatcagacagtcattgttgcccattaggtgtgacactgacagaatctcaggcagaaaaccatgccagcactgctctcagcccctccactgaaacccttgacaggcaggaagaagtatttgagaacactcttgtagcaaatgatcagtctgttgctactgaactgaatgcagtaagtgctcagatcacaagcagcgatgccatgtcctctcaacaaaatgtcatgggaacaactgaaatttcctctgccagaaacataccatcataccctgacacccaagcagtcaatgaatacctacggaaactgtcagatcattcagtaagagaggactcagagcatggtgaaaagccagtgccatctcagcctcttttagaagaagcaattcctaatctccacagcccgcctaccacaagcacctcagccctaaacagcctggtggtctcttgtgcatctgctgttggtgtgagagtggctgctacttatgaagctggtgccttgtcactgaagaaagttatgaacttttatagtacaaccccttgtgaaactggagctcaggcaggcagtagtgccattggccccgaaggtttgaaagatagcagggaagaacaggttaaacaggaatcaatgcaaggaaagaaaagttcaagtcttgtggatatcagagaagaagaaacagagggaggcagtcgaagactctccctccctggattgttgtcacaagtttcccccaggctcttaagaaaggctgcacgggtgaaaacgaggacagtggttctgacccccacatacagtggagaagcagatgcgctcctgccttctctgagaacagaagtgtggacctgggggaaagggaaggaagggcagctggggcacggcgatgttctgcctaggcttcaaccgttgtgtgtaaaatgtctggatggcaaagaagtaatccatctggaggcaggtggttaccattctcttgcacttactgcgaaatcccaggtttactcatggggtagcaatacctttggtcaacttgggcattccgattttccaacaacagttcctcgtcttgcaaagataagcagtgaaaatggagtctggagcatagctgcaggcagggattattccctgtttttagtggatacagaagacttccagcctgggttatattacagtggccgacaggaccctacagaaggtgacaaccttccagagaatcacagtggttctaagactccagtacttctctcctgtagtaagcttggatatataagcagagtgacagcaggaaaagatagctatttagccttggtggataaaaacattatggggtatattgccagtctccacgagttagctactacagaaagacgattctattcaaaactaagtgatatcaaatctcagattctcaggcctcttctcagtttagaaaatttgggcactacaactacagtccagctgttgcaggaggtggctagccgattcagcaagctgtgttacctcattggtcagcatggagcctcattgagcagcttccttcatggggtaaaggaagccaggagtttggtcatcctgaagcattcaagtctcttcttggatagttatacagagtattgcacatctattacaaatttcctggttatgggaggattccagcttcttgctaagcctgccattgatttcctaaataaaaaccaagagctgttgcaagatttgtcagaagtgaatgacgaaaacactcagttgatggaaatactgaatactttgtttttcttgccaatcagacgacttcataattacgcaaaagttttgctaaagcttgctacttgttttgaagtggcatctccagaatatcagaaactgcaggattccagttcttgttatgagtgtcttgctctccatctcggcaggaaaaggaaggaagcagaatacacactgggcttctggaagaccttccccggaaaaatgacggattccttgaggaagccagagcgtcgactgctgtgtgagagtagtaaccgagccctgtctctgcagcatgctgggaggttttccgtgaattggttcattctctttaatgatgccctggtccatgcccagttctccacgcaccatgttttccctctggccacgctgtgggcagagccactgtctgaagaagctggtggtgtgaatggcttaaagataactacacctgaggagcagttcactctcatttcatctacaccccaggaaaagacaaagtggctacgagctataagccaagccgtagatcaggctttgagagggatgtctgatctccccccttatggaagtggtagcagtgttcagagacaggaaccacccatttcacgcagtgccaaatatactttctacaaggatcctcgcctaaaggatgccacctatgatggacgctggctttcagggaagcctcatggcagaggggttttgaagtggcctgatggaaagatgtattctggcatgttcaggaatggcttggaagatgggtatggagaatacagaatcccaaacaaggcaatgaacaaagaagaccattatgtgggccattggaaagaaggaaaaatgtgcggtcaaggagtctacagctatgcttctggtgaagtatttgagggctgttttcaagataatatgcgtcatggtcatggtcttctacgaagtgggaaattgacgtcctcttctcctagtatgttcattggccagtgggtaatggataagaaagcaggatatggtgtctttgatgatatcactaggggggaaaagtatatgggaatgtggcaagatgatgtgtgtcaagggaatggtgtggtggttacccagtttggattatactacgagggcaactttcaccttaataaaatgatgggaaatggggttttgctttccgaagatgatactatctatgaaggagaattttcagatgactggactcttagtggaaagggaacactgactatgccaaatggagactacattgaaggttattttagtggagaatggggatctgggataaaaatcactggaacctacttcaaacctagtctatatgagagtgataaagacagacctaaagttttcaggaagctaggaaacctggcagtgccagctgatgagaagtggaaagcggtgtttgacgaatgttggcgccaactgggctgtgagggcccaggccaaggggaagtttggaaagcatgggacaatattgctgtggccttgaccaccagtcggcgccagcacagagacagtccagaaatactgagtcgttcacagactcagacactagagagtttggaattcattccacagcatgttggtgccttctctgtggagaaatatgatgacatcaggaaatatttaataaaggcctgtgacactcctctgcaccccctgggcaggcttgtggagacactggttgcagtgtatagaatgacatacgtgggcgtaggagccaaccgcaggttattgcaggaggctgtaaaggagattaagtcctatcttaagcgaattttccagctggtgaggttcttatttcctgagctgcctgaagaaggcagcacaattcctctctctgctcctctgccaaccgaaaggaagtctttttgcactgggaagtcagattcccgatctgaatcaccagagccaggttatgtagtaacgagttctggattattgcttcctgtgctgctacctcggctctacccaccgctgtttatgctttatgctttggataatgatcgcgaggaagacatttactgggaatgtgtccttcgactaaataagcagccagatattgctctcctgggctttcttggggtgcagaggaaattttggccagcaaccttgtcaatccttggagagagtaaaaaggttttgccaaccacgaaagatgcttgttttgcctcagcagtagaatgtctgcagcagatcagcacaacatttaccccatcagacaaacttaaggtcatccagcagacttttgaggagatctctcagagtgtcctggcgtcactccacgaagacttcttgtggtccatggatgacttgtttcctgttttcttatatgtggtgctacgggccaggattaggaatttaggctctgaggtacacctcattgaggatctaatggacccctatcttcagcatggggaacagggtataatgttcaccaccttgaaggcatgttactaccagattcagcgtgagaagcttaactaggctgcataacagcttgaaaactggattatctactacagagtgttataacaccatctggagtcttcctgtagtggcaaaaaagaacagtgttgaaattggaaaggactttgtgttatttaggttgttagaatgagccttaccaataataagagccctgagcccagaaaaaaggactgtatagtttaaagggaggattgaaagggaggtaaaaaatcagattagaccagttcttggcctatgataagttccaaaaataccatttatctactatttgaaaaaagaagaggatatcccttcctacagtaaagggtatgtcagctacatgaagttgtaagaaaagcttccagtagagcttcttatattaaagaagttgatggatatttttgaatttctggtttgcctgaatccacctgcagttaccccgatccgtttgcaagaaccagatcgtacttgaaactatagtggccacactctgccttcctgagtcccttccagtcatgtgtgcatcatgtctctttgccaagggaggggagaaaggaacttttaaactgcagttttaactttttctaagctgtttcttgatgggagaggttctgtgcaaaactaccacattctgtccccaaaatgtggaatgcatccaaataggagtcttctgcctcttaacttaaaagaacataggaattttgtttttggtttctttatcatgctacagagagtgaatacactggaattcagacaccgactctgagctgctaggaacctcatttgtccatgtgcaaacgctgtattccaaggcctgtgaatggcagcctgaggaagttttgcatgcaggctgtgttttcgagcaggactaacaactgggaaataagcaaaaaactgcatcgatccccagcctggtgttgttcttccctatacttcacactgaactcaggatgggaagaaaaaggaaacaagctttggctttttccatctcaaaagtattgtggcacctcaacatttcagtgttttgctttttaaaaaatgccctattgtaagttgttggtttatactgtataagtaacactagtagctgttttgaataacataggtgctcttcctcatctcatctcctacaccgtggtgagcatacagagtgtcctgatttgtgttaagtgactgagaagatgttaattacttttgaaaaaggatcatggtttttgctctactttataatcaagacaagtgtttattaaaatactgttttggaatgttggctgtaatgtaacagcaattttcataataaaaggcattcatcttt

SEQ ID NO: 206517 - DNA, 3242 bp, Artificial Sequence
  derived and/or modified sequence
tttagccttggtggataaaaacattatggggtatattgccagtctccacgagttagctactacagaaagacgattctattcaaaactaagtgatatcaaatctcagattctcaggcctcttctcagtttagaaaatttgggcactacaactacagtccagctgttgcaggaggtggctagccgattcagcaagctgtgttacctcattggtcagcatggagcctcattgagcagcttccttcatggggtaaaggaagccaggagtttggtcatcctgaagcattcaagtctcttcttggatagttatacagagtattgcacatctattacaaatttcctggttatgggaggattccagcttcttgctaagcctgccattgatttcctaaataaaaaccaagagctgttgcaagatttgtcagaagtgaatgacgaaaacactcagttgatggaaatactgaatactttgtttttcttgccaatcagacgacttcataattacgcaaaagttttgctaaagcttgctacttgttttgaagtggcatctccagaatatcagaaactgcaggattccagttcttgttatgagtgtcttgctctccatctcggcaggaaaaggaaggaagcagaatacacactgggcttctggaagaccttccccggaaaaatgacggattccttgaggaagccagagcgtcgactgctgtgtgagagtagtaaccgagccctgtctctgcagcatgctgggaggttttccgtgaattggttcattctctttaatgatgccctggtccatgcccagttctccacgcaccatgttttccctctggccacgctgtgggcagagccactgtctgaagaagctggtggtgtgaatggcttaaagataactacacctgaggagcagttcactctcatttcatctacaccccaggaaaagacaaagtggctacgagctataagccaagccgtagatcaggctttgagagggatgtctgatctccccccttatggaagtggtagcagtgttcagagacaggaaccacccatttcacgcagtgccaaatatactttctacaaggatcctcgcctaaaggatgccacctatgatggacgctggctttcagggaagcctcatggcagaggggttttgaagtggcctgatggaaagatgtattctggcatgttcaggaatggcttggaagatgggtatggagaatacagaatcccaaacaaggcaatgaacaaagaagaccattatgtgggccattggaaagaaggaaaaatgtgcggtcaaggagtctacagctatgcttctggtgaagtatttgagggctgttttcaagataatatgcgtcatggtcatggtcttctacgaagtgggaaattgacgtcctcttctcctagtatgttcattggccagtgggtaatggataagaaagcaggatatggtgtctttgatgatatcactaggggggaaaagtatatgggaatgtggcaagatgatgtgtgtcaagggaatggtgtggtggttacccagtttggattatactacgagggcaactttcaccttaataaaatgatgggaaatggggttttgctttccgaagatgatactatctatgaaggagaattttcagatgactggactcttagtggaaaggataattctggcctcatagaacaagttgggaagtgttccctcctcccctattttctgaaagtttgcgaagctttggtattatttcttctttgaatgtttgggagaattcaccaatgaagtcttctgggcctaagcattactttggaacactgactatgccaaatggagactacattgaaggttattttagtggagaatggggatctgggataaaaatcactggaacctacttcaaacctagtctatatgagagtgataaagacagacctaaagttttcaggaagctaggaaacctggcagtgccagctgatgagaagtggaaagcggtgtttgacgaatgttggcgccaactgggctgtgagggcccaggccaaggggaagtttggaaagcatgggacaatattgctgtggccttgaccaccagtcggcgccagcacagagacagtccagaaatactgagtcgttcacagactcagacactagagagtttggaattcattccacagcatgttggtgccttctctgtggagaaatatgatgacatcaggaaatatttaataaaggcctgtgacactcctctgcaccccctgggcaggcttgtggagacactggttgcagtgtatagaatgacatacgtgggcgtaggagccaaccgcaggttattgcaggaggctgtaaaggagattaagtcctatcttaagcgaattttccagctggtgaggttcttatttcctgagctgcctgaagaaggcagcacaattcctctctctgctcctctgccaaccgaaaggaagtctttttgcactgggaagtcagattcccgatctgaatcaccagagccaggttatgtagtaacgagttctggattattgcttcctgtgctgctacctcggctctacccaccgctgtttatgctttatgctttggataatgatcgcgaggaagacatttactgggaatgtgtccttcgactaaataagcagccagatattgctctcctgggctttcttggggtgcagaggaaattttggccagcaaccttgtcaatccttggagagagtaaaaaggttttgccaaccacgaaagatgcttgttttgcctcagcagtagaatgtctgcagcagatcagcacaacatttaccccatcagacaaacttaaggtcatccagcagacttttgaggagatctctcagagtgtcctggcgtcactccacgaagacttcttgtggtccatggatgacttgtttcctgttttcttatatgtggtgctacgggccaggattaggaatttaggctctgaggtacacctcattgaggatctaatggacccctatcttcagcatggggaacagggtataatgttcaccaccttgaaggcatgttactaccagattcagcgtgagaagcttaactaggctgcataacagcttgaaaactggattatctactacagagtgttataacaccatctggagtcttcctgtagtggcaaaaaagaacagtgttgaaattggaaaggactttgtgttatttaggttgttagaatgagccttaccaataataagagccctgagcccag

SEQ ID NO: 206518 - DNA, 4974 bp, Artificial Sequence
  derived and/or modified sequence
atggacagtaaaaaaagaagctccaccgaggcagaggggagcaaagagcggggtttggtgcatatctggcaggccggatccttccccatcacacctgaaagactgcctggctggggcggtaaaactgtgctgcaggcggcactgggcgttaagcatggcgtcctgctcactgaggatggggaggtgtatagttttgggacacttccatggcgctcaggtcctgttgagatctgtccctcctcccctattctcgagaacgccctggtgggtcagtatgtcataactgttgcgaccggcagcttccacagtggtgccgtcacagataatggagtggcctatatgtggggagagaacagcgctggccagtgcgctgtggcaaaccaacagtatgtgcctgagcctaaccctgtgtccattgctgatagcgaggcttctcctcttttagcagttcgaattctgcaacttgcttgtggggaggaacatacattagcgctcagtataagcagagagatttgggcttggggaactggatgtcaactggggctgatcaccactgcatttccagtgacaaagccacagaaagtggagcatctggctggcagggtggttcttcaggtcgcctgcggtgcattccactctctcgcgctagtccagtgtctaccctctcaggatcttaagccggtccctgagcgatgcaaccagtgcagccaactccttatcaccatgaccgataaagaggaccacgtgattattagcgattcccactgctgcccactcggcgtcaccctcactgagagccaggcagagaatcatgctagtacggccctgtccccttctactgagactttagatcgacaagaagaagtgttcgaaaacaccctggtcgccaatgatcagagtgttgccacagaattgaatgccgtgagcgctcagatcactagttcagacgccatgtctagccagcaaaatgtgatgggtacaactgagatctcgagcgccagaaacattccatcatatcccgatactcaggctgttaacgagtatttgcgaaagttaagtgaccactccgtaagagaggattcagaacacggagaaaaacccgttccgagccagcccctgctcgaagaagcaatcccaaaccttcactctccccctacaacctccactagcgccttgaacagcctagtcgtgagctgcgcctcagccgtcggggtcagggtggccgctacatatgaagctggtgccttgtccctcaaaaaggtaatgaatttctacagcaccacaccttgcgaaaccggggcacaggcaggtagctccgcaataggaccagagggcttaaaggactcaagagaagaacaagttaaacaagagtccatgcagggcaaaaagagttcgagcctggttgacatcagggaggaagaaaccgaggggggttccaggcgcctttcgctacccggattgcttagtcaggtgtcccctcggctcctgcgcaaggcagcccgagttaaaacgcgaaccgtcgtcttaacccccacttattcaggagaggctgacgctctactcccatctctcagaaccgaagtgtggacttggggaaaagggaaggagggacagcttgggcatggcgacgtgctgccacgccttcagccattatgcgtcaaatgcctagacggtaaggaggtcattcatctagaggcaggcggataccatagcctggcgctcacagccaagtcccaggtgtactcatggggctccaacaccttcggacagctgggacatagtgactttccaactacagtgccccgtctggccaaaatcagcagcgagaatggtgtgtggtctatagctgctggacgagattatagtttgttcctcgtggataccgaagacttccagcccggactctactacagcgggagacaggaccccacggagggtgacaatctgccagagaaccactccggatctaagacccccgtactgttgagttgctcaaaacttggttatatcagcagagtgactgcgggaaaggattcttatctcgccttagttgacaagaatatcatgggatacatcgcatcccttcacgagctagccaccaccgagaggaggttttactctaaattgtcagatattaagtcccagatcctgcgcccactcctgagtctggagaatctgggcactacaaccaccgttcagttacttcaggaagttgctagtcgtttctcaaagctgtgctatctgatcggccagcatggcgctagtttgtcaagttttctgcatggggtgaaggaggcacgcagcctcgttatactgaaacattcaagcctgtttcttgatagttatactgagtactgtacctccatcacgaacttccttgtgatgggtggttttcagctgctggcgaagcccgctatagatttcctgaacaagaatcaagagctgctacaggacttgagtgaggtaaatgatgagaatacccaacttatggaaatactgaacaccctttttttcttgccaattaggcgactccacaactacgccaaggtattattgaagctggcaacctgtttcgaagtggcgtccccggagtaccagaagctgcaagacagctccagctgctacgaatgccttgccctgcatctgggcagaaagcggaaggaagcggaatacacactgggattctggaagacatttccaggtaaaatgactgatagcttgagaaagcccgagaggagacttctgtgtgagtcatcaaatcgagcgctatccctccaacacgccggacggttctccgttaattggttcatactgtttaatgatgccttggtacacgcacaattttccactcatcacgtctttcccttggcgacgctctgggctgagccactaagcgaggaagccggaggggttaatggtctgaaaattacaaccccagaagagcagtttaccctgattagttcaactccacaggagaaaacaaaatggttacgggctatctctcaggccgtggatcaagccttgaggggcatgtcagatcttccaccctatggttctggtagtagcgttcagcgccaagagccccctatttcccgctccgctaaatataccttctacaaagacccgaggttgaaggatgctacttacgatggaaggtggctaagtggtaaacctcatgggcgtggggttctcaaatggcctgacggaaaaatgtactcgggcatgtttcgcaacggactggaggacgggtacggtgagtaccgaatcccaaacaaagccatgaacaaggaagaccactatgtaggacactggaaggagggtaagatgtgtggacagggtgtctattcctatgcaagtggcgaggtgtttgaaggctgcttccaggacaatatgagacacggacacggactgctgcgatctggaaaactgacatcgagcagccctagtatgttcattgggcagtgggtcatggacaaaaaggccggttacggagtttttgacgatatcacgaggggtgagaagtacatggggatgtggcaggatgacgtgtgccaagggaacggggtggtggtaacacaatttgggctgtactatgagggcaatttccacctgaataagatgatgggtaacggcgtgctactcagtgaggacgacacaatatacgagggtgaattctccgatgactggaccctcagcggtaagggcaccctgaccatgccgaacggggattacatcgaaggttacttcagtggcgaatgggggtccgggatcaagattaccggaacttattttaagccctccttgtatgaaagtgacaaggatcgtccaaaagtcttccggaaactcgggaatctcgctgtccccgctgacgagaagtggaaggccgtgtttgatgagtgctggaggcaattggggtgcgagggccctggccagggcgaagtctggaaagcctgggataacatagccgtagcgctgacaacctcccgacgtcagcaccgagattcaccagaaatcctgtcgagaagtcaaacccagactctggagagcttggaattcattccccaacatgtcggcgctttcagtgtggagaagtacgacgacatcagaaagtatctgattaaggcatgtgacacacctctccatcctctgggtcggcttgtagaaacactcgttgcagtgtaccgaatgacgtatgtaggtgtaggcgctaacaggcgcctgctgcaggaagcagtgaaagagatcaagtcctacctgaagcgaatatttcagctcgtgcgatttttatttccggagctgcccgaggagggctccactatcccgctcagcgcaccgcttcctaccgagcggaaaagcttttgtactggcaagtctgattcaaggtccgagtcaccagagcctgggtatgtggttacctcttcaggactgttgctgccagtgctgcttcccaggctgtatccgccactgttcatgctgtacgccttggataatgaccgcgaagaagatatttattgggagtgtgtgctgagacttaataagcaacctgacatcgccctgcttggattcctgggcgttcagaggaaattctggcccgcaactctgtccatattgggcgagagcaagaaagtgctcccgacaaccaaagacgcatgtttcgcttctgctgtggaatgcctacaacagatcagcactacattcactccatccgataagctgaaggtgattcagcagacttttgaagagatcagtcaaagcgtcctcgctagtctgcatgaggacttcttatggagtatggacgacctgttccctgttttcctttatgttgtgttaagagccaggatccgcaacctgggttctgaggtgcacctgatcgaggacttgatggacccatatctgcagcatggcgagcaggggattatgtttaccaccctcaaagcctgttattatcagatccaaagggaaaagttgaattat

SEQ ID NO: 206519 - DNA, 1758 bp, Artificial Sequence
  derived and/or modified sequence
tagctagccctggtggacaaaaatatcatgggatatatcgcaagcctgcacgaacttgccaccaccgagaggagattctactcaaagttgagcgacataaagagtcagattctgcgcccactgctgtcattggagaatcttgggacaacaactaccgtacagcttctgcaggaggtggcgtcaagattttcaaagctgtgctaccttatcgggcagcacggcgcttcactttcaagttttctgcacggcgttaaggaggctaggtctttggtaatactaaaacacagcagcttgttccttgacagctataccgaatattgtacatcaatcaccaactttctcgtcatgggcggatttcaactgctcgctaagccagccatcgactttctaaataaaaaccaggaacttctacaggacctgagtgaggtgaatgatgaaaatacacagctcatggaaatattgaacaccctgttcttcttgccaatccggagactgcacaactacgctaaagtgttgttgaagctggccacgtgctttgaagttgcttctcccgagtaccagaaattgcaagactcttcatcctgttatgagtgtcttgctttacacctggggcgaaagcgcaaagaggccgagtacacattgggcttttggaaaacgttcccaggaaaaatgaccgactccttgagaaagcctgagagaaggctactgtgcgaatcctccaaccgtgccctgtccctgcagcacgcaggcaggttcagtgtgaactggttcatcctcttcaacgatgccttagtacatgcccagttctctacccaccacgtatttcccttagctaccctgtgggcagaaccactctctgaggaggccggtggtgtcaatgggctgaagattactacacctgaggagcagtttacactcatatccagtactccacaggagaagaccaaatggctgcgggcaatcagccaggcagtcgatcaggcactgcgtggaatgagcgacctgccgccttatggatccggctccagcgtgcagcgccaggagcccccaatctccaggagcgctaagtataccttttataaagacccacggctgaaggacgccacatatgatggcaggtggttgagcggcaaaccacatgggagaggcgttttgaaatggccagacggcaaaatgtatagtggcatgtttcgcaatgggctggaagacggatatggcgagtatagaattcctaacaaagctatgaataaagaagaccattacgtggggcactggaaggagggcaagatgtgcggccagggagtctacagctacgcttctggcgaggtatttgaggggtgcttccaggacaatatgaggcatggccatgggctgctgcgctctggaaagctaaccagcagttctccttctatgttcatcggacaatgggtgatggataaaaaggccggatacggtgtattcgatgacatcactcgcggagaaaagtatatggggatgtggcaggacgacgtgtgccagggaaatggagtggtggtaactcagtttggcctgtactatgaaggcaactttcacctcaataagatgatgggaaatggggtgttgctgtccgaggacgatacaatctatgaaggagagttttcggacgattggacgctctctgggaaagacaactctggtctaatcgaacaagtggggaaatgctcactacttccatactttctaaaggtctgcgaggcactggtcctttttttgctgtag

SEQ ID NO: 206520 - DNA, 1731 bp, Artificial Sequence
  derived and/or modified sequence
atgggctatatagcttccctgcatgaactggcgaccaccgaaaggagattttacagcaagctgtctgatattaagtcccagattttgcggccactgttaagtcttgagaatttgggcactacaaccaccgtccaacttctgcaggaggttgccagtcgctttagcaaattgtgttatctgatcggacagcatggcgcatcactcagcagtttcctgcatggagttaaagaggcgcgtagccttgtcattcttaaacacagctcactattcctcgactcctatactgagtattgcacgtctatcactaatttcctcgtcatgggcggatttcagcttttagcgaaacctgctatagactttctaaataagaaccaagagctgctacaggatctgtctgaggtgaatgatgagaacacgcagcttatggagatcctgaacacactgttctttttacctatcaggcgacttcataactacgccaaggtgcttctaaaattagcaacctgttttgaggttgccagtcctgagtatcagaagctccaggactcatctagctgttacgaatgcctcgcactgcatctagggcgtaaacgaaaggaagccgaatatacacttggattctggaaaactttccctggaaaaatgaccgactcccttcgcaaacctgaaagaaggctgctctgcgagagctctaaccgggctctttccttgcaacacgcaggcaggttctccgttaactggtttattttattcaatgatgctctggtacacgcccagtttagtacacaccatgtatttcctttggctacactttgggccgaacctctctcagaggaagccggtggggttaatggtctgaagatcaccactcccgaggagcagtttacactgatcagttcaacaccgcaggagaagaccaagtggctgcgggctataagccaagctgtagaccaggcgctgagggggatgtctgacctgcccccatatggaagtggctcgtccgtacagagacaggagcccccaattagccgaagcgcaaaatacacattctacaaggacccgcgtcttaaggacgctacctatgatggacgttggttaagcggcaagccccacggcaggggcgtcctgaaatggcctgatgggaaaatgtacagtggtatgtttcgtaacggcctggaggatggttatggggagtataggatccccaacaaggcgatgaataaagaagatcactatgtagggcattggaaggaagggaaaatgtgcggtcagggtgtctatagttacgcttcgggtgaagtattcgaaggatgtttccaggataatatgaggcacggtcacgggctgctccggtctggtaagctgacctcatcttccccaagtatgttcattggacagtgggttatggataaaaaagcaggctacggcgtgtttgatgacatcacccgcggtgagaagtatatggggatgtggcaagatgacgtgtgccaggggaatggcgtggtggtcacccaatttggtttgtattacgaaggaaatttccatctgaataagatgatgggcaacggggtgttgctctctgaagatgataccatttatgaaggcgagtttagcgatgactggaccctgagtggcaaggacaactccggtctaattgaacaggttggtaagtgttccctcctgccctacttccttaaggtatgtgaagccctcgttctgtttttactttag

SEQ ID NO: 206521 - DNA, 4974 bp, Artificial Sequence
  derived and/or modified sequence
atggacagcaagaagagaagcagcaccgaggccgagggcagcaaggagagaggcctggtgcacatctggcaggccggcagcttccccatcacccccgagagactgcccggctggggcggcaagaccgtgctgcaggccgccctgggcgtgaagcacggcgtgctgctgaccgaggacggcgaggtgtacagcttcggcaccctgccctggagaagcggccccgtggagatctgccccagcagccccatcctggagaacgccctggtgggccagtacgtgatcaccgtggccaccggcagcttccacagcggcgccgtgaccgacaacggcgtggcctacatgtggggcgagaacagcgccggccagtgcgccgtggccaaccagcagtacgtgcccgagcccaaccccgtgagcatcgccgacagcgaggccagccccctgctggccgtgagaatcctgcagctggcctgcggcgaggagcacaccctggccctgagcatcagcagagagatctgggcctggggcaccggctgccagctgggcctgatcaccaccgccttccccgtgaccaagccccagaaggtggagcacctggccggcagagtggtgctgcaggtggcctgcggcgccttccacagcctggccctggtgcagtgcctgcccagccaggacctgaagcccgtgcccgagagatgcaaccagtgcagccagctgctgatcaccatgaccgacaaggaggaccacgtgatcatcagcgacagccactgctgccccctgggcgtgaccctgaccgagagccaggccgagaaccacgccagcaccgccctgagccccagcaccgagaccctggacagacaggaggaggtgttcgagaacaccctggtggccaacgaccagagcgtggccaccgagctgaacgccgtgagcgcccagatcaccagcagcgacgccatgagcagccagcagaacgtgatgggcaccaccgagatcagcagcgccagaaacatccccagctaccccgacacccaggccgtgaacgagtacctgagaaagctgagcgaccacagcgtgagagaggacagcgagcacggcgagaagcccgtgcccagccagcccctgctggaggaggccatccccaacctgcacagcccccccaccaccagcaccagcgccctgaacagcctggtggtgagctgcgccagcgccgtgggcgtgagagtggccgccacctacgaggccggcgccctgagcctgaagaaggtgatgaacttctacagcaccaccccctgcgagaccggcgcccaggccggcagcagcgccatcggccccgagggcctgaaggacagcagagaggagcaggtgaagcaggagagcatgcagggcaagaagagcagcagcctggtggacatcagagaggaggagaccgagggcggcagcagaagactgagcctgcccggcctgctgagccaggtgagccccagactgctgagaaaggccgccagagtgaagaccagaaccgtggtgctgacccccacctacagcggcgaggccgacgccctgctgcccagcctgagaaccgaggtgtggacctggggcaagggcaaggagggccagctgggccacggcgacgtgctgcccagactgcagcccctgtgcgtgaagtgcctggacggcaaggaggtgatccacctggaggccggcggctaccacagcctggccctgaccgccaagagccaggtgtacagctggggcagcaacaccttcggccagctgggccacagcgacttccccaccaccgtgcccagactggccaagatcagcagcgagaacggcgtgtggagcatcgccgccggcagagactacagcctgttcctggtggacaccgaggacttccagcccggcctgtactacagcggcagacaggaccccaccgagggcgacaacctgcccgagaaccacagcggcagcaagacccccgtgctgctgagctgcagcaagctgggctacatcagcagagtgaccgccggcaaggacagctacctggccctggtggacaagaacatcatgggctacatcgccagcctgcacgagctggccaccaccgagagaagattctacagcaagctgagcgacatcaagagccagatcctgagacccctgctgagcctggagaacctgggcaccaccaccaccgtgcagctgctgcaggaggtggccagcagattcagcaagctgtgctacctgatcggccagcacggcgccagcctgagcagcttcctgcacggcgtgaaggaggccagaagcctggtgatcctgaagcacagcagcctgttcctggacagctacaccgagtactgcaccagcatcaccaacttcctggtgatgggcggcttccagctgctggccaagcccgccatcgacttcctgaacaagaaccaggagctgctgcaggacctgagcgaggtgaacgacgagaacacccagctgatggagatcctgaacaccctgttcttcctgcccatcagaagactgcacaactacgccaaggtgctgctgaagctggccacctgcttcgaggtggccagccccgagtaccagaagctgcaggacagcagcagctgctacgagtgcctggccctgcacctgggcagaaagagaaaggaggccgagtacaccctgggcttctggaagaccttccccggcaagatgaccgacagcctgagaaagcccgagagaagactgctgtgcgagagcagcaacagagccctgagcctgcagcacgccggcagattcagcgtgaactggttcatcctgttcaacgacgccctggtgcacgcccagttcagcacccaccacgtgttccccctggccaccctgtgggccgagcccctgagcgaggaggccggcggcgtgaacggcctgaagatcaccacccccgaggagcagttcaccctgatcagcagcaccccccaggagaagaccaagtggctgagagccatcagccaggccgtggaccaggccctgagaggcatgagcgacctgcccccctacggcagcggcagcagcgtgcagagacaggagccccccatcagcagaagcgccaagtacaccttctacaaggaccccagactgaaggacgccacctacgacggcagatggctgagcggcaagccccacggcagaggcgtgctgaagtggcccgacggcaagatgtacagcggcatgttcagaaacggcctggaggacggctacggcgagtacagaatccccaacaaggccatgaacaaggaggaccactacgtgggccactggaaggagggcaagatgtgcggccagggcgtgtacagctacgccagcggcgaggtgttcgagggctgcttccaggacaacatgagacacggccacggcctgctgagaagcggcaagctgaccagcagcagccccagcatgttcatcggccagtgggtgatggacaagaaggccggctacggcgtgttcgacgacatcaccagaggcgagaagtacatgggcatgtggcaggacgacgtgtgccagggcaacggcgtggtggtgacccagttcggcctgtactacgagggcaacttccacctgaacaagatgatgggcaacggcgtgctgctgagcgaggacgacaccatctacgagggcgagttcagcgacgactggaccctgagcggcaagggcaccctgaccatgcccaacggcgactacatcgagggctacttcagcggcgagtggggcagcggcatcaagatcaccggcacctacttcaagcccagcctgtacgagagcgacaaggacagacccaaggtgttcagaaagctgggcaacctggccgtgcccgccgacgagaagtggaaggccgtgttcgacgagtgctggagacagctgggctgcgagggccccggccagggcgaggtgtggaaggcctgggacaacatcgccgtggccctgaccaccagcagaagacagcacagagacagccccgagatcctgagcagaagccagacccagaccctggagagcctggagttcatcccccagcacgtgggcgccttcagcgtggagaagtacgacgacatcagaaagtacctgatcaaggcctgcgacacccccctgcaccccctgggcagactggtggagaccctggtggccgtgtacagaatgacctacgtgggcgtgggcgccaacagaagactgctgcaggaggccgtgaaggagatcaagagctacctgaagagaatcttccagctggtgagattcctgttccccgagctgcccgaggagggcagcaccatccccctgagcgcccccctgcccaccgagagaaagagcttctgcaccggcaagagcgacagcagaagcgagagccccgagcccggctacgtggtgaccagcagcggcctgctgctgcccgtgctgctgcccagactgtacccccccctgttcatgctgtacgccctggacaacgacagagaggaggacatctactgggagtgcgtgctgagactgaacaagcagcccgacatcgccctgctgggcttcctgggcgtgcagagaaagttctggcccgccaccctgagcatcctgggcgagagcaagaaggtgctgcccaccaccaaggacgcctgcttcgccagcgccgtggagtgcctgcagcagatcagcaccaccttcacccccagcgacaagctgaaggtgatccagcagaccttcgaggagatcagccagagcgtgctggccagcctgcacgaggacttcctgtggagcatggacgacctgttccccgtgttcctgtacgtggtgctgagagccagaatcagaaacctgggcagcgaggtgcacctgatcgaggacctgatggacccctacctgcagcacggcgagcagggcatcatgttcaccaccctgaaggcctgctactaccagatccagagagagaagctgaactag

SEQ ID NO: 206522 - DNA, 1758 bp, Artificial Sequence
  derived and/or modified sequence
tgactggccctggtggacaagaacatcatgggctacatcgccagcctgcacgagctggccaccaccgagagaagattctacagcaagctgagcgacatcaagagccagatcctgagacccctgctgagcctggagaacctgggcaccaccaccaccgtgcagctgctgcaggaggtggccagcagattcagcaagctgtgctacctgatcggccagcacggcgccagcctgagcagcttcctgcacggcgtgaaggaggccagaagcctggtgatcctgaagcacagcagcctgttcctggacagctacaccgagtactgcaccagcatcaccaacttcctggtgatgggcggcttccagctgctggccaagcccgccatcgacttcctgaacaagaaccaggagctgctgcaggacctgagcgaggtgaacgacgagaacacccagctgatggagatcctgaacaccctgttcttcctgcccatcagaagactgcacaactacgccaaggtgctgctgaagctggccacctgcttcgaggtggccagccccgagtaccagaagctgcaggacagcagcagctgctacgagtgcctggccctgcacctgggcagaaagagaaaggaggccgagtacaccctgggcttctggaagaccttccccggcaagatgaccgacagcctgagaaagcccgagagaagactgctgtgcgagagcagcaacagagccctgagcctgcagcacgccggcagattcagcgtgaactggttcatcctgttcaacgacgccctggtgcacgcccagttcagcacccaccacgtgttccccctggccaccctgtgggccgagcccctgagcgaggaggccggcggcgtgaacggcctgaagatcaccacccccgaggagcagttcaccctgatcagcagcaccccccaggagaagaccaagtggctgagagccatcagccaggccgtggaccaggccctgagaggcatgagcgacctgcccccctacggcagcggcagcagcgtgcagagacaggagccccccatcagcagaagcgccaagtacaccttctacaaggaccccagactgaaggacgccacctacgacggcagatggctgagcggcaagccccacggcagaggcgtgctgaagtggcccgacggcaagatgtacagcggcatgttcagaaacggcctggaggacggctacggcgagtacagaatccccaacaaggccatgaacaaggaggaccactacgtgggccactggaaggagggcaagatgtgcggccagggcgtgtacagctacgccagcggcgaggtgttcgagggctgcttccaggacaacatgagacacggccacggcctgctgagaagcggcaagctgaccagcagcagccccagcatgttcatcggccagtgggtgatggacaagaaggccggctacggcgtgttcgacgacatcaccagaggcgagaagtacatgggcatgtggcaggacgacgtgtgccagggcaacggcgtggtggtgacccagttcggcctgtactacgagggcaacttccacctgaacaagatgatgggcaacggcgtgctgctgagcgaggacgacaccatctacgagggcgagttcagcgacgactggaccctgagcggcaaggacaacagcggcctgatcgagcaggtgggcaagtgcagcctgctgccctacttcctgaaggtgtgcgaggccctggtgctgttcctgctgtag

SEQ ID NO: 206523 - DNA, 1731 bp, Artificial Sequence
  derived and/or modified sequence
atgggctacatcgccagcctgcacgagctggccaccaccgagagaagattctacagcaagctgagcgacatcaagagccagatcctgagacccctgctgagcctggagaacctgggcaccaccaccaccgtgcagctgctgcaggaggtggccagcagattcagcaagctgtgctacctgatcggccagcacggcgccagcctgagcagcttcctgcacggcgtgaaggaggccagaagcctggtgatcctgaagcacagcagcctgttcctggacagctacaccgagtactgcaccagcatcaccaacttcctggtgatgggcggcttccagctgctggccaagcccgccatcgacttcctgaacaagaaccaggagctgctgcaggacctgagcgaggtgaacgacgagaacacccagctgatggagatcctgaacaccctgttcttcctgcccatcagaagactgcacaactacgccaaggtgctgctgaagctggccacctgcttcgaggtggccagccccgagtaccagaagctgcaggacagcagcagctgctacgagtgcctggccctgcacctgggcagaaagagaaaggaggccgagtacaccctgggcttctggaagaccttccccggcaagatgaccgacagcctgagaaagcccgagagaagactgctgtgcgagagcagcaacagagccctgagcctgcagcacgccggcagattcagcgtgaactggttcatcctgttcaacgacgccctggtgcacgcccagttcagcacccaccacgtgttccccctggccaccctgtgggccgagcccctgagcgaggaggccggcggcgtgaacggcctgaagatcaccacccccgaggagcagttcaccctgatcagcagcaccccccaggagaagaccaagtggctgagagccatcagccaggccgtggaccaggccctgagaggcatgagcgacctgcccccctacggcagcggcagcagcgtgcagagacaggagccccccatcagcagaagcgccaagtacaccttctacaaggaccccagactgaaggacgccacctacgacggcagatggctgagcggcaagccccacggcagaggcgtgctgaagtggcccgacggcaagatgtacagcggcatgttcagaaacggcctggaggacggctacggcgagtacagaatccccaacaaggccatgaacaaggaggaccactacgtgggccactggaaggagggcaagatgtgcggccagggcgtgtacagctacgccagcggcgaggtgttcgagggctgcttccaggacaacatgagacacggccacggcctgctgagaagcggcaagctgaccagcagcagccccagcatgttcatcggccagtgggtgatggacaagaaggccggctacggcgtgttcgacgacatcaccagaggcgagaagtacatgggcatgtggcaggacgacgtgtgccagggcaacggcgtggtggtgacccagttcggcctgtactacgagggcaacttccacctgaacaagatgatgggcaacggcgtgctgctgagcgaggacgacaccatctacgagggcgagttcagcgacgactggaccctgagcggcaaggacaacagcggcctgatcgagcaggtgggcaagtgcagcctgctgccctacttcctgaaggtgtgcgaggccctggtgctgttcctgctgtag

SEQ ID NO: 206524 - protein, 2301 aa, Artificial Sequence
  derived and/or modified sequence
KGESKRITLVLQQPQSGGPQGHRHVVLGSLPGKIVLQGNQLAALTQAKNAQGQPAKVVTIQLQVQQPQQKIQIVPQPPSSQPQPQQPPSTQPVTLSSVQQAQIMGPGQSPGQRLSVPVKVVLQPQAGSSQGASSGLSVVKVLSASEVAALSSPASSAPHSGGKTGMEENRRLEHQKKQEKANRIVAEAIARARARGEQNIPRVLNEDELPSVRPEEEGEKKRRKKSAGERLKEEKPKKSKTSGASKTKGKSKLNTITPVVGKKRKRNTSSDNSDVEVMPAQSPREDEESSIQKRRSNRQVKRKKYTEDLDIKITDDEEEEEVDVTGPIKPEPILPEPVQEPDGETLPSMQFFVENPSEEDAAIVDKVLSMRIVKKELPSGQYTEAEEFFVKYKNYSYLHCEWATISQLEKDKRIHQKLKRFKTKMAQMRHFFHEDEEPFNPDYVEVDRILDESHSIDKDNGEPVIYYLVKWCSLPYEDSTWELKEDVDEGKIREFKRIQSRHPELKRVNRPQASAWKKLELSHEYKNRNQLREYQLEGVNWLLFNWYNRQNCILADEMGLGKTIQSIAFLQEVYNVGIHGPFLVIAPLSTITNWEREFNTWTEMNTIVYHGSLASRQMIQQYEMYCKDSRGRLIPGAYKFDALITTFEMILSDCPELREIEWRCVIIDEAHRLKNRNCKLLDSLKHMDLEHKVLLTGTPLQNTVEELFSLLHFLEPSQFPSESEFLKDFGDLKTEEQVQKLQAILKPMMLRRLKEDVEKNLAPKQETIIEVELTNIQKKYYRAILEKNFSFLSKGAGHTNMPNLLNTMMELRKCCNHPYLINGAEEKILTEFREACHIIPHDFHLQAMVRSAGKLVLIDKLLPKLKAGGHKVLIFSQMVRCLDILEDYLIQRRYLYERIDGRVRGNLRQAAIDRFSKPDSDRFVFLLCTRAGGLGINLTAADTCIIFDSDWNPQNDLQAQARCHRIGQSKAVKVYRLITRNSYEREMFDKASLKLGLDKAVLQSMSGRDGNITGIQQFSKKEIEDLLRKGAYAAIMEEDDEGSKFCEEDIDQILLRRTTTITIESEGKGSTFAKASFVASENRTDISLDDPNFWQKWAKKADLDMDLLNSKNNLVIDTPRVRKQTRHFSTLKDDDLVEFSDLESEDDERPRSRRHDRHHAYGRTDCFRVEKHLLVYGWGRWRDILSHGRFKRRMTERDVETICRAILVYCLLHYRGDENIKGFIWDLISPAENGKTKELQNHSGLSIPVPRGRKGKKVKSQSTFDIHKADWIRKYNPDTLFQDESYKKHLKHQCNKVLLRVRMLYYLRQEVIGDQAEKVLGGAIASEIDIWFPVVDQLEVPTTWWDSEADKSLLIGVFKHGYEKYNTMRADPALCFLEKAGRPDDKAIAAEHRVLDNFSDIVEGVDFDKDCEDPEYKPLQGPPKDQDDEGDPLMMMDEEISVIDGDEAQVTQQPGHLFWPPGSALTARLRRLVTAYQRSYKREQMKIEAAERGDRRRRRCEAAFKLKEIARREKQQRWTRREQTDFYRVVSTFGVEYDPDTMQFHWDRFRTFARLDKKTDESLTKYFHGFVAMCRQVCRLPPAAGDEPPDPNLFIEPITEERASRTLYRIELLRRLREQVLCHPLLEDRLALCQPPGPELPKWWEPVRHDGELLRGAARHGVSQTDCNIMQDPDFSFLAARMNYMQNHQAGAPAPSLSRCSTPLLHQQYTSRTASPLPLRPDAPVEKSPEETATQVPSLESLTLKLEHEVVARSRPTPQDYEMRVSPSDTTPLVSRSVPPVKLEDEDDSDSELDLSKLSPSSSSSSSSSSSSSSTDESEDEKEEKLTDQSRSKLYDEESLLSLTMSQDGFPNEDGEQMTPELLLLQERQRASEWPKDRVLINRIDLVCQAVLSGKWPSSRRSQEMVTGGILGPGNHLLDSPSLTPGEYGDSPVPTPRSSSAASMAEEEASAVSTAAAQFTKLRRGMDEKEFTVQIKDEEGLKLTFQKHKLMANGVMGDGHPLFHKKKGNRKKLVELEVECMEEPNHLDVDLETRIPVINKVDGTLLVGEDAPRRAELEMWLQGHPEFAVDPRFLAYMEDRRKQKWQRCKKNNKAELNCLGMEPVQTANSRNGKKGHHTETVFNRVLPGPIAPESSKKRARRMRPDLSKMMALMQGGSTGSLSLHNTFQHSSSGLQSVSSLGHSSATSASLPFMPFVMGGAPSSPHVDSSTMLHHHHHHPHPHHHHHHHPGLRAPGYPSSPVTTASGTTLRLPPLQPEEDDDEDEEDDDDLSQGYDSSERDFSLIDDPMMPANSDSSEDADD

SEQ ID NO: 206525 - protein, 2302 aa, Artificial Sequence
  derived and/or modified sequence
MKGESKRITLVLQQPQSGGPQGHRHVVLGSLPGKIVLQGNQLAALTQAKNAQGQPAKVVTIQLQVQQPQQKIQIVPQPPSSQPQPQQPPSTQPVTLSSVQQAQIMGPGQSPGQRLSVPVKVVLQPQAGSSQGASSGLSVVKVLSASEVAALSSPASSAPHSGGKTGMEENRRLEHQKKQEKANRIVAEAIARARARGEQNIPRVLNEDELPSVRPEEEGEKKRRKKSAGERLKEEKPKKSKTSGASKTKGKSKLNTITPVVGKKRKRNTSSDNSDVEVMPAQSPREDEESSIQKRRSNRQVKRKKYTEDLDIKITDDEEEEEVDVTGPIKPEPILPEPVQEPDGETLPSMQFFVENPSEEDAAIVDKVLSMRIVKKELPSGQYTEAEEFFVKYKNYSYLHCEWATISQLEKDKRIHQKLKRFKTKMAQMRHFFHEDEEPFNPDYVEVDRILDESHSIDKDNGEPVIYYLVKWCSLPYEDSTWELKEDVDEGKIREFKRIQSRHPELKRVNRPQASAWKKLELSHEYKNRNQLREYQLEGVNWLLFNWYNRQNCILADEMGLGKTIQSIAFLQEVYNVGIHGPFLVIAPLSTITNWEREFNTWTEMNTIVYHGSLASRQMIQQYEMYCKDSRGRLIPGAYKFDALITTFEMILSDCPELREIEWRCVIIDEAHRLKNRNCKLLDSLKHMDLEHKVLLTGTPLQNTVEELFSLLHFLEPSQFPSESEFLKDFGDLKTEEQVQKLQAILKPMMLRRLKEDVEKNLAPKQETIIEVELTNIQKKYYRAILEKNFSFLSKGAGHTNMPNLLNTMMELRKCCNHPYLINGAEEKILTEFREACHIIPHDFHLQAMVRSAGKLVLIDKLLPKLKAGGHKVLIFSQMVRCLDILEDYLIQRRYLYERIDGRVRGNLRQAAIDRFSKPDSDRFVFLLCTRAGGLGINLTAADTCIIFDSDWNPQNDLQAQARCHRIGQSKAVKVYRLITRNSYEREMFDKASLKLGLDKAVLQSMSGRDGNITGIQQFSKKEIEDLLRKGAYAAIMEEDDEGSKFCEEDIDQILLRRTTTITIESEGKGSTFAKASFVASENRTDISLDDPNFWQKWAKKADLDMDLLNSKNNLVIDTPRVRKQTRHFSTLKDDDLVEFSDLESEDDERPRSRRHDRHHAYGRTDCFRVEKHLLVYGWGRWRDILSHGRFKRRMTERDVETICRAILVYCLLHYRGDENIKGFIWDLISPAENGKTKELQNHSGLSIPVPRGRKGKKVKSQSTFDIHKADWIRKYNPDTLFQDESYKKHLKHQCNKVLLRVRMLYYLRQEVIGDQAEKVLGGAIASEIDIWFPVVDQLEVPTTWWDSEADKSLLIGVFKHGYEKYNTMRADPALCFLEKAGRPDDKAIAAEHRVLDNFSDIVEGVDFDKDCEDPEYKPLQGPPKDQDDEGDPLMMMDEEISVIDGDEAQVTQQPGHLFWPPGSALTARLRRLVTAYQRSYKREQMKIEAAERGDRRRRRCEAAFKLKEIARREKQQRWTRREQTDFYRVVSTFGVEYDPDTMQFHWDRFRTFARLDKKTDESLTKYFHGFVAMCRQVCRLPPAAGDEPPDPNLFIEPITEERASRTLYRIELLRRLREQVLCHPLLEDRLALCQPPGPELPKWWEPVRHDGELLRGAARHGVSQTDCNIMQDPDFSFLAARMNYMQNHQAGAPAPSLSRCSTPLLHQQYTSRTASPLPLRPDAPVEKSPEETATQVPSLESLTLKLEHEVVARSRPTPQDYEMRVSPSDTTPLVSRSVPPVKLEDEDDSDSELDLSKLSPSSSSSSSSSSSSSSTDESEDEKEEKLTDQSRSKLYDEESLLSLTMSQDGFPNEDGEQMTPELLLLQERQRASEWPKDRVLINRIDLVCQAVLSGKWPSSRRSQEMVTGGILGPGNHLLDSPSLTPGEYGDSPVPTPRSSSAASMAEEEASAVSTAAAQFTKLRRGMDEKEFTVQIKDEEGLKLTFQKHKLMANGVMGDGHPLFHKKKGNRKKLVELEVECMEEPNHLDVDLETRIPVINKVDGTLLVGEDAPRRAELEMWLQGHPEFAVDPRFLAYMEDRRKQKWQRCKKNNKAELNCLGMEPVQTANSRNGKKGHHTETVFNRVLPGPIAPESSKKRARRMRPDLSKMMALMQGGSTGSLSLHNTFQHSSSGLQSVSSLGHSSATSASLPFMPFVMGGAPSSPHVDSSTMLHHHHHHPHPHHHHHHHPGLRAPGYPSSPVTTASGTTLRLPPLQPEEDDDEDEEDDDDLSQGYDSSERDFSLIDDPMMPANSDSSEDADD

SEQ ID NO: 206526 - DNA, 6906 bp, Artificial Sequence
  derived and/or modified sequence
aaaggagagtctaaaaggattacattggtgctgcaacagccacaaagtggcggcccacaagggcaccgacacgtagtcctgggctccctgcccggtaagatcgtcctacaaggtaaccagctggcagccctcacacaggcgaaaaatgcccaggggcagccagctaaagttgtaactattcagctccaggttcaacagccacagcagaaaatccagatcgtcccccaacctccaagcagtcagccccagccccagcagccaccatccacccagccagtgaccctatctagtgtccagcaagctcagattatgggcccaggccagtctcccggacaacggcttagcgtgcctgtcaaggtggtactgcagccccaggctggtagctcccagggcgcctctagtggattgagcgtggttaaggtcctgtctgcctccgaggtagcagctctttccagccccgctagctccgccccacatagcggagggaaaacagggatggaagaaaaccgccgtctcgagcatcaaaagaagcaggagaaagccaatcgcattgtcgccgaggctatcgcccgcgccagggccaggggggaacagaatatcccgagagtgctaaatgaggatgagttgcctagcgttcgaccagaggaggaaggagaaaagaagcgcagaaaaaaatccgccggagagcgcctgaaggaagagaagccaaaaaaatctaagaccagcggagcttcaaagaccaagggcaaatctaagcttaacacgattactcccgttgtgggcaaaaaacgaaaacggaacacctcttccgacaactcagatgtcgaggtgatgcctgcccagtcccctagggaggatgaggaaagttctattcagaaacgtcgctctaacagacaagtcaaacgcaaaaaatacaccgaggatctcgatataaagattactgacgatgaagaagaagaagaggtagacgtcacagggcctattaagcctgagccaatcctgccggagcctgtgcaggagcctgacggcgaaaccctgccaagcatgcaattcttcgtggagaatcctagcgaagaggatgctgccattgtggacaaggtattatcaatgcgaatcgtaaaaaaggaactcccatcaggccagtataccgaggccgaggaattcttcgtcaaatataaaaactacagctacctgcactgcgagtgggccaccatctcccaacttgaaaaagataagagaatccaccagaaactcaagcgattcaagaccaagatggctcaaatgagacattttttccatgaggatgaagaacccttcaatccagattatgtagaagtggatcgcattctggatgagtctcacagcatcgacaaggacaatggtgagccagtgatttactatctggtgaagtggtgctcccttccctatgaagattctacatgggagctcaaagaagatgtcgacgaagggaagattagagaattcaaacggatccagagccggcacccagagttgaaacgcgttaaccggcctcaggcaagcgcctggaaaaaattggaactctcccatgagtataagaaccgaaaccaactgagagagtaccagctcgaaggggtgaactggttgctgttcaattggtataacaggcagaactgcatcctcgcggatgagatggggctgggcaaaaccattcagagcatcgcctttctgcaggaggtttataacgtcggaattcacggccccttcctcgtcatagcacccttgtctaccatcacaaactgggagagagaattcaacacttggactgaaatgaataccatcgtgtaccatggctccttggccagcaggcaaatgattcagcagtacgagatgtactgtaaggattctagagggcgcctgattcccggtgcatataaatttgatgcactgattaccacctttgaaatgatcctgagcgactgtccagagttacgggagattgagtggagatgcgtcattatcgacgaggctcaccgactcaaaaacagaaattgtaagttgctggacagcctgaagcacatggacctagagcataaggtactgttgacgggcacaccactccagaacacagtggaggaattattcagcttgcttcactttctggaaccgagccagttcccgtccgagtctgagtttcttaaggactttggagaccttaaaactgaggagcaggtgcagaagctccaggctatcctcaaacccatgatgcttcgaaggctgaaggaggacgttgagaaaaatctggccccaaaacaggagactattattgaagtagagctgacaaatatccagaaaaagtactaccgtgcaattctggaaaagaatttcagctttctcagcaaaggcgcaggccatacaaacatgccaaacctgctgaatacaatgatggaactcaggaagtgctgcaaccatccctacctgatcaacggggccgaggaaaagattctgaccgagtttagagaggcgtgccacatcatcccacatgattttcacctgcaggcaatggtgcggagtgctgggaaactcgtactgattgacaagctgctcccaaagttgaaggcaggggggcacaaagttctcatattttcccaaatggtgagatgtcttgatattctggaggactacctcattcagaggcggtacttatacgaaaggatcgacggaagagttcgtggtaatttgagacaagccgcgatagaccgcttctcgaagcctgattccgacagattcgttttcttgctatgcacaagagctggggggctggggataaacctaaccgccgctgatacatgtattatcttcgactctgactggaacccccagaatgacttgcaggcacaggctcgctgccacaggattgggcagtccaaggctgttaaggtgtataggctgatcactagaaactcatatgaaagagaaatgttcgataaggcctcactgaaactgggactcgacaaggcggtgctccagagtatgagcggtcgtgatggaaacatcacggggatccagcagttttccaaaaaggagatcgaagacctgcttagaaaaggagcttatgccgccatcatggaagaggatgacgaaggcagtaagttctgcgaagaggatattgatcaaattctcctgcggaggacaactacaatcacaatcgaaagcgaaggtaaggggagcacttttgccaaggccagttttgtggcatcagaaaaccgcaccgacatttcactagacgaccctaacttttggcaaaaatgggctaagaaagctgacctggacatggacctcctgaattccaaaaataatctcgtcattgacacaccacgggtgcgtaaacaaacccggcacttctcaaccttaaaagacgacgatctcgtcgagttcagcgacctggagtccgaggacgatgagaggccacgcagcagacgacacgaccggcaccacgcttacggcaggaccgactgctttcgcgtcgagaagcacctgctcgtatatggctgggggaggtggcgcgacatcctgtcacatggccgcttcaaacgaagaatgactgagcgggatgtggagacaatttgcagggctattttagtgtactgcctactgcactaccggggggacgaaaatattaagggatttatttgggacctcatctcgcccgcagagaatggcaaaaccaaagaacttcagaatcattccgggctttctatccccgttccacggggtagaaaaggaaaaaaggtgaaaagccagagtacgtttgatatacataaggccgattggatccggaaatacaatccagacacactgtttcaggatgagtcatacaagaaacacttaaaacaccagtgcaacaaagtcctattaagagtccggatgctatactatctaaggcaagaagtaattggggaccaggcagaaaaagtgctgggtggggccattgcgtccgagatagatatttggttccctgtggttgatcagcttgaggtcccaacaacctggtgggattcagaggcagacaagtctctcttgatcggcgtgtttaaacacggttatgagaagtataatactatgagggctgatcccgccctgtgctttctcgaaaaggcagggcggcctgacgacaaagccatagctgctgaacaccgggtcctggataacttttctgacatagtggaaggcgtcgactttgacaaagactgtgaggatcccgagtacaaaccactccagggaccccctaaggaccaggatgacgagggcgacccgctgatgatgatggatgaagagatatctgtgatcgacggggacgaggctcaggtgacccaacagcctgggcacctattttggccacctgggagcgccctcacagcccgcctcagacggctggtgactgcctatcagcgaagctataagagggagcagatgaagatcgaggcagcagagcgaggcgataggcgccggagaaggtgtgaggccgctttcaagctgaaggaaattgctcgccgggaaaagcagcagcgttggaccagacgtgagcagaccgatttttatcgcgtggtttcaacatttggggtggaatacgaccccgataccatgcagtttcactgggataggttcaggactttcgcacggctggacaagaaaacggacgagtccctcactaaatatttccacggatttgttgctatgtgtcgccaggtatgcaggttgcctccagcagcgggagacgaacctccggatcctaacctgtttatagagcctattaccgaggaaagagcgagtcggaccttatatcgcattgagttactcaggcgtctccgcgaacaggttctatgtcatccattgctggaggatagactggcactgtgtcagccacccggccctgagctcccaaagtggtgggaacccgtgcggcacgatggcgaactgctcaggggcgccgccagacacggagtcagccagactgattgtaatattatgcaggacccggacttttccttccttgctgcacgaatgaactatatgcagaatcatcaagctggggcgccggcgcccagcctgtcaagatgttcaacgccactgcttcaccagcaatatacctcccggaccgcctcgccactgccccttaggcccgacgcccctgtggaaaaatctcctgaagagaccgcaacgcaggtcccatcactcgagtctttgacacttaaacttgagcatgaggtggtggccagatctagacccaccccccaggactacgagatgagggtaagcccctctgacacgacgccactcgtctcccggtcggtgccccctgtgaagttagaggatgaggatgacagcgacagtgagttggacctgtccaagctgagtccttctagctcttcttcatcaagcagctctagctcatcgtctagcactgatgagtcagaagatgagaaggaagaaaagctcaccgaccaaagccgcagcaagctgtacgatgaggagtcgttgctgtccctgactatgtcgcaggacgggttccctaatgaggacggagagcagatgacacctgaactgttgttattgcaagaacggcagcgggcttcggaatggcctaaagaccgggtcttaattaacaggattgatttggtttgtcaagccgtgctgtccggtaaatggcctagttcacgccgctcccaggagatggtgaccggcggcatccttggaccgggcaaccatcttctggactctccgtccctaaccccgggagaatacggcgacagcccggtgccaaccccaagatcatcttccgccgcttccatggctgaggaagaagcctccgccgtgtctacggccgctgcacaattcactaagctaagaagggggatggacgaaaaggagttcacagtgcaaatcaaggacgaagagggtctgaaattgacattccaaaagcacaagctgatggcaaatggggtaatgggagatggacaccctctgtttcacaagaaaaaggggaaccgaaagaaactggttgagttggaagtggaatgcatggaggagcctaaccacctggatgtggacctggagaccagaatcccggtgataaataaggtggatggtacattgttggtgggtgaggacgctcccagacgggccgagcttgagatgtggctacagggccaccccgaatttgcagtggaccccagatttcttgcctatatggaggaccgtcgcaaacagaagtggcagcgctgcaagaaaaataacaaggctgagttgaattgcttgggtatggaaccagtccagactgcgaattcgagaaacggaaagaaaggccaccacacagagaccgttttcaaccgagtgctccctggtccaatagccccagaatccagcaagaaacgtgcccgccgcatgaggccagacctgagcaaaatgatggcgttgatgcaaggcggcagtacaggatctttgtccttacataatacatttcagcattcatcctcagggttgcagagcgtatcctctcttggacatagctctgctacttcggcaagcttaccctttatgccattcgtgatgggtggagccccatcttcaccccacgtcgattcctccacaatgctgcatcatcaccaccaccatccccatccacatcatcaccatcaccatcacccaggcctcagggcccctggatatccctccagccctgtgaccactgcctccggcacgaccttgcggctgccccctctgcagcctgaggaggacgacgatgaagacgaagaagatgatgatgacctgagccagggatatgattcttccgaacgtgacttctcgttgatagatgatccaatgatgccggccaatagcgattccagcgaagacgcagacgactag

SEQ ID NO: 206527 - DNA, 6909 bp, Artificial Sequence
  derived and/or modified sequence
atgaagggggagtctaaacgcatcacacttgtccttcaacaaccgcagagcgggggcccccagggccatcgtcacgtcgtcctcgggagcctccccggtaagattgttctgcagggcaatcagctggctgctcttacccaggctaaaaacgcgcaaggacaacccgctaaagttgtcacaatacagctgcaagtgcaacagccccagcagaagatacagatcgtgccacagccccctagctctcaaccccagccacagcagcctcctagcacccagcccgtcactctgagtagtgtgcagcaggcccaaatcatgggtcccgggcagagccctggacagaggctcagcgttcctgtgaaagtagttctgcagccgcaagcaggctcgtcacaaggtgcctccagcggtttgtcagtcgtgaaagtactgtccgctagcgaagtggctgccctttcgtcccccgcctcgtccgccccccactctggcggcaaaactggaatggaggagaaccgacggctcgagcaccagaaaaagcaggaaaaggccaatcgcatcgttgcagaggcaatcgccagagcccgcgccagaggggaacagaatataccgcgggtgctgaacgaggacgagcttccttccgtgagacctgaagaagagggtgagaaaaaacggagaaagaagtcagccggcgagcggctgaaggaagagaaaccgaaaaaaagcaaaacttcaggggcttctaaaaccaaaggcaagagcaagctgaacaccatcaccccagtggtagggaaaaagagaaaaagaaacacaagttcagataactccgacgtggaagttatgcccgcacaaagcccacgcgaagacgaggaatccagtatacagaagcggcgctctaatagacaagtgaaacgcaagaagtataccgaggacctggacatcaagatcaccgacgatgaggaggaggaggaagtggacgtgacgggaccaatcaaaccggaacctatcctgcccgagcctgtgcaggagcccgacggcgaaaccctgccatccatgcagttcttcgtggaaaacccaagcgaagaggacgccgctattgtggacaaagtactttctatgcgcatcgtgaaaaaggaactgccatctggacagtatacagaggccgaggagttttttgtcaagtacaagaattattcttacctccactgtgaatgggccacaatcagtcagctggaaaaagataagcggatccaccagaaactaaagagatttaagactaagatggcgcagatgagacacttcttccacgaagacgaagagccttttaaccccgactatgttgaagttgacaggatactggacgaaagccactccatcgacaaggacaatggtgagccagtcatctattatcttgtgaagtggtgttcccttccttacgaggacagcacttgggaactcaaggaagatgtagatgaaggaaaaattcgggagttcaaaaggatccaatccaggcaccctgagctcaagcgtgtcaaccggcctcaggcctccgcctggaaaaaactggaactctctcacgagtataaaaaccggaaccagcttcgcgagtaccaattggaaggggtgaattggctcctgtttaattggtacaatagacagaattgcatcttggctgatgagatgggcctcggaaagaccatccaaagtatagcctttctccaggaagtgtataatgtggggatccatggcccctttctggtgattgcgcccctgtccacaatcactaactgggaacgagagttcaatacctggactgagatgaacaccatagtttaccatggttcgctggcttcacggcaaatgattcaacagtacgaaatgtattgtaaagactcgcgtggccgcctcatacccggtgcctacaaattcgacgcgctaattacaacattcgagatgattctgagcgattgccctgagctgcgagagatcgagtggaggtgtgtgataattgacgaggcacaccgccttaagaatcgaaactgtaaacttttggactctctcaaacatatggacctggaacataaggtcctgctgacaggcacgcccctacagaacacagtggaggagctcttcagcttactgcacttcctggagcccagccagtttcctagtgagtcagaattcctgaaagatttcggcgacctgaaaaccgaggaacaggtccagaagctacaggcaattctgaagcccatgatgttgcgccgactcaaagaagatgtcgaaaaaaacttagctcctaagcaggagaccattattgaggtggaactgacgaatattcagaaaaagtactatagagccatcctggagaagaactttagcttcctaagcaaaggagctggccacacaaatatgcccaacctgttgaataccatgatggagctgagaaagtgctgtaatcatccctacttgatcaatggagccgaagagaaaattttgaccgagttccgcgaggcctgtcacataattcctcatgatttccatctgcaggctatggtccggtccgccgggaaactggtcctgatagacaagctgctgcctaagttaaaagccggcggccataaagtgctgatcttcagtcaaatggtgagatgtctggatatcctggaagattacctaatccagagaagatacctatatgaaaggatcgacggcagagttcgcgggaatctgcgacaggcagctattgaccggttctctaagccggatagtgatcgattcgtctttcttttatgcactcgcgcagggggactgggcatcaacctgactgccgccgatacttgcatcattttcgactctgattggaatcctcaaaacgatttgcaggcacaggccagatgccacagaatcgggcagagcaaagctgtgaaggtctatcggctcatcacacgcaatagctacgagcgagagatgttcgacaaagcttccttgaagcttggactggataaggctgtactgcaatcaatgagtggtagggacggaaatatcaccggaattcaacagttcagtaagaaggagatcgaagacttattgagaaaaggggcctacgccgccatcatggaagaggatgatgaggggtctaaattttgtgaggaagacatagatcaaattttattgcgacggaccaccaccatcactatagagtctgaagggaagggaagtacttttgccaaagcctcgttcgtagcgagtgagaatcgaaccgatatttctttagatgaccccaacttctggcagaaatgggctaagaaggccgatctcgacatggatctgctgaattctaagaacaatctagtgatcgatacaccgcgtgtgcggaagcagacacgccatttctcgaccctcaaggacgacgaccttgtggagttttctgatcttgaatcagaagacgatgaacgcccccgctcccgcagacacgatagacaccatgcctatggcagaacagactgctttagagtagaaaaacacctgctcgtatacggttggggcaggtggcgagacatcctgtctcatggaagattcaaacgtaggatgacagagcgcgacgtggagacaatatgccgcgccatacttgtgtattgtctgctgcactaccgaggggacgaaaacataaaagggttcatctgggaccttatctcaccagccgagaacggtaagactaaggagctgcagaatcattcaggcctgtccattcctgttcctagagggcgcaaaggtaaaaaagttaagagtcagagtacctttgatatccataaggccgactggatcaggaagtacaacccagatacactgtttcaagacgaatcctacaagaaacacctgaagcatcagtgcaacaaggtactcctgagagtgagaatgctctactatctgcgtcaggaagtcatcggagatcaggctgaaaaggtcctgggcggcgccattgcttctgaaattgatatttggtttccggtggtagatcagctggaagtgcctactacctggtgggacagcgaagccgacaagtctctgctgattggagtgttcaagcatggatatgagaagtataataccatgagagcagaccctgccctgtgcttcttggaaaaggcaggcagaccagatgataaagcaatcgcggcggaacaccgggtgctggataacttcagcgatattgtggagggtgtggactttgacaaagactgcgaggatccagagtataagccgctccagggacctcctaaggatcaggacgacgaaggagatccactgatgatgatggacgaggaaatatccgtcattgatggcgatgaggcccaggttactcaacagccaggccacctgttctggcccccagggagcgcactgacagccagacttaggcggctggtcactgcttaccagcggtcgtataaacgggagcagatgaaaatagaggccgccgagaggggggaccgcaggaggagaaggtgcgaagccgcctttaagcttaaggagatcgctcgcagagagaaacagcagcgatggacccgcagggaacagaccgatttttatagagtagtatcaacctttggggtggaatatgaccccgataccatgcaattccattgggataggttccgaactttcgcccgtctggataagaagactgatgagtctctcactaagtacttccacgggtttgttgccatgtgtcggcaagtttgcagactgccaccagcagccggtgacgagcccccagatccaaatttattcattgaacccatcacagaggagcgagcctccaggactttgtataggattgagcttctgcggaggcttcgggagcaagtcctgtgccatcccttgctggaggaccgactcgccctgtgtcagccacctgggccggagctccctaagtggtgggagccagtcagacacgacggggagctgctgaggggtgcagcgagacacggtgtgtcacagactgattgtaacatcatgcaggatccagacttttcattcctcgctgccagaatgaattacatgcagaaccatcaggcaggcgcccccgcacctagcctgagccgttgctccactccactgctccatcaacagtatacctcgaggactgccagccccctgcctttaaggcccgatgccccagtggaaaagtcccctgaagagactgcgacgcaggtgcctagcttggagtctttgactctgaaactcgagcatgaagttgtcgcccgctccaggccaaccccccaggattatgagatgcgcgtgagcccaagcgatacaactccactggtatccagatctgtcccacctgtgaaactcgaggacgaggacgacagcgattcggaactggatctgtccaagctgtccccatcctcatccagtagctcatcatcgtcctccagcagttcctcaactgatgagagtgaggacgagaaggaagagaaactgactgaccaatctaggtcaaagctgtatgatgaggagtcactcctgagcttgacaatgtcccaggacggatttccaaacgaagatggggaacagatgacccctgagctgttgctgctccaggagcgacagcgagcttccgagtggcccaaggacagggtgttaataaacagaattgacctcgtgtgtcaggcagtgctgtctggtaaatggccctcttcacgccggtctcaggaaatggtcacaggtggcatcctggggccgggcaaccacctgcttgactcgccttccttaaccccaggtgagtacggtgatagcccagtgccaactccccgctcatcttccgctgcaagtatggctgaggaggaagccagcgcggttagtactgccgccgcccagtttaccaaattgcggcgcgggatggatgaaaaggaatttactgtgcagattaaggacgaggagggcttaaaactcacctttcagaagcacaaactcatggctaacggtgtgatgggagacggtcatcccctgtttcacaagaaaaagggcaatcggaaaaagttggttgaactggaagttgaatgcatggaagaacccaatcacctggatgtcgaccttgaaacgcgaattcccgtgatcaataaggtagacggcaccctgctggttggcgaggatgctcccagaagagcagagctggagatgtggttacagggacatcccgaattcgctgtggacccgaggttcctcgcgtatatggaggatagacggaaacaaaaatggcagcgatgtaaaaagaataacaaggctgaactaaactgtctgggcatggagcctgtgcaaacagcgaatagtcgtaatggtaaaaagggccaccacactgaaaccgtatttaacagggtcctgcctggcccaatcgctccagagtcaagcaagaaaagggcaagaaggatgaggccagatcttagcaaaatgatggcgttaatgcaaggcgggagtacggggagcttaagtctgcataatacgttccagcactcaagcagcgggctccagtcagttagctccctcggacattcatccgcgacctctgctagtctccctttcatgcccttcgtaatggggggcgctccttcgtctccccatgtggacagttcaacgatgctgcatcaccatcaccatcatccacacccccatcaccatcaccatcatcacccagggctcagagcaccgggatatcctagtagcccagttactaccgccagtggcacaacgctgagacttcctcccctgcaacctgaggaggatgatgatgaagacgaggaggatgatgatgatctgtcacagggatacgatagcagcgaaagggactttagcttaattgatgacccaatgatgcccgctaacagcgatagcagtgaggatgctgatgattag

SEQ ID NO: 206528 - DNA, 6906 bp, Artificial Sequence
  derived and/or modified sequence
aaaggagagagcaagaggatcaccctggtgctgcagcagccccagagcggcggcccccagggccaccgccacgtggtgctgggcagcctgcccgggaagatcgtgctgcagggcaaccagctggccgccctgacccaggccaagaatgcccagggccagcctgccaaggtggtgaccatccagctgcaggtgcagcagccccagcagaagatccagatcgtgccccagccccccagcagccagccccagccccagcagccccccagcacccagcctgtgaccctgagctctgtgcagcaggcccagatcatgggccctggccagagccctggccagaggctgtctgtgcctgtgaaggtggtgctgcagccccaggccggcagcagccagggcgccagcagcggcctgtctgtggtgaaggtgctgagcgccagcgaggtggccgccctgagcagccctgccagcagcgccccccacagcggcggcaagacaggcatggaggagaacagaaggctggagcaccagaagaagcaggagaaggccaaccgcatcgtggccgaggccatcgcccgggcccgggcccggggggagcagaacatcccccgggtgctgaatgaagatgagctgcccagcgtgcggcctgaggaggagggggagaagaagaggaggaagaagtctgctggggagcggctgaaggaggagaagcccaagaagagcaagaccagcggggccagcaagaccaagggcaagagcaagctgaacaccatcacccctgtggtgggcaagaagaggaagaggaacaccagcagtgacaacagtgatgtggaggtgatgcctgcccagagccccagagaagatgaggagagcagcatccagaagaggaggagcaaccggcaggtgaagaggaagaagtacacagaggacctggacatcaagatcacagatgatgaggaggaggaggaggtggatgtgacaggccccatcaagccagagcccatcctgcctgagcctgtgcaggagccagatggagagaccctgcccagcatgcagttctttgtggagaaccccagtgaagaagatgctgccatcgtggacaaggtgctgtccatgagaattgtgaagaaggagctgcccagcggccagtacacagaagctgaggagttctttgtgaagtacaagaactacagctacctgcactgtgagtgggccaccatcagccagctggagaaggacaagaggatccaccagaagctgaagcgcttcaagaccaagatggcccagatgaggcacttcttccatgaagatgaggagcccttcaacccagactatgtggaggtggaccgcatcctggatgagagccacagcattgacaaggacaacggggagcctgtgatctactacctggtgaagtggtgcagcctgccctatgaggacagcacctgggagctgaaggaggatgtggatgagggcaagatccgggagttcaagaggatccagagccgccaccctgagctgaagagggtgaaccggccccaggccagcgcctggaagaagctggagctgagccatgagtacaagaacagaaaccagctgcgggagtaccagctggagggcgtgaactggctgctcttcaactggtacaaccggcagaactgcatcctggctgatgagatgggcctgggcaagaccatccagagcatcgccttcctgcaggaggtgtacaacgtgggcatccacggccccttcctggtgattgcccccctgagcaccatcaccaactgggagcgggagttcaacacctggacagagatgaacaccatcgtgtaccacggcagcctggccagccggcagatgatccagcagtatgagatgtactgcaaggacagccggggccgcctcatccctggggcctacaagtttgatgccctgatcaccacctttgagatgatcctgagtgactgcccagagctgcgggagattgagtggcgctgcgtcatcattgatgaggcccaccggctgaagaacagaaactgcaagctgctggacagcctgaagcacatggacctggagcacaaggtgctgctgaccggcacccccctgcagaacacagtggaggagctgttcagcctgctgcacttcctggagcccagccagttccccagcgagagcgagttcctgaaggactttggagacctgaagacagaggagcaggtgcagaagctgcaggccatcctgaagcccatgatgctgcggcggctgaaggaggatgtggagaagaacctggcccccaagcaggagaccatcatcgaggtggagctgaccaacatccagaagaagtactaccgggccatcctggagaagaacttctccttcctgagcaagggggccggccacaccaacatgcccaacctgctgaacaccatgatggagctgaggaagtgctgcaaccacccctacctgatcaacggggctgaggagaagatcctgacagagttccgggaggcctgccacatcatcccccatgacttccacctgcaggccatggtgcgctctgctgggaagctggtgctgattgacaagctgctgcccaagctgaaggccggcggccacaaggtgctgatcttcagccagatggtgcgctgcctggacatcctggaggactacctgatccagaggcgctacctgtatgaaagaattgatggccgggtgcggggcaacctgcggcaggccgccatcgaccgcttcagcaagccagacagcgacagatttgtgttcctgctgtgcaccagggctgggggcctgggcatcaacctgacagctgctgacacctgcatcatctttgacagcgactggaacccccagaatgacctgcaggcccaggcccgctgccaccgcatcggccagagcaaggctgtgaaggtgtaccgcctcatcaccaggaacagctatgagcgggagatgtttgacaaggccagcctgaagctgggcctggacaaggctgtgctgcagagcatgagcggcagagatggcaacatcaccggcatccagcagttcagcaagaaggagattgaggacctgctgaggaaaggagcctatgctgccatcatggaggaggatgatgagggcagcaagttctgtgaggaggacatcgaccagatcctgctgcggaggaccaccaccatcaccattgaaagtgagggcaagggcagcacctttgccaaggccagctttgtggcctctgaaaatagaacagacatcagcctggatgaccccaacttctggcagaagtgggccaagaaggctgacctggacatggacctgctgaacagcaagaacaacctggtgattgacaccccccgggtgaggaagcagaccaggcacttcagcaccctgaaggatgatgacctggtggagttcagtgacctggagagtgaagatgatgagcggcccaggagcagaagacatgacagacaccacgcctacggccgcacagactgcttccgggtggagaagcacctgctggtgtatggctggggccgctggagggacatcctgagccacggccgcttcaagaggaggatgacagaaagagatgtggagaccatctgccgggccatcctggtgtactgcctgctgcactacagaggagatgagaacatcaagggcttcatctgggacctgatcagccctgcagaaaatggcaagaccaaggagctgcagaaccacagcggcctgagcatccctgtgccccggggcaggaagggcaagaaggtgaagagccagagcacctttgacatccacaaggctgactggatcaggaagtacaacccagacaccctcttccaggatgagagctacaagaagcacctgaagcaccagtgcaacaaggtgctgctgcgggtgaggatgctgtactacctgcggcaggaggtgattggagaccaggccgagaaggtgctgggcggggccatcgccagcgagattgacatctggttccctgtggtggaccagctggaggtgcccaccacctggtgggacagcgaggccgacaagagcctgctgattggagtcttcaagcacggctatgagaagtacaacaccatgagagctgaccctgccctgtgcttcctggagaaggccggccgcccagatgacaaggccatcgctgctgagcaccgggtgctggacaacttcagtgacatcgtggagggcgtggactttgacaaggactgtgaggaccctgagtacaagcccctgcagggcccccccaaggaccaggatgatgaaggagaccccctgatgatgatggatgaggagatctctgtgattgatggagatgaggcccaggtgacccagcagcccggccacctgttctggcccccaggcagcgccctgacagcccggctgcggcggctggtgacagcctaccagaggagctacaagcgggagcagatgaagattgaagctgctgagcggggggacagaagaagaagaagatgtgaggccgccttcaagctgaaggagatcgcccggcgggagaagcagcagcgctggacccggcgggagcagacagacttctacagagtggtgtccacctttggagtggagtatgaccctgacaccatgcagttccactgggaccgcttccgcacctttgcccggctggacaagaagacagatgagagcctgaccaagtacttccacggctttgtggccatgtgccggcaggtgtgccgcctgcccccagctgctggagatgagcccccagaccccaacctcttcatcgagcccatcacagaggagcgggccagcaggaccctgtaccgcatcgagctgctgcggcggctgcgggagcaggtgctgtgccaccccctgctggaggaccggctggccctgtgccagcccccaggccctgagctgcccaagtggtgggagcctgtgagacatgatggagagctgctgcggggagctgcccggcatggagtgtcccagacagactgcaacatcatgcaggaccctgacttctccttcctggccgccaggatgaactacatgcagaaccaccaggccggggccccagcccccagcctgagccgctgcagcacccccctgctgcaccagcagtacaccagcaggacagccagccccctgcccctgcggccagatgcccctgtggagaagagccctgaggagacagccacccaggtgcccagcctggagagcctgaccctgaagctggagcacgaggtggtggcccggagccggcccaccccccaggactatgagatgagggtgagccccagcgacaccacccccctggtgagccgctctgtgccccctgtgaagctggaggatgaagatgacagcgacagcgagctggacctgagcaagctgagccccagcagcagcagcagcagcagcagcagcagcagcagcagcagcacagatgaaagtgaagatgagaaggaggagaagctgacagaccagagccgcagcaagctgtatgatgaggagagcctgctgagcctgaccatgagccaggacggcttccccaatgaagatggagagcagatgaccccagagctgctgctgctgcaggagcggcagagggccagcgagtggcccaaggacagagtgctgatcaacagaattgacctggtgtgccaggccgtgctgagcggcaagtggcccagcagccgccgcagccaggagatggtgactggaggcatcctgggccctggcaaccacctgctggacagccccagcctgaccccaggagaatatggagacagccctgtgcccacccccaggagcagcagcgctgcctccatggccgaggaggaggccagcgctgtgtccacagctgctgcccagttcaccaagctgcggcggggcatggatgagaaggagttcaccgtgcagatcaaggatgaggagggcctgaagctgaccttccagaagcacaagctgatggccaatggagtgatgggagatggccaccccctcttccacaagaagaagggcaacaggaagaagctggtggagctggaggtggagtgcatggaggagcccaaccacctggatgtggacctggagacccgcatccctgtgatcaacaaggtggatggcaccctgctggtgggagaagatgcccccaggagagctgagctggagatgtggctgcagggccaccctgagtttgctgtggacccccgcttcctggcctacatggaggacaggaggaagcagaagtggcagcgctgcaagaagaacaacaaggccgagctgaactgcctgggcatggagcctgtgcagacagccaacagcagaaatggcaagaagggccaccacacagagaccgtcttcaacagagtgctgcccggccccatcgcccctgagagcagcaagaagagggcccggaggatgaggccagacctgagcaagatgatggccctgatgcagggcggcagcacaggcagcctgagcctgcacaacaccttccagcacagcagcagcggcctgcagagcgtgagcagcctgggccacagcagcgccaccagcgccagcctgcccttcatgccctttgtgatgggcggggcccccagcagcccccacgtggacagcagcaccatgctgcaccaccaccaccaccacccccacccccaccaccaccaccaccaccaccctggcctgcgggcccctggctaccccagcagccctgtgaccacagccagcggcaccaccctgcggctgccccccctgcagcctgaggaggatgatgatgaagatgaagaagatgatgatgacctgagccagggctatgacagcagcgagcgggacttcagcctgattgatgaccccatgatgcctgccaacagcgacagcagtgaagatgctgatgactag

SEQ ID NO: 206529 - DNA, 6909 bp, Artificial Sequence
  derived and/or modified sequence
atgaagggggagagcaagaggatcaccctggtgctgcagcagccccagagcggcggcccccagggccacagacatgtggtgctgggcagcctgcccgggaagatcgtgctgcagggcaaccagctggccgccctgacccaggccaagaatgcccagggccagcctgccaaggtggtgaccatccagctgcaggtgcagcagccccagcagaagatccagatcgtgccccagccccccagcagccagccccagccccagcagccccccagcacccagcctgtgaccctgagctctgtgcagcaggcccagatcatgggccctggccagagccctggccagaggctgtctgtgcctgtgaaggtggtgctgcagccccaggccggcagcagccagggcgccagcagcggcctgtctgtggtgaaggtgctgagcgccagcgaggtggccgccctgagcagccctgccagcagcgccccccacagcggcggcaagacaggcatggaggagaacagaaggctggagcaccagaagaagcaggagaaggccaacagaattgtggccgaggccatcgcccgggcccgggcccggggggagcagaacatcccccgggtgctgaatgaagatgagctgcccagcgtgcggcctgaggaggagggggagaagaagaggaggaagaagtctgctggggagcggctgaaggaggagaagcccaagaagagcaagaccagcggggccagcaagaccaagggcaagagcaagctgaacaccatcacccctgtggtgggcaagaagaggaagaggaacaccagcagtgacaacagtgatgtggaggtgatgcctgcccagagcccccgggaggatgaggagagcagcatccagaagagaagaagcaaccggcaggtgaagaggaagaagtacacagaggacctggacatcaagatcacagatgatgaggaggaggaggaggtggatgtgacaggccccatcaagccagagcccatcctgcctgagcctgtgcaggagccagatggagagaccctgcccagcatgcagttctttgtggagaaccccagcgaggaggatgctgccatcgtggacaaggtgctgtccatgagaattgtgaagaaggagctgcccagcggccagtacacagaggccgaggagttctttgtgaagtacaagaactacagctacctgcactgtgagtgggccaccatcagccagctggagaaggacaagaggatccaccagaagctgaagcgcttcaagaccaagatggcccagatgaggcacttcttccatgaagatgaggagcccttcaacccagactatgtggaggtggaccgcatcctggatgagagccacagcattgacaaggacaatggagagcccgtcatctactacctggtgaagtggtgcagcctgccctatgaggacagcacctgggagctgaaggaggatgtggatgagggcaagatccgggagttcaagaggatccagagccgccaccctgagctgaagagggtgaaccggccccaggccagcgcctggaagaagctggagctgagccatgagtacaagaacagaaaccagctgcgggagtaccagctggagggcgtgaactggctgctcttcaactggtacaaccggcagaactgcatcctggctgatgagatgggcctgggcaagaccatccagagcatcgccttcctgcaggaggtgtacaacgtgggcatccacggccccttcctggtgattgcccccctgagcaccatcaccaactgggagcgggagttcaacacctggacagagatgaacaccatcgtgtaccacggcagcctggccagccggcagatgatccagcagtatgagatgtactgcaaggacagccggggccgcctcatccctggggcctacaagtttgatgccctgatcaccacctttgagatgatcctgagtgactgcccagagctgcgggagattgagtggaggtgtgtgatcattgatgaggcccaccggctgaagaacagaaactgcaagctgctggacagcctgaagcacatggacctggagcacaaggtgctgctgaccggcacccccctgcagaacacagtggaggagctgttcagcctgctgcacttcctggagcccagccagttccccagcgagagcgagttcctgaaggactttggagacctgaagacagaggagcaggtgcagaagctgcaggccatcctgaagcccatgatgctgcggcggctgaaggaggatgtggagaagaacctggcccccaagcaggagaccatcatcgaggtggagctgaccaacatccagaagaagtactaccgggccatcctggagaagaacttctccttcctgagcaaaggagctggccacaccaacatgcccaacctgctgaacaccatgatggagctgaggaagtgctgcaaccacccctacctgatcaatggagctgaggagaagatcctgacagagttccgggaggcctgccacatcatcccccatgacttccacctgcaggccatggtgcgctctgctgggaagctggtgctgattgacaagctgctgcccaagctgaaggccggcggccacaaggtgctgatcttcagccagatggtgcgctgcctggacatcctggaggactacctgatccagaggcgctacctgtatgaaagaattgatggccgggtgcggggcaacctgcggcaggccgccatcgaccgcttcagcaagccagacagcgacagatttgtgttcctgctgtgcacccgggccggcggcctgggcatcaacctgacagctgctgacacctgcatcatctttgacagcgactggaacccccagaatgacctgcaggcccaggcccgctgccacagaattggccagagcaaggctgtgaaggtgtaccgcctcatcaccagaaattcctatgaaagagagatgtttgacaaggccagcctgaagctgggcctggacaaggctgtgctgcagagcatgagcggcagagatggcaacatcaccggcatccagcagttcagcaagaaggagattgaggacctgctgaggaagggggcctatgctgccatcatggaggaggatgatgagggcagcaagttctgtgaagaagatattgaccagatcctgctgcggaggaccaccaccatcaccatcgagagcgagggcaagggcagcacctttgccaaggccagctttgtggccagcgagaacagaacagacatcagcctggatgaccccaacttctggcagaagtgggccaagaaggctgacctggacatggacctgctgaacagcaagaacaacctggtgattgacaccccccgggtgaggaagcagaccaggcacttcagcaccctgaaggatgatgacctggtggagttcagtgacctggagagtgaagatgatgagcggcccaggagcagaagacatgacagacaccacgcctacggccgcacagactgcttccgggtggagaagcacctgctggtgtatggctggggccgctggagggacatcctgagccacggccgcttcaagaggaggatgacagaaagagatgtggagaccatctgccgggccatcctggtgtactgcctgctgcactacagaggagatgagaacatcaagggcttcatctgggacctgatcagccctgcagaaaatggcaagaccaaggagctgcagaaccacagcggcctgagcatccctgtgccccggggcaggaagggcaagaaggtgaagagccagagcacctttgacatccacaaggctgactggatcaggaagtacaacccagacaccctcttccaggatgagagctacaagaagcacctgaagcaccagtgcaacaaggtgctgctgcgggtgaggatgctgtactacctgcggcaggaggtgattggagaccaggccgagaaggtgctgggcggggccatcgccagcgagattgacatctggttccctgtggtggaccagctggaggtgcccaccacctggtgggacagcgaggccgacaagagcctgctgattggagtcttcaagcacggctatgagaagtacaacaccatgagagctgaccctgccctgtgcttcctggagaaggccggccgcccagatgacaaggccatcgctgctgagcaccgggtgctggacaacttcagtgacatcgtggagggcgtggactttgacaaggactgtgaagatcctgagtacaagcccctgcagggcccccccaaggaccaggatgatgaaggagaccccctgatgatgatggatgaggagatctctgtgattgatggagatgaggcccaggtgacccagcagcccggccacctgttctggcccccaggcagcgccctgacagcccggctgcggcggctggtgacagcctaccagaggagctacaagcgggagcagatgaagattgaggccgctgagcggggggacagaagaagaagaagatgtgaggccgccttcaagctgaaggagatcgcccggcgggagaagcagcagcgctggacccggcgggagcagacagacttctacagagtggtgtccaccttcggcgtggagtatgaccctgacaccatgcagttccactgggaccgcttccgcacctttgcccggctggacaagaagacagatgagagcctgaccaagtacttccacggctttgtggccatgtgccggcaggtgtgccgcctgcccccagctgctggagatgagcccccagaccccaacctcttcatcgagcccatcacagaggagcgggccagcaggaccctgtacagaattgagctgctgcggcggctgcgggagcaggtgctgtgccaccccctgctggaggaccggctggccctgtgccagcccccaggccctgagctgcccaagtggtgggagcctgtgagacatgatggagagctgctgcggggggccgcccggcatggagtgtcccagacagactgcaacatcatgcaggaccctgacttctccttcctggccgccaggatgaactacatgcagaaccaccaggccggggccccagcccccagcctgagccgctgcagcacccccctgctgcaccagcagtacaccagcaggacagccagccccctgcccctgcggccagatgcccctgtggagaagagccctgaggagacagccacccaggtgcccagcctggagagcctgaccctgaagctggagcacgaggtggtggcccggagccggcccaccccccaggactatgagatgagggtgagccccagcgacaccacccccctggtgagccgctctgtgccccctgtgaagctggaggatgaagatgacagcgacagcgagctggacctgagcaagctgagccccagcagcagcagcagcagcagcagcagcagcagcagcagcagcacagatgaaagtgaagatgagaaggaggagaagctgacagaccagagccgcagcaagctgtatgatgaggagagcctgctgagcctgaccatgagccaggacggcttccccaatgaagatggagagcagatgaccccagagctgctgctgctgcaggagcggcagagggccagcgagtggcccaaggacagagtgctgatcaacagaattgacctggtgtgccaggccgtgctgagcggcaagtggcccagcagcagaagaagccaggagatggtgactggaggcatcctgggccctggcaaccacctgctggacagccccagcctgaccccaggagaatatggagacagccctgtgcccacccccaggagcagcagcgctgcctccatggccgaggaggaggccagcgctgtgtccacagctgctgcccagttcaccaagctgcggcggggcatggatgagaaggagttcaccgtgcagatcaaggatgaggagggcctgaagctgaccttccagaagcacaagctgatggccaacggggtgatgggagatggccaccccctcttccacaagaagaagggcaacaggaagaagctggtggagctggaggtggagtgcatggaggagcccaaccacctggatgtggacctggagacccgcatccctgtgatcaacaaggtggatggcaccctgctggtgggggaggatgccccccggcgggcagagctggagatgtggctgcagggccaccctgagtttgctgtggacccccgcttcctggcctacatggaggacaggaggaagcagaagtggcagcgctgcaagaagaacaacaaggccgagctgaactgcctgggcatggagcctgtgcagacagccaacagcagaaatggcaagaagggccaccacacagaaacagtgttcaacagagtgctgcccggccccatcgcccctgagagcagcaagaagagggcccggaggatgaggccagacctgagcaagatgatggccctgatgcagggcggcagcacaggcagcctgagcctgcacaacaccttccagcacagcagcagcggcctgcagagcgtgagcagcctgggccacagcagcgccaccagcgccagcctgcccttcatgccctttgtgatgggcggggcccccagcagcccccacgtggacagcagcaccatgctgcaccaccaccaccaccacccccacccccaccaccaccaccaccaccaccctggcctgcgggcccctggctaccccagcagccctgtgaccacagccagcggcaccaccctgcggctgccccccctgcagccagaagaagatgatgatgaagatgaggaggatgatgatgacctgagccagggctatgacagcagcgagcgggacttcagcctgattgatgaccccatgatgcctgccaacagcgacagcagtgaagatgctgatgactag

SEQ ID NO: 206530 - DNA, 6906 bp, Artificial Sequence
  derived and/or modified sequence
aagggcgagagcaagcggatcaccctggtgctgcagcagccccagtccgggggacctcaggggcaccgacacgtggtactaggttcactcccagggaagatcgttctccagggtaatcaactggctgcgctgactcaggcaaagaatgcacaaggacagcccgctaaggtggtgaccatacagctgcaagtacagcaaccacaacaaaaaatccagatcgtgcctcagcccccctcgtcacagccccagccacagcagccaccctccactcagcccgtgaccctgtctagcgttcaacaggcacagattatgggtcccggacagagtcccgggcagcgcctgtccgtgcctgtgaaagtggtactgcagcctcaggccgggtcatctcagggcgccagctctggactatccgtagtgaaagtgctgagtgcctctgaggtggcagcactaagctctccagcctcgtctgctccacactcaggcgggaaaacaggaatggaagaaaaccgccggctcgagcaccaaaaaaagcaagaaaaagctaatcgtattgtggccgaggcgattgcacgtgcccgcgccagaggggagcagaacatcccacgcgttttaaatgaggacgagttacctagcgtccggccagaggaagagggcgagaagaaacgtagaaaaaaatcagctggggagcgccttaaggaagagaagccaaaaaagtccaagacttccggcgcttccaagacaaagggcaaatctaaacttaacactatcacccccgtagtgggcaagaagagaaagcggaatacgtctagcgacaatagcgacgtggaggtgatgccagcccaatcacccagagaggatgaagagagtagcatacagaagagaaggagcaatcggcaggtgaagcgcaagaagtacactgaagatcttgatattaagatcactgacgacgaagaggaggaggaagtcgatgtcactgggcctataaaacctgaaccaatcctgcccgagcccgttcaagaaccggatggcgaaacgctcccaagtatgcagttcttcgtcgaaaacccatctgaggaggatgctgccatcgtcgacaaagtgctaagcatgcgcatcgttaagaaggagctccccagtggacaatatacagaggcagaggagttttttgtcaagtacaaaaattacagctacctgcactgcgagtgggccaccattagtcaactggagaaggataaacggatccaccagaagttgaagcgttttaagacgaaaatggcccaaatgcgccacttcttccacgaggacgaggagccgttcaatcctgattatgtggaagtggatcgcattctggatgagtcccatagtatcgacaaagataacggcgagcccgtgatttactaccttgtgaaatggtgctccttaccatatgaggactcaacatgggagcttaaggaggatgttgatgagggcaagattagggagttcaagagaatccagagccgtcatcccgaactgaagagggtcaatcgccctcaggccagtgcctggaaaaaactggagttgtcccacgagtacaagaacaggaatcaacttagggagtatcaattggagggcgtgaactggctcttattcaactggtataacagacaaaattgcatattagccgacgagatgggattgggcaagactattcagagcatcgccttcctccaggaagtgtataatgtgggaattcatgggcccttcctggtgatcgcaccactgtcgacaatcacaaattgggagcgggaatttaacacatggacggagatgaacaccattgtctatcatgggtccctggccagcagacagatgatacagcagtatgaaatgtactgcaaagatagcagaggccgcctgataccaggggcatataagtttgacgctcttataaccaccttcgagatgatcctgtcggattgtccggaactaagagagatcgaatggaggtgtgtcatcattgatgaagcacaccgtttgaagaatcgcaattgtaagctgctcgatagcctcaaacatatggaccttgagcacaaagtcctgctgactggtacgcctctacaaaatactgtggaagaactgttcagtctgctccatttcctcgaaccgagccaatttccatcagaaagtgaatttctgaaagattttggggatctcaagacagaagaacaggtgcagaagcttcaagccatcttgaaacccatgatgctgcgccggctgaaagaggacgttgagaagaatcttgcccctaaacaggaaacgataatcgaagttgaactgaccaatattcaaaagaagtactaccgagccatcctggagaaaaatttctctttcttgagcaagggtgcaggacatactaacatgcccaacctcctcaacaccatgatggaactcaggaagtgttgtaatcacccttatcttatcaatggagccgaggagaaaattttgaccgaatttagggaagcatgtcatataattcctcatgattttcacttgcaagcgatggtgagaagcgccggaaaactggtgcttatcgacaagttgctacccaagctgaaagctggggggcacaaggttctgatattctctcaaatggtgcgatgcttggatatcttagaagattatttgatacagagaaggtacctttatgaacgtatcgacgggcgcgttcggggaaacctgagacaagcggccattgaccgattctctaaacctgattcggatcgttttgtctttctcctgtgcacccgcgccgggggcctcggtataaacctcaccgccgccgacacatgcatcatcttcgacagcgactggaacccccagaacgatctccaagcccaagctcggtgccacaggatcgggcagagcaaagctgtcaaagtgtaccggctaattaccagaaattcttacgaacgcgagatgtttgacaaagcaagcctcaagcttggtctagacaaagctgtgctccaatccatgagtggacgtgatggaaacattactggcatccagcagttctccaaaaaggaaatcgaggatttgctgcggaagggagcttatgccgcaatcatggaagaggacgacgaagggagcaagttttgtgaggaggatatagaccagattctgctgcgtcgcactaccacaatcacaatcgagagtgaaggcaaaggctctaccttcgccaaagcctcgtttgtggcgagcgaaaatcgcaccgacatcagtctggatgaccctaacttctggcagaaatgggcaaagaaagcggatctcgacatggatctgttgaattctaagaataacttagtgatagacacaccccgagtgcggaaacagacgaggcactttagtacactgaaagatgacgacctcgtggagttctccgacctagagtctgaggacgacgagaggccgcggtcacggaggcatgatcgccaccacgcttatggcaggacagactgttttagggtggagaaacacttgctcgtgtatggctggggaagatggagagatatcctaagccacggccggtttaaacgcagaatgacagagcgcgacgttgaaactatctgcagggccattctggtttattgtctgcttcactataggggagatgaaaatatcaaaggcttcatttgggacctgatctcccccgctgaaaacgggaaaaccaaagagctccagaatcactccggcttgagcatccctgtcccacggggccgtaaaggcaagaaagtcaagagccagtcgacattcgacatccataaagccgattggatcaggaaatataatcctgacacgttgtttcaggatgagtcttacaagaaacatttaaaacatcagtgtaacaaggtgttattgagggtcaggatgctatactaccttagacaggaggtcatcggagatcaggcagaaaaagtgcttggcggcgccattgcttccgaaattgatatttggttccccgtcgtcgatcaactggaagttccaacaacatggtgggatagcgaagccgacaaatcactactgatcggcgtcttcaagcacggttacgagaaatacaataccatgagggctgacccggctctctgtttcctggagaaggctggccgaccagatgacaaagctatcgctgcagagcatcgagtgttagacaacttttccgacatcgtggaaggggtggatttcgataaggattgcgaggaccctgagtacaaacctctccagggacccccaaaggaccaagacgatgaaggcgatccgttgatgatgatggatgaggaaatatcagtaatcgatggagatgaagctcaggtgactcagcagcccgggcatcttttctggcctcccggcagcgcgctgacagcaagactgcgccgtctggtgacggcctaccagcggagttataagcgggagcagatgaagatcgaagcagccgaacggggagacagacggcgcagacgatgcgaggccgcctttaagttgaaggaaattgcacgtcgagagaaacaacagcggtggaccagacgggagcagacagacttttaccgcgtcgtgtcaacttttggagtcgagtacgatcctgatacgatgcaatttcactgggatcgctttagaactttcgctaggctggataaaaagactgatgagagcctgaccaaatactttcacggattcgttgctatgtgccgacaggtatgccggttaccccctgctgccggtgatgagcccccagatcctaacctgttcattgaaccaatcacagaagaacgcgcttcaaggacgctatatagaattgagctattgagacggctcagggaacaggttctctgtcaccccctcctcgaggaccgtcttgccctgtgccagccgcccgggcctgagcttccgaagtggtgggagcccgtgagacatgacggcgagctgctccgaggcgccgcccgccatggagttagtcagactgattgcaatattatgcaggaccccgatttcagttttctagctgcacgcatgaactatatgcaaaaccaccaagctggcgcgcctgcccccagcctttcacgatgctctacccctctgctgcatcaacagtacacctcacgtaccgccagcccactacctctgagacccgacgcgcccgtggagaaatcccctgaagagaccgctacccaagtgccatcgttggaatctctgaccctgaagctggagcatgaggtggtggccagatcacgaccaacaccgcaggactatgagatgcgtgtgtcccctagcgacacaaccccactggtcagccggtccgtgccacctgtgaagctggaggatgaagatgattccgactctgaactggatctctctaaacttagcccttcctcttcttcgagctcctcaagcagcagctcttcaagtagtactgatgaatcagaagatgagaaagaggagaaattgacggatcaatcacgtagcaagctctacgacgaagagagccttctgagtcttaccatgtcacaggacggcttcccaaacgaggatggcgagcaaatgaccccagagctgcttctcctgcaggagagacagcgggcgtcagagtggccaaaggacagagtactgatcaatcgcattgatctcgtgtgtcaggctgtcctatccgggaagtggccgtcttctaggagaagccaggagatggtgacaggtggcatcctgggacccgggaaccacctgcttgactctccttccttgacacccggagaatacggcgacagtcctgttccaaccccacgatccagcagcgccgctagtatggccgaggaggaggcttcagcagtctcgaccgccgctgcacagttcacgaagctgaggagagggatggacgagaaagagtttaccgtgcaaatcaaggatgaggagggccttaaacttacatttcagaagcataaactgatggctaatggtgttatgggagatggccacccactgttccataaaaagaaggggaaccggaagaaactggttgagctggaggtcgaatgtatggaggagccaaaccatctggacgttgacctcgaaacccgcatccccgtgatcaacaaggttgacggtacgctgctggtaggcgaggacgctcctcgcagggcggagctcgaaatgtggctacaaggtcacccagagttcgctgtcgaccctcgtttcctagcctatatggaggaccgacgtaagcagaagtggcagcgatgtaagaagaataacaaggccgaactgaactgtctggggatggaacctgtccagacagcgaactctcgaaatgggaagaagggccatcacactgaaaccgtgtttaatcgggtgctcccaggccctattgcccctgagtcgagcaaaaaaagggcccgcaggatgaggccagacctcagtaaaatgatggctctgatgcagggaggaagcacagggagccttagtctccataacacatttcaacatagctcctccgggctgcagagtgtttcttccctggggcatagttcggcaaccagcgcttcactgccctttatgccatttgttatggggggcgctccttcttcacctcacgtagatagcagtaccatgctacatcaccatcatcatcatcctcacccccaccatcaccaccaccatcaccctggtttgcgggccccagggtatccctcttctccagtgacaactgccagcggtacaactctgaggttacctcccctgcaaccagaggaggatgatgacgaagacgaagaggatgatgatgacctgtcgcaaggatacgatagttcagagcgggacttctcgttaattgatgatccgatgatgccggctaattcagatagtagtgaggacgccgacgactag

SEQ ID NO: 206531 - DNA, 6909 bp, Artificial Sequence
  derived and/or modified sequence
atgaagggcgagagcaagcggatcaccctggtgctgcagcagccccaaagtggcggccctcaaggtcaccgccacgtggtactaggctcactgcctggtaagattgtgctacaaggcaaccagctggctgctctgacccaggccaaaaatgcccagggtcaacctgccaaggtggtgaccattcagctgcaagtccagcaaccccagcagaaaattcagattgtgccacaacccccttcttcgcagccgcagccgcagcagcctcctagcacacaaccggttacgctgagtagcgtgcaacaggctcagataatgggacccggacagtctcccggacaacgcctctccgtgccggtaaaggtggtactccagccccaggcaggtagttcacagggcgcaagctctggcctgtctgtggtaaaagtcttatcagcctctgaagtggctgctttatcaagtcccgcctcctctgcgccacattctggcggaaagaccggcatggaggagaaccgccgcttagagcatcagaaaaagcaggagaaggccaatcgaatcgtggcagaagccatcgctcgcgcccgcgcacgcggcgagcagaatatacccagggttttgaatgaggacgagcttcccagcgttcgcccggaggaggagggagagaagaaacgccgcaaaaaatcggccggcgaaagactgaaagaggaaaaaccaaagaaaagcaagactagcggcgcttcaaaaaccaagggaaagagtaaactgaacactatcacccctgtggtgggcaaaaaacggaagagaaatacttcttccgataactcagacgtggaggtgatgccagcccaatcgccgcgtgaggacgaggaaagctccattcaaaagagaaggtctaaccgccaagtgaagcgcaagaagtacaccgaagatttggatattaagatcactgatgacgaagaggaggaggaagtggacgtgacaggccccatcaagcctgagcccatcctgcccgagccagtgcaggagcccgacggcgaaacacttcctagtatgcaatttttcgtggaaaacccctctgaggaggatgccgcaattgttgataaagtgctgtcaatgcgtattgttaagaaagaactgccctccggccagtacacagaggccgaggagttttttgtgaagtacaagaactactcttacctgcactgcgagtgggctactattagtcagctggaaaaggataagaggatccaccagaagctaaagcgattcaagactaagatggctcagatgagacacttttttcacgaggacgaggaaccatttaaccctgattatgtggaagtggatcgtatcctcgacgagagccactctatcgacaaggacaacggggagcccgtgatttattacctggtgaaatggtgctctctcccctacgaagactccacttgggaactgaaagaagatgtagacgagggcaagattagggaattcaagcgcatccaatcacggcaccccgaattgaaacgggttaaccggccccaggcctccgcctggaagaagttggagctttcccatgagtataaaaacaggaaccaactcagggaatatcagctggagggcgtgaattggctgctcttcaactggtacaacaggcagaactgcatcctggcagatgagatgggccttggcaaaaccatccagagcattgcattcctgcaggaagtctataacgtaggaatccacggtccattccttgtaatcgcccctctttctacgattactaactgggaacgtgagtttaatacatggactgaaatgaacaccatagtgtaccatggctctctggcctccagacagatgattcagcagtacgagatgtactgcaaagactctcgtggccgattaatcccaggcgcttataagttcgacgctctaataacgacctttgagatgattctcagtgactgtccggaactcagggagatcgagtggaggtgtgtcatcatcgacgaagcccaccgtctgaaaaaccgaaactgtaagctcctggactctctgaaacatatggacctcgagcataaggtcctgctgacagggacccctctgcagaatacggtcgaagagttgttcagtctcctgcacttcctcgaaccttctcagtttccttctgagagtgagtttctcaaggatttcggagatctgaagacggaggaacaggttcagaaactgcaggctattttgaaaccgatgatgctcagaagattgaaagaagacgttgaaaaaaatctggcccctaaacaggaaacaatcattgaagttgagctgaccaatatccagaaaaaatattatagggcgatccttgaaaagaatttctcttttttgtcgaagggagctgggcacactaacatgcctaatctgttgaataccatgatggaactgcggaaatgctgtaatcacccttatctgatcaacggcgctgaggaaaaaatcctcaccgaattcagagaagcgtgtcatattattccccacgacttccatctgcaggcgatggtgcgctcagcgggcaagctggtgctgattgacaaactgctccctaagttgaaagctggggggcataaggttctcatcttttcccaaatggtacgctgcctagatattttagaggactaccttattcaaaggaggtacttgtacgaacgcatcgacgggcgggtgcgcgggaatttgcggcaggctgcaatagaccgcttctccaagcccgactccgatcggttcgtgttcttactctgtactcgggccggaggcctcggcataaatcttactgccgccgatacctgcattatcttcgacagcgattggaacccacagaacgatcttcaagcgcaggcacgctgtcaccggatagggcagagcaaagctgtcaaggtgtaccggctgataacacggaatagctatgaacgtgagatgttcgacaaggcttccctgaagctggggttggataaggccgtgttgcagagtatgagtggccgtgatggcaatattaccggcatacaacaattttcaaagaaggaaatcgaagatctgctccggaagggggcatacgcagccattatggaggaggacgatgaagggagcaagttctgcgaggaagacatcgatcagattttattaaggaggacaactacgatcacaattgaatcagaggggaaaggcagcacatttgccaaggccagctttgtagcctctgagaaccggacagacatcagcctggacgaccccaatttctggcagaaatgggctaaaaaagccgacttggacatggacctgctgaatagtaagaataatttggttatcgacaccccccgcgtccgtaagcagactagacacttcagcacattaaaggatgacgacttagtggaattctccgacttagagagcgaggacgacgagcgtcctaggtcacgacgacacgaccgacaccacgcttacggacggacagactgtttccgcgtggagaagcatctgttggtgtacgggtgggggcgctggcgcgatatcttgtcacacgggcgatttaagagacggatgacagaaagggatgtagagaccatctgtagggctatcctcgtttactgcttgctgcactaccggggagatgaaaacatcaaagggtttatttgggacctgatctctccagctgaaaatggaaagaccaaagaactacaaaaccacagtggattgagcattccagtgccaagaggtaggaagggcaaaaaggtgaaatcacagtcaacctttgatatccacaaggccgattggattcgaaagtataaccccgatactctatttcaggatgagtcatataaaaaacacctaaagcatcaatgtaacaaggttctcctgagggtgagaatgctttactatctgaggcaagaggttattggcgaccaggcagagaaggtcctcggcggagccattgcatctgagattgacatctggtttcccgtggttgaccagctggaagtccctacgacgtggtgggattccgaagcagacaaatcactcctgatcggggtgttcaagcatggttatgagaaatacaacacgatgcgcgcagatcctgccctgtgctttctagaaaaggcgggcagacctgacgacaaagcaatcgccgccgaacatcgcgtcttggacaatttctccgatatcgtggagggtgtcgactttgacaaggattgtgaggaccccgagtataaaccgctgcaggggccccccaaagatcaagatgatgaaggcgaccctctaatgatgatggacgaggagatttcagtgatcgacggcgatgaggcccaggtaactcagcagccgggtcacctcttttggccccccgggtcagctttgaccgcccgcctgagacggcttgtgactgcttaccagaggagctacaagagggaacagatgaagatcgaggctgccgagcggggcgatcgtaggcggagaagatgtgaagcggcattcaagctgaaagagatcgccagacgtgagaagcagcagaggtggacaaggcgcgagcagaccgatttctacagggtggtctccacttttggtgtggagtatgatcccgacacaatgcagtttcattgggatcggttcagaacgttcgcccgcctcgataagaagacagacgaaagcctgacaaagtattttcacggctttgtcgctatgtgtcgtcaagtgtgcagactgccacccgcagctggcgacgagccacctgacccgaacctgttcattgagcccattactgaagaaagggcctccagaacattgtacaggatcgaactgctgagaaggcttcgtgagcaggtgctgtgccatcctctcctcgaggatcgcttagcactgtgccagccccctggtcccgagctgccaaaatggtgggagccagtcagacacgatggagagctgctgcgtggggcagcaaggcatggagtcagtcagaccgactgcaatattatgcaagacccggacttttcttttctggctgcacgtatgaactacatgcaaaatcaccaggccggcgccccagcgccatctctgtctagatgctctacacctttgctgcaccagcagtatactagccgcactgcatccccccttccactgaggcctgatgcccccgtcgaaaagtcacctgaggaaaccgccacccaagtgccttcactggagtctttgactctgaaactcgaacacgaggtagttgccagatcaagaccaaccccccaggattatgagatgcgagtcagtccctccgatacaacccctttagtctcacgctctgtgcctcccgtgaaactggaagatgaagacgattccgactccgaactcgatttatctaagctgtcaccatcttccagctcatcctctagctccagctcctcctcatcatcaacagatgagagcgaggatgaaaaagaggagaagctgaccgaccagtcacggagtaagctctacgacgaagagtcattactgagccttacaatgtcgcaggatggcttccccaacgaagatggagagcagatgactcccgagctccttctgctccaggaacgccaacgggcatccgagtggccaaaggatcgcgtactgatcaaccgtatcgatctcgtgtgccaggcagtgttgagtggaaagtggccctcttcccggaggtctcaggaaatggtgactggggggatcctgggcccaggcaaccatctcctggatagcccttccttgactccaggagagtatggtgattccccggtgcccacccctcggtcgagcagcgcagcatctatggctgaggaggaagcatcggccgtctctacagccgccgcacagttcaccaaattaaggagaggtatggacgagaaggaatttaccgtgcagattaaggatgaggagggcctcaaactgacgttccaaaaacacaagcttatggccaacggggttatgggcgacggccacccgctttttcataagaagaaaggcaataggaagaagttggtagaactggaagtggaatgcatggaagaacctaatcacttagacgtcgatctagagacaaggattccagtgattaacaaggtggatggtactctgctggttggtgaagatgccccacggagggctgagttagagatgtggttgcaaggtcatcctgagttcgctgtagacccccggtttctggcatatatggaggatcgaaggaagcaaaagtggcaacggtgcaaaaaaaacaataaagcggaactgaactgcttaggcatggagcctgtgcagactgccaattcaagaaatggcaaaaaaggccaccatactgagaccgtattcaatagagttctgcctggtcctatcgctccagagtcatctaagaaacgggcccggcgcatgcgtcctgatctttccaagatgatggccctcatgcagggaggttctacaggcagtctgtctctccacaataccttccagcactccagctctggcctgcagagtgtgtccagcctcggacacagttccgctacaagcgcttctttacccttcatgccttttgtgatgggtggggcgccctcatctccacacgtcgactctagcactatgctccaccaccaccaccaccacccccatcctcatcaccatcatcaccatcatccgggtctgagagcacccggctacccatcctcccctgtaacaacggctagcggaaccactttgagactaccccctctgcagcctgaagaagatgacgatgaagatgaagaggacgacgacgacctgtcccaggggtacgattcatctgagcgcgactttagtctgatagatgatcctatgatgcctgccaatagcgacagctccgaggatgcagatgactag

SEQ ID NO: 206532 - DNA, 6906 bp, Artificial Sequence
  derived and/or modified sequence
aaaggggagtccaagagaattacgttagtactacagcagccacagagtggcggtccgcaggggcacaggcatgttgtgctgggctcattacccggaaaaatagtgctccagggaaaccaattggccgcactcacccaggctaagaacgcacagggccagcctgcaaaggtcgtgaccatccaattgcaagtgcagcagcctcagcagaagatacagattgtgccacagccacccagttcccagccccagccgcaacagccaccatctacacagccagttactctgtcaagcgtgcagcaagctcagattatgggaccgggacagtcacctgggcagagattgagtgtgcccgtgaaagtggtcttgcagcctcaggcaggctcatctcagggtgctagctcaggtctgagcgtcgtcaaagtcctgtctgcttccgaagtcgccgctctgagttctcctgctagctctgccccacactccggtggaaaaaccggaatggaagaaaatcggcgattagagcatcagaagaagcaggaaaaagctaaccggatcgtagctgaggcgatagctagagctagggccaggggtgagcagaacattcctcgcgtccttaacgaggatgaactgccatcagttcgtccagaagaagagggagagaagaagagaagaaagaagagcgcaggtgagagactgaaggaggaaaaaccgaaaaagtccaagacgtccggagccagcaaaaccaagggaaagtcgaagcttaatactataaccccagtagtgggaaagaagaggaaaaggaatacatcttcagataacagtgatgtagaagtgatgcccgctcaatccccaagagaggacgaggagtcatccattcagaaacgacgttcgaatagacaggtgaaaagaaagaaatatactgaagacttggacatcaagatcacagatgacgaggaggaggaagaagtggacgtgacgggacccatcaagccagaacccattttgcccgagcctgtgcaagagcctgacggggagacactcccctccatgcagttttttgtagagaacccttccgaggaggacgcagctatcgttgacaaagtgttgagcatgcgaattgtgaagaaagagcttccatcaggccagtacacagaggctgaggagtttttcgtcaagtataagaattacagctacctgcactgcgaatgggcgaccatcagtcagctggaaaaggataaacgaatccaccagaagctgaagcgctttaaaacaaagatggcccagatgaggcatttcttccatgaagacgaggaaccgttcaacccagactatgtggaggtggatcggattctagacgaatctcacagcatcgacaaggataacggggaaccggtgatctactaccttgtaaagtggtgctccctgccctatgaggacagcacatgggaacttaaggaggacgtggatgaggggaagatcagagagtttaagcgcattcagagccgacaccctgaactgaaaagagtcaatcgtccccaggctagcgcttggaaaaaactggaactttcccacgagtataaaaaccgcaatcaactacgcgagtatcagctcgagggcgtcaattggttgttgttcaactggtataatcgccagaattgtatcctcgcagacgagatgggccttggtaaaacaatccagagcatcgctttccttcaggaggtttacaacgtcggaatacacggcccatttctggtgatcgctcccctctcaacaataacaaattgggagcgggagtttaacacttggacagagatgaacacaatcgtgtaccatggatccctggcgtcgagacagatgatccagcagtatgagatgtactgcaaggattctagggggcgactcatccccggtgcttataagtttgatgccctgattactacctttgaaatgatcctatctgactgtccggaactccgtgagatagaatggcgctgcgtgattatagatgaagctcacagacttaagaaccgtaactgcaagcttcttgattcattaaagcacatggacctggagcacaaagtgctcctcacaggcaccccattgcagaatacagttgaggagttgtttagtctgctgcactttctcgaaccctcccagttcccgtcagagagtgagttcctcaaggactttggtgacttaaagacagaggaacaggtgcagaaattgcaggcaatcctaaagccaatgatgctcagaaggcttaaggaagacgtggagaagaacctggccccaaagcaggagactattatcgaggttgaactaacaaatatacagaagaagtactacagagcaattctagaaaaaaacttctcgtttcttagcaagggtgccggacacaccaacatgccgaacttactcaataccatgatggagctgcgtaagtgctgcaaccacccatatctcatcaacggggctgaggaaaagattttgacagaatttcgggaggcttgtcatatcatcccccacgacttccatcttcaggcaatggtgagatcagccggaaaactggtgttgatcgataaattattaccaaaactgaaggccggaggacataaagtgctgatcttcagccagatggtccggtgcctggacatacttgaggattatctcattcagagaaggtacttatacgagcggatcgacggacgagtacgtggcaatttacgtcaggccgcaatcgaccggttttcaaagccggacagtgatcggttcgtttttcttttgtgcacaagggccggtggattggggataaaccttacggcagcagatacctgtatcatatttgacagtgattggaacccacagaatgatttgcaggctcaggcccgatgccatcgcataggccagagtaaagctgtgaaagtgtatagactgatcacaaggaattcctatgaacgagagatgttcgacaaggcaagcctaaaactggggctcgataaggccgttcttcagtcaatgagtggccgagatgggaatattactgggatacaacagttctccaaaaaggagatcgaggacctgctgcggaagggcgcttacgctgctatcatggaagaagatgatgagggcagcaagttctgcgaggaggatattgaccagatcctcctgagaagaaccacaacaattacgatagagtccgaagggaaaggcagtaccttcgcaaaggccagttttgtggcctcagaaaatagaacggacataagtctcgatgaccccaatttctggcagaaatgggctaaaaaagccgacctggacatggacttgctcaactctaagaacaatctcgtcattgataccccgcgtgtgcgtaagcagacacgacacttttccaccctgaaggatgacgatctggtggaattcagcgatctagagtcagaggacgatgagagaccgaggtcccggagacacgatcgccaccacgcctacgggaggacggactgctttagggtggaaaagcaccttttagtgtatggctggggtcgatggagggacattctctctcatggacgcttcaagagaagaatgaccgagcgcgacgtggaaaccatctgtagagccattctagtttattgtctgttgcattatcgcggagatgaaaatataaaggggtttatttgggaccttatcagccctgcagagaacggcaaaactaaggaactgcagaaccacagtgggctatcaattccggtgcctagaggcaggaagggcaagaaggtaaagtcacagagtacctttgacattcacaaggccgattggataaggaaatacaacccagatactctgttccaggacgagtcctacaagaaacatcttaagcatcagtgtaataaagttctcttacgggttcgtatgctgtattacctcagacaggaagttatcggagatcaagccgagaaggtactcggaggagccattgccagcgaaatcgacatctggttcccagtggtggaccagcttgaggtgccaacaacttggtgggattcggaagcggacaaaagcttgctgataggagtgtttaaacatgggtatgagaagtacaacaccatgcgtgctgatccagccctctgtttcctggagaaagctggacgccctgatgacaaggcgatagctgctgagcatcgcgttctggataacttttcagacattgtagaaggtgtcgatttcgacaaagattgcgaagatcccgagtacaaaccgctgcagggcccacctaaagaccaggatgacgaaggagaccccctcatgatgatggacgaagaaatcagcgtcattgacggggatgaggcacaggtgactcagcagcctggacacttgttctggccacccggtagtgcccttactgcgaggctgcgaagacttgttactgcctatcagcggagttacaaacgggagcagatgaaaattgaggctgccgaaaggggtgacaggcgtagacggagatgtgaggccgcatttaagctgaaagagattgccaggcgagaaaaacagcagaggtggacacgtcgggagcagacagacttttacagagtcgtttctactttcggagtcgagtacgatcctgatacaatgcagttccactgggataggtttcggaccttcgcccgtttggacaagaagaccgacgaatctttgacgaagtattttcatgggtttgtggcaatgtgccgacaagtgtgccgacttcctcctgccgcaggagacgagcccccagatccaaatctctttatcgagccaatcacagaagagcgggcaagccgaaccctgtatcgcatagagctgctccggagacttcgggaacaggtgctgtgtcatcctctgttagaggaccgtctcgccctctgtcagccccctggacccgagcttcccaagtggtgggagccggtacggcatgatggtgagctgctcaggggtgccgctagacatggtgtgtctcagaccgattgtaacattatgcaagatcccgactttagctttctggcagctcggatgaactacatgcaaaatcatcaggctggcgctcctgcaccctcattgtccagatgttccacaccgctgctccaccaacagtacactagcagaactgccagtcccctcccgctccggccagatgccccagtcgagaagtcaccagaagagactgccacccaagtgccgagcctcgaatccttgacgctgaagctagagcacgaggtggtcgccaggtctcgtcccactcctcaggactacgaaatgagagtatcaccaagtgatacaactcccttagtctctagatcagtgccccctgtcaagctcgaggacgaagatgacagtgattccgagctggacctgagtaaactgtcaccttcctcatcgagcagcagctcatcgagctccagctcatccagcaccgacgaaagtgaggacgagaaagaggaaaagctcaccgaccaatcacgaagtaaattgtatgatgaagagtccctgctttccctgactatgtctcaagatgggttccccaacgaagacggcgagcagatgactcccgagctgctcctcttgcaggaaagacagcgcgcatctgaatggcccaaggaccgagttttgatcaacagaatcgatttggtgtgtcaggccgtgctgagtgggaagtggccttctagcagacgctctcaagagatggtcacaggcggtatcctaggcccaggcaatcatctgctagatagcccatcccttacccccggagaatacggtgattctcctgttccaactcccaggtcttcgtccgccgcttctatggccgaagaggaagcaagcgcagtttccactgccgctgcgcaattcacaaagctaaggcgaggcatggacgaaaaggaattcaccgtccagatcaaggatgaagaggggctcaaattaacattccagaagcacaagctgatggccaacggagtgatgggggatggccacccattatttcacaaaaagaagggcaatcgaaaaaaattggttgagctggaagtggagtgcatggaagaacctaatcatctggatgttgacctggaaactaggatcccagtaataaataaagtcgacggcactctgctggtgggggaggacgccccaaggcgcgctgagctggagatgtggctgcaaggacatccagaattcgcagtggatcctagattcctcgcctacatggaggacagacggaaacaaaagtggcaacggtgcaaaaaaaacaataaggcggagctgaattgccttggcatggaaccagtacagaccgcgaactcacgcaacggtaagaagggtcatcacaccgaaaccgtgtttaatcgggtactgcccggaccaattgcacccgagtcctccaagaagagggccagaagaatgcgccctgacctctctaagatgatggccctgatgcagggcggaagtaccggtagtctctcactccacaacacatttcagcactcaagctccgggttacagtccgtgagttctctcggtcactcgtcagccacgtccgccagtctgccattcatgcctttcgtgatgggaggcgctccctcctctccgcatgtggactcctctactatgctgcatcaccaccaccatcatcctcatccccatcatcatcaccaccaccaccctggtctgcgcgctcccggttaccctagcagcccagtcacaacagctagcggaaccacgctgcggttacccccactgcagccagaggaggatgatgatgaagacgaggaagatgatgacgacctgagccaagggtatgatagctctgagagggacttcagcttgatagacgaccccatgatgcctgctaatagcgacagctccgaagatgcggatgactac

SEQ ID NO: 206533 - DNA, 6908 bp, Artificial Sequence
  derived and/or modified sequence
atgaaaggggaaagcaaacgcattactctcgtactgcaacaaccacagtcggggggtcctcagggtcatcggcatgtggttctcggctccttaccaggcaaaatcgtcctgcaaggcaaccagctcgccgcacttacacaggctaagaacgcccagggccagcccgcaaaggtcgtgactattcaattgcaggtacagcagccccagcagaagattcagattgttccacagcccccaagttctcaaccgcagccacagcagcctccatccacccagcctgtgacactcagtagtgtgcagcaagcccagattatgggccctggacagtcgccaggacaacgactctccgtcccagtgaaagtcgtgctgcaaccacaggcgggatcctcgcagggcgcatcatcaggactatccgttgtgaaagttctcagcgcgagcgaagtcgccgctctgtcatccccagcctcgtcagccccacactctggaggcaaaacagggatggaggagaaccgtcgcctcgagcatcagaagaaacaggaaaaagccaacagaatcgttgctgaggcgatcgctcgggcaagggccaggggagaacagaatattccgagggttctcaacgaggatgagctgcccagcgtgagacccgaggaagaaggggaaaaaaaacgccgtaagaaaagcgcaggggaacgcttaaaggaggagaaacctaaaaagagcaaaacgagtggagccagcaaaaccaagggaaaatccaagctgaatactattactcccgtagtgggcaaaaagagaaaaaggaataccagtagcgataacagcgacgtggaagttatgcccgcacagtcacccagagaggacgaagagtccagcattcaaaagcgccgtagcaacaggcaggtgaagcgcaagaaatacacagaggacctggacataaaaatcaccgacgacgaagaggaggaggaagttgatgtcacgggccctatcaaaccagaacccattttgccagagcctgtccaggagccggacggtgagactctgcccagtatgcagttttttgtggagaatcctagcgaggaagatgctgctatcgtggataaggtgttgagcatgagaattgtgaagaaggaacttccatccggacagtataccgaggctgaggagttcttcgtgaagtacaaaaattattcttaccttcactgtgagtgggcgacaatcagccaactggaaaaggataaacgaatccatcagaagctgaaacggtttaagactaagatggcacagatgcgtcacttttttcacgaggacgaagaaccgttcaacccggattatgtcgaggtggacagaatactcgacgagtctcactcaattgacaaggacaacggcgagcctgtgatttattatctcgttaaatggtgtagcctgccttacgaggattctacgtgggagctcaaggaggacgttgatgaaggcaagatcagggaattcaaacgtatacagtcacgccaccccgaactgaagcgcgtcaatcggcctcaagcctcagcatggaaaaaactggagctgagccacgagtataagaaccggaaccagctaagagagtaccaactggaaggcgtaaactggttactcttcaactggtacaaccggcagaactgcatattggccgacgaaatggggttggggaagacaatccaaagcatagccttcctgcaggaggtctataatgtaggtattcacgggccttttctcgtgattgcaccactgagcacgatcactaactgggagcgagagttcaacacatggacagaaatgaacactatcgtgtatcatggatcactggccagtcggcagatgatccagcagtacgaaatgtattgcaaagacagcagaggcagactaatccccggtgcctacaaatttgacgccctcatcactacgtttgaaatgatcctttctgattgccccgaactccgcgagatcgaatggcgctgtgttattatcgatgaggctcataggctcaagaatcggaactgtaaactcctcgatagcctcaaacatatggatctggagcacaaggtgttgctcaccggaaccccactccaaaatacggtagaagagctgttttcccttctacattttctcgagccatctcagtttccctccgagtccgagttcctaaaggatttcggtgatcttaagactgaagaacaggttcagaaactccaggctatcctcaagcctatgatgctgagacggctgaaagaagacgtagagaagaacttggcccctaagcaagagacaatcattgaggtcgaattgaccaacattcagaagaaatactaccgggcaatcttggagaaaaacttctcattcctgagcaagggggctggtcacacaaatatgccaaacctcctcaatacaatgatggaactgagaaaatgctgcaaccatccttacctaatcaacggcgctgaagagaaaattctgacagagttcagagaagcatgccacataatcccacacgactttcatctacaagctatggtcagatctgctggtaagcttgtgctgatagacaagctgctcccaaagctgaaggcaggaggccacaaagttctgatattcagtcaaatggttcggtgcctcgatatactggaggattacctgatccaacgtcggtacttatatgaacggatcgacggcagagtaagagggaacctgagacaggctgcgatcgatagattctcaaagcccgattccgaccggttcgtcttcttgctgtgtacccgggctgggggactgggtataaacctcacagccgctgacacatgcatcatctttgacagcgactggaacccgcagaacgacctgcaggctcaggcgaggtgtcatcgaattggtcagtcgaaagctgtcaaggtataccggttgatcaccagaaatagctacgaaagagaaatgtttgacaaagcctctctgaagctcggtctcgataaggctgttctgcaatctatgagtggccgagatgggaatattacgggcatacagcagttttccaagaaagagatcgaagatttactcaggaaaggagcctatgcagctattatggaagaggatgatgaaggatcaaaattctgcgaagaagacatcgatcagattttgctcaggcggactacaaccattacaattgagtccgaaggtaaggggtctacctttgcaaaggcatcctttgtggccagcgagaaccgaacagacattagcctggatgaccctaatttttggcagaaatgggccaagaaagcagacttggacatggatttattaaattccaagaacaatctggtgattgatacgccacgggtccgcaaacagacacggcacttctccactctaaaggatgacgatctagtcgaattttcagatctggaaagcgaagacgacgaacgacccagatcacgtagacacgataggcatcatgcgtatgggagaaccgactgcttccgcgtcgaaaagcacctactagtttacgggtggggtaggtggagagatattctgagtcacggacggttcaaaagacggatgaccgaacgggacgtcgaaactatctgccgggctatattagtctattgccttctgcattatcgaggcgatgagaacatcaaggggtttatttgggatctgatttcccccgcagaaaatggcaaaactaaggagttacagaatcacagcggcctgagcatacctgtgcctcggggacgcaaagggaagaaagtcaaatcacagagcaccttcgatatccataaagctgattggatccgcaagtataatcccgacacactgtttcaggatgagtcctataaaaagcatcttaagcatcagtgtaataaggtgctgttacgggtgcggatgctgtattatcttcgacaagaggtgatcggggaccaggccgaaaaagttctgggtggagcaatcgctagcgagattgatatctggttcccggtggtggatcagctggaggtgcccactacttggtgggacagcgaggctgacaagtcactgctgataggcgtgttcaagcacggctatgagaaatataacaccatgcgggctgacccggctctgtgtttccttgagaaagccggaagacctgacgataaggctatagccgcagagcaccgggtgctggataacttcagcgacattgtagaaggagttgactttgacaaagactgtgaggatccagagtataaacccctccagggcccacctaaggaccaggacgatgaaggcgatcccctcatgatgatggatgaggagatcagtgtaatagacggggacgaggcccaggtcacacagcagcctggccatttattttggcctccaggtagtgcactcaccgctaggttacggagactggtgactgcttatcagcgatcttacaagagggagcaaatgaagattgaagctgcggagaggggagaccggagacgaaggcgctgcgaggctgcattcaagcttaaagaaatcgcacgtagggagaagcagcagagatggactagacgtgagcagacagacttttatcgcgtcgtgtccacgtttggcgtcgaatacgaccccgacaccatgcagtttcactgggatcgttttcgtaccttcgccaggttggataagaaaacagatgagtcattgaccaagtattttcacggctttgtcgccatgtgcaggcaggtctgtagattgccaccagctgcgggagatgagcctcctgacccaaatctgtttattgagccaatcaccgaggaacgcgcaagtcgaactttgtatcgaatagagctgctgaggcgcttgcgtgaacaggtgttatgccaccctttgttggaggatcgactggccctttgccagcccccaggtccagaactgcccaaatggtgggaacccgtgaggcatgacggcgagttgttgcggggtgctgcccgtcatggggtgtctcaaactgactgcaacatcatgcaggatcctgacttcagtttcctggcagcgcgaatgaactatatgcagaaccatcaggctggcgctccagccccttccctttctcgctgttccacacctttgctgcaccagcagtacacatcacgcaccgcaagccctttgcccctgagacccgatgctcctgtcgaaaagagtcctgaagaaacggctacccaggttccctccctagaatctctcacattaaagcttgaacacgaagtggtggccagatctcgcccaaccccacaggattacgaaatgagggttagcccatccgacacaacgcctcttgttagcaggtcggtccctcctgtcaagcttgaagatgaagatgactctgattccgaactcgatctttcaaagctctcaccttctagctccagttcaagctcatccagttcaagttcgtccagcacggatgagtctgaggatgagaaggaggagaaactcactgaccaatccagaagcaagctgtacgacgaggaaagcttgctgtctttgactatgtcccaagacgggttccctaatgaggacggtgagcaaatgacccctgagctgctgttgctgcaggagcgacagcgtgcctctgaatggccaaaggaccgagttctgataaacaggattgatctggtatgtcaggcagtcttatcaggcaaatggccaagctctaggcgatctcaggaaatggtgaccggcggaatccttggtcctggcaaccatctgctggatagcccttctctaaccccaggggaatatggcgactctccagtccccacacccagatcctcatccgctgcatctatggctgaggaagaagcctcggcagtatcaaccgcagcggcacaattcaccaagttgcggaggggtatggatgagaaggagttcactgtgcagattaaagacgaggaaggcctgaaactgacttttcagaagcataaactcatggccaacggtgtgatgggggatgggcacccactgtttcacaagaaaaaaggcaaccggaagaaactggttgagttagaggttgaatgtatggaagaaccaaaccatctcgatgtggatctcgaaacccggatccctgtgattaataaagtggatggcaccctactggtgggcgaagacgctcctcgcagagccgagctggagatgtggctgcagggacaccccgaatttgcggtagatcctcggttcctggcttacatggaggatcgcaggaaacagaaatggcagaggtgcaagaaaaataacaaagctgaactgaactgtctaggaatggagccggtgcagacagcgaatagcagaaatggaaagaagggacatcacaccgaaaccgtgtttaaccgcgtgttgcctgggccaattgcaccagaatccagtaagaaacgcgctcgaagaatgagacccgatctgagcaaaatgatggcgctgatgcaagggggttccacaggcagccttagtttacataacacgttccagcattcatccagcgggcttcagagcgtctcctcacttggacacagttccgctacctccgcctcgctcccatttatgcctttcgtgatggggggtgctccatcgtctccacacgtagatagctccaccatgctgcaccatcaccaccatcacccacatcctcaccatcatcaccaccaccatcccggattaagagcacctggatacccatctagccctgtcactactgcctctgggaccactcttcgactgcccccactgcagccagaggaggatgatgacgaggacgaagaggacgatgatgaccttagtcagggctatgacagctccgagagggacttttccctcatcgacgatcctatgatgccagctaattctgattccagcgaggacgcagacgacta

SEQ ID NO: 206534 - DNA, 7324 bp, Artificial Sequence
  derived and/or modified sequence
aaaggtgaatcgaaacgcatcaccctggtcctccagcagccacagtctggaggtccccaaggacatcggcatgttgtgctagggagtctaccaggcaagatagtgttacagggcaaccagctggcagccctgactcaagccaagaatgcccaagggcagcctgccaaggtagtaactatccagctgcaggtgcagcagccacagcaaaaaatccagattgtaccacaaccaccatcatcgcagccacagccccagcagccaccctccacccagccagtgactctgtcctctgtacagcaggctcagataatgggaccaggacaaagcccaggacaaagactttcagtaccagtcaaggtggtactgcagccacaggctggctcttcccaaggggcctcttctgggctctctgtagttaaagttctgagtgccagtgaagtggcagctttgtcatcaccagcaagctctgctcctcattcggggggaaagacaggaatggaggaaaaccgcagattggaacaccagaagaagcaagagaaagcaaatcggattgtagcagaggccattgcgagagcccgtgcccgcggtgagcagaacatacctcgagtcttaaatgaggacgagttgcccagcgttcggccagaggaggaaggcgagaagaaacgcaggaagaagagtgctggggagaggctgaaagaggagaagccaaagaagagtaaaacatctggtgcctccaaaacaaagggcaagagcaagctcaacaccatcactcctgtagtgggtaagaagagaaaacgtaatacctcatctgataattcagatgtggaagtcatgcctgcacagtcacctcgagaagatgaagaaagcagcattcagaagagacgctcaaaccgccaagttaagcgaaaaaaatatacagaggacctggatataaagatcacagatgatgaagaagaagaagaggtggatgtaactggtccaataaaacctgagcctatcctccctgaaccagtgcaagaaccagatggcgagactttgccttccatgcagttctttgtggagaatcccagtgaagaagatgcagccattgtagacaaagtgctttctatgcggattgtgaagaaggagctcccttctggacaatatactgaagcagaagaattctttgtcaagtacaagaactactcctatctgcattgtgaatgggctactatctcccaactagagaaggataagaggatacatcaaaaattaaagcgcttcaaaaccaaaatggctcagatgagacacttcttccatgaggatgaagagccctttaatccagactacgtagaggtggataggatattggatgagtctcacagtattgacaaggacaatggggagcccgttatttactacctggtgaaatggtgctctctgccctatgaggatagcacatgggagctaaaagaagatgttgatgagggcaagattcgagaatttaaacggattcagtcaaggcacccagaactcaaaagggtgaatcgtccgcaggcaagtgcctggaagaaattggagctatcacatgaatataaaaacagaaaccagctacgggaatatcagttggaaggggttaattggctgctctttaattggtataacaggcagaactgcatcctggctgatgagatgggattgggcaaaactattcagtccattgccttcttgcaggaagtatataatgtgggcatccatggtcccttcttggtcattgccccactgtccacaattactaactgggagcgagaatttaatacatggacagaaatgaacactattgtgtaccatggcagtctggccagcaggcagatgattcaacagtatgaaatgtactgcaaagattcacggggacgcctcatcccaggcgcatacaagtttgacgctctgatcaccacttttgagatgattttgtcagattgtcctgagcttcgtgaaattgaatggcgttgtgttatcattgatgaagcccatcgactgaaaaaccgtaattgcaagctgcttgatagtctcaagcacatggacctggaacacaaggtgctactcacaggaacaccattgcaaaatactgtagaagaactgtttagcttgcttcatttcttggaaccgtcacaatttccctcagaatcagagtttctcaaggactttggggatctcaagacagaggaacaggttcaaaagctacaggccattcttaagccaatgatgctgagaagactcaaagaggatgttgaaaaaaacttggcacccaaacaggaaacaattattgaagtagagctgactaatatccagaagaaatactatcgggctattttggagaagaatttctccttcctttccaaaggggcaggtcataccaacatgcctaatctacttaacacaatgatggagttgcgcaagtgctgcaaccacccatatctcatcaatggtgctgaagaaaaaatcctaacagaattccgtgaagcttgccatattatacctcatgactttcacctgcaggccatggttcgttcagccggcaaactggttcttattgacaagttgcttccaaagcttaaagctggtggccataaagttctgatcttctctcagatggtgcgctgcctagacatcctagaggattatttaatccagaggaggtacttatatgaacgtattgatgggcgagttagaggcaaccttcgacaggctgccattgaccgcttcagcaagcctgactcagaccgctttgtcttcttactgtgtacccgggctggtggacttggtattaatcttacagctgctgatacctgcatcatctttgattcagactggaatccacaaaatgacctgcaggcccaggcacgatgtcatcgaattgggcagagcaaagctgtgaaggtgtaccgcctcatcactcgtaattcctacgagagagagatgtttgataaggccagcctcaagttggggttggataaggctgtgcttcaatccatgagtggtcgggatggcaacattactggaatccaacagttctctaagaaggagattgaagatcttttaagaaaaggagcatatgcagccatcatggaggaagatgatgaaggctccaagttttgtgaagaggacattgaccagatcttgttaagacgaactacaaccatcaccattgaatctgaaggaaaaggttccacctttgctaaggcaagctttgttgcttctgaaaacaggacagatatttctttggatgaccccaacttttggcaaaagtgggccaaaaaggctgacctagacatggatctgctcaacagcaagaataatttggtaattgacacacctagagtacgaaaacaaacgcgccactttagcactctgaaagatgatgacctggtggaattctctgatttggaaagtgaggatgatgagcggccacgctcccgcagacatgaccgtcatcatgcctatgggcgcactgactgctttcgggtggaaaagcatctcctggtatatggttggggacgatggcgagatattttatctcatggacgcttcaagcgacgtatgactgaacgagatgtggagaccatttgtcgggccattctcgtgtactgtcttctacactaccgtggggatgaaaatattaaaggcttcatctgggacttgattagcccagctgaaaatggcaagacaaaagaattgcagaatcattcaggtctatctatccctgtgcctcgtggacgcaaaggaaaaaaagtaaagtcacaaagcacttttgatatccataaggcagattggatccggaaatataaccctgacactttgttccaagatgaaagttataagaagcacttgaaacatcagtgtaacaaggtactgttgcgggtacgaatgctatactacctgaggcaggaggttattggagaccaagcagaaaaggtgttagggggtgcgattgccagtgagattgacatatggttcccagtagtggatcaactggaggttccaacaacttggtgggacagtgaggctgacaagtcgctgctcattggagtctttaaacatggctatgagaaatataataccatgagggcagacccagccttatgtttcctagaaaaggctggccgaccagatgacaaagcaattgcagcagaacatcgagtgttggataacttctctgacatagtagaaggggttgactttgataaagattgtgaagatcctgaatataaaccactccaaggtcccccaaaggaccaagatgatgagggtgatcccttgatgatgatggatgaggagatctcagtgattgatggagatgaagcccaggtgacccaacagccaggccatttattctggcctccgggctctgccctaacagctaggcttcggcgtctagtaacagcgtatcagcgcagctacaagagagaacaaatgaagatagaggctgcagaacgtggggaccggcgaaggcggcgttgtgaagcagccttcaagctgaaagaaattgcacggcgggagaaacaacaacgatggacaaggcgtgaacaaactgatttttatcgagtggtgtctacgtttggtgtggaatatgaccctgacaccatgcagttccattgggatcgcttccgcacttttgctcgactagacaaaaagacagatgaaagccttaccaagtacttccatggctttgtggccatgtgccgccaagtatgccgccttcccccagcagctggagatgaaccccccgaccctaacctgttcattgagcccatcactgaggagagagcctcacggactctctaccgtatagaattgcttcggcgcttacgggaacaagttttatgccacccccttttggaagatcggctggcattgtgtcagcctcctggtcctgaattgcccaaatggtgggagcctgttcggcatgatggggagcttctaagaggggcagcccgccatggggtgagccaaacagactgcaacatcatgcaggacccagacttctcttttctggctgcccgtatgaattatatgcagaaccatcaagcaggagcaccagctccatccttgtcacgctgctctactccactgctgcaccagcagtatacctcacgcactgcctcaccactgcccctgcgcccagatgctcctgttgaaaagtcacccgaggagacagctacccaggtccccagtctggagagtctgactttaaagctagagcacgaggtggtggccaggagccgaccaaccccacaagactatgagatgcgagtatccccctctgatactacccctctggtttcccggagtgttccaccagtcaaactggaggatgaggatgattcggactctgagctggacttgagcaagctgtcaccatcttcttcttcttcctcatcctcatccagctccagctccagcactgatgagagtgaggatgagaaggaagagaagctaactgaccagtcccgctcaaagctctatgatgaagagagtctcctgtccctcactatgtcccaagatggattcccaaatgaagatggagaacaaatgacccctgagcttctgctactgcaggaaagacaaagagcctctgagtggcccaaggatcgtgtcctgataaaccgtattgacctcgtctgccaggctgtactctcagggaagtggccttctagccgtaggagccaggaaatggtaacaggaggaattttggggccaggcaaccacttgctagacagtccctcattgactcctggagaatatggtgactctccagtccccacaccacgaagtagtagtgcagcttccatggcagaggaggaagcatctgcagtcagcacagcggcagcccagttcaccaaacttcgccgaggcatggatgaaaaggagtttacagttcaaatcaaagatgaggaaggattgaagttaacattccagaagcacaagttgatggcgaatggagtaatgggagatggacatccactgtttcataagaagaaggggaacagaaagaagctagtagagctggaggtggagtgcatggaagagcctaatcaccttgatgtggacctggagacccggatccctgtcatcaataaggtggatggtactttgctggtgggtgaggatgcccctcgccgggctgaactggagatgtggttacagggtcatccagagtttgctgttgatccccgatttctagcgtatatggaggatcgcagaaaacagaagtggcaaagatgtaaaaaaaataataaggcagaattgaactgtttgggaatggaaccagtacagacagctaactctagaaatgggaaaaagggtcatcacactgaaacggtgttcaaccgggttttgccagggcctattgcaccagagagcagcaagaagcgggcccgtaggatgcgaccagacctttctaagatgatggccctcatgcagggtggaagcactgggtctctatctctgcataacacgttccaacacagcagtagtggcctacagtctgtgtcatctttgggtcacagcagtgccacttctgcatctttgccttttatgccatttgtgatgggtggtgcaccatcatcccctcatgtagactccagcaccatgcttcatcaccaccaccaccacccccacccccaccatcaccaccatcaccatccaggcttgagagcccctggctacccctcttcaccagtgactaccgcctctggtactaccttgcggttgccaccactgcaacctgaggaggatgacgatgaggatgaagaagatgatgatgacttatctcagggctatgatagctcagaaagggacttctcactcattgatgatcctatgatgccagctaactcagactccagtgaagatgctgatgactgaagccccagcatgggccccattgcttgggcggctgctgtattttcatttactctggcccttggactatggaaacgtgggaggggcaggggagatgtggggaagtccaggactccaggaggtgaaaaggaaaaaaaaaaaaaaatgtacctgattgctcccaattatgagaggattgggtgggcaggggaactcctaaaataatacatgaccacttcctcatttctggggaaggaaaggagactagagcagctggtgtgctcacccctccctagtcacctccattaaccacagactatgtagcgctggccctagcctctggcagagcctgttcctggccgaactgtggatacagctggagggtcaggaactgttaccttctttccccttggcattaataaatttaagttaatccttttcc

SEQ ID NO: 206535 - DNA, 6906 bp, Artificial Sequence
  derived and/or modified sequence
aagggcgagagcaagagaatcaccctggtgctgcagcagccccagagcggcggcccccagggccacagacacgtggtgctgggcagcctgcccggcaagatcgtgctgcagggcaaccagctggccgccctgacccaggccaagaacgcccagggccagcccgccaaggtggtgaccatccagctgcaggtgcagcagccccagcagaagatccagatcgtgccccagccccccagcagccagccccagccccagcagccccccagcacccagcccgtgaccctgagcagcgtgcagcaggcccagatcatgggccccggccagagccccggccagagactgagcgtgcccgtgaaggtggtgctgcagccccaggccggcagcagccagggcgccagcagcggcctgagcgtggtgaaggtgctgagcgccagcgaggtggccgccctgagcagccccgccagcagcgccccccacagcggcggcaagaccggcatggaggagaacagaagactggagcaccagaagaagcaggagaaggccaacagaatcgtggccgaggccatcgccagagccagagccagaggcgagcagaacatccccagagtgctgaacgaggacgagctgcccagcgtgagacccgaggaggagggcgagaagaagagaagaaagaagagcgccggcgagagactgaaggaggagaagcccaagaagagcaagaccagcggcgccagcaagaccaagggcaagagcaagctgaacaccatcacccccgtggtgggcaagaagagaaagagaaacaccagcagcgacaacagcgacgtggaggtgatgcccgcccagagccccagagaggacgaggagagcagcatccagaagagaagaagcaacagacaggtgaagagaaagaagtacaccgaggacctggacatcaagatcaccgacgacgaggaggaggaggaggtggacgtgaccggccccatcaagcccgagcccatcctgcccgagcccgtgcaggagcccgacggcgagaccctgcccagcatgcagttcttcgtggagaaccccagcgaggaggacgccgccatcgtggacaaggtgctgagcatgagaatcgtgaagaaggagctgcccagcggccagtacaccgaggccgaggagttcttcgtgaagtacaagaactacagctacctgcactgcgagtgggccaccatcagccagctggagaaggacaagagaatccaccagaagctgaagagattcaagaccaagatggcccagatgagacacttcttccacgaggacgaggagcccttcaaccccgactacgtggaggtggacagaatcctggacgagagccacagcatcgacaaggacaacggcgagcccgtgatctactacctggtgaagtggtgcagcctgccctacgaggacagcacctgggagctgaaggaggacgtggacgagggcaagatcagagagttcaagagaatccagagcagacaccccgagctgaagagagtgaacagaccccaggccagcgcctggaagaagctggagctgagccacgagtacaagaacagaaaccagctgagagagtaccagctggagggcgtgaactggctgctgttcaactggtacaacagacagaactgcatcctggccgacgagatgggcctgggcaagaccatccagagcatcgccttcctgcaggaggtgtacaacgtgggcatccacggccccttcctggtgatcgcccccctgagcaccatcaccaactgggagagagagttcaacacctggaccgagatgaacaccatcgtgtaccacggcagcctggccagcagacagatgatccagcagtacgagatgtactgcaaggacagcagaggcagactgatccccggcgcctacaagttcgacgccctgatcaccaccttcgagatgatcctgagcgactgccccgagctgagagagatcgagtggagatgcgtgatcatcgacgaggcccacagactgaagaacagaaactgcaagctgctggacagcctgaagcacatggacctggagcacaaggtgctgctgaccggcacccccctgcagaacaccgtggaggagctgttcagcctgctgcacttcctggagcccagccagttccccagcgagagcgagttcctgaaggacttcggcgacctgaagaccgaggagcaggtgcagaagctgcaggccatcctgaagcccatgatgctgagaagactgaaggaggacgtggagaagaacctggcccccaagcaggagaccatcatcgaggtggagctgaccaacatccagaagaagtactacagagccatcctggagaagaacttcagcttcctgagcaagggcgccggccacaccaacatgcccaacctgctgaacaccatgatggagctgagaaagtgctgcaaccacccctacctgatcaacggcgccgaggagaagatcctgaccgagttcagagaggcctgccacatcatcccccacgacttccacctgcaggccatggtgagaagcgccggcaagctggtgctgatcgacaagctgctgcccaagctgaaggccggcggccacaaggtgctgatcttcagccagatggtgagatgcctggacatcctggaggactacctgatccagagaagatacctgtacgagagaatcgacggcagagtgagaggcaacctgagacaggccgccatcgacagattcagcaagcccgacagcgacagattcgtgttcctgctgtgcaccagagccggcggcctgggcatcaacctgaccgccgccgacacctgcatcatcttcgacagcgactggaacccccagaacgacctgcaggcccaggccagatgccacagaatcggccagagcaaggccgtgaaggtgtacagactgatcaccagaaacagctacgagagagagatgttcgacaaggccagcctgaagctgggcctggacaaggccgtgctgcagagcatgagcggcagagacggcaacatcaccggcatccagcagttcagcaagaaggagatcgaggacctgctgagaaagggcgcctacgccgccatcatggaggaggacgacgagggcagcaagttctgcgaggaggacatcgaccagatcctgctgagaagaaccaccaccatcaccatcgagagcgagggcaagggcagcaccttcgccaaggccagcttcgtggccagcgagaacagaaccgacatcagcctggacgaccccaacttctggcagaagtgggccaagaaggccgacctggacatggacctgctgaacagcaagaacaacctggtgatcgacacccccagagtgagaaagcagaccagacacttcagcaccctgaaggacgacgacctggtggagttcagcgacctggagagcgaggacgacgagagacccagaagcagaagacacgacagacaccacgcctacggcagaaccgactgcttcagagtggagaagcacctgctggtgtacggctggggcagatggagagacatcctgagccacggcagattcaagagaagaatgaccgagagagacgtggagaccatctgcagagccatcctggtgtactgcctgctgcactacagaggcgacgagaacatcaagggcttcatctgggacctgatcagccccgccgagaacggcaagaccaaggagctgcagaaccacagcggcctgagcatccccgtgcccagaggcagaaagggcaagaaggtgaagagccagagcaccttcgacatccacaaggccgactggatcagaaagtacaaccccgacaccctgttccaggacgagagctacaagaagcacctgaagcaccagtgcaacaaggtgctgctgagagtgagaatgctgtactacctgagacaggaggtgatcggcgaccaggccgagaaggtgctgggcggcgccatcgccagcgagatcgacatctggttccccgtggtggaccagctggaggtgcccaccacctggtgggacagcgaggccgacaagagcctgctgatcggcgtgttcaagcacggctacgagaagtacaacaccatgagagccgaccccgccctgtgcttcctggagaaggccggcagacccgacgacaaggccatcgccgccgagcacagagtgctggacaacttcagcgacatcgtggagggcgtggacttcgacaaggactgcgaggaccccgagtacaagcccctgcagggcccccccaaggaccaggacgacgagggcgaccccctgatgatgatggacgaggagatcagcgtgatcgacggcgacgaggcccaggtgacccagcagcccggccacctgttctggccccccggcagcgccctgaccgccagactgagaagactggtgaccgcctaccagagaagctacaagagagagcagatgaagatcgaggccgccgagagaggcgacagaagaagaagaagatgcgaggccgccttcaagctgaaggagatcgccagaagagagaagcagcagagatggaccagaagagagcagaccgacttctacagagtggtgagcaccttcggcgtggagtacgaccccgacaccatgcagttccactgggacagattcagaaccttcgccagactggacaagaagaccgacgagagcctgaccaagtacttccacggcttcgtggccatgtgcagacaggtgtgcagactgccccccgccgccggcgacgagccccccgaccccaacctgttcatcgagcccatcaccgaggagagagccagcagaaccctgtacagaatcgagctgctgagaagactgagagagcaggtgctgtgccaccccctgctggaggacagactggccctgtgccagccccccggccccgagctgcccaagtggtgggagcccgtgagacacgacggcgagctgctgagaggcgccgccagacacggcgtgagccagaccgactgcaacatcatgcaggaccccgacttcagcttcctggccgccagaatgaactacatgcagaaccaccaggccggcgcccccgcccccagcctgagcagatgcagcacccccctgctgcaccagcagtacaccagcagaaccgccagccccctgcccctgagacccgacgcccccgtggagaagagccccgaggagaccgccacccaggtgcccagcctggagagcctgaccctgaagctggagcacgaggtggtggccagaagcagacccaccccccaggactacgagatgagagtgagccccagcgacaccacccccctggtgagcagaagcgtgccccccgtgaagctggaggacgaggacgacagcgacagcgagctggacctgagcaagctgagccccagcagcagcagcagcagcagcagcagcagcagcagcagcagcaccgacgagagcgaggacgagaaggaggagaagctgaccgaccagagcagaagcaagctgtacgacgaggagagcctgctgagcctgaccatgagccaggacggcttccccaacgaggacggcgagcagatgacccccgagctgctgctgctgcaggagagacagagagccagcgagtggcccaaggacagagtgctgatcaacagaatcgacctggtgtgccaggccgtgctgagcggcaagtggcccagcagcagaagaagccaggagatggtgaccggcggcatcctgggccccggcaaccacctgctggacagccccagcctgacccccggcgagtacggcgacagccccgtgcccacccccagaagcagcagcgccgccagcatggccgaggaggaggccagcgccgtgagcaccgccgccgcccagttcaccaagctgagaagaggcatggacgagaaggagttcaccgtgcagatcaaggacgaggagggcctgaagctgaccttccagaagcacaagctgatggccaacggcgtgatgggcgacggccaccccctgttccacaagaagaagggcaacagaaagaagctggtggagctggaggtggagtgcatggaggagcccaaccacctggacgtggacctggagaccagaatccccgtgatcaacaaggtggacggcaccctgctggtgggcgaggacgcccccagaagagccgagctggagatgtggctgcagggccaccccgagttcgccgtggaccccagattcctggcctacatggaggacagaagaaagcagaagtggcagagatgcaagaagaacaacaaggccgagctgaactgcctgggcatggagcccgtgcagaccgccaacagcagaaacggcaagaagggccaccacaccgagaccgtgttcaacagagtgctgcccggccccatcgcccccgagagcagcaagaagagagccagaagaatgagacccgacctgagcaagatgatggccctgatgcagggcggcagcaccggcagcctgagcctgcacaacaccttccagcacagcagcagcggcctgcagagcgtgagcagcctgggccacagcagcgccaccagcgccagcctgcccttcatgcccttcgtgatgggcggcgcccccagcagcccccacgtggacagcagcaccatgctgcaccaccaccaccaccacccccacccccaccaccaccaccaccaccaccccggcctgagagcccccggctaccccagcagccccgtgaccaccgccagcggcaccaccctgagactgccccccctgcagcccgaggaggacgacgacgaggacgaggaggacgacgacgacctgagccagggctacgacagcagcgagagagacttcagcctgatcgacgaccccatgatgcccgccaacagcgacagcagcgaggacgccgacgactag

SEQ ID NO: 206536 - DNA, 6909 bp, Artificial Sequence
  derived and/or modified sequence
atgaagggcgagagcaagagaatcaccctggtgctgcagcagccccagagcggcggcccccagggccacagacacgtggtgctgggcagcctgcccggcaagatcgtgctgcagggcaaccagctggccgccctgacccaggccaagaacgcccagggccagcccgccaaggtggtgaccatccagctgcaggtgcagcagccccagcagaagatccagatcgtgccccagccccccagcagccagccccagccccagcagccccccagcacccagcccgtgaccctgagcagcgtgcagcaggcccagatcatgggccccggccagagccccggccagagactgagcgtgcccgtgaaggtggtgctgcagccccaggccggcagcagccagggcgccagcagcggcctgagcgtggtgaaggtgctgagcgccagcgaggtggccgccctgagcagccccgccagcagcgccccccacagcggcggcaagaccggcatggaggagaacagaagactggagcaccagaagaagcaggagaaggccaacagaatcgtggccgaggccatcgccagagccagagccagaggcgagcagaacatccccagagtgctgaacgaggacgagctgcccagcgtgagacccgaggaggagggcgagaagaagagaagaaagaagagcgccggcgagagactgaaggaggagaagcccaagaagagcaagaccagcggcgccagcaagaccaagggcaagagcaagctgaacaccatcacccccgtggtgggcaagaagagaaagagaaacaccagcagcgacaacagcgacgtggaggtgatgcccgcccagagccccagagaggacgaggagagcagcatccagaagagaagaagcaacagacaggtgaagagaaagaagtacaccgaggacctggacatcaagatcaccgacgacgaggaggaggaggaggtggacgtgaccggccccatcaagcccgagcccatcctgcccgagcccgtgcaggagcccgacggcgagaccctgcccagcatgcagttcttcgtggagaaccccagcgaggaggacgccgccatcgtggacaaggtgctgagcatgagaatcgtgaagaaggagctgcccagcggccagtacaccgaggccgaggagttcttcgtgaagtacaagaactacagctacctgcactgcgagtgggccaccatcagccagctggagaaggacaagagaatccaccagaagctgaagagattcaagaccaagatggcccagatgagacacttcttccacgaggacgaggagcccttcaaccccgactacgtggaggtggacagaatcctggacgagagccacagcatcgacaaggacaacggcgagcccgtgatctactacctggtgaagtggtgcagcctgccctacgaggacagcacctgggagctgaaggaggacgtggacgagggcaagatcagagagttcaagagaatccagagcagacaccccgagctgaagagagtgaacagaccccaggccagcgcctggaagaagctggagctgagccacgagtacaagaacagaaaccagctgagagagtaccagctggagggcgtgaactggctgctgttcaactggtacaacagacagaactgcatcctggccgacgagatgggcctgggcaagaccatccagagcatcgccttcctgcaggaggtgtacaacgtgggcatccacggccccttcctggtgatcgcccccctgagcaccatcaccaactgggagagagagttcaacacctggaccgagatgaacaccatcgtgtaccacggcagcctggccagcagacagatgatccagcagtacgagatgtactgcaaggacagcagaggcagactgatccccggcgcctacaagttcgacgccctgatcaccaccttcgagatgatcctgagcgactgccccgagctgagagagatcgagtggagatgcgtgatcatcgacgaggcccacagactgaagaacagaaactgcaagctgctggacagcctgaagcacatggacctggagcacaaggtgctgctgaccggcacccccctgcagaacaccgtggaggagctgttcagcctgctgcacttcctggagcccagccagttccccagcgagagcgagttcctgaaggacttcggcgacctgaagaccgaggagcaggtgcagaagctgcaggccatcctgaagcccatgatgctgagaagactgaaggaggacgtggagaagaacctggcccccaagcaggagaccatcatcgaggtggagctgaccaacatccagaagaagtactacagagccatcctggagaagaacttcagcttcctgagcaagggcgccggccacaccaacatgcccaacctgctgaacaccatgatggagctgagaaagtgctgcaaccacccctacctgatcaacggcgccgaggagaagatcctgaccgagttcagagaggcctgccacatcatcccccacgacttccacctgcaggccatggtgagaagcgccggcaagctggtgctgatcgacaagctgctgcccaagctgaaggccggcggccacaaggtgctgatcttcagccagatggtgagatgcctggacatcctggaggactacctgatccagagaagatacctgtacgagagaatcgacggcagagtgagaggcaacctgagacaggccgccatcgacagattcagcaagcccgacagcgacagattcgtgttcctgctgtgcaccagagccggcggcctgggcatcaacctgaccgccgccgacacctgcatcatcttcgacagcgactggaacccccagaacgacctgcaggcccaggccagatgccacagaatcggccagagcaaggccgtgaaggtgtacagactgatcaccagaaacagctacgagagagagatgttcgacaaggccagcctgaagctgggcctggacaaggccgtgctgcagagcatgagcggcagagacggcaacatcaccggcatccagcagttcagcaagaaggagatcgaggacctgctgagaaagggcgcctacgccgccatcatggaggaggacgacgagggcagcaagttctgcgaggaggacatcgaccagatcctgctgagaagaaccaccaccatcaccatcgagagcgagggcaagggcagcaccttcgccaaggccagcttcgtggccagcgagaacagaaccgacatcagcctggacgaccccaacttctggcagaagtgggccaagaaggccgacctggacatggacctgctgaacagcaagaacaacctggtgatcgacacccccagagtgagaaagcagaccagacacttcagcaccctgaaggacgacgacctggtggagttcagcgacctggagagcgaggacgacgagagacccagaagcagaagacacgacagacaccacgcctacggcagaaccgactgcttcagagtggagaagcacctgctggtgtacggctggggcagatggagagacatcctgagccacggcagattcaagagaagaatgaccgagagagacgtggagaccatctgcagagccatcctggtgtactgcctgctgcactacagaggcgacgagaacatcaagggcttcatctgggacctgatcagccccgccgagaacggcaagaccaaggagctgcagaaccacagcggcctgagcatccccgtgcccagaggcagaaagggcaagaaggtgaagagccagagcaccttcgacatccacaaggccgactggatcagaaagtacaaccccgacaccctgttccaggacgagagctacaagaagcacctgaagcaccagtgcaacaaggtgctgctgagagtgagaatgctgtactacctgagacaggaggtgatcggcgaccaggccgagaaggtgctgggcggcgccatcgccagcgagatcgacatctggttccccgtggtggaccagctggaggtgcccaccacctggtgggacagcgaggccgacaagagcctgctgatcggcgtgttcaagcacggctacgagaagtacaacaccatgagagccgaccccgccctgtgcttcctggagaaggccggcagacccgacgacaaggccatcgccgccgagcacagagtgctggacaacttcagcgacatcgtggagggcgtggacttcgacaaggactgcgaggaccccgagtacaagcccctgcagggcccccccaaggaccaggacgacgagggcgaccccctgatgatgatggacgaggagatcagcgtgatcgacggcgacgaggcccaggtgacccagcagcccggccacctgttctggccccccggcagcgccctgaccgccagactgagaagactggtgaccgcctaccagagaagctacaagagagagcagatgaagatcgaggccgccgagagaggcgacagaagaagaagaagatgcgaggccgccttcaagctgaaggagatcgccagaagagagaagcagcagagatggaccagaagagagcagaccgacttctacagagtggtgagcaccttcggcgtggagtacgaccccgacaccatgcagttccactgggacagattcagaaccttcgccagactggacaagaagaccgacgagagcctgaccaagtacttccacggcttcgtggccatgtgcagacaggtgtgcagactgccccccgccgccggcgacgagccccccgaccccaacctgttcatcgagcccatcaccgaggagagagccagcagaaccctgtacagaatcgagctgctgagaagactgagagagcaggtgctgtgccaccccctgctggaggacagactggccctgtgccagccccccggccccgagctgcccaagtggtgggagcccgtgagacacgacggcgagctgctgagaggcgccgccagacacggcgtgagccagaccgactgcaacatcatgcaggaccccgacttcagcttcctggccgccagaatgaactacatgcagaaccaccaggccggcgcccccgcccccagcctgagcagatgcagcacccccctgctgcaccagcagtacaccagcagaaccgccagccccctgcccctgagacccgacgcccccgtggagaagagccccgaggagaccgccacccaggtgcccagcctggagagcctgaccctgaagctggagcacgaggtggtggccagaagcagacccaccccccaggactacgagatgagagtgagccccagcgacaccacccccctggtgagcagaagcgtgccccccgtgaagctggaggacgaggacgacagcgacagcgagctggacctgagcaagctgagccccagcagcagcagcagcagcagcagcagcagcagcagcagcagcaccgacgagagcgaggacgagaaggaggagaagctgaccgaccagagcagaagcaagctgtacgacgaggagagcctgctgagcctgaccatgagccaggacggcttccccaacgaggacggcgagcagatgacccccgagctgctgctgctgcaggagagacagagagccagcgagtggcccaaggacagagtgctgatcaacagaatcgacctggtgtgccaggccgtgctgagcggcaagtggcccagcagcagaagaagccaggagatggtgaccggcggcatcctgggccccggcaaccacctgctggacagccccagcctgacccccggcgagtacggcgacagccccgtgcccacccccagaagcagcagcgccgccagcatggccgaggaggaggccagcgccgtgagcaccgccgccgcccagttcaccaagctgagaagaggcatggacgagaaggagttcaccgtgcagatcaaggacgaggagggcctgaagctgaccttccagaagcacaagctgatggccaacggcgtgatgggcgacggccaccccctgttccacaagaagaagggcaacagaaagaagctggtggagctggaggtggagtgcatggaggagcccaaccacctggacgtggacctggagaccagaatccccgtgatcaacaaggtggacggcaccctgctggtgggcgaggacgcccccagaagagccgagctggagatgtggctgcagggccaccccgagttcgccgtggaccccagattcctggcctacatggaggacagaagaaagcagaagtggcagagatgcaagaagaacaacaaggccgagctgaactgcctgggcatggagcccgtgcagaccgccaacagcagaaacggcaagaagggccaccacaccgagaccgtgttcaacagagtgctgcccggccccatcgcccccgagagcagcaagaagagagccagaagaatgagacccgacctgagcaagatgatggccctgatgcagggcggcagcaccggcagcctgagcctgcacaacaccttccagcacagcagcagcggcctgcagagcgtgagcagcctgggccacagcagcgccaccagcgccagcctgcccttcatgcccttcgtgatgggcggcgcccccagcagcccccacgtggacagcagcaccatgctgcaccaccaccaccaccacccccacccccaccaccaccaccaccaccaccccggcctgagagcccccggctaccccagcagccccgtgaccaccgccagcggcaccaccctgagactgccccccctgcagcccgaggaggacgacgacgaggacgaggaggacgacgacgacctgagccagggctacgacagcagcgagagagacttcagcctgatcgacgaccccatgatgcccgccaacagcgacagcagcgaggacgccgacgactag

SEQ ID NO: 206537 - protein, 2133 aa, Artificial Sequence
  derived and/or modified sequence
MDEVEQDQHEARLKELFDSFDTTGTGSLGQEELTDLCHMLSLEEVAPVLQQTLLQDNLLGRVHFDQFKEALILILSRTLSNEEHFQEPDCSLEAQPKYVRGGKRYGRRSLPEFQESVEEFPEVTVIEPLDEEARPSHIPAGDCSEHWKTQRSEEYEAEGQLRFWNPDDLNASQSGSSPPQDWIEEKLQEVCEDLGITRDGHLNRKKLVSICEQYGLQNVDGEMLEEVFHNLDPDGTMSVEDFFYGLFKNGKSLTPSASTPYRQLKRHLSMQSFDESGRRTTTSSAMTSTIGFRVFSCLDDGMGHASVERILDTWQEEGIENSQEILKALDFSLDGNINLTELTLALENELLVTKNSIHQAALASFKAEIRHLLERVDQVVREKEKLRSDLDKAEKLKSLMASEVDDHHAAIERRNEYNLRKLDEEYKERIAALKNELRKEREQILQQAGKQRLELEQEIEKAKTEENYIRDRLALSLKENSRLENELLENAEKLAEYENLTNKLQRNLENVLAEKFGDLDPSSAEFFLQEERLTQMRNEYERQCRVLQDQVDELQSELEEYRAQGRVLRLPLKNSPSEEVEANSGGIEPEHGLGSEECNPLNMSIEAELVIEQMKEQHHRDICCLRLELEDKVRHYEKQLDETVVSCKKAQENMKQRHENETHTLEKQISDLKNEIAELQGQAAVLKEAHHEATCRHEEEKKQLQVKLEEEKTHLQEKLRLQHEMELKARLTQAQASFEREREGLQSSAWTEEKVRGLTQELEQFHQEQLTSLVEKHTLEKEELRKELLEKHQRELQEGREKMETECNRRTSQIEAQFQSDCQKVTERCESALQSLEGRYRQELKDLQEQQREEKSQWEFEKDELTQECAEAQELLKETLKREKTTSLVLTQEREMLEKTYKEHLNSMVVERQQLLQDLEDLRNVSETQQSLLSDQILELKSSHKRELREREEVLCQAGASEQLASQRLERLEMEHDQERQEMMSKLLAMENIHKATCETADRERAEMSTEISRLQSKIKEMQQATSPLSMLQSGCQVIGEEEVEGDGALSLLQQGEQLLEENGDVLLSLQRAHEQAVKENVKMATEISRLQQRLQKLEPGLVMSSCLDEPATEFFGNTAEQTEQFLQQNRTKQVEGVTRRHVLSDLEDDEVRDLGSTGTSSVQRQEVKIEESEASVEGFSELENSEETRTESWELKNQISQLQEQLMMLCADCDRASEKKQDLLFDVSVLKKKLKMLERIPEASPKYKLLYEDVSRENDCLQEELRMMETRYDEALENNKELTAEVFRLQDELKKMEEVTETFLSLEKSYDEVKIENEGLNVLVLRLQGKIEKLQESVVQRCDCCLWEASLENLEIEPDGNILQLNQTLEECVPRVRSVHHVIEECKQENQYLEGNTQLLEKVKAHEIAWLHGTIQTHQERPRVQNQVILEENTTLLGFQDKHFQHQATIAELELEKTKLQELTRKLKERVTILVKQKDVLSHGEKEEELKAMMHDLQITCSEMQQKVELLRYESEKLQQENSILRNEITTLNEEDSISNLKLGTLNGSQEEMWQKTETVKQENAAVQKMVENLKKQISELKIKNQQLDLENTELSQKNSQNQEKLQELNQRLTEMLCQKEKEPGNSALEEREQEKFNLKEELERCKVQSSTLVSSLEAELSEVKIQTHIVQQENHLLKDELEKMKQLHRCPDLSDFQQKISSVLSYNEKLLKEKEALSEELNSCVDKLAKSSLLEHRIATMKQEQKSWEHQSASLKSQLVASQEKVQNLEDTVQNVNLQMSRMKSDLRVTQQEKEALKQEVMSLHKQLQNAGGKSWAPEIATHPSGLHNQQKRLSWDKLDHLMNEEQQLLWQENERLQTMVQNTKAELTHSREKVRQLESNLLPKHQKHLNPSGTMNPTEQEKLSLKRECDQFQKEQSPANRKVSQMNSLEQELETIHLENEGLKKKQVKLDEQLMEMQHLRSTATPSPSPHAWDLQLLQQQACPMVPREQFLQLQRQLLQAERINQHLQEELENRTSETNTPQGNQEQLVTVMEERMIEVEQKLKLVKRLLQEKVNQLKEQLCKNTKADAMVKDLYVENAQLLKALEVTEQRQKTAEKKNYLLEEKIASLSNIVRNLTPAPLTSTPPLRS

SEQ ID NO: 206538 - protein, 2116 aa, Artificial Sequence
  derived and/or modified sequence
MDEVEQDQHEARLKELFDSFDTTGTGSLGQEELTDLCHMLSLEEVAPVLQQTLLQDNLLGRVHFDQFKEALILILSRTLSNEEHFQEPDCSLEAQPKYVRGGKRYGRRSLPEFQESVEEFPEVTVIEPLDEEARPSHIPAGDCSEHWKTQRSEEYEAEGQLRFWNPDDLNASQSGSSPPQDWIEEKLQEVCEDLGITRDGHLNRKKLVSICEQYGLQNVDGEMLEEVFHNLDPDGTMSVEDFFYGLFKNGKSLTPSASTPYRQLKRHLSMQSFDESGRRTTTSSAMTSTIGFRVFSCLDDGMGHASVERILDTWQEEGIENSQEILKALDFSLDGNINLTELTLALENELLVTKNSIHQAALASFKAEIRHLLERVDQVVREKEKLRSDLDKAEKLKSLMASEVDDHHAAIERRNEYNLRKLDEEYKERIAALKNELRKEREQILQQAGKQRLELEQEIEKAKTEENYIRDRLALSLKENSRLENELLENAENVLAEKFGDLDPSSAEFFLQEERLTQMRNEYERQCRVLQDQVDELQSELEEYRAQGRVLRLPLKNSPSEEVEANSGGIEPEHGLGSEECNPLNMSIEAELVIEQMKEQHHRDICCLRLELEDKVRHYEKQLDETVVSCKKAQENMKQRHENETHTLEKQISDLKNEIAELQGQAAVLKEAHHEATCRHEEEKKQLQVKLEEEKTHLQEKLRLQHEMELKARLTQAQASFEREREGLQSSAWTEEKVRGLTQELEQFHQEQLTSLVEKHTLEKEELRKELLEKHQRELQEGREKMETECNRRTSQIEAQFQSDCQKVTERCESALQSLEGRYRQELKDLQEQQREEKSQWEFEKDELTQECAEAQELLKETLKREKTTSLVLTQEREMLEKTYKEHLNSMVVERQQLLQDLEDLRNVSETQQSLLSDQILELKSSHKRELREREEVLCQAGASEQLASQRLERLEMEHDQERQEMMSKLLAMENIHKATCETADRERAEMSTEISRLQSKIKEMQQATSPLSMLQSGCQVIGEEEVEGDGALSLLQQGEQLLEENGDVLLSLQRAHEQAVKENVKMATEISRLQQRLQKLEPGLVMSSCLDEPATEFFGNTAEQTEQFLQQNRTKQVEGVTRRHVLSDLEDDEVRDLGSTGTSSVQRQEVKIEESEASVEGFSELENSEETRTESWELKNQISQLQEQLMMLCADCDRASEKKQDLLFDVSVLKKKLKMLERIPEASPKYKLLYEDVSRENDCLQEELRMMETRYDEALENNKELTAEVFRLQDELKKMEEVTETFLSLEKSYDEVKIENEGLNVLVLRLQGKIEKLQESVVQRCDCCLWEASLENLEIEPDGNILQLNQTLEECVPRVRSVHHVIEECKQENQYLEGNTQLLEKVKAHEIAWLHGTIQTHQERPRVQNQVILEENTTLLGFQDKHFQHQATIAELELEKTKLQELTRKLKERVTILVKQKDVLSHGEKEEELKAMMHDLQITCSEMQQKVELLRYESEKLQQENSILRNEITTLNEEDSISNLKLGTLNGSQEEMWQKTETVKQENAAVQKMVENLKKQISELKIKNQQLDLENTELSQKNSQNQEKLQELNQRLTEMLCQKEKEPGNSALEEREQEKFNLKEELERCKVQSSTLVSSLEAELSEVKIQTHIVQQENHLLKDELEKMKQLHRCPDLSDFQQKISSVLSYNEKLLKEKEALSEELNSCVDKLAKSSLLEHRIATMKQEQKSWEHQSASLKSQLVASQEKVQNLEDTVQNVNLQMSRMKSDLRVTQQEKEALKQEVMSLHKQLQNAGGKSWAPEIATHPSGLHNQQKRLSWDKLDHLMNEEQQLLWQENERLQTMVQNTKAELTHSREKVRQLESNLLPKHQKHLNPSGTMNPTEQEKLSLKRECDQFQKEQSPANRKVSQMNSLEQELETIHLENEGLKKKQVKLDEQLMEMQHLRSTATPSPSPHAWDLQLLQQQACPMVPREQFLQLQRQLLQAERINQHLQEELENRTSETNTPQGNQEQLVTVMEERMIEVEQKLKLVKRLLQEKVNQLKEQLCKNTKADAMVKDLYVENAQLLKALEVTEQRQKTAEKKNYLLEEKIASLSNIVRNLTPAPLTSTPPLRS

SEQ ID NO: 206539 - DNA, 306 bp, Artificial Sequence
  derived and/or modified sequence
atggacgaggtggagcaggaccagcacgaggccagactgaaggagctgttcgacagcttcgacaccaccggcaccggcagcctgggccaggaggagctgaccgacctgtgccacatgctgagcctggaggaggtggcccccgtgctgcagcagaccctgctgcaggacaacctgctgggcagagtgcacttcgaccagttcaaggaggccctgatcctgatcctgagcagaaccctgagcaacgaggagcacttccaggagcccgactgcagcctggaggcccagcccaagtacgtgagaggctag

SEQ ID NO: 206540 - DNA, 6402 bp, Artificial Sequence
  derived and/or modified sequence
atggacgaggtcgaacaggatcaacatgaagcccgtctcaaagagttatttgattccttcgatactaccggcacaggctctctcggccaggaagagttaaccgatttatgccacatgctcagccttgaggaagtcgcacctgttctgcagcagaccctgctacaagataacctccttggcagggtgcattttgatcaatttaaggaggcattgattctcatcctgtcacgcaccttgtctaatgaggagcatttccaagagcccgattgttccctcgaagcccagccaaaatacgtgcgaggcggcaagcggtacggcaggcggtccctgcctgagttccaggagtccgtcgaggaatttccagaagtgactgtgatcgagccacttgacgaagaggctaggccaagtcacatcccggccggagattgctcagagcactggaagacacagcggtctgaagagtatgaagcggagggacagttacgcttttggaacccggatgacctgaatgcaagccagagtgggagctcgcccccacaggactggatcgaggagaaactgcaggaggtgtgcgaggatttgggaattactagagacggtcacctcaaccgcaaaaagttagtctccatttgcgagcagtacggactccagaacgttgatggcgagatgctagaagaggtgtttcacaacctggacccagacggcactatgtctgttgaggatttcttctacggtttgttcaagaatggaaagtccctgacaccgagcgcatctaccccctataggcagctcaaacggcacctctccatgcaaagttttgacgagagtggaagacggaccactacgtcatccgcaatgaccagtaccataggcttcagagtgttctcatgtctcgatgacggaatgggtcacgcctcagtggagagaatccttgatacgtggcaagaagaaggcattgagaattcccaggagatcctcaaggccctagacttcagtctcgacggtaacataaacctgacagagttaaccttggccctggaaaatgagctgctggtgacgaaaaactccatacatcaggccgcgctggcctcatttaaggccgagatcagacatctcctggagagagtggaccaggtcgtcagagaaaaagagaagttgagatctgacctggataaagccgaaaaacttaagtctctaatggccagcgaagtagatgaccaccatgctgcaatcgagcggagaaacgagtataatttgagaaagctcgatgaggagtacaaggaacggattgcggccttgaagaacgagctacgcaaggagagagaacagatcctgcaacaagcaggcaagcagaggctagagctggagcaggaaatcgagaaggcaaagacagaagagaattacattagagacagactcgctttatcactgaaagagaacagtaggttggaaaacgagctgctcgagaacgcagagaagcttgcagaatacgagaatttgaccaacaagctccagaggaatctagaaaatgttctagcagagaagttcggagatctggatcccagctcggccgaattttttctgcaggaagaacgtctgactcagatgaggaacgaatacgaaagacagtgccgcgtccttcaggatcaagtcgatgagctgcagagcgagcttgaagagtatagggctcaggggcgcgtattgcggctgccactcaagaactccccgagcgaagaagtagaggctaacagtggcgggatcgagcccgaacatggcctgggatccgaggaatgcaaccctctgaacatgtctatcgaagcggagctcgtgattgagcagatgaaggaacagcatcatcgcgacatttgttgtctacgactggagcttgaggacaaggttaggcactacgaaaagcagttggatgagaccgttgtgagctgcaaaaaggcacaagagaacatgaaacagagacacgaaaatgaaacccatactttagagaagcagatctccgacctgaaaaacgaaattgccgaactgcaggggcaggctgctgttctcaaggaagcacatcacgaagccacttgccgacatgaggaggagaagaaacagctgcaggtgaagctcgaagaagaaaagacacacttgcaggagaaactgaggcttcagcacgagatggagctcaaagccaggcttactcaggcacaggcctcatttgaaagagaaagggagggattgcagtcgagtgcctggacggaagagaaagtgcggggtcttacccaagaactggaacagtttcatcaagaacaattaacttcactggttgagaaacataccttagagaaggaagaactgcggaaagagctgctggaaaagcaccagcgggaactgcaagagggcagagagaagatggaaacagaatgcaaccgacgcacaagtcagatcgaggctcaattccagtccgactgtcagaaggtcaccgaaaggtgtgagagcgccctccagagcttggaaggccgatatcgtcaggaactgaaagacttgcaggagcagcagcgcgaagagaaaagccagtgggaattcgagaaggatgagctaactcaggaatgtgctgaagcacaggagctgctcaaggagacactgaaacgagagaaaacaacctccttagtcctgacacaggagagagagatgttagaaaagacatataaggaacacttgaatagcatggtggtggaacggcagcagttactgcaggacctggaggatttgcgaaatgtcagcgagacccaacaatcgctcctgtccgatcagatcctggaactcaaatcttcacacaaacgcgaattaagagagagagaggaagtcctttgccaggcgggcgcctcagagcagctagctagccaacgcctagagcggttggaaatggagcatgaccaagagcgccaggagatgatgtctaaattgctcgctatggagaacatccataaagccacatgcgagactgccgatagagaacgggctgagatgtcaactgagatctctcgcttgcagtccaagattaaggagatgcagcaggcaacctctcctctttctatgctgcaaagcggctgtcaggtgattggagaagaggaggtcgagggcgacggggccctcagcctgcttcagcaaggggagcaacttcttgaggagaatggagacgtgctgttaagtcttcaaagagcgcatgagcaggcagttaaggagaatgtgaagatggctactgagatttctaggctccagcagagactacagaaattagaacctggactagtgatgtcatcttgcctagatgagccagccacagagttttttgggaacaccgccgagcagacggaacagttcttgcagcagaatcgtaccaagcaggtcgagggcgtcacccgaaggcacgtgttatcggacctggaagatgatgaagtgagggacctgggctccactgggacctcgagcgtgcagaggcaagaggtcaagattgaggagtccgaggcctctgtagaaggattctccgagttggagaacagtgaggaaacacgtaccgaaagctgggagttgaaaaatcagatctcacagctgcaggagcaactcatgatgctgtgcgccgactgcgatagagcttctgagaagaagcaggacttacttttcgacgtgagtgttctcaagaaaaaattgaaaatgctagagcgcatccccgaagcctcccctaaatataaactgctctatgaggatgtatccagggaaaatgactgcctccaggaggagctaagaatgatggaaacccggtatgacgaagcactggaaaacaacaaagagttgaccgctgaagtatttcgactgcaggatgagctgaagaaaatggaagaagtgacagagactttcctgtctctggaaaagtcctacgatgaggttaagatcgagaacgaaggactgaacgtgttagtgcttcgcctgcaaggaaagattgaaaaactgcaggaatctgtggtgcagcggtgcgattgctgtctgtgggaagcttctctggaaaatttggagattgaaccagatggtaatatcctgcagttgaaccagaccctggaagagtgtgtacctcgggtgcggagcgtgcatcatgtaatcgaggagtgcaaacaggaaaaccagtacttggagggtaatactcagctgctggagaaggttaaagcccacgagatcgcgtggcttcacggaacaatccagacgcaccaagagcgtccgcgtgtgcagaatcaggtgatactagaggaaaacaccactctcttggggtttcaagacaaacacttccagcaccaggcaacgatcgcggagctggagcttgagaagaccaagctgcaggagctgacaagaaagctcaaagagagggttaccatacttgttaaacagaaggacgtcctttcacacggagagaaggaggaggagctgaaggccatgatgcacgatctgcaaattacctgctcagagatgcagcagaaggtcgagctgctgcggtacgagagcgagaaactacagcaggagaactcaatcttgaggaacgagataaccaccttgaacgaggaagactctatctcgaatctgaaactgggcactctaaatggatcacaggaagaaatgtggcagaagacggaaacagtgaaacaggagaacgctgccgtccagaagatggtggagaatctaaagaagcagattagcgaattaaagatcaagaaccagcaactcgacctggaaaataccgaattgagtcagaaaaattctcaaaatcaagagaaactgcaggagttgaaccagcgcctgaccgagatgctgtgccaaaaggagaaagagccagggaattccgctctcgaggagagggagcaggaaaagtttaatttgaaggaagaactcgaaagatgtaaggtgcagagttccaccctggtttcttcccttgaggccgagttgagcgaggtcaagatccagacccacatcgtccagcaggagaatcatctcctcaaggatgagctcgagaagatgaagcagctccaccggtgtcctgacctatcggattttcagcaaaaaatctccagtgtcctgagctataacgagaagctactgaaggagaaggaggcgttgtctgaggaactgaattcttgtgtggataaacttgctaaatcctcccttctcgagcataggatcgcgactatgaaacaggagcaaaagagctgggagcatcagagcgctagtctgaaatcccagcttgtggcgagccaggagaaagtacagaacctagaggacacagtgcagaatgtcaacttacagatgtcccgtatgaaaagcgaccttcgggtcacccagcaagaaaaagaggccctcaagcaggaggtgatgtcactgcataaacaattgcaaaacgcaggtgggaaaagctgggcaccagaaattgccacccatcccagcggcctgcacaatcaacagaagcgcctgtcttgggataagctcgaccacctgatgaacgaagaacaacagctgctgtggcaggaaaacgagcgccttcaaactatggtacaaaatactaaagcagaactgacacatagccgcgagaaggtgaggcagctggaaagtaacctgctgcccaagcaccagaaacaccttaatccaagcggaacaatgaatcctacggagcaagagaagttgtctttgaagcgggaatgtgaccagttccagaaagagcaatctccagcaaacaggaaggtgtcacaaatgaattcactcgagcaggagctcgaaactatccatctggaaaacgaggggcttaagaaaaaacaggtcaagcttgatgagcaattgatggagatgcagcatctgcgatccactgccacacccagcccgtctccccatgcctgggatctccaacttttgcaacaacaagcctgccctatggtgcctagggagcagttcctgcagctccagcggcaacttttacaggcggagcggatcaaccagcatttacaggaggaactcgaaaatcgtacatcggagacaaacaccccgcagggaaatcaagaacagttggtgacagtgatggaagagagaatgatcgaggtcgaacaaaagttgaagctggtgaagagactgcttcaagagaaagtgaaccagctgaaggagcaactatgtaaaaataccaaggccgatgctatggtgaaagatctttacgtcgaaaacgcccaactcctgaaagctcttgaggttactgagcagcggcagaagactgccgagaagaaaaactacttactggaggagaaaatcgcttcactgtccaatattgtacgtaatcttacacccgcccccctaacctccactcccccgttgcgctcatag

SEQ ID NO: 206541 - DNA, 6351 bp, Artificial Sequence
  derived and/or modified sequence
atggacgaggtggagcaggaccaacacgaagctaggttgaaggagttgttcgattcctttgataccacagggactggctccctcgggcaggaggaattaactgacctgtgtcacatgctcagcctggaggaagtcgcacctgtactccaacagaccctgttgcaggacaacctgcttggccgagtccacttcgatcagtttaaggaggcgctcatcctgatactgagtcgaaccctgtcaaacgaggagcacttccaggaacctgattgctccctagaagcccagccaaagtacgtccgtggaggcaaaagatacggcagaagatcgctccctgagttccaagagagcgtcgaagaatttcccgaagtgaccgttatcgaacctctggatgaagaggctagaccatcgcacattccagctggcgactgctccgaacattggaagacccagagatccgaagagtacgaagccgagggacagctcaggttctggaatcccgatgatctgaacgcatcccaatccggctcttccccaccacaggattggatagaggaaaaattgcaagaggtgtgcgaagatctgggtattacacgtgacggccacctcaacaggaagaagcttgtcagcatctgcgaacaatacgggctgcagaatgtggatggagaaatgttggaagaagtgtttcataacctggaccccgatgggaccatgagcgtcgaagattttttctacggcctgtttaagaacgggaaaagtctcaccccatcagcatccactccctaccgtcaactgaagcgacacctttccatgcagtcatttgacgagtcggggaggcggaccactaccagctcagccatgacatcaaccataggtttccgcgtattctcctgtcttgacgacggcatggggcacgcctctgttgaacgcatcctggatacctggcaagaagagggcatcgaaaatagccaggaaatccttaaggcgctagatttctctctggatggtaatattaatcttactgaactcacactggctctggagaacgagctgctcgtgaccaagaacagtatacaccaagctgctcttgcttctttcaaagccgaaattagacatctcctagagcgtgtcgaccaggtcgtgagagagaaggaaaagctccgctccgaccttgacaaagctgaaaagttgaaatccttgatggcctctgaggtggatgaccaccatgctgccattgaacgtcgcaatgaatataacctccggaagctggatgaagaatataaagaacggatagccgccctgaaaaacgaactcagaaaggaacgcgagcagattctccaacaggccggaaagcagcgcttagagcttgaacaggagattgagaaggccaaaaccgaggaaaattatattagagatcgcctagccttgtccctcaaggaaaatagtaggctcgagaacgagcttttggagaacgccgagaacgttctggcagagaaatttggggatctggacccatccagtgccgagttctttctgcaggaggagaggctgacacagatgcgcaatgagtatgaacgccagtgcagggtcttacaggaccaggtggatgagctgcagtccgagctcgaggagtaccgcgcccagggacgggtgctccgcctcccccttaagaactcgccctcagaggaggtggaagctaacagcgggggcatcgagcctgaacatgggctcggcagcgaggagtgcaaccccctcaatatgtctatagaagccgagctcgtgatcgagcagatgaaggagcagcatcatcgcgacatttgttgcctgcggctggagctggaagataaagtgaggcactatgagaagcagcttgatgagacagtggtgtcctgcaagaaggcgcaggagaatatgaagcagcggcatgagaacgagacccacacactcgagaaacagatcagtgatctcaagaacgagatagcagaactgcaagggcaggccgctgtgctaaaggaagcacatcacgaggcaacatgcagacacgaagaagagaaaaaacagctgcaagtgaagttggaggaggagaagacccacctccaggagaaactccgcctccagcacgagatggagttgaaggctaggttgacacaggcccaagcctccttcgagagggagagagaggggttgcagtcatcggcatggaccgaggagaaggtcagggggctgacacaagagctcgaacaattccaccaggagcagctgacctccctggtggaaaagcatacactagagaaagaggaattacgaaaagaactcctcgagaaacaccagagggaacttcaggaagggcgagagaaaatggagacagaatgtaaccgtcggacttcccagatcgaagcccagttccagtccgattgccagaaggtgaccgaacggtgcgagagcgccctgcagtcactggagggtcggtaccgtcaagagctcaaagatctacaagagcagcaaagggaagaaaaaagccaatgggagttcgagaaagacgagcttactcaggagtgcgccgaggcccaggaattgctcaaggagaccctgaagcgtgaaaagaccacatctctggtcctaacccaggaacgggagatgctcgagaaaacttacaaagagcatttgaatagtatggtcgtagagcggcagcaactcctgcaggacctcgaggatctccgaaacgtctccgaaacacagcagtccctattgtcagatcagattcttgagctgaagtcctctcacaagagagagctgcgagagcgtgaggaagtgctctgccaggccggagccagcgaacagctggctagccaaagactggaacggcttgaaatggagcatgaccaggaaaggcaggagatgatgtctaaacttctcgctatggaaaatatccacaaagccacttgcgagacagcggacagggagcgcgccgaaatgtcaactgaaatctccaggcttcagagtaagatcaaggagatgcagcaggcaacttccccactaagcatgctgcaatccggctgccaagtcatcggagaggaggaggtggaaggggatggagcgctgtcattactccagcagggcgaacagttactcgaggagaacggggacgtcctgctgtctttgcagcgcgctcacgaacaggctgttaaagaaaatgttaaaatggccactgaaatcagccgcctgcagcagcgtctccagaagctggagccgggcctggtgatgagctcatgcctggatgaaccagctacagagttcttcggcaacactgccgagcagacagaacaatttctgcaacagaatagaaccaagcaggtagagggggtgacacggcgccacgttctaagcgacctggaagacgacgaagtccgggatcttgggagtaccggaacctcatcagtccaacgtcaggaagtcaagatcgaggaatcagaggcctcagttgaagggttttcagagctggaaaatagtgaagagacgcgaactgagtcatgggaattaaagaaccagatctcacagctgcaggaacagctcatgatgctatgcgcagactgcgacagagcttctgaaaagaaacaggacctgctcttcgatgtgtcagtgctgaagaagaagttaaagatgttagagcgcatccctgaagcaagcccaaaatacaagttactttatgaagacgtatcacgagagaacgattgcctgcaggaggaactcagaatgatggagactagatacgatgaagctctcgagaacaacaaagaacttacggcggaagtcttccgcctgcaggacgagctgaagaagatggaagaagtgacagaaacattcctctcattagaaaagagctacgacgaggtgaagatcgaaaacgagggcctgaacgtgttggtgcttaggttacagggcaagatcgagaaactccaggaatcagtggtccagagatgtgattgttgtctttgggaggcttctcttgaaaacttggaaatcgaaccggatggaaacatcctccagttgaaccagacccttgaggaatgcgttccacgtgtgcgtagtgtgcaccacgtgatagaggagtgcaagcaggagaaccagtaccttgagggtaacactcagctgctggagaaagtgaaggcccatgagatagcgtggcttcacgggacaatccagactcaccaagagcggcctcgggtccaaaaccaagtcatcctcgaggagaatacaactctgctggggttccaggataagcatttccagcaccaggccacaattgcagaactggaactggagaagacaaaactgcaggaactgactcgcaagctaaaagaaagagtgactatcctagtcaagcagaaggacgtgctatctcatggagaaaaggaggaggagctgaaagcaatgatgcacgatctgcagatcacttgcagcgagatgcagcagaaggtcgagctcctcagatacgagagcgaaaaactacagcaggaaaactccattctgaggaatgagataacaaccttaaacgaggaggattctatttctaacttgaagctcgggacgcttaatgggagtcaggaagaaatgtggcagaaaactgaaactgtgaagcaggaaaatgctgccgtccagaagatggtcgaaaacttgaagaagcagattagcgaattgaagattaagaaccaacagctagatctggaaaacaccgagctgtcccagaagaatagtcaaaaccaggagaaactgcaggaactgaatcagagactaactgaaatgctgtgtcagaaggaaaaggagccaggcaattcagcgctagaggagagagaacaggagaaatttaatcttaaggaggaactcgaacgatgtaaagttcagagttcaactctggtgagctccttggaggccgaactctcggaggtgaaaatccagacacatatcgtccagcaggagaatcacctcctgaaggacgaattggagaaaatgaaacagctgcaccggtgcccagacctgtcggacttccagcagaagatctcctcagtgctctcctataacgagaagctgcttaaagaaaaagaggcattgtccgaagagcttaatagctgcgtggataaactggcaaaatcatccctactggagcaccggatcgcaactatgaaacaggagcagaagtcctgggagcatcagagcgcttcactcaaatcccagctcgtcgcctcccaagaaaaggtccagaatctggaggatactgtccaaaacgtgaacctccaaatgagtcgcatgaaaagtgacttaagggtgacacaacaagagaaagaagctctgaaacaggaggtcatgagcctgcataagcagctgcaaaatgccggcgggaaatcatgggctccggaaattgcaacgcacccctcaggattgcacaaccaacagaaacgattgtcatgggataaacttgatcacctgatgaacgaagaacagcagctgctctggcaggagaatgagagactgcagacaatggttcagaacaccaaagcagagctgacacacagccgagagaaggtgcgacaattggagagcaatctactcccaaaacatcaaaaacacctcaacccctcaggcacaatgaaccctaccgaacaagagaaactgtccctgaaacgcgaatgcgatcaattccagaaggaacagtcaccggccaataggaaggttagtcagatgaattctttagaacaagaactggagactatccaccttgagaatgagggcctgaagaaaaaacaggtcaagctcgatgaacaactcatggagatgcagcacctacgctcgactgctacgccatctccatccccccacgcctgggacctgcagctgctgcagcagcaggcgtgtcccatggtgccaagggagcagttcctccagttgcagcggcagctcctgcaggccgagagaatcaaccaacaccttcaagaggagctggagaaccgtacatccgaaactaacacccctcagggcaatcaggagcaactggtgacggtaatggaagagcgcatgatcgaagtggaacagaagctgaaactggtaaaaaggctacttcaagagaaggtcaatcaactaaaagaacagctgtgtaaaaacacaaaagctgacgctatggttaaggacctgtacgttgaaaatgcgcagctgctgaaggctctggaggtgacagaacagagacaaaaaacagccgaaaaaaaaaattatctcttagaggaaaagatcgccagcctttcaaacattgtgagaaatctgacccccgctcctctgacctcaactccgcctctgcgcagttag

SEQ ID NO: 206542 - DNA, 306 bp, Artificial Sequence
  derived and/or modified sequence
atggacgaggtggagcaagatcagcacgaggccaggctgaaagagctgtttgacagcttcgacactactgggaccggcagtcttggacaagaagaactgacagacctgtgtcacatgctgagcttggaggaggtggctccagtcctgcagcagacactcctccaggataatctgctgggccgagtccattttgaccagttcaaggaagctctgattttgatcttatcccgtacactgagcaatgaagaacacttccaggagcctgattgtagtctggaggctcaacccaaatacgtgcgcggctag

SEQ ID NO: 206543 - DNA, 6402 bp, Artificial Sequence
  derived and/or modified sequence
atggatgaggtggagcaggaccagcacgaggcccggctgaaggagctgtttgacagctttgacaccactggaacaggcagcctgggccaggaggagctgacagacctgtgccacatgctgagcctggaggaggtggcccctgtgctgcagcagaccctgctgcaggacaacctgctgggccgggtgcactttgaccagttcaaggaggccctgatcctgatcctgagcaggaccctgagcaatgaggagcacttccaggagccagactgcagcctggaggcccagcccaagtatgtgcggggcggcaagagatatggaagaagaagcctgcctgagttccaggagagcgtggaggagttccctgaggtgaccgtcatcgagcccctggatgaggaggcccggcccagccacatcccagctggggactgcagcgagcactggaagacccagaggtctgaggagtatgaagctgagggccagctgcgcttctggaacccagatgacctgaatgccagccagagcggcagcagccccccccaggactggattgaggagaagctgcaggaggtgtgtgaggacctgggcatcaccagagatggccacctgaacaggaagaagctggtgtccatctgtgagcagtatggcctgcagaatgtggatggagagatgctggaggaggtgttccacaacctggaccctgatggcaccatgtctgtggaggacttcttctacggcctcttcaagaatggcaagagcctgacccccagcgccagcaccccctaccggcagctgaagaggcacctgtccatgcagagctttgatgagagcggccgccgcaccaccaccagcagcgccatgaccagcaccatcggcttccgggtcttcagctgcctggatgatggcatgggccacgcctctgtggagcgcatcctggacacctggcaggaggagggcatcgagaacagccaggagatcctgaaggccctggacttcagcctggatggcaacatcaacctgacagagctgaccctggccctggagaatgagctgctggtgaccaagaacagcatccaccaggccgccctggccagcttcaaggccgagatccgccacctgctggagcgggtggaccaggtggtgcgggagaaggagaagctgcggagtgacctggacaaggccgagaagctgaagagcctgatggccagcgaggtggatgaccaccacgccgccattgaaagaagaaatgagtacaacctgaggaagctggatgaggagtacaaggagagaattgctgccctgaagaatgagctgaggaaggagcgggagcagatcctgcagcaggccggcaagcagaggctggagctggagcaggagattgagaaggccaagacagaggagaactacatccgggaccggctggccctgagcctgaaggagaacagccggctggagaatgagctgctggagaatgctgagaagctggccgagtatgagaacctgaccaacaagctgcagaggaacctggagaatgtgctggccgagaagtttggagacctggaccccagcagcgctgagttcttcctgcaggaggagcggctgacccagatgagaaatgaatatgaaaggcagtgccgggtgctgcaggaccaggtggatgagctgcagagcgagctggaggagtaccgggcccagggccgggtgctgcggctgcccctgaagaacagccccagcgaggaggtggaggccaacagcggcggcatcgagcctgagcacggcctgggcagcgaggagtgcaaccccctgaacatgagcattgaagctgagctggtgattgagcagatgaaggagcagcaccaccgggacatctgctgcctgcggctggagctggaggacaaggtgcgccactatgagaagcagctggatgaaacagtggtgtcctgcaagaaggcccaggagaacatgaagcagagacatgaaaatgagacccacaccctggagaagcagatcagtgacctgaagaatgaaattgctgagctgcagggccaggccgctgtgctgaaggaggcccaccacgaggccacctgcagacatgaggaggagaagaagcagctgcaggtgaagctggaggaggagaagacccacctgcaggagaagctgcggctgcagcacgagatggagctgaaggcccggctgacccaggcccaggccagctttgagcgggagcgggagggcctgcagagcagcgcctggacagaggagaaggtgcggggcctgacccaggagctggagcagttccaccaggagcagctgaccagcctggtggagaagcacaccctggagaaggaggagctgaggaaggagctgctggagaagcaccagcgggagctgcaggagggccgggagaagatggagacagagtgcaacagaaggaccagccagatcgaggcccagttccagagcgactgccagaaggtgacagagcgctgtgagagcgccctgcagagcctggagggccgctaccggcaggagctgaaggacctgcaggagcagcagcgggaggagaagagccagtgggagtttgagaaggatgagctgacccaggagtgtgccgaggcccaggagctgctgaaggagaccctgaagcgggagaagaccaccagcctggtgctgacccaggagcgggagatgctggagaagacctacaaggagcacctgaacagcatggtggtggagcggcagcagctgctgcaggacctggaggacctgagaaatgtgtctgagacccagcagagcctgctgagtgaccagatcctggagctgaagagcagccacaagcgggagctgcgggagcgggaggaggtgctgtgccaggccggggccagcgagcagctggccagccagaggctggagcggctggagatggagcatgaccaggagcggcaggagatgatgagcaagctgctggccatggagaacatccacaaggccacctgtgaaacagctgaccgggagcgggcagagatgagcacagagatcagccggctgcagagcaagatcaaggagatgcagcaggccaccagccccctgtccatgctgcagagcggctgccaggtgattggagaggaggaggtggagggagatggagccctgagcctgctgcagcagggcgagcagctgctggaggagaatggagatgtgctgctgagcctgcagagggcccacgagcaggccgtgaaggaaaatgtgaagatggccacagagatcagccggctgcagcagaggctgcagaagctggagcccggcctggtgatgagcagctgcctggatgagcccgccacagagttcttcggcaacacagctgagcagacagagcagttcctgcagcagaacagaaccaagcaggtggagggcgtgacccggcggcacgtgctgagtgacctggaggatgatgaggtgcgggacctgggcagcacaggcaccagctctgtgcagaggcaggaggtgaagattgaggagagcgaggcctctgtggagggcttcagcgagctggagaacagcgaggagaccaggacagagagctgggagctgaagaaccagatcagccagctgcaggagcagctgatgatgctgtgtgccgactgtgaccgggccagcgagaagaagcaggacctgctgtttgatgtgtctgtgctgaagaagaagctgaagatgctggagcgcatccctgaggccagccccaagtacaagctgctgtatgaagatgtgtcccgggagaatgactgcctgcaggaggagctgaggatgatggagaccaggtatgatgaggccctggagaacaacaaggagctgacagctgaggtgttccggctgcaggatgagctgaagaagatggaggaggtgacagagaccttcctgagcctggagaagagctatgatgaggtgaagattgaaaatgaaggcctgaatgtgctggtgctgcggctgcagggcaagattgagaagctgcaggagagcgtggtgcagagatgtgactgctgcctgtgggaggccagcctggagaacctggagattgaaccagatggcaacatcctgcagctgaaccagaccctggaggagtgtgtgccccgggtgcgctctgtgcaccacgtgattgaggagtgcaagcaggagaaccagtacctggagggcaacacccagctgctggagaaggtgaaggcccatgaaattgcctggctgcacggcaccatccagacccaccaggagcggccccgggtgcagaaccaggtgatcctggaggagaacaccaccctgctgggcttccaggacaagcacttccagcaccaggccaccatcgccgagctggagctggagaagaccaagctgcaggagctgaccaggaagctgaaggagcgggtgaccatcctggtgaagcagaaggatgtgctgagccacggggagaaggaggaggagctgaaggccatgatgcatgacctgcagatcacctgcagcgagatgcagcagaaggtggagctgctgcgctatgagagcgagaagctgcagcaggagaacagcatcctgagaaatgagatcaccaccctgaatgaggaggacagcatcagcaacctgaagctgggcaccctgaatggcagccaggaggagatgtggcagaagacagagaccgtgaagcaggagaatgctgctgtgcagaagatggtggagaacctgaagaagcagatcagcgagctgaagatcaagaaccagcagctggacctggagaacacagagctgagccagaagaacagccagaaccaggagaagctgcaggagctgaaccagaggctgacagagatgctgtgccagaaggagaaggagcccggcaacagcgccctggaggagcgggagcaggagaagttcaacctgaaggaggagctggagcgctgcaaggtgcagagcagcaccctggtgagcagcctggaggccgagctgtctgaggtgaagatccagacccacatcgtgcagcaggagaaccacctgctgaaggatgagctggagaagatgaagcagctgcaccgctgcccagacctgagtgacttccagcagaagatcagctctgtgctgagctacaatgagaagctgctgaaggagaaggaggccctgtctgaggagctgaacagctgtgtggacaagctggccaagagcagcctgctggagcaccgcatcgccaccatgaagcaggagcagaagtcctgggagcaccagagcgccagcctgaagagccagctggtggccagccaggagaaggtgcagaacctggaggacacagtgcagaatgtgaacctgcagatgagcaggatgaagagtgacctgcgggtgacccagcaggagaaggaggccctgaagcaggaggtgatgagcctgcacaagcagctgcagaatgccggcggcaagtcctgggcccctgagatcgccacccaccccagcggcctgcacaaccagcagaagaggctgtcctgggacaagctggaccacctgatgaatgaggagcagcagctgctgtggcaggagaatgaaaggctgcagaccatggtgcagaacaccaaggccgagctgacccacagccgggagaaggtgcggcagctggagagcaacctgctgcccaagcaccagaagcacctgaaccccagcggcaccatgaaccccacagagcaggagaagctgagcctgaagagagaatgtgaccagttccagaaggagcagagccctgccaacaggaaggtgtcccagatgaacagcctggagcaggagctggagaccatccacctggagaatgaaggcctgaagaagaagcaggtgaagctggatgagcagctgatggagatgcagcacctgcggagcacagccacccccagccccagcccccacgcctgggacctgcagctgctgcagcagcaggcctgccccatggtgccccgggagcagttcctgcagctgcagaggcagctgctgcaggccgagcgcatcaaccagcacctgcaggaggagctggagaacagaaccagcgagaccaacaccccccagggcaaccaggagcagctggtgacagtgatggaggagaggatgattgaggtggagcagaagctgaagctggtgaagaggctgctgcaggagaaggtgaaccagctgaaggagcagctgtgcaagaacaccaaggcagatgccatggtgaaggacctgtatgtggagaatgcccagctgctgaaggccctggaggtgacagagcagaggcagaagacagctgagaagaagaactacctgctggaggagaagatcgccagcctgagcaacatcgtgaggaacctgaccccagcccccctgaccagcaccccacccctgcggagctag

SEQ ID NO: 206544 - DNA, 6351 bp, Artificial Sequence
  derived and/or modified sequence
atggatgaggtggagcaggaccagcacgaggcccggctgaaggagctgtttgacagctttgacaccactggaacaggcagcctgggccaggaggagctgacagacctgtgccacatgctgagcctggaggaggtggcccctgtgctgcagcagaccctgctgcaggacaacctgctgggccgggtgcactttgaccagttcaaggaggccctgatcctgatcctgagcaggaccctgagcaatgaggagcacttccaggagccagactgcagcctggaggcccagcccaagtatgtgcggggcggcaagagatatggaagaagaagcctgcctgagttccaggagagcgtggaggagttccctgaggtgaccgtcatcgagcccctggatgaggaggcccggcccagccacatcccagctggggactgcagcgagcactggaagacccagaggtctgaggagtatgaagctgagggccagctgcgcttctggaacccagatgacctgaatgccagccagagcggcagcagccccccccaggactggattgaggagaagctgcaggaggtgtgtgaggacctgggcatcaccagagatggccacctgaacaggaagaagctggtgtccatctgtgagcagtatggcctgcagaatgtggatggagagatgctggaggaggtgttccacaacctggaccctgatggcaccatgtctgtggaggacttcttctacggcctcttcaagaatggcaagagcctgacccccagcgccagcaccccctaccggcagctgaagaggcacctgtccatgcagagctttgatgagagcggccgccgcaccaccaccagcagcgccatgaccagcaccatcggcttccgggtcttcagctgcctggatgatggcatgggccacgcctctgtggagcgcatcctggacacctggcaggaggagggcatcgagaacagccaggagatcctgaaggccctggacttcagcctggatggcaacatcaacctgacagagctgaccctggccctggagaatgagctgctggtgaccaagaacagcatccaccaggccgccctggccagcttcaaggccgagatccgccacctgctggagcgggtggaccaggtggtgcgggagaaggagaagctgcggagtgacctggacaaggccgagaagctgaagagcctgatggccagcgaggtggatgaccaccacgccgccattgaaagaagaaatgagtacaacctgaggaagctggatgaggagtacaaggagagaattgctgccctgaagaatgagctgaggaaggagcgggagcagatcctgcagcaggccggcaagcagaggctggagctggagcaggagattgagaaggccaagacagaggagaactacatccgggaccggctggccctgagcctgaaggagaacagccggctggagaatgagctgctggagaatgcagaaaatgtgctggccgagaagtttggagacctggaccccagcagcgctgagttcttcctgcaggaggagcggctgacccagatgagaaatgaatatgagcggcagtgccgggtgctgcaggaccaggtggatgagctgcagagcgagctggaggagtaccgggcccagggccgggtgctgcggctgcccctgaagaacagccccagcgaggaggtggaggccaacagcggcggcatcgagcctgagcacggcctgggcagcgaggagtgcaaccccctgaacatgagcattgaggccgagctggtgattgagcagatgaaggagcagcaccaccgggacatctgctgcctgcggctggagctggaggacaaggtgcgccactatgagaagcagctggatgagaccgtggtgtcctgcaagaaggcccaggagaacatgaagcagagacatgaaaatgagacccacaccctggagaagcagatcagtgacctgaagaatgaaattgctgagctgcagggccaggccgctgtgctgaaggaggcccaccacgaggccacctgcagacatgaggaggagaagaagcagctgcaggtgaagctggaggaggagaagacccacctgcaggagaagctgcggctgcagcacgagatggagctgaaggcccggctgacccaggcccaggccagctttgagcgggagcgggagggcctgcagagcagcgcctggacagaggagaaggtgcggggcctgacccaggagctggagcagttccaccaggagcagctgaccagcctggtggagaagcacaccctggagaaggaggagctgaggaaggagctgctggagaagcaccagcgggagctgcaggagggccgggagaagatggagacagagtgcaacagaaggaccagccagatcgaggcccagttccagagcgactgccagaaggtgacagagcgctgtgagagcgccctgcagagcctggagggccgctaccggcaggagctgaaggacctgcaggagcagcagcgggaggagaagagccagtgggagtttgagaaggatgagctgacccaggagtgtgccgaggcccaggagctgctgaaggagaccctgaagcgggagaagaccaccagcctggtgctgacccaggagcgggagatgctggagaagacctacaaggagcacctgaacagcatggtggtggagcggcagcagctgctgcaggacctggaggacctgagaaatgtgtctgagacccagcagagcctgctgagtgaccagatcctggagctgaagagcagccacaagcgggagctgcgggagcgggaggaggtgctgtgccaggccggggccagcgagcagctggccagccagaggctggagcggctggagatggagcatgaccaggagcggcaggagatgatgagcaagctgctggccatggagaacatccacaaggccacctgtgaaacagctgaccgggagagagctgagatgagcacagagatcagccggctgcagagcaagatcaaggagatgcagcaggccaccagccccctgtccatgctgcagagcggctgccaggtgattggagaggaggaggtggagggagatggagccctgagcctgctgcagcagggcgagcagctgctggaggagaatggagatgtgctgctgagcctgcagagggcccacgagcaggccgtgaaggaaaatgtgaagatggccacagagatcagccggctgcagcagaggctgcagaagctggagcccggcctggtgatgagcagctgcctggatgagcccgccacagagttctttggaaacacagctgagcagacagagcagttcctgcagcagaacagaaccaagcaggtggagggcgtgaccaggagacatgtgctgagtgacctggaggatgatgaggtgcgggacctgggcagcacaggcaccagctctgtgcagaggcaggaggtgaagattgaggagagcgaggcctctgtggagggcttcagcgagctggagaacagcgaggagaccaggacagagagctgggagctgaagaaccagatcagccagctgcaggagcagctgatgatgctgtgtgccgactgtgaccgggccagcgagaagaagcaggacctgctgtttgatgtgtctgtgctgaagaagaagctgaagatgctggagcgcatccctgaggccagccccaagtacaagctgctgtatgaagatgtgtccagagaaaatgactgcctgcaggaggagctgaggatgatggagaccaggtatgatgaggccctggagaacaacaaggagctgacagctgaggtgttccggctgcaggatgagctgaagaagatggaggaggtgacagagaccttcctgagcctggagaagagctatgatgaggtgaagattgaaaatgaaggcctgaatgtgctggtgctgcggctgcagggcaagattgagaagctgcaggagagcgtggtgcagagatgtgactgctgcctgtgggaggccagcctggagaacctggagattgaaccagatggcaacatcctgcagctgaaccagaccctggaggagtgtgtgccccgggtgcgctctgtgcaccacgtgattgaggagtgcaagcaggagaaccagtacctggagggcaacacccagctgctggagaaggtgaaggcccacgagatcgcctggctgcacggcaccatccagacccaccaggagcggccccgggtgcagaaccaggtgatcctggaggagaacaccaccctgctgggcttccaggacaagcacttccagcaccaggccaccatcgccgagctggagctggagaagaccaagctgcaggagctgaccaggaagctgaaggagcgggtgaccatcctggtgaagcagaaggatgtgctgagccatggagagaaggaggaggagctgaaggccatgatgcatgacctgcagatcacctgcagcgagatgcagcagaaggtggagctgctgcgctatgaaagtgagaagctgcagcaggagaacagcatcctgagaaatgagatcaccaccctgaatgaagaagattccatcagcaacctgaagctgggcaccctgaatggcagccaggaggagatgtggcagaagacagaaacagtgaagcaggagaatgctgctgtgcagaagatggtggagaacctgaagaagcagatcagcgagctgaagatcaagaaccagcagctggacctggagaacacagagctgagccagaagaacagccagaaccaggagaagctgcaggagctgaaccagaggctgacagagatgctgtgccagaaggagaaggagcccggcaacagcgccctggaggagcgggagcaggagaagttcaacctgaaggaggagctggagcgctgcaaggtgcagagcagcaccctggtgagcagcctggaggccgagctgtctgaggtgaagatccagacccacatcgtgcagcaggagaaccacctgctgaaggatgagctggagaagatgaagcagctgcaccgctgcccagacctgagtgacttccagcagaagatcagctctgtgctgagctacaatgagaagctgctgaaggagaaggaggccctgtctgaggagctgaacagctgtgtggacaagctggccaagagcagcctgctggagcacagaattgccaccatgaagcaggagcagaagtcctgggagcaccagagcgccagcctgaagagccagctggtggccagccaggagaaggtgcagaacctggaggacacagtgcagaatgtgaacctgcagatgagcaggatgaagagtgacctgcgggtgacccagcaggagaaggaggccctgaagcaggaggtgatgagcctgcacaagcagctgcagaatgctgggggcaagtcctgggcccctgagatcgccacccaccccagcggcctgcacaaccagcagaagaggctgtcctgggacaagctggaccacctgatgaatgaggagcagcagctgctgtggcaggagaatgaaaggctgcagaccatggtgcagaacaccaaggccgagctgacccacagccgggagaaggtgcggcagctggagagcaacctgctgcccaagcaccagaagcacctgaaccccagcggcaccatgaaccccacagagcaggagaagctgagcctgaagcgggagtgtgaccagttccagaaggagcagagccctgccaacaggaaggtgtcccagatgaacagcctggagcaggagctggagaccatccacctggagaatgaaggcctgaagaagaagcaggtgaagctggatgagcagctgatggagatgcagcacctgcggagcacagccacccccagccccagcccccacgcctgggacctgcagctgctgcagcagcaggcctgccccatggtgccccgggagcagttcctgcagctgcagaggcagctgctgcaggccgagcgcatcaaccagcacctgcaggaggagctggagaacagaacatctgagaccaacaccccccagggcaaccaggagcagctggtgacagtgatggaggagaggatgattgaggtggagcagaagctgaagctggtgaagaggctgctgcaggagaaggtgaaccagctgaaggagcagctgtgcaagaacaccaaggcagatgccatggtgaaggacctgtatgtggagaatgcccagctgctgaaggccctggaggtgacagagcagaggcagaagacagctgagaagaagaactacctgctggaggagaagatcgccagcctgagcaacatcgtgaggaacctgaccccagcccccctgaccagcaccccacccctgcggagctag

SEQ ID NO: 206545 - DNA, 306 bp, Artificial Sequence
  derived and/or modified sequence
atggatgaggtggagcaggaccagcacgaggcccggctgaaggagctgtttgacagctttgacaccactggaacaggcagcctgggccaggaggagctgacagacctgtgccacatgctgagcctggaggaggtggcccctgtgctgcagcagaccctgctgcaggacaacctgctgggccgggtgcactttgaccagttcaaggaggccctgatcctgatcctgagcaggaccctgagcaatgaggagcacttccaggagccagactgcagcctggaggcccagcccaagtatgtgcggggctag

SEQ ID NO: 206546 - DNA, 6402 bp, Artificial Sequence
  derived and/or modified sequence
atggacgaggtggagcaggaccagcacgaggcccggctgaaggagctcttcgatagtttcgacacaaccggaaccgggtccctcggccaggaagaactcactgacctttgccatatgctgtctttggaggaggtagctccagtcctgcagcagaccttgctgcaggacaatctactaggaagagtacacttcgaccaattcaaagaggcactgatcctgattttgtctcgcacgctgtccaatgaggagcactttcaagagcccgattgtagcctggaagcgcagcccaagtatgtgaggggcggcaaaagatatggaaggcgatcactgcccgagtttcaggagtcagtcgaagaattccctgaggtgaccgtgattgagccactagatgaggaggcgagaccctcccatatcccagctggtgattgctccgaacattggaagacccagcggagcgaggagtacgaagcggagggccaactcagattctggaatcccgacgacttgaatgcttcacagtctgggtccagccctccccaggattggatcgaagagaagctgcaggaagtgtgtgaagatctgggtattacaagagatgggcatcttaaccggaagaagttggttagtatttgtgagcagtacgggctgcagaatgtggacggagagatgctcgaagaggttttccacaacctcgatccagatggcacaatgtcggtggaggactttttttatgggttgttcaaaaacggtaaaagccttacaccctcagccagcactccgtacaggcagttaaaaaggcacctgagcatgcagtcattcgacgaatcaggccgccggacaacaaccagcagcgccatgacctcaaccattggtttccgagtcttctcctgcctcgacgacggaatgggccacgccagcgttgagcgtatactcgatacctggcaggaggagggtatcgagaacagtcaggagattctcaaggctctcgactttagtctcgatgggaatatcaacctcacggaactcactcttgctttggagaacgagctgctcgtgaccaaaaacagtattcatcaggctgctttagcatcctttaaggctgaaatccgacacctgctggaacgtgtggatcaggtcgtcagggagaaagagaagctgcggtctgacctggacaaggccgaaaaactaaaatccttaatggcgtctgaggtggatgaccatcatgccgccatagaacggagaaatgagtacaacctgcgcaagctggacgaggaatacaaggaaaggatcgctgcactgaaaaacgagctcaggaaagaacgggagcagattttgcaacaagcaggcaagcaacggctcgagcttgagcaggagatcgaaaaggctaagactgaggagaattatattcgtgaccgcttggctcttagcttaaaagagaactctcgtttggaaaacgaactgctggagaacgcagaaaaactcgccgagtacgagaacttgactaacaaacttcagcgtaacctcgaaaacgttctggcagaaaaattcggagatctggaccctagctccgctgagttctttctgcaggaggaaaggctgacccagatgcgcaatgagtatgagcgccagtgccgggtactacaggaccaggtggacgaacttcagagtgagctggaagagtaccgcgcccagggtcgagtcttgcgattgccactcaagaattcaccgagcgaggaggtggaagcaaactcaggcgggattgaaccagagcacgggctgggcagcgaggagtgtaaccctctaaacatgtcgattgaagctgagcttgtcatcgaacagatgaaagagcaacatcatcgtgatatatgttgtcttcggttagagcttgaggacaaggtgaggcattacgagaaacaattggacgaaactgtggtatcctgtaaaaaagcccaggagaatatgaaacaacggcatgagaatgagacccacaccctagaaaagcagatcagcgatttgaagaacgagatcgctgagctgcagggccaggccgcagtccttaaagaggcccaccatgaggcaacttgcagacatgaagaagagaaaaagcagctccaggtgaagcttgaagaggaaaaaacacacttacaggagaagcttaggcttcagcacgagatggaacttaaagcccgattaacgcaggcacaggcatccttcgaaagagaacgagagggactccaatcttccgcctggacagaggagaaagtacgcgggctgacccaggaattggagcagttccatcaggagcagctgactagcctcgtcgaaaagcacacgctggagaaggaagagctgcggaaggagctgctggaaaagcatcagcgtgagctgcaggaagggagagagaaaatggagactgaatgtaaccgtcggactagccagattgaagcccaatttcaatccgattgccagaaagttactgagcggtgcgagtcagccctacagtctctagaaggaaggtatcgacaggaactgaaggaccttcaagaacagcaaagggaggaaaaaagccagtgggaatttgagaaggatgagttaactcaggaatgtgctgaagctcaagagcttctcaaagaaaccctgaagcgggaaaagacaacgagcttagtactgactcaggaacgggagatgttagagaaaacctacaaagagcatctgaattccatggttgtggaacgacagcagctgcttcaggatctcgaagatctgcgcaatgttagcgaaacccagcagtctttattgagcgaccagatcctcgaactgaaatcctcacacaagcgcgagttgagagaacgcgaggaagtgttgtgccaggccggggccagcgagcagcttgcctcgcagcggctcgaacgacttgagatggagcatgaccaggagcggcaggagatgatgtcaaagctcttagccatggaaaacatacacaaggccacttgcgagactgctgaccgcgaacgagcagaaatgtctacggaaatatcaaggctccaatctaagattaaggagatgcaacaggctacaagtcccttatcaatgctgcaatctgggtgccaggtcattggcgaggaggaggttgagggggatggggcactcagtctgctgcaacagggggagcagctcctggaagagaacggagatgtgctgctcagtctacagcgagcacacgagcaggctgtgaaagaaaatgttaagatggccactgagatttcacggttgcagcagagattgcagaagcttgagccaggattggtgatgtcctcttgcctcgatgagccagccaccgagtttttcggaaacactgcagagcagactgaacaattcctgcagcagaacaggactaaacaggtggagggggtaacccggcgacacgtgctgtcagacctcgaggacgacgaagtaagggatttgggtagcacaggaaccagctctgtgcagcgccaggaagtaaagattgaggagagcgaggcctcagtggagggtttctccgagctggagaatagtgaagagacaagaacagagagctgggaacttaaaaaccagatctcccagcttcaagagcaacttatgatgctctgcgccgactgtgacagggcctccgagaagaaacaggatttgctgtttgatgtgagcgtattgaaaaaaaagctgaagatgctggagcgtattccagaagcttcccctaaatataagctgctgtacgaggatgtgtctcgcgaaaatgactgccttcaggaggaactgaggatgatggagacacggtacgacgaggcattggagaacaataaagagctgacggccgaagtgtttaggttacaggacgagttgaagaaaatggaggaggtcacagagacattcctgtcgttagaaaaaagttatgacgaggtgaaaatagaaaacgagggtctcaacgtgcttgtgctgcgcctgcaaggcaagatagagaaattgcaagaaagtgtggtgcaacgatgtgactgctgtctctgggaagcctctctggaaaatctggagattgaacccgacggtaacattctgcagctgaaccagactctggaggagtgcgtcccgcgagtgagaagtgtacaccacgtgatcgaggaatgtaagcaagagaatcaatacctggaggggaatacccagctcctggaaaaagtcaaggcgcatgagatcgcctggctgcacggcacaatccagacccatcaggagaggccgagagtgcagaatcaagtgatattggaggagaacactacccttttgggcttccaggacaagcacttccagcaccaggctaccatcgccgaattagaactggaaaagactaaattacaggaactgacacgcaaactgaaggaaagggtgacaatcctggtgaagcagaaagacgtactttctcacggggagaaagaagaagagctgaaagcgatgatgcatgacctgcagataacctgctctgagatgcagcaaaaagttgagctgctcagatatgaaagcgagaaactacagcaggaaaactcaattttgcgcaacgagatcacaactcttaatgaagaggactcaatctccaacctgaagctggggacactgaacgggtctcaggaggaaatgtggcagaagacagaaaccgtgaagcaggagaatgccgccgtgcagaaaatggttgagaacctgaaaaagcagattagtgaactgaagatcaaaaatcagcagctggatctggaaaacactgagctgtctcagaagaactctcagaaccaggagaaactgcaagagttaaaccagagactgactgaaatgttgtgtcaaaaagaaaaggagcctggaaacagcgccctggaagagcgcgagcaggagaaatttaacctgaaagaagagcttgagcgctgtaaggtacaaagttcaacgcttgtgtcctccctggaggccgagctctcagaagtcaagatccagactcatatagtgcagcaagagaatcatctcctgaaggacgagctggagaagatgaagcagctacaccggtgtccggacctgagcgatttccagcagaagatttcctccgtcctgagctacaatgagaaattactcaaagagaaggaggcactgagcgaagagcttaactcgtgcgtggataagttggccaagtccagtctgctggagcatcggattgccactatgaagcaggagcagaagtcttgggagcatcagagcgcttccttaaagagccagctagtggcatcacaggaaaaggtgcagaacctggaggacacagttcagaacgtgaatctgcagatgtctcggatgaagtctgatctcagagttactcagcaggaaaaggaggccctgaagcaggaagtaatgtcccttcacaagcagctccaaaatgcaggaggcaaaagctgggctccggaaatcgccacccatccgtcaggtctacacaaccagcagaaaaggcttagttgggataagttagaccatctgatgaatgaagaacaacagctgttatggcaagaaaatgaacgcctgcaaaccatggttcagaatactaaggccgagcttacacacagccgggaaaaggtccggcagctcgaaagtaacctgttgccaaaacaccagaagcatctaaaccccagtggaaccatgaatcctaccgagcaagagaaactgagcttgaagcgcgagtgtgaccagtttcaaaaagagcaatcccctgcgaaccgaaaagtgagccagatgaatagcctggagcaggaattagagacaatccacttagaaaacgagggactcaaaaaaaagcaagtaaagctggatgaacaactgatggaaatgcaacacttgcgttctactgctactccgagcccttcacctcacgcttgggacctccagctcctgcagcagcaggcatgtcccatggtaccccgtgagcaatttcttcagctgcaacggcaattgttgcaggcagaacgaattaaccagcaccttcaggaagagctggaaaatcgcacaagtgaaacaaatactccacagggcaatcaggaacagcttgtgactgtcatggaagaaagaatgattgaggtggagcagaagttgaaactagttaaacgcctgctccaagagaaggtgaatcagctgaaagagcagctctgtaaaaacacaaaggcagatgctatggtgaaagatttgtacgtagaaaatgcacagctgttaaaggcactcgaggttacagagcagagacagaagacggctgagaagaaaaattacttgcttgaagagaaaatcgcatccttgtctaatatagtccgcaaccttacacccgcaccgctgacttccacgcctccgctgagatcctag

SEQ ID NO: 206547 - DNA, 6351 bp, Artificial Sequence
  derived and/or modified sequence
atggacgaggtggagcaggaccagcacgaggcccggctgaaggagctgtttgacagctttgacaccaccggcacaggaagcctgggacaagaagagctgacagacctctgccatatgcttagtctggaagaagttgcacccgtcttgcagcaaactttattgcaggacaacctgctcggacgggtccactttgaccaatttaaggaggcgttaattctgatcctatctcgaacgctcagcaatgaggagcacttccaggagcccgactgttctcttgaagcacagcctaagtacgtgcgcggtggaaagcggtatggtcggcggtctctaccggagttccaggagtctgtagaagaatttccagaagtgacggtgatcgagcctctagatgaagaggcccggccgtcccacattcccgcgggcgactgctccgagcactggaagactcagaggtctgaagaatacgaggccgaggggcagcttcggttctggaatccggatgatctgaacgcatcccagagcgggagcagcccaccccaggattggatagaggagaagctacaagaggtttgtgaggacctgggcattacacgcgacgggcatctgaatcggaaaaagttagtcagcatctgcgaacagtatgggctgcagaatgttgacggtgagatgctggaagaggtttttcataaccttgatcctgatggaacaatgtcagttgaagacttcttctatggtcttttcaagaacggtaaaagtttgacaccttccgctagcaccccatatcgccaactgaaacggcacctttctatgcagtcgtttgacgagtccggccgccgaacaacgactagttctgcgatgaccagtaccatcgggtttagggtgttttcctgtctggatgatggcatgggtcatgcttcggttgagaggattctggatacatggcaggaggaaggtattgagaactcgcaggagattcttaaagcactggatttctccttggacggcaacattaacttgactgaactgaccttggccttggagaatgagttattggtgaccaaaaattccatccatcaggccgccctggctagttttaaagctgagatccgccatctgctggagcgtgttgatcaggttgtccgggagaaagagaagctcagatctgaccttgacaaggcagagaagcttaaaagccttatggcttccgaggtggacgatcaccacgccgctatcgaaaggcggaacgagtataaccttcggaaactcgatgaggaatacaaggagcggatcgcagctctcaagaacgaactgcggaaagaaagggaacagattttgcagcaggcaggcaagcaaagactggaactggagcaggaaatcgaaaaggcgaagactgaggaaaactacatccgtgatagactcgccctctccctgaaagagaattcgcggctggaaaatgaacttcttgagaatgctgagaatgtgctcgcggagaaattcggagacctggacccttcctcagccgaattcttcctacaggaggagaggctgacacagatgcgtaatgagtatgagcgccagtgcagagtgttgcaggatcaggtggatgagttgcagtcagaactggaagagtatagagcacagggtcgcgtcctgagattgcccctaaagaattccccctccgaagaagtggaagcgaactcaggggggatcgaacccgagcacgggctgggaagcgaagagtgcaatccactgaacatgtcgattgaagccgaactggtaatcgagcagatgaaagagcagcaccacagagatatctgctgccttcggctggaactagaggacaaggtgcgccactatgagaagcagttggatgagacagttgtgtcctgtaagaaagctcaagagaatatgaaacagcggcatgaaaatgagacacatacgcttgagaaacagatatctgaccttaaaaatgagatcgcggaactacagggacaagcggccgttctcaaggaagcacaccacgaagcaacgtgcagacatgaagaagaaaagaaacagcttcaggtgaaactggaggaagaaaagacacacctgcaggagaagctgagactgcaacacgagatggaactcaaggccagacttacccaggcccaggcctcatttgagcgggaacgggaaggcctacagtctagcgcatggaccgaggagaaagtgagaggtcttactcaggaacttgaacagttccatcaggaacagcttacatcattggttgaaaagcatactttggagaaagaagaactcagaaaagaactactggaaaagcatcaaagggagttgcaggagggcagagagaagatggagacagagtgcaaccggcgtaccagtcaaatcgaggcccagtttcagagcgattgccaaaaggtgacagaaaggtgcgagtcagctctgcagagcttggaagggagataccggcaagaactgaaagatctccaagaacagcagcgcgaagaaaaaagtcagtgggagtttgagaaagacgaactgactcaggagtgtgcggaagctcaggagctccttaaggagaccctcaaacgcgagaaaaccacatcactagttttgacacaggagagggaaatgctcgaaaaaacttacaaagagcatctgaattccatggtggtcgagcgacagcagctgctccaagatctggaggatctacgaaatgtctccgagactcaacagagtcttctctctgatcagattctggagttaaaaagcagccataagagggagctgagagaaagggaggaggtgctgtgtcaggcaggcgcttctgagcagctggcttctcagagactcgaacggttggagatggaacacgaccaagagaggcaggaaatgatgtccaagttgttggccatggaaaacattcataaagctacttgcgagactgctgacagagaacgagcagaaatgtctaccgaaatctcccgattgcagtccaaaataaaggagatgcagcaggccacttctccgctgagtatgctgcagtcagggtgccaggttattggtgaggaagaggttgagggtgatggtgccttatcactcctgcagcagggcgagcagctactcgaagaaaatggagatgtgttgctctctcttcagagagctcatgaacaggccgttaaagagaatgtgaaaatggccactgagatttccaggctccagcagcgtctgcaaaagcttgagcccggcttagtgatgtcctcctgtttagacgagcctgccactgagtttttcggcaataccgccgagcagactgagcagttcctacagcaaaatcgcacaaagcaagtcgaaggtgtcacccgacggcatgtcctgagcgacttggaggacgatgaggtgcgtgacctggggagcacaggcacctcttctgtccagaggcaggaagttaaaatagaggagtccgaggcaagcgtagaaggctttagtgagctcgaaaattcagaggagacaagaaccgaaagctgggagctcaagaaccagatcagccagctgcaagaacagttgatgatgctgtgcgcagactgcgacagagcttccgaaaagaaacaagatctcctgttcgacgttagcgtgctgaaaaagaagctgaagatgctggaaagaatccccgaagccagtcccaaatataagctgctgtacgaggacgtgtcccgcgagaatgattgcctgcaggaggagctccggatgatggagacaagatacgacgaagctctagaaaataataaagaactaaccgcagaggtgtttcgccttcaggacgaactgaagaagatggaggaggtaaccgagacgtttctgtccctagaaaagtcatatgacgaggtcaaaatagaaaacgaaggcctgaacgtcctggtactccgattacaaggcaagatagagaagcttcaggaatctgttgtacaaagatgtgattgctgtttgtgggaagccagtctggaaaatctggaaatcgaaccagacggcaatatcttacaattgaaccagacgctggaagaatgcgtccctcgggtgagaagcgtgcaccacgtaattgaggaatgcaagcaggagaatcaatacctggagggcaacactcagctgctggagaaggtgaaggcacacgaaattgcatggctgcacggaactatacagactcatcaggagaggcctcgggtacagaatcaggttattctcgaggagaacacgacattgctgggctttcaggacaaacacttccagcaccaggccacaattgcggaactggaactggagaaaaccaaactccaagagctcacaaggaagctgaaagaacgagtcactattctcgtgaaacagaaggacgtcttgtcacacggggagaaggaggaggaactgaaggccatgatgcatgatctgcaaatcacgtgttcggagatgcagcaaaaagttgaactgctgcgatacgaatcagagaagctccagcaggagaatagcattctccgcaacgagatcacaaccttgaatgaggaagactcaatttccaatctgaagctggggacactcaacggatcacaggaagaaatgtggcaaaagacggagacagtgaaacaggaaaatgccgccgtacagaaaatggtggaaaacctgaaaaagcagatctctgaactgaagatcaagaaccagcagctcgatcttgaaaacaccgagctgagccagaaaaactctcagaaccaggaaaaactgcaagaactaaatcaacgcttaacggaaatgttgtgtcagaaggagaaggaaccagggaatagtgctctggaagagagggagcaagaaaaattcaacttaaaggaggagctggaaaggtgtaaggttcagtctagcactctggtctctagtcttgaggctgagctcagcgaagtaaaaattcagacacatatagtccaacaggagaatcacctgctgaaggatgagctagagaagatgaagcagctgcatagatgtccagatctgtctgactttcaacagaaaatcagttccgtgctgagttataacgagaaactgctaaaagagaaggaggcactctcagaggaactgaacagttgtgttgacaagcttgcaaagtcatccctgcttgaacaccggatagctacaatgaagcaggaacagaagagttgggagcaccaatcagccagtctcaagagtcaactggttgcttctcaggaaaaagtgcaaaatctcgaggacacggtgcaaaacgtaaatctgcagatgtctaggatgaagtcggacctgcgcgtcacacaacaagaaaaagaggctctgaaacaggaagtaatgtccttacataagcagctgcagaatgccgggggcaagagttgggcaccagagatcgcaactcatccatctggcctccataatcagcagaagcggcttagctgggataagctagatcaccttatgaacgaggaacagcaattgttgtggcaggagaatgaacgtttgcaaactatggttcaaaacacgaaagccgaattgacgcacagtcgcgagaaggtgagacagctcgagagtaacctgctgcctaagcatcagaaacacctcaatccttcgggaaccatgaatcccactgaacaggagaagctgtccctgaaaagagagtgtgatcagtttcagaaagaacagagccccgcaaaccgcaaagtgagtcagatgaattccctggaacaggagctcgagactattcacctcgaaaacgagggcctaaaaaagaagcaagtgaagttagacgagcagttgatggaaatgcagcatctacggtctacggccaccccttctcccagcccgcacgcctgggacctacagctacttcagcagcaggcttgccctatggtcccaagggaacagttcctccagctgcagcgccagcttctgcaagccgaaaggatcaatcagcacttgcaagaggagctggagaataggacttctgagacaaatacccctcagggaaatcaagagcaactagtgaccgtcatggaggagagaatgatcgaggtggagcagaaactgaagctggtaaaacggctcctccaagagaaagtgaaccagttgaaggagcaactctgcaaaaatactaaagcagatgctatggtgaaggacctgtacgtcgagaacgctcaactgctgaaggctctggaagtcacagaacaaaggcagaaaaccgcagagaaaaagaattatttgctggaagaaaaaatagcgagcctgtctaatatcgtgcggaacttgactcctgctccactgacgtctacacctcctctgaggagttag

SEQ ID NO: 206548 - DNA, 306 bp, Artificial Sequence
  derived and/or modified sequence
atggacgaggtggagcaggaccagcacgaggcccggctgaaggagctgttcgattctttcgatactacaggcactggttcgctaggacaagaagagttgactgatctttgccacatgctctctctcgaggaggtggcaccagttctgcagcagaccttattgcaagataaccttctagggcgcgtccatttcgaccagttcaaagaggccttgatcctgattttaagtcgaacattgtccaacgaggagcatttccaggagcccgattgctcactggaggcccagccgaagtacgtgcgcgggtag

SEQ ID NO: 206549 - DNA, 6402 bp, Artificial Sequence
  derived and/or modified sequence
atggatgaggtagaacaggaccaacacgaggccagactgaaagagctctttgactcttttgacacaaccggaaccgggagcttgggtcaggaggagttgacagatctctgccacatgctgtctctcgaggaggtcgcccctgttctacagcagacactcctccaggataacctccttggccgagtgcattttgaccagttcaaagaagctctcatactgatactctctcggactctttctaacgaggagcattttcaggagccggactgcagtctcgaggcacaacccaagtatgtgagagggggaaagcgatacggcaggaggagtctacccgagtttcaagagtctgtagaagaattccctgaagtcacagtgattgagccccttgacgaggaagccaggcctagtcatatccccgctggcgactgttcagagcactggaagacccagcgctctgaagagtacgaggctgagggccagctaagattctggaatcctgatgatcttaatgcgagtcagtctgggtctagtcccccacaggattggattgaggagaaactgcaagaggtatgtgaggatctgggcatcacacgcgacggacatttaaaccgcaaaaagctggtttccatttgcgagcagtatggccttcagaacgtggacggcgagatgctggaagaagtgtttcataatcttgatccggatgggacgatgagtgtggaagacttcttttatgggctcttcaagaacggcaagagtctcactccgagcgcctcaacaccctatcgccagcttaagcgtcacctgagcatgcagagttttgatgagtcgggcaggagaaccacaacgtcctctgccatgacctcaacaatcggcttccgggtgttcagttgtttagatgacggaatgggccacgccagcgttgaacgcattctggacacttggcaggaggagggcatcgaaaactcccaggagatccttaaggcccttgatttcagcctggacggaaatattaatctcaccgagctgacattagccttagagaacgaactgctggtaacaaaaaattcaattcaccaggcagccctggccagttttaaagccgaaatcagacacctactagagagagtggatcaggttgttagggagaaggaaaaactaaggtcggatctggataaggccgaaaagttaaaatcgctaatggcgtctgaagtggacgatcaccacgctgccatagaacgccgaaacgagtacaatttgcggaagttggatgaggagtataaagaacggatcgcagcattgaagaacgagctcaggaaggaacgggaacagatactgcagcaagctggaaaacaaaggctggaactggaacaggaaattgagaaggccaaaaccgaggagaactatatcagagaccgacttgcactgagcctgaaagagaactcacgactggagaacgagctgttggagaatgccgaaaagctggcggagtatgagaacttaacaaacaagctgcaaaggaacctggaaaatgtactggcggagaagttcggcgatctcgacccaagcagcgcagagtttttcctgcaggaagagaggttaacccaaatgaggaatgagtacgaacgacagtgtcgggtgctgcaggatcaagttgacgagttgcagtctgaactggaagaatatagggctcaagggcgagtgctcaggctcccactcaaaaattccccaagtgaagaggtggaggcgaatagtgggggtatcgagccagaacatggactgggctcagaggagtgcaatccacttaacatgtccatcgaggcagagctcgttattgagcagatgaaagagcagcatcacagggacatctgttgtctcaggcttgagctggaggataaagtcagacactacgagaagcaacttgatgagacagtcgttagctgtaaaaaagcccaggaaaatatgaagcagagacacgaaaacgaaacacacaccttggaaaaacagatttctgacctgaagaatgagattgccgagctccaagggcaggctgccgtgctgaaggaggcacatcatgaagctacttgtcgacatgaggaagagaagaaacagctccaggtgaaattagaggaagagaaaacacatctccaagagaagctgcgattgcaacatgagatggagctcaaagcgaggctgacacaggctcaggcaagttttgaacgcgaacgcgaaggactgcagtcttcggcctggactgaagagaaggtccgcggtctcacacaggaactcgaacaattccaccaggaacagttgacctccttagtggagaagcatacgctcgagaaggaagagctgcgcaaagaactccttgagaaacatcaacgggagcttcaggaaggacgggagaaaatggaaaccgagtgtaatcgaagaacttctcaaatcgaggcccagtttcaatcagattgtcagaaggtcaccgaacgctgtgaatccgccttgcaatctctggaagggcgataccgacaggagctcaaggacctccaggagcaacagcgcgaggagaagtcccagtgggagtttgaaaaggacgaactgacacaggaatgcgccgaggctcaggagctgctgaaggaaaccctgaagagagaaaagactacctccctagttctgacacaggagcgtgagatgctggagaagacttacaaggagcatctgaattctatggtagttgaacgacagcagctcctgcaggacctagaagacctgaggaacgtgtcagagactcagcagtctctgctatcagatcagatcttagagctgaagagttctcacaaaagggaactgagggaacgggaggaagtgctctgccaggccggagcaagtgaacagctggcgtcgcagcgtttggaacgcttggaaatggagcacgaccaggagcgacaagaaatgatgtcaaagttactagcaatggaaaatatacacaaagctacgtgtgaaacagctgacagggaaagggctgaaatgtcaacagagatttccaggctgcaatctaaaatcaaagagatgcagcaagctacctcccccctgtccatgctccaatcgggctgtcaagtgatcggagaggaggaagtggagggtgacggagccctcagcctgttacaacaaggggagcagttgcttgaagagaatggcgacgtactcttgagcctgcagagagcccacgaacaggcagtcaaagagaatgtgaagatggctaccgagatcagtagactccagcagaggttgcagaagctggaacccggactcgtgatgtcttcatgcctggacgagcctgccacagaattcttcggaaacacagctgaacagactgaacagttcttgcagcagaataggacaaaacaggtcgagggggtgacaaggaggcacgtcttgagcgacttagaagacgacgaagttcgagatctgggttcgactggaacatcttcagtgcaacgccaggaagtgaagatcgaggaatccgaggccagcgtagaggggttcagcgagctcgagaattccgaggaaacacgaaccgaatcatgggaattgaagaaccagattagccagttacaggaacagctgatgatgctgtgtgccgactgcgacagggccagtgagaagaaacaggacttgctgtttgatgtgtccgtgctgaagaaaaaactcaaaatgctggagcgaatccccgaagccagtcctaagtataaactactctacgaagacgtgagccgagaaaacgactgccttcaggaggaactgcgaatgatggagacaagatacgacgaggctctggaaaacaacaaagagctgaccgcagaagtcttccggctgcaggacgagttgaagaaaatggaggaggttaccgagacgttccttagtctggagaagagctatgatgaagtcaaaattgaaaatgaggggctgaatgtcctggtactgcggctgcagggaaaaattgagaaactgcaggagtccgtggttcaaagatgtgattgttgtctgtgggaagccagtctggagaacctggaaatcgagccagacggtaatatcttacaactgaatcagacgctcgaggagtgcgtcccacgagtgagatccgtccaccatgtcatcgaagaatgcaagcaggaaaatcagtacctagaggggaatactcaactgctagagaaagttaaggcacatgaaattgcctggttgcatgggaccattcaaactcaccaggaaaggcctagggttcagaaccaggtaatcctggaagagaatacaactctactaggttttcaagacaaacacttccaacatcaggccactatagcggaactcgagctggaaaagacaaaattgcaagaactgacaaggaaattaaaggaacgcgttaccattctggtgaaacaaaaagatgtactatcccatggagagaaagaagaagaactgaaggcaatgatgcacgacctgcagattacgtgttcagagatgcagcagaaagtcgaactcctgagatacgaatcggaaaagctacagcaggagaattcaattttgcggaatgaaatcactaccctgaatgaagaggattccataagcaaccttaaactgggtacactcaatggcagccaggaggagatgtggcagaaaaccgagacagtaaagcaggagaacgcagccgtccagaagatggtggagaatctaaaaaaacagatctctgaactgaagatcaagaatcagcagttagatctggagaacacggagctgagccagaaaaactcccagaatcaggaaaagcttcaggagctcaaccagcgcctgactgagatgctttgtcagaaagagaaggaacccggaaattctgctttagaagagcgcgaacaggagaagttcaacctcaaggaggagctggagcggtgcaaggtgcagtctagtaccctagtcagctctttagaagctgaattgtccgaggtgaaaattcagacccacatcgtccagcaggaaaatcacctgctcaaagacgagctcgagaaaatgaagcagctgcaccgctgtccagacctgtccgattttcaacagaagatcagtagtgtgttgtcctacaatgagaagctcctgaaggaaaaggaggcattatcagaagagctgaacagctgcgtggataagttagctaagtcatccctgttagagcataggatagcgacaatgaagcaggaacaaaagagctgggaacaccagtcagcttctcttaagtctcagctggtcgcctcccaggagaaggtacagaacctggaggatacagtgcaaaacgtgaacctccagatgtcgagaatgaaatctgacctgagggtcacacaacaagaaaaggaagctcttaaacaagaggttatgagcttacataagcaactgcagaatgccggaggaaagtcgtgggcaccagagattgctacgcacccatcaggacttcacaatcaacagaagcgcctatcttgggataagctggaccacctcatgaatgaagaacagcaactgctgtggcaggaaaatgaacggctccaaaccatggtacagaacactaaggccgagttgactcactccagggaaaaagtacggcagttggagagtaatctgctgccaaaacaccaaaagcacctgaacccttctggaaccatgaatcctacagaacaggaaaaattgagtctcaaaagagaatgcgaccaattccaaaaggaacagtccccagccaaccggaaggtttcgcaaatgaacagcctcgaacaagagctggaaactattcacttggaaaacgagggtctgaaaaaaaagcaggttaaactcgatgagcagctgatggagatgcagcatctgagatcaaccgcaacgcccagcccgagccctcacgcctgggacctgcagcttctgcagcagcaagcctgcccgatggttccacgtgaacagtttctacagttgcagcgacagctgctgcaggctgagcgcatcaatcagcatttacaggaggagctggagaatagaacatccgagaccaatactccccagggtaaccaagaacagctcgtcaccgttatggaggagaggatgatcgaagtcgagcagaaactaaagctcgtgaagagactccttcaggagaaagtgaaccagttaaaggagcagctgtgcaagaacacaaaagcagatgcaatggttaaagatctttacgtggagaacgctcagttgctaaaagcactggaggtcacagagcagcgccaaaagaccgctgaaaaaaaaaactatcttctcgaggaaaagatcgcaagcttgagtaatatcgtccgtaatctgacgccggctcccttgacctctaccccaccccttcggtcttag

SEQ ID NO: 206550 - DNA, 10293 bp, Artificial Sequence
  derived and/or modified sequence
ccgagccgggagccgagcgcgctgggcgcggccgtcccgctgccgccgccaagcccggagtgcgccagcggccatggttcccgcggcggcgccgggcgcctgagccccgggacgcaagcgctggaggcgggctgccggctgtgcgggcgctccggagagaccgacagaaggtgagcactgtgggctatgggatggatgaggtggagcaggaccagcatgaggcccgactcaaggagctgtttgacagttttgacacgacgggcacagggtccctggggcaggaggaactcaccgacctttgccacatgttgagcttggaggaggtggccccagtgctgcagcagacattacttcaggacaacctcttgggcagggtacattttgaccaatttaaagaagcattaatactcatcttgtccagaactctgtcaaatgaagaacactttcaagaaccagactgctcactagaagctcagcccaaatatgttagaggtgggaagcgttacggacgaaggtccttgcccgagttccaagagtccgtggaggagtttcctgaagtgacggtgattgagccactggatgaagaagcgcggccttcacacatcccagccggtgactgcagtgagcactggaagacgcaacgcagtgaggagtatgaagcggaaggccagttaaggttttggaacccagatgacttgaatgcttcacagagtggatcttcccctccccaagactggatagaagagaaactgcaagaagtttgtgaagatttggggatcacccgtgatggtcacctgaaccggaagaagctggtctccatctgtgagcagtatggtttacagaatgtggatggagagatgctcgaggaagtattccataatcttgatcctgacggtacaatgagtgtagaagattttttctatggtttgtttaaaaatggaaaatctcttacaccatcagcatctactccatatagacaactaaaaaggcacctttccatgcagtctttcgatgagagtggacgacgtaccacaacctcatcagcaatgacaagtaccattggctttcgggtcttctcctgcctggatgatgggatgggccatgcatctgtggagagaatactggacacctggcaggaagagggcattgagaacagccaggagatcctgaaggccttggatttcagcctcgatggaaacatcaatttgacagaattaacactggcccttgaaaatgaacttttggttaccaagaacagcattcaccaggcggctctggccagctttaaggctgaaatccggcatttgttggaacgagttgatcaggtggtcagagaaaaagagaagctacggtcagatctggacaaggccgagaagctcaagtctttaatggcctcggaggtggatgatcaccatgcggccatagagcggcggaatgagtacaacctcaggaaactggatgaagagtacaaggagcgaatagcagccttaaaaaatgaactccgaaaagagagagagcagatcctgcagcaggcaggcaagcagcgtttagaacttgaacaggaaattgaaaaggcaaaaacagaagagaactatatccgggaccgccttgccctctctttaaaggaaaacagtcgtctggaaaatgagcttctagaaaatgcagagaagttggcagaatatgagaatctgacaaacaaacttcagagaaatttggaaaatgtgttagcagaaaagtttggtgacctcgatcctagcagtgctgagttcttcctgcaagaagagagactgacacagatgagaaatgaatatgagcggcagtgcagggtactacaagaccaagtagatgaactccagtctgagctggaagaatatcgtgcacaaggcagagtgctcaggcttccgttgaagaactcaccgtcagaagaagttgaggctaacagcggtggcattgagcccgaacacgggctcggttctgaagaatgcaatccattgaatatgagcattgaggcagagctggtcattgaacagatgaaagaacaacatcacagggacatatgttgcctcagactggagctcgaagataaagtgcgccattatgaaaagcagctggacgaaaccgtggtcagctgcaagaaggcacaggagaacatgaagcaaaggcatgagaacgaaacgcacaccttagaaaaacaaataagtgaccttaaaaatgaaattgctgaacttcaggggcaagcagcagtgctcaaggaggcacatcatgaggccacttgcaggcatgaggaggagaaaaaacaactgcaagtgaagcttgaggaggaaaagactcacctgcaggagaagctgaggctgcaacatgagatggagctcaaggctagactgacacaggctcaagcaagctttgagcgggagagggaaggccttcagagtagcgcctggacagaagagaaggtgagaggcttgactcaggaactagagcagtttcaccaggagcagctgacaagcctggtggagaaacacactcttgagaaagaggagttaagaaaagagctcttggaaaagcaccaaagggagcttcaggagggaagggaaaaaatggaaacagagtgtaatagaagaacctctcaaatagaagcccagtttcagtctgattgtcagaaagtcactgagaggtgtgaaagcgctctgcaaagcctggaggggcgctaccgccaagagctgaaggacctccaggaacagcagcgtgaggagaaatcccagtgggaatttgagaaggacgagctcacccaggagtgtgcggaagcccaggagctgctgaaagagactcttaagagagagaaaacaacttctctggtcctgacccaggagagagagatgctggagaaaacatacaaagaacatttgaacagcatggtcgtcgagagacagcagctactccaagacctggaagacctaagaaatgtatctgaaacccagcaaagcctgctgtctgaccagatacttgagctgaagagcagtcacaaaagggaactgagggagcgtgaggaggtcctgtgccaggcaggggcttcggagcagctggccagccagcggctggaaagactagaaatggaacatgaccaggaaaggcaggaaatgatgtccaagcttctagccatggagaacattcacaaagcgacctgtgagacagcagatcgagaaagagccgagatgagcacagaaatctccagacttcagagtaaaataaaggaaatgcagcaggcaacatctcctctctcaatgcttcagagtggttgccaggtgataggagaggaggaggtggaaggagatggagccctgtccctgcttcagcaaggggagcagctgttggaagaaaatggggacgtcctcttaagcctgcagagagctcatgaacaggcagtgaaggaaaatgtgaaaatggctactgaaatttctagattgcaacagaggctacaaaagttagagccagggttagtaatgtcttcttgtttggatgagccagctactgagttttttggaaatactgcggaacaaacagagcagtttttacagcaaaaccgaacgaagcaagtagaaggtgtgaccaggcggcatgtcctaagtgacctggaagatgatgaggtccgggacctgggaagtacagggacgagctctgttcagagacaggaagtcaaaatagaggagtctgaagcttcagtagagggtttttctgagcttgaaaacagtgaagagaccaggactgaatcctgggagctgaagaatcagattagtcagcttcaggaacagctaatgatgttatgtgcggactgtgatcgagcttctgaaaagaaacaggacctactttttgatgtttctgtgctaaaaaagaaactgaagatgcttgagagaatccctgaggcttctcccaaatataagctgttgtatgaagatgtgagccgagaaaatgactgccttcaggaagagctgagaatgatggagacacgctacgatgaggcactagaaaataacaaagaactcactgcagaggttttcaggttgcaggatgagctgaagaaaatggaggaagtcactgaaacattcctcagcctggaaaagagttacgatgaggtcaaaatagaaaatgaggggctgaatgttctggttttgagacttcaaggcaagattgagaagcttcaggaaagcgtggtccagcggtgtgactgctgcttatgggaagccagtttagagaacctggaaatcgaacctgatggaaatatactccagctcaatcagacactggaagagtgtgtgcccagggttaggagtgtacatcatgtcatagaggaatgtaagcaagaaaaccagtaccttgaggggaacacacagctcttggaaaaagtaaaagcacatgaaattgcctggttacatggaacaattcagacacatcaagaaaggccaagagtacagaatcaagttatactggaggaaaacactactctcctaggctttcaagacaaacattttcagcatcaggccaccatagcagagttagaactggagaaaacaaagttacaggagctgactaggaagttgaaggagagagtcactattttagttaagcaaaaagatgtactttctcacggagaaaaggaggaagagctgaaggcaatgatgcatgacttgcagatcacgtgcagtgagatgcagcaaaaagttgaacttctgagatatgaatctgaaaagcttcaacaggaaaattctattttgagaaatgaaattactactttaaatgaagaagatagcatttctaacctgaaattagggacattaaatggatctcaggaagaaatgtggcaaaaaacggaaactgtaaaacaagaaaatgctgcagttcagaagatggttgaaaatttaaagaaacagatttcagaattaaaaatcaaaaaccaacaattggatttggaaaatacagaacttagccaaaagaactctcaaaaccaggaaaaactgcaagaacttaatcaacgtctaacagaaatgctatgccagaaggaaaaagagccaggaaacagtgcattggaggaacgggaacaagagaagtttaatctgaaagaagaactggaacgttgtaaagtgcagtcctccactttagtgtcttctctggaggcggagctctctgaagttaaaatacagacccatattgtgcaacaggaaaaccaccttctcaaagatgaactggagaaaatgaaacagctgcacagatgtcccgatctctctgacttccagcaaaaaatctctagtgttctaagctacaacgaaaaactgctgaaagaaaaggaagctctgagtgaggaattaaatagctgtgtcgataagttggcaaaatcaagtcttttagagcatagaattgcgacgatgaagcaggaacagaaatcctgggaacatcagagtgcgagcttaaagtcacagctggtggcttctcaggaaaaggttcagaatttagaagacaccgtgcagaatgtaaacctgcaaatgtcccggatgaaatctgacctacgagtgactcagcaggaaaaggaggctttaaaacaagaagtgatgtctttacataagcaacttcagaatgctggtggcaagagctgggccccagagatagctactcatccatcagggctccataaccagcagaaaaggctgtcctgggacaagttggatcatctgatgaatgaggaacagcagctgctttggcaagagaatgagaggctccagaccatggtacagaacaccaaagccgaactcacgcactcccgggagaaggtccgtcagttggaatccaatcttcttcccaagcaccaaaaacatctaaacccatcaggtaccatgaatcccacagagcaagaaaaattgagcttaaagagagagtgtgatcagtttcagaaagaacaatctcctgctaacaggaaggtcagtcagatgaattcccttgaacaagaattagaaacaattcatttggaaaatgaaggcctgaaaaagaaacaagtaaaactggatgagcagctcatggagatgcagcacctgaggtccactgcgacgcctagcccgtcccctcatgcttgggatttgcagctgctccagcagcaagcctgtccgatggtgcccagggagcagtttctgcagcttcaacgccagctgctgcaggcagaaaggataaaccagcacctgcaggaggaacttgaaaacaggacctccgaaaccaacacaccacagggaaaccaggaacaactggtaactgtcatggaggaacgaatgatagaagttgaacagaaactgaaactagtgaaaaggcttcttcaagagaaagtgaatcagctcaaagaacaactctgcaagaacactaaggcagacgcaatggtgaaggacttgtatgttgaaaatgcccagttgttgaaagctctggaagtgactgaacagcgacagaaaacagcagagaagaaaaattacctcctggaggagaagattgccagcctcagtaatatagttaggaatctgacaccagcgccattgacttctacacctcctttgaggtcatagccaaaccaaagggtacactcatatttgtgcactttactgaaatagatgaacatttcagtaggttctcaacttaaaattaagcctaacctaaaactgccagcaacacaactggagtttccatttatcataattagtttttctaaatagacccttatgggagtttgaaaataaatactcacatatttcactacttaaattattcccaagatttgaatttattttaaaattttaatagccaccaagaatgtggacatatgaaaattcaagaacctaaaaaataccagttttgaatgagtttttgtggttttggttttttttttaattattacaaatctatgtgtaaaatctagatatttgaagtttgagatctgatgagaatggttgttataaactttattttaaaaccaaatttaggtgttcttacatatttaaatactggaaagtcattataatagttttggttctttgaattggtagacaattagtagagtataattggttaggaggcagggcttattaagtggttattaaccgctgacatcagacaaacccaaatctgtagaattctaaccttctaacacctgtgacagtattaccactcttcttgtattatagatttagaactgatttactcaattgcactcttaactaatgttaaaagcttacttgctttaaacagccttttcttctttctcttaaaagtttcatttggggagctggtcttctaagaaacggataaagccacataattaaagcagttgaactatagggaaagcactgaacaaaccactttggagtaaatagctactcttagaaaagagggataagcagaccatgtaggttttctgtctctcaaatcttagagttcataaatttacttgaggttgcctcaagaactcagggaacaatactgtaaactgtcttcctgaactactgtagggcctctctaagaatttgaaatgtataaaccatgtgacctcatttatttgtcttatatatttacagccatactagaatttttatttctacgtttttagtaaatttaatattctgggggaaaaaaggccttgattttagggttaaaaacctgacttatagaagagtttatttaatataggtcaaaattttctgtgtttcttattccttctatacctcaaatctgattctaagaatttcttactgtgataatcattggcatgccacctgaggtcaaggagtgccaaataggactttccactcatgctcaagatcaaaactttatagaacagtcaacattttagattcggtaaccttttttttcttccaattataatctctgctagccacttccgccagcagttggtggaagacttactaggtgcagggcactttccaagttcatcacaacaacctgcttgttttcatgagacaataatccgaaaagttcgctttgatatattcctggagggccaagcccatctatttacaaaaggtgaacagcaaaatcaagcactgctttatgggcaggaacacaagagaaagcaaactgcccaagaagtcatcatgtcagaaactcaatctcaacaaaataatttccatcagggaacttcagggtttcttgggggcttatgagtctcaccggtcaacccaggaggcctcactacaagagccttgacaaggcactgttttttgtgggactgggagttcacactgatgaagcaaacctttgaatttttgcacagctcttgtcagaaagccctgagttccccctggataaagagttaattttaatccttccctataattatacttcaaaatatttgacatctgctattatgccttctttagatctttcttctgtggtgcagacatttctagtaagtgtttgactacttgtatggcattagctttcacagaaaattgtttcacttaaaactgtggattggcctaggctaaggacaaaaataaactaagtacctgtagtgtatttatgtgatatgtgtcaagttactcaaagttattgctgttggaactgaacaataatatttcccagatagctggccttagcatgtgatcacggttgttgtatttttaatttttgtcttttacagtatgagaggtgtaggttaatttgtttatttcctataaatttgtatttatgtgtatataaaatgtacaatgaatgtaaatatgactttctggaaagtttagactacatttagaatctctattcaaaatcaaaatgctgctcaaatgaatttaaccaacatctaggtgcttaatttctcattttatcccacttatgagattgggaaaaagatcaatatgagaaataccatacagataccttaaatgtatgcatttgtgcaacaatttttgagaaggtgagtggcaatttataatttagttggcaatttataatagaacttatagcttttaaaagaccttttaaagacattaaatgtaaacttaaaaatgtttagatcttgtttcaaactttacaatagcattcttcaaaatattaagttatatattttataggcatttagttgcttattaaaagcactgattttcaaactttttgatttaagaacaattatttaagatcgtctcagaagatgggatcttcgtttcaagaaaagggaatcaagtttgcctttgagataatacgttacactaagaaaaggaaaatgtggatagtaaaacccacctctctcatcctattgtactctcttctgctttttagaagcctgcacttaagcttagatttgtgaagggagagtagaaggggagaagtagaaccacagtgttttatttatttttctaaaactcttactaaatccagattttttaaactgttttaaatgtgaattcttcccagaaatttcaatgcattgcatatttagccttcggcatatttttcatgaatagatcatgaagtcataggcttccaaggcataggaagagatcttgcaggtctagtattttaataatgcactattacccagggcagatattatgagaaactgtttcttctctaagggtttatggcagactttgcttttttaacatgtgagaaatgaattttttattttgtgatttatgtgatttcttttgctgagtgaaggaaaggagaaattgttgctattgtcagcatcttaaaggtatttccagtcaaggcaaggctaagtgctttgtgatagtattaagcaagtcatgttttgaatggattacctgtagtgactcattggaatgatataattatacaagtaatgccaaaaaccaagtcaaagcctaattaaccaaagcactcatttaaaaatcatcatgtttggacctatctggacctctcagcactgtaaaatagttttggttttgtggcatatgaatagctgtttaacaaatcaaagttagctttttgcttctcagcttttttgggcaatacaagttaagttcttaatggggagacattatcatggcatgacttaagggaacattggtttgtgaaggaaaaacagattatctaaagccatctctatgtttctgttcagataaagattaatgagttctgtgtttatatcagctttgtatatttcatcttagccattctatcctagaaagattttaatgtgagcttaagatgtaaataaataattttgcaaacatgccttttgttttctatataccctgaccttttaataaagtttcagtgtatttatca

SEQ ID NO: 206551 - DNA, 6351 bp, Artificial Sequence
  derived and/or modified sequence
atggatgaggtcgaacaggaccagcatgaggccaggcttaaagagctgttcgactctttcgacacaacgggtaccggatccctaggacaggaggagctcacagacttgtgtcatatgttgtctctcgaggaggtggccccagtgcttcagcagacacttctgcaggacaacctgttgggcagggtgcactttgaccaatttaaggaggcactcattctaatcctttcacgcaccttgagcaacgaagaacattttcaagagcctgactgtagcctcgaggcccaaccgaagtatgttaggggcggtaagcggtatgggcgacggtccctcccggaattccaggagagtgtagaggaatttcctgaggtgaccgtgatagagccactcgacgaagaagctagaccgtcccacatacccgctggcgactgctccgaacactggaagactcaaagaagcgaagagtacgaagctgagggacagctgcgcttctggaatcccgatgatctgaatgcttctcagtccggctcatcacccccacaggactggattgaagagaaactgcaagaggtgtgtgaggatctgggaataaccagagacggccacctgaatcgcaagaaacttgtctcgatctgcgagcagtacgggctccagaacgtggatggggagatgttagaggaagtgttccataacctcgacccagacggaaccatgtcagtggaagacttcttttatggtctgtttaaaaacggcaagagcctgacgccgtcggcctctacaccgtaccgtcagctcaaacggcatttgtcgatgcaaagctttgatgaaagcggcagacggaccactacaagttcagctatgacatccacgataggtttccgggtgttcagttgccttgatgacgggatgggacatgcgagcgtcgagcgaatcttggacacctggcaggaagaaggaattgaaaattcacaagaaattctgaaagccctggactttagtcttgatggcaatattaatctgaccgagcttacgctggccctcgagaatgagttgttggttactaagaactctatacatcaggccgcacttgcgagcttcaaagcagagatccgccatcttcttgaaagggtggaccaggtagtgcgcgaaaaggagaaactccggagcgacctggacaaggccgagaaactgaagtccctcatggccagcgaagttgacgatcaccatgctgctatagagaggcgcaacgagtataacctccggaaactcgacgaggaatacaaagagcgaatagctgcacttaaaaatgagctccgaaaagagcgcgagcaaattctgcagcaggctgggaaacagcggctcgagcttgaacaggagattgaaaaagctaaaaccgaagagaattatatccgagaccgcttggccctgtcactcaaggagaattcaaggctggagaatgagttgctggaaaatgcagagaacgttcttgctgagaaattcggcgacctcgatccttcgagcgccgagttcttcctgcaggaggagcgattaacccagatgcggaatgagtatgaacgtcagtgtagggtgctgcaggaccaggtggatgagctgcagtcagaactggaagagtatcgggcacaggggagggttctccgacttccgctcaaaaattccccttctgaggaggtagaagccaactctggtggaatcgaaccagagcacgggctgggttcggaagagtgtaatccactgaacatgtcaattgaagccgagctcgtgatcgagcagatgaaggaacagcaccaccgggatatctgctgccttaggttggaactcgaagacaaggtgcggcattatgagaagcagctggatgagactgtcgtaagttgtaaaaaagctcaagaaaacatgaaacagcgccacgaaaatgagactcacaccctcgagaagcaaattagtgatctgaagaatgagatcgctgagctgcaggggcaggccgctgtgctgaaggaggcccatcatgaggctacgtgtcggcacgaagaagagaagaagcagcttcaggtgaagctggaagaggaaaaaacccacctccaggaaaaactcagacttcaacatgagatggagctcaaagcacggctgacccaggcccaggcgtcctttgaaagagaacgagaaggcctgcagagctccgcctggacagaggagaaggtccgcggtcttacacaggagctggagcagttccatcaggaacaattaacttccctggtcgaaaagcatactctggaaaaagaggaacttagaaaggagctgcttgagaagcaccagcgagaactgcaggaaggcagagagaagatggagactgagtgcaatagacgcacctcccagattgaggcccagtttcagtcagactgtcagaaggtgacagagcgatgtgagtcagccctgcaatcgcttgagggacggtaccgtcaggaattgaaagaccttcaggagcagcaacgcgaagaaaagtcccaatgggagtttgaaaaagatgagttgactcaggaatgtgccgaagcccaggagctgttaaaggagacactcaaacgggaaaaaacaactagcctggtgctgacccaagagcgagaaatgctcgagaaaacatataaagaacacctcaattcaatggtggtggagcgccaacaactacttcaagacttggaggatctacgaaacgtatccgagacccagcagtccctgctgagcgatcagattctggaactcaagagctctcacaaacgcgaactaagagagagagaggaggtgctctgtcaggccggagcatctgaacagctcgcctcacaacgactagagagactggaaatggaacatgaccaggagcgccaggagatgatgtccaagttactggcaatggagaatattcacaaggccacttgcgagacagcggatagagaaagagctgagatgagcacagaaatatccagactgcagtcgaagattaaggagatgcagcaggctacctcccccctttcaatgctacagagcgggtgccaggtgattggggaagaagaagtggagggggatggagccctgtctctactgcagcagggagagcaattgcttgaagagaacggggacgtcttgctctcactgcagcgggctcacgaacaggcggtcaaagaaaatgtgaaaatggccaccgagatctccagattacagcagagactccagaagttagagcccggtctggtgatgtcctcatgtttggatgaaccggcaaccgagttctttgggaacaccgccgagcaaacagagcagtttctgcagcaaaatagaactaaacaggtggaaggagtgacccgccgtcatgtgctgtcagatcttgaggacgatgaggtccgagacctcgggagtacgggcacctctagcgtgcaacgacaggaagtcaagattgaagagtcagaggcctccgtggagggatttagcgagcttgagaattctgaggaaactcgcacagaaagctgggagctgaagaatcaaatctcacagctgcaggagcagttaatgatgctgtgtgccgactgcgaccgtgcctcagagaaaaaacaggatctactgtttgatgtatcagtgctgaaaaagaagcttaaaatgttggagcggattccagaggcctctcccaagtacaaactgctgtatgaggatgtgagtagagagaatgattgcctgcaagaggagctccgcatgatggagactaggtacgatgaagccctcgaaaacaataaggagctgaccgcagaagtgttcaggttgcaagacgagttgaagaagatggaagaggtgacagaaaccttccttagtctggaaaaaagctacgatgaggtcaaaatcgaaaacgagggcctgaatgtgttagtgttaagattgcaggggaagatcgaaaaattacaggagtcggtggtgcagagatgtgattgttgtctgtgggaggcgagtctagaaaatctcgagatagaacctgacggtaatatcctgcagctgaatcagacattggaggaatgcgtgccaagagtgcgctccgtacaccatgtcattgaagaatgtaaacaggaaaaccagtaccttgagggaaacacacagctgctggagaaggtcaaggctcatgagatagcctggctgcacggaaccatccagacgcatcaagaaaggccacgggtgcaaaatcaggtgattctggaggagaacacaaccctgctggggtttcaagacaagcatttccagcatcaggctactattgctgagttagagctagaaaagaccaagctccaggagttgactcgtaaactgaaggagcgggttacaattctcgtaaagcagaaggacgttctaagtcatggcgagaaagaggaggagctgaaagcgatgatgcacgacctgcagatcacttgtagcgagatgcagcagaaagtcgagcttctgcgctatgagtctgaaaaactgcagcaggaaaactcaatcctgaggaatgaaatcactacactcaacgaagaagattcaatttctaacctgaagttggggactctgaatggtagccaggaggagatgtggcagaagaccgaaaccgtgaaacaggagaacgcagcggtccaaaaaatggttgagaacctgaaaaaacagatttctgaacttaaaattaaaaatcagcagttggacctggagaacactgagttaagtcagaagaactcccaaaatcaggagaagctccaagaactgaatcagcgcctgaccgaaatgctgtgtcagaaggagaaagagcccggtaacagcgcccttgaggagcgcgagcaagaaaagttcaacctcaaggaggaactcgagcgttgcaaagtgcagtcttcgacgctcgtgagtagcctcgaggccgagctgtccgaagtgaaaattcagactcacatagtgcagcaggagaatcacttgctgaaggatgaattagagaagatgaaacagcttcatcgttgtccagatttatctgacttccagcaaaagatttcctccgtgttgagttacaatgagaaactgctgaaggagaaagaggccttgtcagaagagctgaattcttgtgttgataagctggcgaaatcctccctgttggagcacagaatcgcaacaatgaagcaggaacagaaaagctgggagcatcagtccgcctccttgaagtcccagctggtggcgagtcaggagaaggtgcaaaatcttgaggatacagtccagaacgtgaatctgcagatgtcaaggatgaagtccgatctgcgagtgacccagcaggaaaaggaagcgctaaagcaggaagtgatgtccctgcataaacagctgcagaacgctggtggtaaatcctgggctccggagatcgctacacatcctagcggacttcataatcagcaaaagcgactaagctgggacaagttggatcatttaatgaatgaggaacagcagctgctctggcaggagaacgaacgcctacaaacaatggtccagaataccaaggctgaactcacacactcaagagagaaggtcagacagcttgaatcaaatctgctgccaaagcatcagaaacacctgaacccctccggcacgatgaaccctacggagcaggaaaagctgtccctgaagcgggagtgcgaccagtttcagaaggagcaatcacccgctaaccggaaggtgtctcagatgaatagcctggagcaagagcttgaaacaattcacctggaaaatgaaggacttaaaaaaaagcaggtcaagttggacgagcagctgatggaaatgcagcatcttcggtcgactgccacaccctctccttctcctcacgcatgggacctacagctcctgcagcagcaagcttgccccatggtgcctcgggagcagttcctgcaactacaacgacagctgctacaggcagagaggatcaaccagcatctgcaggaagagctcgagaaccgaacttcagagacgaacactccccaaggcaaccaagagcagttagtcaccgtgatggaggagaggatgatcgaggtggagcaaaagctgaagctcgttaagcgtctgctccaggagaaagtaaaccagctaaaagagcagctttgcaagaatacgaaggcagacgcaatggtcaaagatctgtatgtcgagaatgcacagttgttaaaagcactagaggtgaccgagcaacgacaaaagacagcagagaagaaaaattatctgttggaggaaaaaatcgcgtccctgtcaaacatagttcgcaacctgacccccgcacccttgacctccactcctccattgcggtcttag

SEQ ID NO: 206552 - DNA, 306 bp, Artificial Sequence
  derived and/or modified sequence
atggacgaggttgaacaagaccaacacgaggcgcgtttgaaagaactgttcgattcatttgatacaacaggtaccggaagcctgggacaggaagaactgacagatttatgtcatatgctgtcactggaagaggtggctccagtgctccagcagacactgctacaagataacttgctgggcagggttcactttgatcaatttaaagaagcactgatattgatattaagtcgaacactttctaacgaggaacattttcaggagccggattgcagcctggaagctcagccgaagtacgtcagaggatag

SEQ ID NO: 206553 - DNA, 569 bp, Artificial Sequence
  derived and/or modified sequence
atgcgcgctgcagcccgcggcccccgagagccgcgcttttgtaagagctggccccttacatatggaaatgacgctcacgcgggtccccattcgcgtccttttgaaggacgcccgcccggaaccgctgcgccggctgcgaagtattgtcccgtttctccagccctaacaaagcgtcctccttcgctttgcagagcgctggaggcgggctgccggctgtgcgggcgctccggagagaccgacagaaggtgagcactgtgggctatgggatggatgaggtggagcaggaccagcatgaggcccgactcaaggagctgtttgacagttttgacacgacgggcacagggtccctggggcaggaggaactcaccgacctttgccacatgttgagcttggaggaggtggccccagtgctgcagcagacattacttcaggacaacctcttgggcagggtacattttgaccaatttaaagaagcattaatactcatcttgtccagaactctgtcaaatgaagaacactttcaagaaccagactgctcactagaagctcagcccaaatatgttagaggt

SEQ ID NO: 206554 - DNA, 10242 bp, Artificial Sequence
  derived and/or modified sequence
ccgagccgggagccgagcgcgctgggcgcggccgtcccgctgccgccgccaagcccggagtgcgccagcggccatggttcccgcggcggcgccgggcgcctgagccccgggacgcaagcgctggaggcgggctgccggctgtgcgggcgctccggagagaccgacagaaggtgagcactgtgggctatgggatggatgaggtggagcaggaccagcatgaggcccgactcaaggagctgtttgacagttttgacacgacgggcacagggtccctggggcaggaggaactcaccgacctttgccacatgttgagcttggaggaggtggccccagtgctgcagcagacattacttcaggacaacctcttgggcagggtacattttgaccaatttaaagaagcattaatactcatcttgtccagaactctgtcaaatgaagaacactttcaagaaccagactgctcactagaagctcagcccaaatatgttagaggtgggaagcgttacggacgaaggtccttgcccgagttccaagagtccgtggaggagtttcctgaagtgacggtgattgagccactggatgaagaagcgcggccttcacacatcccagccggtgactgcagtgagcactggaagacgcaacgcagtgaggagtatgaagcggaaggccagttaaggttttggaacccagatgacttgaatgcttcacagagtggatcttcccctccccaagactggatagaagagaaactgcaagaagtttgtgaagatttggggatcacccgtgatggtcacctgaaccggaagaagctggtctccatctgtgagcagtatggtttacagaatgtggatggagagatgctcgaggaagtattccataatcttgatcctgacggtacaatgagtgtagaagattttttctatggtttgtttaaaaatggaaaatctcttacaccatcagcatctactccatatagacaactaaaaaggcacctttccatgcagtctttcgatgagagtggacgacgtaccacaacctcatcagcaatgacaagtaccattggctttcgggtcttctcctgcctggatgatgggatgggccatgcatctgtggagagaatactggacacctggcaggaagagggcattgagaacagccaggagatcctgaaggccttggatttcagcctcgatggaaacatcaatttgacagaattaacactggcccttgaaaatgaacttttggttaccaagaacagcattcaccaggcggctctggccagctttaaggctgaaatccggcatttgttggaacgagttgatcaggtggtcagagaaaaagagaagctacggtcagatctggacaaggccgagaagctcaagtctttaatggcctcggaggtggatgatcaccatgcggccatagagcggcggaatgagtacaacctcaggaaactggatgaagagtacaaggagcgaatagcagccttaaaaaatgaactccgaaaagagagagagcagatcctgcagcaggcaggcaagcagcgtttagaacttgaacaggaaattgaaaaggcaaaaacagaagagaactatatccgggaccgccttgccctctctttaaaggaaaacagtcgtctggaaaatgagcttctagaaaatgcagagaatgtgttagcagaaaagtttggtgacctcgatcctagcagtgctgagttcttcctgcaagaagagagactgacacagatgagaaatgaatatgagcggcagtgcagggtactacaagaccaagtagatgaactccagtctgagctggaagaatatcgtgcacaaggcagagtgctcaggcttccgttgaagaactcaccgtcagaagaagttgaggctaacagcggtggcattgagcccgaacacgggctcggttctgaagaatgcaatccattgaatatgagcattgaggcagagctggtcattgaacagatgaaagaacaacatcacagggacatatgttgcctcagactggagctcgaagataaagtgcgccattatgaaaagcagctggacgaaaccgtggtcagctgcaagaaggcacaggagaacatgaagcaaaggcatgagaacgaaacgcacaccttagaaaaacaaataagtgaccttaaaaatgaaattgctgaacttcaggggcaagcagcagtgctcaaggaggcacatcatgaggccacttgcaggcatgaggaggagaaaaaacaactgcaagtgaagcttgaggaggaaaagactcacctgcaggagaagctgaggctgcaacatgagatggagctcaaggctagactgacacaggctcaagcaagctttgagcgggagagggaaggccttcagagtagcgcctggacagaagagaaggtgagaggcttgactcaggaactagagcagtttcaccaggagcagctgacaagcctggtggagaaacacactcttgagaaagaggagttaagaaaagagctcttggaaaagcaccaaagggagcttcaggagggaagggaaaaaatggaaacagagtgtaatagaagaacctctcaaatagaagcccagtttcagtctgattgtcagaaagtcactgagaggtgtgaaagcgctctgcaaagcctggaggggcgctaccgccaagagctgaaggacctccaggaacagcagcgtgaggagaaatcccagtgggaatttgagaaggacgagctcacccaggagtgtgcggaagcccaggagctgctgaaagagactcttaagagagagaaaacaacttctctggtcctgacccaggagagagagatgctggagaaaacatacaaagaacatttgaacagcatggtcgtcgagagacagcagctactccaagacctggaagacctaagaaatgtatctgaaacccagcaaagcctgctgtctgaccagatacttgagctgaagagcagtcacaaaagggaactgagggagcgtgaggaggtcctgtgccaggcaggggcttcggagcagctggccagccagcggctggaaagactagaaatggaacatgaccaggaaaggcaggaaatgatgtccaagcttctagccatggagaacattcacaaagcgacctgtgagacagcagatcgagaaagagccgagatgagcacagaaatctccagacttcagagtaaaataaaggaaatgcagcaggcaacatctcctctctcaatgcttcagagtggttgccaggtgataggagaggaggaggtggaaggagatggagccctgtccctgcttcagcaaggggagcagctgttggaagaaaatggggacgtcctcttaagcctgcagagagctcatgaacaggcagtgaaggaaaatgtgaaaatggctactgaaatttctagattgcaacagaggctacaaaagttagagccagggttagtaatgtcttcttgtttggatgagccagctactgagttttttggaaatactgcggaacaaacagagcagtttttacagcaaaaccgaacgaagcaagtagaaggtgtgaccaggcggcatgtcctaagtgacctggaagatgatgaggtccgggacctgggaagtacagggacgagctctgttcagagacaggaagtcaaaatagaggagtctgaagcttcagtagagggtttttctgagcttgaaaacagtgaagagaccaggactgaatcctgggagctgaagaatcagattagtcagcttcaggaacagctaatgatgttatgtgcggactgtgatcgagcttctgaaaagaaacaggacctactttttgatgtttctgtgctaaaaaagaaactgaagatgcttgagagaatccctgaggcttctcccaaatataagctgttgtatgaagatgtgagccgagaaaatgactgccttcaggaagagctgagaatgatggagacacgctacgatgaggcactagaaaataacaaagaactcactgcagaggttttcaggttgcaggatgagctgaagaaaatggaggaagtcactgaaacattcctcagcctggaaaagagttacgatgaggtcaaaatagaaaatgaggggctgaatgttctggttttgagacttcaaggcaagattgagaagcttcaggaaagcgtggtccagcggtgtgactgctgcttatgggaagccagtttagagaacctggaaatcgaacctgatggaaatatactccagctcaatcagacactggaagagtgtgtgcccagggttaggagtgtacatcatgtcatagaggaatgtaagcaagaaaaccagtaccttgaggggaacacacagctcttggaaaaagtaaaagcacatgaaattgcctggttacatggaacaattcagacacatcaagaaaggccaagagtacagaatcaagttatactggaggaaaacactactctcctaggctttcaagacaaacattttcagcatcaggccaccatagcagagttagaactggagaaaacaaagttacaggagctgactaggaagttgaaggagagagtcactattttagttaagcaaaaagatgtactttctcacggagaaaaggaggaagagctgaaggcaatgatgcatgacttgcagatcacgtgcagtgagatgcagcaaaaagttgaacttctgagatatgaatctgaaaagcttcaacaggaaaattctattttgagaaatgaaattactactttaaatgaagaagatagcatttctaacctgaaattagggacattaaatggatctcaggaagaaatgtggcaaaaaacggaaactgtaaaacaagaaaatgctgcagttcagaagatggttgaaaatttaaagaaacagatttcagaattaaaaatcaaaaaccaacaattggatttggaaaatacagaacttagccaaaagaactctcaaaaccaggaaaaactgcaagaacttaatcaacgtctaacagaaatgctatgccagaaggaaaaagagccaggaaacagtgcattggaggaacgggaacaagagaagtttaatctgaaagaagaactggaacgttgtaaagtgcagtcctccactttagtgtcttctctggaggcggagctctctgaagttaaaatacagacccatattgtgcaacaggaaaaccaccttctcaaagatgaactggagaaaatgaaacagctgcacagatgtcccgatctctctgacttccagcaaaaaatctctagtgttctaagctacaacgaaaaactgctgaaagaaaaggaagctctgagtgaggaattaaatagctgtgtcgataagttggcaaaatcaagtcttttagagcatagaattgcgacgatgaagcaggaacagaaatcctgggaacatcagagtgcgagcttaaagtcacagctggtggcttctcaggaaaaggttcagaatttagaagacaccgtgcagaatgtaaacctgcaaatgtcccggatgaaatctgacctacgagtgactcagcaggaaaaggaggctttaaaacaagaagtgatgtctttacataagcaacttcagaatgctggtggcaagagctgggccccagagatagctactcatccatcagggctccataaccagcagaaaaggctgtcctgggacaagttggatcatctgatgaatgaggaacagcagctgctttggcaagagaatgagaggctccagaccatggtacagaacaccaaagccgaactcacgcactcccgggagaaggtccgtcagttggaatccaatcttcttcccaagcaccaaaaacatctaaacccatcaggtaccatgaatcccacagagcaagaaaaattgagcttaaagagagagtgtgatcagtttcagaaagaacaatctcctgctaacaggaaggtcagtcagatgaattcccttgaacaagaattagaaacaattcatttggaaaatgaaggcctgaaaaagaaacaagtaaaactggatgagcagctcatggagatgcagcacctgaggtccactgcgacgcctagcccgtcccctcatgcttgggatttgcagctgctccagcagcaagcctgtccgatggtgcccagggagcagtttctgcagcttcaacgccagctgctgcaggcagaaaggataaaccagcacctgcaggaggaacttgaaaacaggacctccgaaaccaacacaccacagggaaaccaggaacaactggtaactgtcatggaggaacgaatgatagaagttgaacagaaactgaaactagtgaaaaggcttcttcaagagaaagtgaatcagctcaaagaacaactctgcaagaacactaaggcagacgcaatggtgaaggacttgtatgttgaaaatgcccagttgttgaaagctctggaagtgactgaacagcgacagaaaacagcagagaagaaaaattacctcctggaggagaagattgccagcctcagtaatatagttaggaatctgacaccagcgccattgacttctacacctcctttgaggtcatagccaaaccaaagggtacactcatatttgtgcactttactgaaatagatgaacatttcagtaggttctcaacttaaaattaagcctaacctaaaactgccagcaacacaactggagtttccatttatcataattagtttttctaaatagacccttatgggagtttgaaaataaatactcacatatttcactacttaaattattcccaagatttgaatttattttaaaattttaatagccaccaagaatgtggacatatgaaaattcaagaacctaaaaaataccagttttgaatgagtttttgtggttttggttttttttttaattattacaaatctatgtgtaaaatctagatatttgaagtttgagatctgatgagaatggttgttataaactttattttaaaaccaaatttaggtgttcttacatatttaaatactggaaagtcattataatagttttggttctttgaattggtagacaattagtagagtataattggttaggaggcagggcttattaagtggttattaaccgctgacatcagacaaacccaaatctgtagaattctaaccttctaacacctgtgacagtattaccactcttcttgtattatagatttagaactgatttactcaattgcactcttaactaatgttaaaagcttacttgctttaaacagccttttcttctttctcttaaaagtttcatttggggagctggtcttctaagaaacggataaagccacataattaaagcagttgaactatagggaaagcactgaacaaaccactttggagtaaatagctactcttagaaaagagggataagcagaccatgtaggttttctgtctctcaaatcttagagttcataaatttacttgaggttgcctcaagaactcagggaacaatactgtaaactgtcttcctgaactactgtagggcctctctaagaatttgaaatgtataaaccatgtgacctcatttatttgtcttatatatttacagccatactagaatttttatttctacgtttttagtaaatttaatattctgggggaaaaaaggccttgattttagggttaaaaacctgacttatagaagagtttatttaatataggtcaaaattttctgtgtttcttattccttctatacctcaaatctgattctaagaatttcttactgtgataatcattggcatgccacctgaggtcaaggagtgccaaataggactttccactcatgctcaagatcaaaactttatagaacagtcaacattttagattcggtaaccttttttttcttccaattataatctctgctagccacttccgccagcagttggtggaagacttactaggtgcagggcactttccaagttcatcacaacaacctgcttgttttcatgagacaataatccgaaaagttcgctttgatatattcctggagggccaagcccatctatttacaaaaggtgaacagcaaaatcaagcactgctttatgggcaggaacacaagagaaagcaaactgcccaagaagtcatcatgtcagaaactcaatctcaacaaaataatttccatcagggaacttcagggtttcttgggggcttatgagtctcaccggtcaacccaggaggcctcactacaagagccttgacaaggcactgttttttgtgggactgggagttcacactgatgaagcaaacctttgaatttttgcacagctcttgtcagaaagccctgagttccccctggataaagagttaattttaatccttccctataattatacttcaaaatatttgacatctgctattatgccttctttagatctttcttctgtggtgcagacatttctagtaagtgtttgactacttgtatggcattagctttcacagaaaattgtttcacttaaaactgtggattggcctaggctaaggacaaaaataaactaagtacctgtagtgtatttatgtgatatgtgtcaagttactcaaagttattgctgttggaactgaacaataatatttcccagatagctggccttagcatgtgatcacggttgttgtatttttaatttttgtcttttacagtatgagaggtgtaggttaatttgtttatttcctataaatttgtatttatgtgtatataaaatgtacaatgaatgtaaatatgactttctggaaagtttagactacatttagaatctctattcaaaatcaaaatgctgctcaaatgaatttaaccaacatctaggtgcttaatttctcattttatcccacttatgagattgggaaaaagatcaatatgagaaataccatacagataccttaaatgtatgcatttgtgcaacaatttttgagaaggtgagtggcaatttataatttagttggcaatttataatagaacttatagcttttaaaagaccttttaaagacattaaatgtaaacttaaaaatgtttagatcttgtttcaaactttacaatagcattcttcaaaatattaagttatatattttataggcatttagttgcttattaaaagcactgattttcaaactttttgatttaagaacaattatttaagatcgtctcagaagatgggatcttcgtttcaagaaaagggaatcaagtttgcctttgagataatacgttacactaagaaaaggaaaatgtggatagtaaaacccacctctctcatcctattgtactctcttctgctttttagaagcctgcacttaagcttagatttgtgaagggagagtagaaggggagaagtagaaccacagtgttttatttatttttctaaaactcttactaaatccagattttttaaactgttttaaatgtgaattcttcccagaaatttcaatgcattgcatatttagccttcggcatatttttcatgaatagatcatgaagtcataggcttccaaggcataggaagagatcttgcaggtctagtattttaataatgcactattacccagggcagatattatgagaaactgtttcttctctaagggtttatggcagactttgcttttttaacatgtgagaaatgaattttttattttgtgatttatgtgatttcttttgctgagtgaaggaaaggagaaattgttgctattgtcagcatcttaaaggtatttccagtcaaggcaaggctaagtgctttgtgatagtattaagcaagtcatgttttgaatggattacctgtagtgactcattggaatgatataattatacaagtaatgccaaaaaccaagtcaaagcctaattaaccaaagcactcatttaaaaatcatcatgtttggacctatctggacctctcagcactgtaaaatagttttggttttgtggcatatgaatagctgtttaacaaatcaaagttagctttttgcttctcagcttttttgggcaatacaagttaagttcttaatggggagacattatcatggcatgacttaagggaacattggtttgtgaaggaaaaacagattatctaaagccatctctatgtttctgttcagataaagattaatgagttctgtgtttatatcagctttgtatatttcatcttagccattctatcctagaaagattttaatgtgagcttaagatgtaaataaataattttgcaaacatgccttttgttttctatataccctgaccttttaataaagtttcagtgtatttatca

SEQ ID NO: 206555 - DNA, 6402 bp, Artificial Sequence
  derived and/or modified sequence
atggacgaggtggagcaggaccagcacgaggccagactgaaggagctgttcgacagcttcgacaccaccggcaccggcagcctgggccaggaggagctgaccgacctgtgccacatgctgagcctggaggaggtggcccccgtgctgcagcagaccctgctgcaggacaacctgctgggcagagtgcacttcgaccagttcaaggaggccctgatcctgatcctgagcagaaccctgagcaacgaggagcacttccaggagcccgactgcagcctggaggcccagcccaagtacgtgagaggcggcaagagatacggcagaagaagcctgcccgagttccaggagagcgtggaggagttccccgaggtgaccgtgatcgagcccctggacgaggaggccagacccagccacatccccgccggcgactgcagcgagcactggaagacccagagaagcgaggagtacgaggccgagggccagctgagattctggaaccccgacgacctgaacgccagccagagcggcagcagccccccccaggactggatcgaggagaagctgcaggaggtgtgcgaggacctgggcatcaccagagacggccacctgaacagaaagaagctggtgagcatctgcgagcagtacggcctgcagaacgtggacggcgagatgctggaggaggtgttccacaacctggaccccgacggcaccatgagcgtggaggacttcttctacggcctgttcaagaacggcaagagcctgacccccagcgccagcaccccctacagacagctgaagagacacctgagcatgcagagcttcgacgagagcggcagaagaaccaccaccagcagcgccatgaccagcaccatcggcttcagagtgttcagctgcctggacgacggcatgggccacgccagcgtggagagaatcctggacacctggcaggaggagggcatcgagaacagccaggagatcctgaaggccctggacttcagcctggacggcaacatcaacctgaccgagctgaccctggccctggagaacgagctgctggtgaccaagaacagcatccaccaggccgccctggccagcttcaaggccgagatcagacacctgctggagagagtggaccaggtggtgagagagaaggagaagctgagaagcgacctggacaaggccgagaagctgaagagcctgatggccagcgaggtggacgaccaccacgccgccatcgagagaagaaacgagtacaacctgagaaagctggacgaggagtacaaggagagaatcgccgccctgaagaacgagctgagaaaggagagagagcagatcctgcagcaggccggcaagcagagactggagctggagcaggagatcgagaaggccaagaccgaggagaactacatcagagacagactggccctgagcctgaaggagaacagcagactggagaacgagctgctggagaacgccgagaagctggccgagtacgagaacctgaccaacaagctgcagagaaacctggagaacgtgctggccgagaagttcggcgacctggaccccagcagcgccgagttcttcctgcaggaggagagactgacccagatgagaaacgagtacgagagacagtgcagagtgctgcaggaccaggtggacgagctgcagagcgagctggaggagtacagagcccagggcagagtgctgagactgcccctgaagaacagccccagcgaggaggtggaggccaacagcggcggcatcgagcccgagcacggcctgggcagcgaggagtgcaaccccctgaacatgagcatcgaggccgagctggtgatcgagcagatgaaggagcagcaccacagagacatctgctgcctgagactggagctggaggacaaggtgagacactacgagaagcagctggacgagaccgtggtgagctgcaagaaggcccaggagaacatgaagcagagacacgagaacgagacccacaccctggagaagcagatcagcgacctgaagaacgagatcgccgagctgcagggccaggccgccgtgctgaaggaggcccaccacgaggccacctgcagacacgaggaggagaagaagcagctgcaggtgaagctggaggaggagaagacccacctgcaggagaagctgagactgcagcacgagatggagctgaaggccagactgacccaggcccaggccagcttcgagagagagagagagggcctgcagagcagcgcctggaccgaggagaaggtgagaggcctgacccaggagctggagcagttccaccaggagcagctgaccagcctggtggagaagcacaccctggagaaggaggagctgagaaaggagctgctggagaagcaccagagagagctgcaggagggcagagagaagatggagaccgagtgcaacagaagaaccagccagatcgaggcccagttccagagcgactgccagaaggtgaccgagagatgcgagagcgccctgcagagcctggagggcagatacagacaggagctgaaggacctgcaggagcagcagagagaggagaagagccagtgggagttcgagaaggacgagctgacccaggagtgcgccgaggcccaggagctgctgaaggagaccctgaagagagagaagaccaccagcctggtgctgacccaggagagagagatgctggagaagacctacaaggagcacctgaacagcatggtggtggagagacagcagctgctgcaggacctggaggacctgagaaacgtgagcgagacccagcagagcctgctgagcgaccagatcctggagctgaagagcagccacaagagagagctgagagagagagaggaggtgctgtgccaggccggcgccagcgagcagctggccagccagagactggagagactggagatggagcacgaccaggagagacaggagatgatgagcaagctgctggccatggagaacatccacaaggccacctgcgagaccgccgacagagagagagccgagatgagcaccgagatcagcagactgcagagcaagatcaaggagatgcagcaggccaccagccccctgagcatgctgcagagcggctgccaggtgatcggcgaggaggaggtggagggcgacggcgccctgagcctgctgcagcagggcgagcagctgctggaggagaacggcgacgtgctgctgagcctgcagagagcccacgagcaggccgtgaaggagaacgtgaagatggccaccgagatcagcagactgcagcagagactgcagaagctggagcccggcctggtgatgagcagctgcctggacgagcccgccaccgagttcttcggcaacaccgccgagcagaccgagcagttcctgcagcagaacagaaccaagcaggtggagggcgtgaccagaagacacgtgctgagcgacctggaggacgacgaggtgagagacctgggcagcaccggcaccagcagcgtgcagagacaggaggtgaagatcgaggagagcgaggccagcgtggagggcttcagcgagctggagaacagcgaggagaccagaaccgagagctgggagctgaagaaccagatcagccagctgcaggagcagctgatgatgctgtgcgccgactgcgacagagccagcgagaagaagcaggacctgctgttcgacgtgagcgtgctgaagaagaagctgaagatgctggagagaatccccgaggccagccccaagtacaagctgctgtacgaggacgtgagcagagagaacgactgcctgcaggaggagctgagaatgatggagaccagatacgacgaggccctggagaacaacaaggagctgaccgccgaggtgttcagactgcaggacgagctgaagaagatggaggaggtgaccgagaccttcctgagcctggagaagagctacgacgaggtgaagatcgagaacgagggcctgaacgtgctggtgctgagactgcagggcaagatcgagaagctgcaggagagcgtggtgcagagatgcgactgctgcctgtgggaggccagcctggagaacctggagatcgagcccgacggcaacatcctgcagctgaaccagaccctggaggagtgcgtgcccagagtgagaagcgtgcaccacgtgatcgaggagtgcaagcaggagaaccagtacctggagggcaacacccagctgctggagaaggtgaaggcccacgagatcgcctggctgcacggcaccatccagacccaccaggagagacccagagtgcagaaccaggtgatcctggaggagaacaccaccctgctgggcttccaggacaagcacttccagcaccaggccaccatcgccgagctggagctggagaagaccaagctgcaggagctgaccagaaagctgaaggagagagtgaccatcctggtgaagcagaaggacgtgctgagccacggcgagaaggaggaggagctgaaggccatgatgcacgacctgcagatcacctgcagcgagatgcagcagaaggtggagctgctgagatacgagagcgagaagctgcagcaggagaacagcatcctgagaaacgagatcaccaccctgaacgaggaggacagcatcagcaacctgaagctgggcaccctgaacggcagccaggaggagatgtggcagaagaccgagaccgtgaagcaggagaacgccgccgtgcagaagatggtggagaacctgaagaagcagatcagcgagctgaagatcaagaaccagcagctggacctggagaacaccgagctgagccagaagaacagccagaaccaggagaagctgcaggagctgaaccagagactgaccgagatgctgtgccagaaggagaaggagcccggcaacagcgccctggaggagagagagcaggagaagttcaacctgaaggaggagctggagagatgcaaggtgcagagcagcaccctggtgagcagcctggaggccgagctgagcgaggtgaagatccagacccacatcgtgcagcaggagaaccacctgctgaaggacgagctggagaagatgaagcagctgcacagatgccccgacctgagcgacttccagcagaagatcagcagcgtgctgagctacaacgagaagctgctgaaggagaaggaggccctgagcgaggagctgaacagctgcgtggacaagctggccaagagcagcctgctggagcacagaatcgccaccatgaagcaggagcagaagagctgggagcaccagagcgccagcctgaagagccagctggtggccagccaggagaaggtgcagaacctggaggacaccgtgcagaacgtgaacctgcagatgagcagaatgaagagcgacctgagagtgacccagcaggagaaggaggccctgaagcaggaggtgatgagcctgcacaagcagctgcagaacgccggcggcaagagctgggcccccgagatcgccacccaccccagcggcctgcacaaccagcagaagagactgagctgggacaagctggaccacctgatgaacgaggagcagcagctgctgtggcaggagaacgagagactgcagaccatggtgcagaacaccaaggccgagctgacccacagcagagagaaggtgagacagctggagagcaacctgctgcccaagcaccagaagcacctgaaccccagcggcaccatgaaccccaccgagcaggagaagctgagcctgaagagagagtgcgaccagttccagaaggagcagagccccgccaacagaaaggtgagccagatgaacagcctggagcaggagctggagaccatccacctggagaacgagggcctgaagaagaagcaggtgaagctggacgagcagctgatggagatgcagcacctgagaagcaccgccacccccagccccagcccccacgcctgggacctgcagctgctgcagcagcaggcctgccccatggtgcccagagagcagttcctgcagctgcagagacagctgctgcaggccgagagaatcaaccagcacctgcaggaggagctggagaacagaaccagcgagaccaacaccccccagggcaaccaggagcagctggtgaccgtgatggaggagagaatgatcgaggtggagcagaagctgaagctggtgaagagactgctgcaggagaaggtgaaccagctgaaggagcagctgtgcaagaacaccaaggccgacgccatggtgaaggacctgtacgtggagaacgcccagctgctgaaggccctggaggtgaccgagcagagacagaagaccgccgagaagaagaactacctgctggaggagaagatcgccagcctgagcaacatcgtgagaaacctgacccccgcccccctgaccagcaccccccccctgagaagctag

SEQ ID NO: 206556 - DNA, 6351 bp, Artificial Sequence
  derived and/or modified sequence
atggacgaggtggagcaggaccagcacgaggccagactgaaggagctgttcgacagcttcgacaccaccggcaccggcagcctgggccaggaggagctgaccgacctgtgccacatgctgagcctggaggaggtggcccccgtgctgcagcagaccctgctgcaggacaacctgctgggcagagtgcacttcgaccagttcaaggaggccctgatcctgatcctgagcagaaccctgagcaacgaggagcacttccaggagcccgactgcagcctggaggcccagcccaagtacgtgagaggcggcaagagatacggcagaagaagcctgcccgagttccaggagagcgtggaggagttccccgaggtgaccgtgatcgagcccctggacgaggaggccagacccagccacatccccgccggcgactgcagcgagcactggaagacccagagaagcgaggagtacgaggccgagggccagctgagattctggaaccccgacgacctgaacgccagccagagcggcagcagccccccccaggactggatcgaggagaagctgcaggaggtgtgcgaggacctgggcatcaccagagacggccacctgaacagaaagaagctggtgagcatctgcgagcagtacggcctgcagaacgtggacggcgagatgctggaggaggtgttccacaacctggaccccgacggcaccatgagcgtggaggacttcttctacggcctgttcaagaacggcaagagcctgacccccagcgccagcaccccctacagacagctgaagagacacctgagcatgcagagcttcgacgagagcggcagaagaaccaccaccagcagcgccatgaccagcaccatcggcttcagagtgttcagctgcctggacgacggcatgggccacgccagcgtggagagaatcctggacacctggcaggaggagggcatcgagaacagccaggagatcctgaaggccctggacttcagcctggacggcaacatcaacctgaccgagctgaccctggccctggagaacgagctgctggtgaccaagaacagcatccaccaggccgccctggccagcttcaaggccgagatcagacacctgctggagagagtggaccaggtggtgagagagaaggagaagctgagaagcgacctggacaaggccgagaagctgaagagcctgatggccagcgaggtggacgaccaccacgccgccatcgagagaagaaacgagtacaacctgagaaagctggacgaggagtacaaggagagaatcgccgccctgaagaacgagctgagaaaggagagagagcagatcctgcagcaggccggcaagcagagactggagctggagcaggagatcgagaaggccaagaccgaggagaactacatcagagacagactggccctgagcctgaaggagaacagcagactggagaacgagctgctggagaacgccgagaacgtgctggccgagaagttcggcgacctggaccccagcagcgccgagttcttcctgcaggaggagagactgacccagatgagaaacgagtacgagagacagtgcagagtgctgcaggaccaggtggacgagctgcagagcgagctggaggagtacagagcccagggcagagtgctgagactgcccctgaagaacagccccagcgaggaggtggaggccaacagcggcggcatcgagcccgagcacggcctgggcagcgaggagtgcaaccccctgaacatgagcatcgaggccgagctggtgatcgagcagatgaaggagcagcaccacagagacatctgctgcctgagactggagctggaggacaaggtgagacactacgagaagcagctggacgagaccgtggtgagctgcaagaaggcccaggagaacatgaagcagagacacgagaacgagacccacaccctggagaagcagatcagcgacctgaagaacgagatcgccgagctgcagggccaggccgccgtgctgaaggaggcccaccacgaggccacctgcagacacgaggaggagaagaagcagctgcaggtgaagctggaggaggagaagacccacctgcaggagaagctgagactgcagcacgagatggagctgaaggccagactgacccaggcccaggccagcttcgagagagagagagagggcctgcagagcagcgcctggaccgaggagaaggtgagaggcctgacccaggagctggagcagttccaccaggagcagctgaccagcctggtggagaagcacaccctggagaaggaggagctgagaaaggagctgctggagaagcaccagagagagctgcaggagggcagagagaagatggagaccgagtgcaacagaagaaccagccagatcgaggcccagttccagagcgactgccagaaggtgaccgagagatgcgagagcgccctgcagagcctggagggcagatacagacaggagctgaaggacctgcaggagcagcagagagaggagaagagccagtgggagttcgagaaggacgagctgacccaggagtgcgccgaggcccaggagctgctgaaggagaccctgaagagagagaagaccaccagcctggtgctgacccaggagagagagatgctggagaagacctacaaggagcacctgaacagcatggtggtggagagacagcagctgctgcaggacctggaggacctgagaaacgtgagcgagacccagcagagcctgctgagcgaccagatcctggagctgaagagcagccacaagagagagctgagagagagagaggaggtgctgtgccaggccggcgccagcgagcagctggccagccagagactggagagactggagatggagcacgaccaggagagacaggagatgatgagcaagctgctggccatggagaacatccacaaggccacctgcgagaccgccgacagagagagagccgagatgagcaccgagatcagcagactgcagagcaagatcaaggagatgcagcaggccaccagccccctgagcatgctgcagagcggctgccaggtgatcggcgaggaggaggtggagggcgacggcgccctgagcctgctgcagcagggcgagcagctgctggaggagaacggcgacgtgctgctgagcctgcagagagcccacgagcaggccgtgaaggagaacgtgaagatggccaccgagatcagcagactgcagcagagactgcagaagctggagcccggcctggtgatgagcagctgcctggacgagcccgccaccgagttcttcggcaacaccgccgagcagaccgagcagttcctgcagcagaacagaaccaagcaggtggagggcgtgaccagaagacacgtgctgagcgacctggaggacgacgaggtgagagacctgggcagcaccggcaccagcagcgtgcagagacaggaggtgaagatcgaggagagcgaggccagcgtggagggcttcagcgagctggagaacagcgaggagaccagaaccgagagctgggagctgaagaaccagatcagccagctgcaggagcagctgatgatgctgtgcgccgactgcgacagagccagcgagaagaagcaggacctgctgttcgacgtgagcgtgctgaagaagaagctgaagatgctggagagaatccccgaggccagccccaagtacaagctgctgtacgaggacgtgagcagagagaacgactgcctgcaggaggagctgagaatgatggagaccagatacgacgaggccctggagaacaacaaggagctgaccgccgaggtgttcagactgcaggacgagctgaagaagatggaggaggtgaccgagaccttcctgagcctggagaagagctacgacgaggtgaagatcgagaacgagggcctgaacgtgctggtgctgagactgcagggcaagatcgagaagctgcaggagagcgtggtgcagagatgcgactgctgcctgtgggaggccagcctggagaacctggagatcgagcccgacggcaacatcctgcagctgaaccagaccctggaggagtgcgtgcccagagtgagaagcgtgcaccacgtgatcgaggagtgcaagcaggagaaccagtacctggagggcaacacccagctgctggagaaggtgaaggcccacgagatcgcctggctgcacggcaccatccagacccaccaggagagacccagagtgcagaaccaggtgatcctggaggagaacaccaccctgctgggcttccaggacaagcacttccagcaccaggccaccatcgccgagctggagctggagaagaccaagctgcaggagctgaccagaaagctgaaggagagagtgaccatcctggtgaagcagaaggacgtgctgagccacggcgagaaggaggaggagctgaaggccatgatgcacgacctgcagatcacctgcagcgagatgcagcagaaggtggagctgctgagatacgagagcgagaagctgcagcaggagaacagcatcctgagaaacgagatcaccaccctgaacgaggaggacagcatcagcaacctgaagctgggcaccctgaacggcagccaggaggagatgtggcagaagaccgagaccgtgaagcaggagaacgccgccgtgcagaagatggtggagaacctgaagaagcagatcagcgagctgaagatcaagaaccagcagctggacctggagaacaccgagctgagccagaagaacagccagaaccaggagaagctgcaggagctgaaccagagactgaccgagatgctgtgccagaaggagaaggagcccggcaacagcgccctggaggagagagagcaggagaagttcaacctgaaggaggagctggagagatgcaaggtgcagagcagcaccctggtgagcagcctggaggccgagctgagcgaggtgaagatccagacccacatcgtgcagcaggagaaccacctgctgaaggacgagctggagaagatgaagcagctgcacagatgccccgacctgagcgacttccagcagaagatcagcagcgtgctgagctacaacgagaagctgctgaaggagaaggaggccctgagcgaggagctgaacagctgcgtggacaagctggccaagagcagcctgctggagcacagaatcgccaccatgaagcaggagcagaagagctgggagcaccagagcgccagcctgaagagccagctggtggccagccaggagaaggtgcagaacctggaggacaccgtgcagaacgtgaacctgcagatgagcagaatgaagagcgacctgagagtgacccagcaggagaaggaggccctgaagcaggaggtgatgagcctgcacaagcagctgcagaacgccggcggcaagagctgggcccccgagatcgccacccaccccagcggcctgcacaaccagcagaagagactgagctgggacaagctggaccacctgatgaacgaggagcagcagctgctgtggcaggagaacgagagactgcagaccatggtgcagaacaccaaggccgagctgacccacagcagagagaaggtgagacagctggagagcaacctgctgcccaagcaccagaagcacctgaaccccagcggcaccatgaaccccaccgagcaggagaagctgagcctgaagagagagtgcgaccagttccagaaggagcagagccccgccaacagaaaggtgagccagatgaacagcctggagcaggagctggagaccatccacctggagaacgagggcctgaagaagaagcaggtgaagctggacgagcagctgatggagatgcagcacctgagaagcaccgccacccccagccccagcccccacgcctgggacctgcagctgctgcagcagcaggcctgccccatggtgcccagagagcagttcctgcagctgcagagacagctgctgcaggccgagagaatcaaccagcacctgcaggaggagctggagaacagaaccagcgagaccaacaccccccagggcaaccaggagcagctggtgaccgtgatggaggagagaatgatcgaggtggagcagaagctgaagctggtgaagagactgctgcaggagaaggtgaaccagctgaaggagcagctgtgcaagaacaccaaggccgacgccatggtgaaggacctgtacgtggagaacgcccagctgctgaaggccctggaggtgaccgagcagagacagaagaccgccgagaagaagaactacctgctggaggagaagatcgccagcctgagcaacatcgtgagaaacctgacccccgcccccctgaccagcaccccccccctgagaagctag

SEQ ID NO: 206557 - protein, 1800 aa, Artificial Sequence
  derived and/or modified sequence
MATDSGDPASTEDSEKPDGISFENRVPQVAATLTVEARLKEKNSTFSASGETVERKRFFRKSVEMTEDDKVAESSPKDERIKAAMNIPRVDKLPSNVLRGGQEVKYEQCSKSTSEISKDCFKEKNEKEMEEEAEMKAVATSPSGRFLKFDIELGRGAFKTVYKGLDTETWVEVAWCELQDRKLTKAEQQRFKEEAEMLKGLQHPNIVRFYDSWESILKGKKCIVLVTELMTSGTLKTYLKRFKVMKPKVLRSWCRQILKGLQFLHTRTPPIIHRDLKCDNIFITGPTGSVKIGDLGLATLMRTSFAKSVIGTPEFMAPEMYEEHYDESVDVYAFGMCMLEMATSEYPYSECQNAAQIYRKVTSGIKPASFNKVTDPEVKEIIEGCIRQNKSERLSIRDLLNHAFFAEDTGLRVELAEEDDCSNSSLALRLWVEDPKKLKGKHKDNEAIEFSFNLETDTPEEVAYEMVKSGFFHESDSKAVAKSIRDRVTPIKKTREKKPAGCLEERRDSQCKSMGNVFPQPQNTTLPLAPAQQTGAECEETEVDQHVRQQLLQRKPQQHCSSVTGDNLSEAGAASVIHSDTSSQPSVAYSSNQTMGSQMVSNIPQAEVNVPGQIYSSQQLVGHYQQVSGLQKHSKLTQPQILPLVQGQSTVLPVHVLGPTVVSQPQVSPLTVQKVPQIKPVSQPVGAEQQAALLKPDLVRSLNQDVATTKENVSSPDNPSGNGKQDRIKQRRASCPRPEKGTKFQLTVLQVSTSGDNMVECQLETHNNKMVTFKFDVDGDAPEDIADYMVEDNFVLESEKEKFVEELRAIVGQAQEILHVHFATERATGVDSITVDSNSSQTGSSEQVQINSTSTQTSNESAPQSSPVGRWRFCINQTIRNRETQSPPSLQHSMSAVPGRHPLPSPKNTSNKEISRDTLLTIENNPCHRALFTSKSEHKDVVDGKISECASVETKQPAILYQVEDNRQIMAPVTNSSSYSTTSVRAVPAECEGLTKQASIFIPVYPCHQTASQADALMSHPGESTQTSGNSLTTLAFDQKPQTLSVQQPAMDAEFISQEGETTVNTEASSPKTVIPTQTPGLEPTTLQPTTVLESDGERPPKLEFADNRIKTLDEKLRNLLYQEHSISSIYPESQKDTQSIDSPFSSSAEDTLSCPVTEVIAISHCGIKDSPVQSPNFQQTGSKLLSNVAASQPANISVFKRDLNVITSVPSELCLHEMSSDASLPGDPEAYPAAVSSGGAIHLQTGGGYFGLSFTCPSLKNPISKKSWTRKLKSWAYRLRQSTSFFKRSKVRQVETEEMRSAIAPDPIPLTRESTADTRALNRCKAMSGSFQRGRFQVITIPQQQSAKMTSFGIEHISVFSETNHSSEEAFIKTAKSQLVEIEPATQNPKTSFSYEKLQALQETCKENKGVPKQGDNFLSFSAACETDVSSVTPEKEFEETSATGSSMQSGSELLLKEREILTAGKQPSSDSEFSASLAGSGKSVAKTGPESNQCLPHHEEQAYAQTQSSLFYSPSSPMSSDDESEIEDEDLKVELQRLREKHIQEVVNLQTQQNKELQELYERLRSIKDSKTQSTEIPLPPASPRRPRSFKSKLRSRPQSLTHVDNGIVATGKSCLINELENPLCVESNAASCQQSPASKKGMFTDDLHKLVDDWTKEAVGNSLIKPSLNQLKQSQHKLETENWNKVSENTPSTMGYTSTWISSLSQIRGAVPTSLPQGLSLPSFPGPLSSYGMPHVCQYNAVAGAGYPVQWVGISGTTQQSVVIPAQSGGPFQPGMNMQAFPTSSVQNPATIPPGPK

SEQ ID NO: 206558 - DNA, 5403 bp, Artificial Sequence
  derived and/or modified sequence
atggccaccgacagcggcgaccccgccagcaccgaggacagcgagaagcccgacggcatcagcttcgagaacagagtgccccaggtggccgccaccctgaccgtggaggccagactgaaggagaagaacagcaccttcagcgccagcggcgagaccgtggagagaaagagattcttcagaaagagcgtggagatgaccgaggacgacaaggtggccgagagcagccccaaggacgagagaatcaaggccgccatgaacatccccagagtggacaagctgcccagcaacgtgctgagaggcggccaggaggtgaagtacgagcagtgcagcaagagcaccagcgagatcagcaaggactgcttcaaggagaagaacgagaaggagatggaggaggaggccgagatgaaggccgtggccaccagccccagcggcagattcctgaagttcgacatcgagctgggcagaggcgccttcaagaccgtgtacaagggcctggacaccgagacctgggtggaggtggcctggtgcgagctgcaggacagaaagctgaccaaggccgagcagcagagattcaaggaggaggccgagatgctgaagggcctgcagcaccccaacatcgtgagattctacgacagctgggagagcatcctgaagggcaagaagtgcatcgtgctggtgaccgagctgatgaccagcggcaccctgaagacctacctgaagagattcaaggtgatgaagcccaaggtgctgagaagctggtgcagacagatcctgaagggcctgcagttcctgcacaccagaaccccccccatcatccacagagacctgaagtgcgacaacatcttcatcaccggccccaccggcagcgtgaagatcggcgacctgggcctggccaccctgatgagaaccagcttcgccaagagcgtgatcggcacccccgagttcatggcccccgagatgtacgaggagcactacgacgagagcgtggacgtgtacgccttcggcatgtgcatgctggagatggccaccagcgagtacccctacagcgagtgccagaacgccgcccagatctacagaaaggtgaccagcggcatcaagcccgccagcttcaacaaggtgaccgaccccgaggtgaaggagatcatcgagggctgcatcagacagaacaagagcgagagactgagcatcagagacctgctgaaccacgccttcttcgccgaggacaccggcctgagagtggagctggccgaggaggacgactgcagcaacagcagcctggccctgagactgtgggtggaggaccccaagaagctgaagggcaagcacaaggacaacgaggccatcgagttcagcttcaacctggagaccgacacccccgaggaggtggcctacgagatggtgaagagcggcttcttccacgagagcgacagcaaggccgtggccaagagcatcagagacagagtgacccccatcaagaagaccagagagaagaagcccgccggctgcctggaggagagaagagacagccagtgcaagagcatgggcaacgtgttcccccagccccagaacaccaccctgcccctggcccccgcccagcagaccggcgccgagtgcgaggagaccgaggtggaccagcacgtgagacagcagctgctgcagagaaagccccagcagcactgcagcagcgtgaccggcgacaacctgagcgaggccggcgccgccagcgtgatccacagcgacaccagcagccagcccagcgtggcctacagcagcaaccagaccatgggcagccagatggtgagcaacatcccccaggccgaggtgaacgtgcccggccagatctacagcagccagcagctggtgggccactaccagcaggtgagcggcctgcagaagcacagcaagctgacccagccccagatcctgcccctggtgcagggccagagcaccgtgctgcccgtgcacgtgctgggccccaccgtggtgagccagccccaggtgagccccctgaccgtgcagaaggtgccccagatcaagcccgtgagccagcccgtgggcgccgagcagcaggccgccctgctgaagcccgacctggtgagaagcctgaaccaggacgtggccaccaccaaggagaacgtgagcagccccgacaaccccagcggcaacggcaagcaggacagaatcaagcagagaagagccagctgccccagacccgagaagggcaccaagttccagctgaccgtgctgcaggtgagcaccagcggcgacaacatggtggagtgccagctggagacccacaacaacaagatggtgaccttcaagttcgacgtggacggcgacgcccccgaggacatcgccgactacatggtggaggacaacttcgtgctggagagcgagaaggagaagttcgtggaggagctgagagccatcgtgggccaggcccaggagatcctgcacgtgcacttcgccaccgagagagccaccggcgtggacagcatcaccgtggacagcaacagcagccagaccggcagcagcgagcaggtgcagatcaacagcaccagcacccagaccagcaacgagagcgccccccagagcagccccgtgggcagatggagattctgcatcaaccagaccatcagaaacagagagacccagagcccccccagcctgcagcacagcatgagcgccgtgcccggcagacaccccctgcccagccccaagaacaccagcaacaaggagatcagcagagacaccctgctgaccatcgagaacaacccctgccacagagccctgttcaccagcaagagcgagcacaaggacgtggtggacggcaagatcagcgagtgcgccagcgtggagaccaagcagcccgccatcctgtaccaggtggaggacaacagacagatcatggcccccgtgaccaacagcagcagctacagcaccaccagcgtgagagccgtgcccgccgagtgcgagggcctgaccaagcaggccagcatcttcatccccgtgtacccctgccaccagaccgccagccaggccgacgccctgatgagccaccccggcgagagcacccagaccagcggcaacagcctgaccaccctggccttcgaccagaagccccagaccctgagcgtgcagcagcccgccatggacgccgagttcatcagccaggagggcgagaccaccgtgaacaccgaggccagcagccccaagaccgtgatccccacccagacccccggcctggagcccaccaccctgcagcccaccaccgtgctggagagcgacggcgagagaccccccaagctggagttcgccgacaacagaatcaagaccctggacgagaagctgagaaacctgctgtaccaggagcacagcatcagcagcatctaccccgagagccagaaggacacccagagcatcgacagccccttcagcagcagcgccgaggacaccctgagctgccccgtgaccgaggtgatcgccatcagccactgcggcatcaaggacagccccgtgcagagccccaacttccagcagaccggcagcaagctgctgagcaacgtggccgccagccagcccgccaacatcagcgtgttcaagagagacctgaacgtgatcaccagcgtgcccagcgagctgtgcctgcacgagatgagcagcgacgccagcctgcccggcgaccccgaggcctaccccgccgccgtgagcagcggcggcgccatccacctgcagaccggcggcggctacttcggcctgagcttcacctgccccagcctgaagaaccccatcagcaagaagagctggaccagaaagctgaagagctgggcctacagactgagacagagcaccagcttcttcaagagaagcaaggtgagacaggtggagaccgaggagatgagaagcgccatcgcccccgaccccatccccctgaccagagagagcaccgccgacaccagagccctgaacagatgcaaggccatgagcggcagcttccagagaggcagattccaggtgatcaccatcccccagcagcagagcgccaagatgaccagcttcggcatcgagcacatcagcgtgttcagcgagaccaaccacagcagcgaggaggccttcatcaagaccgccaagagccagctggtggagatcgagcccgccacccagaaccccaagaccagcttcagctacgagaagctgcaggccctgcaggagacctgcaaggagaacaagggcgtgcccaagcagggcgacaacttcctgagcttcagcgccgcctgcgagaccgacgtgagcagcgtgacccccgagaaggagttcgaggagaccagcgccaccggcagcagcatgcagagcggcagcgagctgctgctgaaggagagagagatcctgaccgccggcaagcagcccagcagcgacagcgagttcagcgccagcctggccggcagcggcaagagcgtggccaagaccggccccgagagcaaccagtgcctgccccaccacgaggagcaggcctacgcccagacccagagcagcctgttctacagccccagcagccccatgagcagcgacgacgagagcgagatcgaggacgaggacctgaaggtggagctgcagagactgagagagaagcacatccaggaggtggtgaacctgcagacccagcagaacaaggagctgcaggagctgtacgagagactgagaagcatcaaggacagcaagacccagagcaccgagatccccctgccccccgccagccccagaagacccagaagcttcaagagcaagctgagaagcagaccccagagcctgacccacgtggacaacggcatcgtggccaccggcaagagctgcctgatcaacgagctggagaaccccctgtgcgtggagagcaacgccgccagctgccagcagagccccgccagcaagaagggcatgttcaccgacgacctgcacaagctggtggacgactggaccaaggaggccgtgggcaacagcctgatcaagcccagcctgaaccagctgaagcagagccagcacaagctggagaccgagaactggaacaaggtgagcgagaacacccccagcaccatgggctacaccagcacctggatcagcagcctgagccagatcagaggcgccgtgcccaccagcctgccccagggcctgagcctgcccagcttccccggccccctgagcagctacggcatgccccacgtgtgccagtacaacgccgtggccggcgccggctaccccgtgcagtgggtgggcatcagcggcaccacccagcagagcgtggtgatccccgcccagagcggcggccccttccagcccggcatgaacatgcaggccttccccaccagcagcgtgcagaaccccgccaccatcccccccggccccaagtag

SEQ ID NO: 206559 - DNA, 5403 bp, Artificial Sequence
  derived and/or modified sequence
atggcaacagactccggtgaccccgcctcaaccgaagattcggagaagccggatggcatctcctttgaaaaccgcgttccacaggtcgctgccacgctgacagtggaagctcggttgaaagaaaaaaattcaactttttctgcgtccggcgaaaccgtcgagcgaaaacggttcttccgaaagagcgtagagatgaccgaagatgataaggtggcggagtcatccccaaaggacgagcgcatcaaggctgcaatgaacatccctcgtgtggacaaactacctagcaacgttcttaggggggggcaggaggtgaaatatgaacagtgctcaaagagcactagcgaaatatccaaggattgttttaaagaaaagaacgagaaggaaatggaggaggaggccgagatgaaggctgtagcaacctccccttctggtcgattcctgaagttcgatattgagctaggtaggggagcctttaaaactgtctataagggcctcgacaccgagacttgggttgaggtggcgtggtgtgagctgcaggacagaaagctaacaaaggccgaacaacagaggttcaaagaggaggcggaaatgctgaagggactgcagcatcctaacattgtgcggttttacgattcatgggagtccattctcaaagggaaaaaatgcatagtcctggtgacagagctcatgacctctgggacacttaagacctacttaaagcgctttaaagtgatgaagcccaaggtgttgagaagctggtgtcgacagattctgaagggactgcagttcctacacacgaggactccaccaattattcacagagatctcaaatgcgataacatctttatcaccggcccaacagggagtgttaagataggggacctgggtctcgctacgctgatgagaacatcattcgccaaatcagtcattggcactcctgaatttatggctcccgagatgtatgaagagcattacgacgaatccgtcgacgtatatgcttttggaatgtgtatgttggagatggcgacaagcgagtacccatattccgagtgtcaaaacgctgcccagatctaccgcaaggtaacttctggtatcaaacccgcatctttcaataaggtgaccgaccccgaagttaaggaaattattgagggctgtatccggcaaaataagtccgaaagactgtccatcagggatctcctcaatcacgctttttttgccgaagatactggtttgcgggtggagttggcagaggaagacgattgttctaattcctcgctcgctctccgcctgtgggtcgaggaccccaaaaagctgaagggaaaacacaaagataacgaagcaatcgaattcagcttcaatctggaaaccgacacgcccgaagaagtggcttacgagatggtcaagagcggcttctttcatgaatctgattcaaaggccgtggcgaagtcaatccgcgatcgggtgacacccattaagaaaacacgtgagaagaaacccgccggatgtctcgaggagaggagagactcacagtgtaagtcaatgggaaatgtgttccctcagcctcagaataccacactgcctcttgcacctgcacagcagacaggagccgaatgtgaggaaaccgaggtcgaccaacacgtgcgtcaacagctactgcagcggaaaccccagcaacattgctcaagtgtaaccggcgacaatctctcagaggcaggagctgcttccgtcattcatagtgacacctcttcacagccctccgtggcttacagttccaaccagacaatgggctcccagatggtgagtaatattccacaggctgaggttaatgtgccaggccagatctatagttctcagcagctggttggtcactaccaacaggtctctggcctacagaaacacagcaaacttacgcagccccaaattctgcccctcgttcagggccagagtacagtgctgcccgtgcacgttctgggacccacagttgtatcgcagcctcaggtcagccccctcactgtgcagaaagtgccccagattaaaccagtttcacagccggtgggcgctgagcagcaggccgccctgttgaagccagatctggtgagatcacttaaccaggatgtggcgacaaccaaggaaaatgtctctagcccagataacccttccggcaacggaaagcaagacaggataaagcaaagacgggcctcctgccccaggcctgaaaagggcacaaaattccagctaaccgtgttacaggtgagtacttcaggcgataacatggtcgagtgccagctagagacacacaacaataaaatggttacgttcaagttcgatgtggacggcgatgctccagaagacatcgctgattacatggttgaggataacttcgtgctcgagagtgaaaaagagaaatttgtggaagagctaagggctatcgtcggccaagctcaggaaattctccacgtacactttgcgacagaaagggcgactggagttgactccatcaccgtcgattccaacagttcccagaccgggtcttcagaacaggtgcaaattaatagcaccagtacacagacctcaaatgaatctgcccctcagtcatcacccgtgggcaggtggaggttttgtattaatcagaccattagaaaccgcgagacccagtctcctccttcattgcagcatagcatgagcgcagtcccaggtcgccatccacttccgtcgcctaagaacacttctaacaaggagatctctagggataccctgctgaccatagagaataacccatgtcacagggctctttttaccagcaagtccgagcacaaagacgtggtggatggtaaaatttctgaatgcgcctccgtcgaaaccaaacagcctgcaattctgtatcaggtcgaggacaatcgacagattatggccccagtcacgaattctagttcttactcaaccactagcgtgcgagctgttcctgctgagtgtgagggactgaccaaacaggcttccatttttatccccgtctatccctgtcaccagacagcctctcaagcagacgcactgatgtcacatcctggggaatcaacacagacctcaggaaactcactcaccactctggcatttgatcagaaacctcagacactttctgtgcaacaacccgctatggacgccgaattcatttcacaagaaggggagaccacagtcaacacggaggcatcaagccccaaaaccgtaatccctactcaaaccccgggccttgagcctacgactcttcagcctaccactgtgcttgagagcgatggggaaaggcctcccaaactggagttcgcagacaataggataaagactctggacgaaaagctgaggaatttgctctaccaggagcacagtatttcatcgatataccccgaaagccaaaaagatacacagagtatcgatagccctttcagcagctctgctgaagacacgctttcatgtccagtcacggaagtgattgcgatctcacactgtgggattaaggattcccccgtgcaatcgcccaatttccaacagaccggctccaagctgctaagtaatgtggcggcaagccagccagctaatattagcgtgttcaagcgcgatttaaatgtaattacaagtgtgccaagtgagctgtgccttcatgaaatgtcatccgacgcgtccctcccaggtgatcctgaggcctatccagccgccgtgtcttccggaggtgctatacatctccagacggggggaggatatttcggcctgtcctttacatgtccaagcctgaagaaccccatctccaagaagagctggacacgcaaactgaagtcctgggcataccgcctcagacaatcgacgagttttttcaagcgatctaaagtacggcaggttgaaacggaagaaatgcgctctgccatcgcccccgaccctattcccctcactagagaatctacagcagataccagagcacttaacaggtgcaaggccatgtccgggagcttccagcgcgggaggttccaggtaattaccatcccacagcagcagtctgccaagatgactagcttcggcattgaacacatcagtgtgttctcagagaccaaccactcaagcgaagaagcattcatcaaaactgcaaagtcccagctggttgaaattgagccagctacacagaaccccaagacatctttttcatacgaaaagttacaggccctgcaggaaacttgcaaagagaacaaaggcgtcccgaaacaaggcgataactttctgtcattttctgctgcttgcgagactgacgtgagctcggtcaccccagagaaggaattcgaggagacttccgcaacagggagttcaatgcagagtggtagcgaactcctgctgaaggagagggagatcctgaccgccgggaaacagccctcttctgattctgagtttagcgcatctctcgctgggtcagggaagtccgtggcaaagacaggtcctgaatccaatcagtgcctgccccatcatgaggagcaggcttatgcccaaacccagtccagtctgttttactcccccagctcccccatgagtagcgatgatgaaagtgaaatcgaggatgaggatttgaaggtcgaactccagcggctccgcgagaagcacatccaggaggtcgtcaacctccagacccagcagaacaaagagctgcaagagctctatgagagacttagatccataaaagattccaagacccaatctaccgagatacccctcccacccgccagccccaggcgacccaggtcctttaagagcaaactcagatcccggccccagagcttaacgcacgtcgataacggaatcgtggcaactgggaagagctgcctgatcaacgagcttgagaatccattgtgcgtagaatctaatgccgcctcatgccaacagtccccggcatcgaagaagggtatgttcacagacgatctgcacaagttggttgacgactggactaaggaggccgttgggaactccctcatcaaaccatccctcaatcagcttaagcaatctcagcacaaactggagaccgaaaattggaacaaggtctccgagaacacccctagcaccatggggtacacttcaacgtggatttcaagcctcagtcagattcggggagccgtcccaaccagcctccctcaggggctttcactacctagctttccagggccccttagctcctacgggatgccacatgtctgccaatataacgcggtagccggcgcaggataccctgtacagtgggttggtatcagtgggactactcagcagagtgtagtgatcccagcccagtctggggggccgtttcaacccggcatgaacatgcaggcctttccgacctcttcagtgcaaaatcccgctacgatcccacccggccctaagtag

SEQ ID NO: 206560 - DNA, 5403 bp, Artificial Sequence
  derived and/or modified sequence
atggccacagattctggggaccctgccagcacagaggacagcgagaagccagatggcatcagctttgaaaatagagtgccccaggtggccgccaccctgactgtggaggcccggctgaaggagaagaacagcaccttcagcgccagcggggagaccgtggagaggaagcgcttcttcaggaagtctgtggagatgacagaagatgacaaggtggccgagagcagccccaaggatgagcgcatcaaggccgccatgaacatcccccgggtggacaagctgcccagcaatgtgctgcggggcggccaggaggtgaagtatgagcagtgcagcaagagcaccagcgagatcagcaaggactgcttcaaggagaagaatgagaaggagatggaggaggaggccgagatgaaggctgtggccaccagccccagcggccgcttcctgaagtttgatattgagctgggccgcggggccttcaagacagtgtacaagggcctggacacagagacctgggtggaggtggcctggtgtgagctgcaggacaggaagctgaccaaggccgagcagcagcgcttcaaggaggaggccgagatgctgaagggcctgcagcaccccaacatcgtgcgcttctatgacagctgggagagcatcctgaagggcaagaagtgcatcgtgctggtgacagagctgatgaccagcggcaccctgaagacctacctgaagcgcttcaaggtgatgaagcccaaggtgctgcgctcctggtgccggcagatcctgaagggcctgcagttcctgcacaccaggaccccacccatcatccaccgggacctgaagtgtgacaacatcttcatcaccggccccactggatctgtgaagatcggggacctgggcctggccaccctgatgaggaccagctttgccaagagcgtcatcggcaccccagagttcatggcccctgagatgtatgaggagcactatgatgagagcgtggatgtgtatgccttcggcatgtgcatgctggagatggccaccagcgagtacccctacagcgagtgccagaatgctgcccagatctacaggaaggtgaccagcggcatcaagccagccagcttcaacaaggtgacagatcctgaggtgaaggagatcatcgagggctgcatccggcagaacaagtctgagcggctgagcatccgggacctgctgaaccacgccttctttgctgaggacaccggcctgcgggtggagctggccgaggaggatgactgcagcaacagcagcctggccctgcggctgtgggtggaggaccccaagaagctgaagggcaagcacaaggacaatgaggccatcgagttctccttcaacctggagacagacaccccagaggaggtggcctatgagatggtgaagagcggcttcttccatgaaagtgacagcaaggctgtggccaagagcatccgggacagagtgacccccatcaagaagacccgggagaagaagccagctggctgcctggaggagcggcgggacagccagtgcaagtccatgggaaatgtgttcccccagccccagaacaccaccctgcccctggccccagcccagcagacaggagcagaatgtgaggagacagaggtggaccagcacgtgcggcagcagctgctgcagaggaagccccagcagcactgcagctctgtgactggagacaacctgtctgaggccggggccgccagcgtcatccacagcgacaccagcagccagcccagcgtggcctacagcagcaaccagaccatgggcagccagatggtgagcaacatcccccaggccgaggtgaatgtgcccggccagatctacagcagccagcagctggtgggccactaccagcaggtgtctggcctgcagaagcacagcaagctgacccagccccagatcctgcccctggtgcagggccagagcacagtgctgcctgtgcacgtgctgggccccaccgtggtgtcccagccccaggtgagccccctgactgtgcagaaggtgccccagatcaagcctgtgtcccagcctgtgggcgctgagcagcaggccgccctgctgaagccagacctggtgcgcagcctgaaccaggatgtggccaccaccaaggaaaatgtgagcagcccagacaaccccagcggaaatggcaagcaggaccgcatcaagcagaggcgggccagctgccccaggcctgagaagggcaccaagttccagctgactgtgctgcaggtgtccaccagcggggacaacatggtggagtgccagctggagacccacaacaacaagatggtgaccttcaagtttgatgtggatggagatgccccagaagatattgctgactacatggtggaggacaactttgtgctggagagcgagaaggagaagtttgtggaggagctgcgggccatcgtgggccaggcccaggagatcctgcacgtgcactttgccacagagcgggccaccggggtggacagcatcaccgtggacagcaacagcagccagacaggcagcagcgagcaggtgcagatcaacagcaccagcacccagaccagcaatgaaagtgccccccagagcagccctgtgggccgctggaggttctgcatcaaccagaccatccggaaccgggagacccagagcccccccagcctgcagcacagcatgtctgctgtgcccggccgccaccccctgcccagccccaagaacaccagcaacaaggagatcagccgggacaccctgctgaccatcgagaacaacccctgccaccgggccctcttcaccagcaagtctgagcacaaggatgtggtggatggcaagatcagtgaatgtgcctctgtggagaccaagcagcctgccatcctgtaccaggtggaggacaaccggcagatcatggcccctgtgaccaacagcagcagctacagcaccacctctgtgcgggctgtgcctgcagaatgtgagggcctgaccaagcaggccagcatcttcatccctgtgtacccctgccaccagacagccagccaggctgatgccctgatgagccaccctggagagagcacccagaccagcggcaacagcctgaccaccctggcctttgaccagaagccccagaccctgtctgtgcagcagcctgccatggatgctgagttcatcagccaggagggggagaccaccgtgaacacagaggccagcagccccaagacagtcatccccacccagaccccaggcctggagcccaccaccctgcagcccaccaccgtgctggagagtgatggagagcggccccccaagctggagtttgctgacaaccgcatcaagaccctggatgagaagctgaggaacctgctgtaccaggagcacagcatcagcagcatctacccagagagccagaaggacacccagagcattgacagccccttcagcagcagcgctgaggacaccctgagctgccctgtgacagaggtgattgccatcagccactgcggcatcaaggacagccctgtgcagagccccaacttccagcagacaggcagcaagctgctgagcaatgtggccgccagccagcctgccaacatcagcgtcttcaagagggacctgaatgtcatcacctctgtgcccagcgagctgtgcctgcacgagatgagcagtgatgccagcctgcccggggaccctgaggcctacccagctgctgtgagcagcggcggggccatccacctgcagacaggaggcggctacttcggcctgtccttcacctgccccagcctgaagaaccccatcagcaagaagtcctggaccaggaagctgaagtcctgggcctaccgcctgcggcagagcaccagcttcttcaagaggagcaaggtgcggcaggtggagacagaggagatgaggtctgccatcgccccagaccccatccccctgacccgggagagcacagctgacacccgggccctgaaccgctgcaaggccatgagcggcagcttccagaggggccgcttccaggtgatcaccatcccccagcagcagagcgccaagatgaccagctttggaattgagcacatctctgtgttcagcgagaccaaccacagcagcgaggaggccttcatcaagacagccaagagccagctggtggagattgaaccagccacccagaaccccaagaccagcttctcctatgagaagctgcaggccctgcaggagacctgcaaggagaacaagggcgtgcccaagcagggcgacaacttcctgtccttctctgctgcctgtgaaacagatgtgtcctctgtgaccccagagaaggagtttgaggagaccagcgccaccggcagctccatgcagagcggcagcgagctgctgctgaaggagcgggagatcctgacagctgggaagcagcccagcagtgacagcgagttcagcgccagcctggccggcagcggcaagtctgtggccaagacaggccctgagagcaaccagtgcctgccccaccacgaggagcaggcctatgcccagacccagagcagcctcttctacagccccagcagccccatgagcagtgatgatgagagcgagattgaagatgaggacctgaaggtggagctgcagaggctgcgggagaagcacatccaggaggtggtgaacctgcagacccagcagaacaaggagctgcaggagctgtatgagcggctgcggagcatcaaggacagcaagacccagagcacagagatccccctgcccccagccagcccccggcggcccaggagcttcaagagcaagctgcggagccggccccagagcctgacccacgtggacaatggcatcgtggccaccgggaagagctgcctgatcaatgagctggagaaccccctgtgtgtggagagcaatgctgccagctgccagcagagccctgccagcaagaagggcatgttcacagatgacctgcacaagctggtggatgactggaccaaggaggccgtgggcaacagcctcatcaagcccagcctgaaccagctgaagcagagccagcacaagctggagacagagaactggaacaaggtgtctgagaacacccccagcaccatgggctacaccagcacctggatcagcagcctgagccagatcagaggagctgtgcccaccagcctgccccagggcctgagcctgcccagcttccctggccccctgagcagctatggcatgccccacgtgtgccagtacaatgctgtggccggggccggctaccctgtgcagtgggtgggcatcagcggcaccacccagcagagcgtggtgatcccagcccagagcggcggccccttccagcccggcatgaacatgcaggccttccccaccagctctgtgcagaacccagccaccatccccccaggccccaagtag

SEQ ID NO: 206561 - DNA, 5403 bp, Artificial Sequence
  derived and/or modified sequence
atggccaccgacagcggcgaccccgccagcaccgaggacagcgagaagccagacggaattagttttgagaaccgggtccctcaagtggctgcaacacttactgtcgaagctcgtctgaaagagaaaaattcaacgttctcagccagtggcgagactgtggagcggaagcggtttttccggaaatctgttgaaatgacagaagatgacaaagtggccgaatccagccctaaggatgaaagaatcaaagctgccatgaatatcccccgcgtggacaagctgcccagcaacgtcctgaggggaggacaggaagtgaaatacgagcaatgcagcaaatccacctccgaaatttcaaaagattgttttaaggagaagaacgagaaggagatggaggaggaagctgaaatgaaggccgtcgccacatctccgagcggccggttcctgaagttcgacatcgagttaggccggggagctttcaagaccgtgtataaaggactggatactgagacctgggttgaagtcgcctggtgcgagcttcaagaccgtaaactcaccaaagctgagcaacagcgatttaaggaggaagctgaaatgttaaaggggctccagcaccccaacatcgtgaggttttatgatagctgggagtcaatactcaaaggaaagaaatgcattgtgctcgtgaccgaactaatgacgtccggaaccctcaagacctatttaaaaagattcaaggtaatgaaacctaaagtactgcgcagctggtgtcgccaaatccttaaggggctgcaatttctccatactcgcacacctcctattattcatcgggacctcaagtgcgataacatctttatcaccggacctacgggatccgtcaagattggagacctgggcctggctacattgatgcgcaccagcttcgccaaaagcgtgataggaacacctgagtttatggcgcccgaaatgtacgaggaacattatgatgaatccgtggacgtgtacgcctttggaatgtgcatgctcgagatggccacatcagaatatccatacagcgagtgtcagaacgcagcccaaatatatcggaaggtaacctcgggcattaagcccgccagcttcaataaagttacggacccagaggtgaaggagattatcgaggggtgcatccgacagaataaatccgaaaggctgtccatcagggacctgctcaatcatgccttcttcgccgaagatactggcctacgtgtcgaactggctgaggaggacgactgtagtaattcgtctctcgccctgagactttgggtggaagatccaaagaagcttaagggcaaacataaagacaacgaagctatagagttcagcttcaatctggagacagacacccctgaagaggtggcatacgagatggttaaatcagggttcttccatgagtccgattcaaaggccgtggctaagagtattagagacagagtaacccctataaagaaaactagagaaaaaaaaccagccggctgcctggaggagagacgggatagccaatgtaaatcgatgggcaacgtgtttccacagccacagaacacaaccctgccactcgcccccgcccagcaaaccggcgctgaatgcgaggaaactgaggtagatcagcacgtgcgccagcagctcctacaacggaaacctcagcaacactgtagttcggtaacaggagataatctgtccgaggcaggggcagcttcagtcattcattcagatactagctctcaaccctctgtggcttactcctccaaccaaacaatgggttcgcagatggtaagcaacattcctcaggcagaggtaaatgtccctggacagatctattcatcacaacagcttgtgggccactaccagcaggtttcaggactgcagaagcactccaaactgacccagcctcaaattctgccactggtgcaagggcagtcgaccgtgttacctgtccatgtgctggggcctactgtggtctcccagcctcaggtctctccactgacggttcagaaagtgccccaaattaagccggtgagtcagcctgtgggcgctgaacaacaggccgcattgctgaaaccagatctcgtccgaagcctgaaccaggatgtggctaccacaaaggagaacgttagcagtcccgacaacccctcaggcaatgggaagcaggatagaatcaagcagcgcagagctagttgcccgcggcccgagaagggtacaaaattccagctgactgttctccaggtgagcacgtcaggagataacatggtcgaatgccagctagagactcataacaataagatggtcacatttaagtttgatgtcgacggagacgcaccagaggacatcgccgactacatggtggaagataacttcgtgttggaatctgagaaggaaaaattcgtggaggagctccgagctattgtggggcaggcacaggaaatcttgcacgtccactttgctacggagcgcgcaacaggcgtggattccatcaccgttgactccaattcttcacagacaggttcctccgagcaagtgcagatcaattccacatcgacccagacctcgaacgaaagtgcgcctcagagctctccagtcggccgctggcggttttgcatcaaccagaccatcaggaatcgggaaacacagagtccaccgagcttgcagcacagcatgtctgctgtgcctggacggcatccgttgccaagtccaaaaaatacgtcaaataaagagatatccagggacacactgctcacaattgaaaataacccgtgtcaccgggctctgtttacgagtaaaagtgagcacaaggatgttgttgatggtaagatttcagagtgtgcatccgtggagacaaagcaacctgccatcttgtaccaggtggaggataaccgccagatcatggccccagtcaccaactcgtcttcctattcaacaacttcagtgagggcagtgcccgccgaatgtgaaggccttacgaagcaggccagcatcttcattccagtgtatccttgccatcagacagcatcccaggccgatgctctgatgtctcatccgggcgaaagtacgcagacaagcggaaatagtctgaccacacttgcgtttgatcagaagccccagactctctctgttcagcaacctgctatggatgcagagttcattagccaggaaggggagaccaccgtgaatactgaggccagctctcccaagactgttattcctacccagaccccaggactggaacccactacacttcagcctaccacggtcctggaatctgatggtgagcgtccgcctaaactggagtttgccgacaatcgaattaaaaccctggatgaaaagctgcggaacctgctgtaccaggagcattccatatcttcaatctatcctgagagccagaaggacacccaatctatcgactcccctttttcctcaagcgctgaagatactcttagctgccctgttacagaggtgatcgcaatttcccattgtggtattaaagactctccagtccagtcacccaacttccagcagacaggatcaaagctcctttcaaacgttgccgcttctcagcccgcgaacattagcgtgtttaaacgggacttgaacgtgatcacctctgtcccctcggaattgtgcctccacgaaatgagtagcgacgcttctctgcccggcgacccggaggcatacccagcagcagttagtagcggtggcgccatacatctccaaaccggcgggggatattttggactgagtttcacctgtcctagcctgaaaaatcccatttccaagaaatcctggactcgaaagctgaagagctgggcttatcggctgcggcagtctacttcatttttcaagcggtctaaggtcagacaggtagagactgaggagatgagatctgcaatcgctccggatcctatccctctgacccgtgagtccactgccgacaccagggcgctgaaccgctgtaaggccatgtccggatcttttcagagggggcggttccaggttattacgatcccccagcaacaatctgccaaaatgaccagcttcggcattgaacacatcagcgtgttcagcgaaacaaaccacagttcagaggaagctttcataaaaaccgccaaatcacagctggtcgagattgaaccagccacccagaatccaaagaccagcttctcctacgagaagctgcaggcattgcaagaaacctgtaaagaaaataaaggggtacctaaacaaggcgacaactttctgtccttttctgctgcttgcgagacggatgtaagttccgtgacacctgagaaagagttcgaggagacgtctgctacaggatcttctatgcagtccggaagcgagctgctcttgaaggaacgggagattttgactgccggcaaacaaccttcttctgacagcgagttcagcgctagcttggccggctcgggcaagtctgtcgccaagacaggccccgagtccaaccagtgcctgccccaccacgaagagcaggcctacgctcagacccagagcagcctgttctacagtccatctagcccgatgtctagtgacgacgagtcagaaatagaagacgaggacctgaaagtcgaactacagagactacgtgagaaacacattcaggaagtcgtgaatctccagacccagcaaaacaaagagctgcaagagctttatgaaaggctccgctccatcaaagacagcaaaacacaaagcaccgaaatcccgcttcccccagcttcaccccggagacctagaagcttcaagtctaaactgaggtcaagaccccagagtctcacccacgtcgataatggtattgtggccacaggtaagagctgtctgatcaacgaactcgagaaccccttgtgtgtggaaagcaacgccgcttcatgccaacaaagccccgcgtcgaagaaaggaatgttcactgatgacttgcacaagcttgtggatgattggacaaaagaagccgtgggtaacagcctcattaagccgagtttaaatcaattaaaacaatctcagcacaaactggagactgaaaactggaacaaggtgagcgagaatactccaagcacgatgggctacacatctacctggattagttccctgagccagatccgcggagccgtcccaacatctctgcctcaggggctaagtttacccagctttccagggcccctttcttcctatgggatgccacacgtgtgccagtacaacgccgtagcgggggccggatatcccgtacagtgggttggcatttcaggaaccactcaacaatcagtcgtgattccagctcagagcggaggcccctttcagcctggtatgaatatgcaggcctttccaactagttcggtgcagaatccagccacgattccgcctggcccaaaatag

SEQ ID NO: 206562 - DNA, 5402 bp, Artificial Sequence
  derived and/or modified sequence
atggctacggactccggcgaccctgcttccactgaagactctgaaaaaccagacggcatcagtttcgaaaaccgggtacctcaggtggcggctaccctgaccgtggaggcccgactgaaggaaaaaaactctacatttagtgcctccggcgagacagtggagaggaagagattctttagaaagtccgtggagatgacggaggacgacaaggtcgcagaatcctcccctaaagatgaaaggattaaggctgccatgaacattccaagagtcgataagctaccaagcaacgtcctgcgcggaggtcaggaggtcaagtacgagcagtgcagtaaatcaacatctgaaatttctaaagattgctttaaagagaaaaacgagaaggaaatggaagaagaagccgagatgaaggccgtggcaacatccccgtccggcaggttccttaaattcgacatcgaacttgggcgaggcgcttttaagactgtgtataagggcctcgacacagagacatgggtggaggttgcttggtgcgagctacaggatagaaaactcacgaaggctgaacagcagaggttcaaggaagaggccgaaatgctgaaggggcttcagcacccaaatattgtgaggttttatgactcatgggaatccatactgaaggggaagaaatgcattgttctggtgacagagttaatgacatctggcacattgaaaacctacctgaagagattcaaggttatgaaaccgaaagtccttcggtcgtggtgccgtcaaatcctgaagggcttacagtttctgcacactaggacacccccaatcatacacagagacctgaagtgtgataacatcttcatcactgggcctacagggtctgtcaagattggagatttaggcctggccaccctcatgcggaccagttttgcaaagtcagttatcggcactcctgagtttatggcgccagagatgtacgaagagcactacgatgaaagcgtggatgtatatgccttcggtatgtgcatgctggaaatggcgacctcggaatacccctatagtgaatgtcagaatgcggcacagatctataggaaggtcactagcggcatcaagcctgccagctttaataaggtgacagatcctgaagtcaaggagattatcgaaggctgtatccgccagaacaagtccgagcgcctgtccatcagggatttacttaatcatgcctttttcgcagaagacacaggactcagagtggagctagcggaggaggatgactgctctaactcttcactggccctccggttgtgggtagaggatccaaaaaaacttaaagggaaacacaaggataacgaggctattgagttttcattcaacctggagactgatactccggaagaggtagcctatgagatggtcaagtctggatttttccacgagtccgactccaaggctgtagccaaaagcattcgcgacagggtcacccccattaagaaaaccagagaaaagaagcccgcaggctgtctcgaggaacggcgagactcccagtgcaaatctatgggtaatgtgttcccccagccacagaacacgactctccccctggctccagctcagcagaccggcgctgaatgtgaagagaccgaggtggatcaacacgtaagacagcagttgttacagcgcaagccacagcagcattgttcttcagtgacaggggataacctctcagaggccggtgctgcctctgtgattcatagcgacacatcctcccagccatcagtggcctattcatcaaaccaaaccatgggctcccaaatggtttccaatattccacaggccgaagttaacgtccctgggcagatttactctagccaacagctcgtcgggcattatcaacaggtgagtggcctgcagaagcattctaaattaacgcaaccacagattctaccactcgtgcagggtcagagcaccgtgttgcctgtgcacgtccttggaccaacagtagtgagtcagccccaggttagtccattgacagttcagaaggtcccacagataaaacctgtatcccagcctgttggtgccgagcagcaggctgcgttactcaagcctgatcttgtcaggtcactgaaccaagatgtggccactaccaaagagaatgtctcatctccagataatccatccgggaatggtaagcaagaccggatcaagcagcgccgtgcaagctgccctcgccctgagaaagggactaaattccagctcactgtcttacaggtgtctacgtccggcgacaacatggtggagtgtcaactggaaacccacaataacaagatggttaccttcaagttcgatgttgacggagacgcacccgaggacatcgccgactatatggtcgaggataactttgtgcttgaatccgagaaagagaagttcgtggaagaactcagagccatcgttggacaagcccaagagatcttacatgtacacttcgcaaccgaacgcgcaactggagtcgactcaattacggtggattcgaattccagccagaccggctcgtcagagcaggtgcaaattaacagtacttcaactcagacctccaatgagtccgcacctcagtctagtccagtggggagatggagattctgcatcaatcaaaccataaggaacagagagacgcagagccctcccagtctgcagcatagcatgtctgccgttcccggaaggcatcctttgcccagccctaaaaatacttctaacaaagagattagcagggatactcttctaacaatcgaaaacaacccctgccacagagccctgttcaccagcaagagtgagcacaaagacgtggtggacggaaagatttcagaatgtgcctccgtcgaaacaaagcagcctgctatactttaccaagtggaagataatcgccagataatggcaccagtgaccaattcctcttcatattcaaccacctctgttagggccgttccagcagaatgtgaagggctgaccaagcaggcgtctatattcatcccggtctatccctgtcatcagaccgcctcccaggccgacgccttgatgtcccacccaggggaaagtactcagacaagtgggaattcattgaccacgcttgcattcgatcaaaagccacagacacttagtgtgcaacagcccgcaatggacgccgaattcatctcccaggaaggggagaccaccgtgaacaccgaagccagctctcctaaaactgtcattcccactcagacccctggcctcgaacccacaacacttcagcctactacagttctggagagcgacggagaacgccctccaaaactcgagttcgcggataatagaattaaaaccttagacgaaaagttgagaaacctgctgtatcaggaacacagcatatccagcatctaccctgaatcacagaaggatactcaatcaatagacagcccgttcagcagttctgcagaggacactttgtcctgtcccgtcacagaggtgatagccatttcccattgtgggatcaaggactctcccgtccagagtcctaattttcagcaaactggatcaaagcttttgagtaacgtagcagccagccagccggctaacatatcagtattcaagcgcgacctgaacgtgatcaccagcgtgcctagcgaactgtgcctgcatgagatgtcaagcgacgcctccctccccggtgaccccgaggcatatccggctgcagtatcctccggtggggcaatccacttgcagacaggcggagggtatttcggcctgagtttcacctgcccaagcctgaagaacccaatctccaagaaatcgtggactcggaaactgaagagttgggcctatcggctacggcagagcacaagctttttcaagagaagcaaagtgcggcaggtcgaaactgaggagatgcggtccgccattgcccctgatcccatccctttaacccgggaaagcaccgcggacacccgggcactcaatcggtgtaaagctatgtcaggatccttccaaagagggagatttcaggtcatcaccatacctcagcagcagagcgctaagatgacttcattcggcatcgagcacatttctgtgtttagcgagactaatcatagctccgaggaagcattcatcaaaacagcaaaatcccaactggtagaaattgagcctgctacacagaatcctaaaaccagtttttcctacgagaagctgcaagcgctgcaggagacctgtaaagagaataagggcgtgccaaaacagggggacaacttcctttccttctctgcggcttgtgaaaccgacgtgagtagcgtgacacctgaaaaggaattcgaagaaacctcagccaccggttcttctatgcagtccggcagcgaactgcttcttaaagaaagggagattctcaccgcgggaaagcagccctcatctgattctgaattttccgcgagcctggctggatccggcaaaagcgtggccaagactggacccgagtccaaccaatgtctgccccaccatgaggagcaggcttatgctcagacgcagtcctcccttttttatagcccaagtagccccatgtccagcgacgacgagtcagagatcgaggacgaggacttgaaagttgagctgcagaggctccgggagaagcatattcaagaagtggtgaatctccagacccagcaaaataaagagcttcaggaactgtacgagcgtctccggagcattaaagatagcaaaacacagagtactgaaatcccactaccccctgcctctccacggaggcccagaagctttaagtcaaagttgcgatcccgtccacaatctctgacccacgttgataacgggatcgtagctacgggaaagagctgtctcatcaacgaactggagaatccgctctgcgttgagtcgaatgcggctagctgccagcagagccctgcatctaagaaggggatgttcacggacgaccttcacaaactcgtcgatgattggacaaaggaagctgtggggaactcgctgatcaaacccagcctgaaccagctgaagcaaagccagcataagctggagaccgagaactggaacaaggtctctgagaacacaccttccactatgggatacactagcacctggatctcttccctgagtcagatccgcggtgctgtcccgacctctcttcctcagggattgtcactgcctagcttccccggacccctgtcaagctacggcatgcctcatgtatgtcaatacaatgccgtggccggagctggctacccggtgcaatgggtgggaatttccggcacaacgcagcagtcagttgtcatccctgcccaaagcggaggccctttccaacctggcatgaatatgcaagctttcccaaccagcagcgtgcaaaatcccgctactatccctcccggacctaaata

SEQ ID NO: 206563 - DNA, 11341 bp, Artificial Sequence
  derived and/or modified sequence
ctcagctccgggccgagcgcgagcttgggctcgtaccccgctcccctctctccgcccgctctttacctaccggccgtagctggcccggtgggctcgcggggagacgctcgcgcgcgcaagcgcacacgacgcggagcggagctcgagacatcgaggagaggagtaagaagcatcggaggaggcgatcgaggaggaggcggtgtgtgtgtatgtgtctattctacggtgtggctcgtcgtggggcgagaggaggctcgagagagggcgagggagaagcgaaaagagtaagagagtcttcctttgcgagagcctctaatctggttgctatggaaatacatgaccacgcaaaaggaagtccattctgataattctgatacctgagatgtaactggactgaagagtagaaacaggaaaaattttagtgccaactttaattacaatggccactgattcaggggatccagccagcacagaagattctgagaaacctgatggaatttcatttgaaaacagagttccccaggtcgctgcaactttgacagtagaagctagactaaaggagaaaaacagtaccttctctgcttctggggaaactgtagaaaggaagagatttttccgaaagagtgttgaaatgacggaagatgacaaagttgccgaatcatcccccaaagatgagagaattaaggctgcaatgaatattccaagagtagataagcttccttcaaatgtgttgagaggtggacaagaagttaaatatgaacagtgttcaaagtcaacctcagaaatctcaaaagattgtttcaaggagaaaaatgaaaaggaaatggaagaagaagcagaaatgaaggctgtagctacttctcctagtggcagattcctgaaatttgacatagaactaggaagaggagcatttaaaacagtatataaaggactggacactgaaacatgggttgaggttgcttggtgtgagctgcaggaccgaaagttaaccaaagctgagcagcaaagattcaaggaagaagcagagatgttgaagggtctccagcaccccaatatagttcgattttatgattcctgggaatctatattaaaaggaaagaaatgtattgtattagtgactgaactaatgacatctgggaccttaaagacgtacttaaaacgatttaaagtcatgaaaccaaaggtcttaaggagctggtgcaggcaaattttaaaggggttgcagttcttgcacactaggactcctcctattattcaccgggatctgaagtgtgacaatattttcatcacgggacccactggatctgtgaagattggtgatctaggattagccaccttaatgcgtacctcatttgctaagagtgtcattggaactcctgagtttatggctccagagatgtatgaagaacactatgatgaatccgtagatgtttatgcttttggaatgtgtatgctggaaatggccacatcggagtatccttattctgagtgtcagaatgcagctcaaatataccggaaagtaactagtggcataaaaccagccagcttcaataaagtcactgatcctgaagtcaaagaaatcattgaaggatgtattcgtcaaaacaaatctgaaaggttgtctatcagggacctattaaaccatgcattttttgctgaggatacaggactgagggtggagttagcagaagaagatgattgctcaaattcatcccttgctttaagactctgggttgaagaccctaaaaaattgaaaggcaaacacaaagacaatgaagctattgaatttagtttcaacttagaaacagatacacctgaggaagtagcatatgaaatggtcaagtctgggttcttccatgaaagtgattccaaagctgttgctaaatccattagagaccgggtgacgccaataaagaagacaagagagaagaagcctgctggctgtttggaagaacgcagggattctcagtgcaagtctatggggaatgtattccctcagccccagaatacaactttaccccttgctcccgctcagcaaactggggctgaatgtgaagaaactgaagttgatcaacatgttagacaacagcttctacaaagaaaaccacagcagcactgctcctctgttacaggtgacaatttgtctgaggcaggagctgcatcagttatacattcagatacttcaagtcagcccagtgtagcctattcctcaaatcaaacgatgggctctcaaatggtttctaatatcccgcaggctgaagtaaatgttccagggcaaatttattcatctcagcaactagtaggacattaccagcaagtttcagggttacagaagcattcaaagctgactcagccgcagattttgcctttggttcaaggtcagtccactgttttacctgtacatgtccttggaccgacagttgtttcacaaccccaggtttccccattaactgttcagaaggtcccacagataaagcctgtatcccaaccagttggagctgaacaacaagcagctcttctaaaaccagatttagttcgaagcttgaatcaagatgtggcaactacgaaggaaaacgtcagtagccctgataacccaagtggaaatggcaaacaggatcggatcaaacagagaagagcttcctgtccccgaccagagaaggggactaaatttcagcttaccgtccttcaggtatcaacctctggagataacatggtagagtgtcagctggagacacacaacaacaagatggtcaccttcaagtttgatgttgatggtgatgcgccagaggatattgcagactatatggttgaagataactttgtgctggaaagtgagaaagaaaaatttgtagaagaattgagagctattgtaggtcaagcccaggagatccttcatgtccactttgccacagaaagagccactggagttgattctattactgtggactccaacagtagccagacagggtcatctgaacaagtacagataaattctacatctactcaaaccagcaatgaatctgctcctcagtcatccccagttggtcggtggcgattctgtatcaatcagacgataagaaaccgtgagactcagtctcctccttctcttcagcattccatgtctgcggttcctggccgacatccacttcctagtccaaaaaacacaagtaataaggaaatatcacgggacacattgctcactatagaaaataatccatgccaccgtgcacttttcacctccaaatcagaacacaaggatgtggttgatggtaagatttctgaatgtgctagtgtagaaaccaagcagccagctatactttatcaagtggaagataacaggcagataatggcaccagttactaatagttccagttactctactacttcagttcgtgcagttccagctgaatgtgagggactcaccaaacaagcaagcatattcatacctgtgtatccatgtcaccaaactgccagtcaggctgatgcacttatgtcccatcctggcgaatcaactcagacttctggtaactctcttacaactctggcatttgatcaaaagcctcaaaccttatcagtacagcagccagctatggatgcagagtttatttctcaagaaggagaaactacagtgaacactgaagcaagttctcctaagacagtcattcccactcagacccctggccttgaaccaactacccttcaacccactactgtcctggaatcagatggagaaagacctccaaaactggagtttgcagacaaccgaattaaaactctggatgaaaaattaagaaacttgctctatcaggagcacagcatctctagcatctatcccgagagtcagaaggatacccaaagcatagactctccattttcttcctctgctgaagataccctctcctgtccagtgacagaagtcatagccatcagtcactgtggaattaaagatagccctgtacaatcccctaatttccaacagacaggctctaagcttctgtccaatgtggctgcaagtcagcctgctaatatatcagtgttcaaaagggacctgaatgtgataacttctgtacccagcgaattgtgtttacatgagatgtcctcagatgcttcacttccaggggatccagaggcctatcctgctgctgtgtcaagcggtggagccattcatctgcagacaggaggtggatattttggcctaagctttacttgtcctagtctcaaaaatcctattagcaagaaatcctggactcgcaaattaaaaagctgggcatacaggctacggcagtcaaccagctttttcaagagatcaaaagtccgtcaagtggaaacagaagagatgagatcagcaattgctcctgatcccattcctctgacacgggagtccacagctgatactagggctttgaatagatgtaaagcgatgagtggatcatttcagcggggtcggttccaggtgattacaattcctcagcagcagtcagcaaaaatgacatcttttggaatagaacacatatcagtgttcagtgagacaaaccattctagtgaagaagcctttattaaaacagcaaagtctcagttggtagaaatagaacctgccacacaaaatccaaaaacttcgttttcttatgagaagttacaagctcttcaggaaacctgtaaagaaaataaaggagttcccaaacaaggtgacaacttcttatctttcagcgcagcttgtgagactgatgtatcttcagtgaccccagaaaaggaatttgaagaaacttcagccacaggaagtagcatgcagtctggatctgaactgttgcttaaagagagagagatattgactgctgggaaacagcctagctctgatagtgaattttcagccagtcttgctggcagtggaaagtcagtggcaaagactggtccagagagtaatcagtgcttaccacaccacgaagaacaagcttatgctcaaacacagagttcactcttctattcgccatcttccccaatgagcagtgatgatgaatcagaaatagaggatgaggacttgaaggtggagcttcaaagattacgagaaaaacacattcaggaggtggtaaatcttcaaacccagcagaataaggagctgcaggagctctatgaacgccttcggtcaattaaagatagcaaaacccaatctactgagattcctttgccacctgcatcaccacgtcgaccaagatctttcaaaagcaaacttcgaagccgcccccagtccttgacacatgtggacaatggcatagttgctacagggaaaagctgccttataaatgagttggaaaatccactgtgtgtggagagtaatgcagcatcatgccaacagtctccagccagtaaaaaagggatgttcacagatgacttacacaagctggtggatgactggacaaaggaagcagtaggaaattctcttattaagccaagtttaaaccaacttaaacaaagtcaacacaaactagagacagaaaactggaataaagtatctgaaaatactccgtctactatgggctacacatcaacatggatttcttctctgtcccaaatccgtggagctgtcccaacttccttgccacaaggactctcactcccttcatttcctgggccattatcatcatatggaatgcctcacgtttgtcagtataatgctgtggcgggggcggggtatccagtacagtgggtaggaatttcaggaacaacacaacaatctgtagtaattcccgcccaatctgggggaccattccagccagggatgaatatgcaggcatttccaacttcatcagtgcagaatcctgccacaatccctcctggtcctaaatgaatcagagtagatggtgataaaaagggaggttttttcagaattattttcaggacacccaagatattaaagtttcttcctcttgggttctgtcatattttccctcatttgagtttactttagactatatattttttgttccagtgtggtatttgatacagctcatcattctgtagaaatgtgcagtttgcagatagaacactgcacacagaaatgttttttcacttcaaattctatcctctttgatacttgattttttaaaaatactgttcagaatgctttaataagctcagcttgagcattaccatttccaggacactttccatgaattgttgagaagctccccatcccccgccttttttttttttttttttaactgctgctatctgcagctggatactcttctttaaaaatgtttaaaaattatttagattgattctccccaaatgtggatgaactgagaccctccatcagccagagtcttatgggatcttcacttcacatgtttgtcttaggtttacctttcacagaaggcagggtaacttgctgcaggaaacgttttggtgtataaaattagaatcacttttttttttttttttgagatggagtctctctctgtcacccaggttggagtgcagtggtgtgatcttggctcactgctgcaacctccccctcctgggttcaagcgattctcctgcctcagcctcctgagtagctgggactacaggcgccagccaccatgcctggctaatttttgtatttttagtagaggatggggtttcactatgttggccagactggtctcaaactcctaaccttgtgatccgccctccttagcccccccaaaaaattacaataattttgtcaaccaatacagaacatgagccctttttaaatgtgatttcccgtcatcacagcagtaggatgaagccttgttttgggtgagacagagggaaagggaaaaaacagaattgtaacagttccttgattctgcagatactgctgctgttttacgatttcagtaataattcaaagcagctgtctccttgtttctcacatgcatactacattggttttgagcatctgagaggcattggtttgtcttgcattcttttgcaaggcatatattgcagctgatatgaatctcgtttggggggaatccttgtattcctaacaagggggattaaagctacacctcaatccattcttctgaagtgaaatttacttgacacagtaggtttcgagacttacatatgaaacactggctttacagggttctcagagatgtggggtatacactgtcctgcagtgagatagtagaccctagaaggatactatttaagttgtccttagctctttttaattacaatttttagttgttagaatttctttttagtatctatagtatcttagatgattttagatcttaaatgagtttggcagcctctttagaatctgagagagatcactgtcaagttgcactttactgggttttatccagttttaggaggaggggaggcaatgtcaaaatgtacacctttggtttttaagaaggttaactataataatgttaaaggctagtcacagggttacctaatgctcagtctgtgaaacctaaatagaattcttaaaatgttatttaccaactaagtattcatgttcaaattacttaccttccactctgaagactttaaggtcatttctaatacacatttacctaattaggagttctgtctactagtaaacattccaaattgctacccaacattactgttaacagattttcctccgtattcttctaaaaattataccccatgggcttgccaggtaatgacgaaaacttaatgggtgtacttttttttttttttgcacagtctactttgtgacattaagtacctcttttccaaaaaaaaaaaaaaatgtgttttatgttgcttacctgaggatcacatccattatcaagaagattctgtcgctataatttgaggcatctagggcagcattttgagaattgctgttgataagatccactgtttcttttcatagaacatgatctgttttgtatgagtctttccaaatgttaagtacagattcttcaaatttcttgtacagtattggtttgcagtttaaagtgattttaggacattagtgtaatgcaaatgcttgcattgcactgttttccatatgtataaaaacaatgctcctaaaatccctaattctttaaaactgcctgtgtttcattataaaaagttggctttgtgtaattacaccgagccatacaacctataaagtgaaaatactgcagattttaggaccccttcttctctagtcacaatcattttaaacagtgtaccccaggatgaaaaaagctccatggctgacatgtacaattacatgtattaatgactgctctacatcctatgttctgcctttggccaccacctctattccacatataattcatcattcttgtttgcctgcagactcttgcagtgccttgtaatatttacaatcttttcaggtttttgctggaaagaaaagtagtcttctaaagtttgaagatggtgaatagtgtactgctgtctccatgctgactgcagtaaccgggttatcatatatgttatgtatacattatgtatatataacatgtgtacatttaaaaatacagaaaaaagtgagcttgtgcagaaatggagaaaacaatgttattctcatcactgtggggttttattaaaattattttttcccatgacttacatgtttggttcagattatagtcactttgactgtaaatactggctagttttctatccagggcttttgcattatttcataattttgctaaatcatataatagtgctattttcatccttgtctgaggtacttttcctccccagaaataattaacttgaggtaaagctcagaaattcccttcttaacaaagagcctactatataaaaagggccttcctttccaaaaaacacacaaacctgtccttttcattttccttcttgtagaggagaaaatggttgtacttaaccatcctgcttgtaaagtttattcagaggatagtctgtatgtccagccaccatgtttacttctcaaagtgcaagtctgatgaatagtactgtatctccatatgtggtaatgtgagcatttcatcatgaagtacctgctgctatgtctgtgaagttgggtgtaacatcataagaatatgaaaccagtattggtgtaaatctaatgaaaataaccctatgtatatttgtagcagtcttgaatctctatttaaggtaatttgctgtaatataacaaatattcattctgtttttcatcccttccttgccagttttatatcaagcatgaattccaatggtttgacagcaaaattatctgtgaaagtttaaaaggcacttttctgctgtgatttttggattgagtgtggagtgttatgtacagtttgatgggatatatcattttagaaccccagatttaattctagtccaattaattttgtttaactacctcgttttcagtgctgttttgggtgcacaagtaaacactacctgtgaaacttgcttttttgccttgattctcagtattctttcagattataaatctggtctgcctcttttttcccagtgctagccaacagtttgagatgagagggatcatcactctcatctgtgtttaagtggagagccatgtgcttctgtgaaatatgctttggggatttgggggtggagagcagaagaataattgaaattggtggcaatataggatttaggtgtaggagttagttataaaataaacaaatggtaagaaagtacctgaattagacaatccagtgcctataactttgcattttttattagagatgcatttctcgtctgtgtgcctaaagggcaatgggttgaaattgctttaactaccacagcgaaatatttgacaaatccttcagcaatggcctatcattcaacatatattagcacagtgctaggtatttgcagtggtattttgttaccttaaaacggccaaatgcatttagttgaaatgtagttgatagtaagggttttatataactttatccaatctctaaagtttatggaagcattgactttcttctttgctgtcttttctgagtgatgaaaatgatgcattccttttttttccttgaaaactcagcaaatgtttgtaaccagatgttccttgtttcacatgtttactgtgtaacactacagcatatttaatattggtaaatactgtatttcagtcattatgcataagtacattcctgaggtatatttgccatcattttgggattcagttattttatcttctgtttgggtcagaaaaacttgaactatctgaggtggtatgcaggccattttctagaagattgttttttgaatctgtagtttatcaaggacttgttccccccctccctttgtttagaagaggaatcagaaaaggggggtggtgtgtagaaaaggcctttgatttgataggtgtaatttctaagattgaaattttaaaaatgcagatcgtaagatagtaacactcaaacttgataaaatcctttgaattgaaattagtatgaaatttttatggaaccaaatgccttcaggtcaccctggaaatagtctttgtatgtgaaagatcaacacaaacattggtcaggaaccctgacagccaatatatgaaggagcctgggatagtaactaggttacactaaagttattttcaactaagatagctagacgagtgtacaaaccaatagctcctattctggaaggttttctttttattaaaaaaaattcaaacaaggttaaaagtcaagcaagaagggaagagagaaactgggttctgagaaaaaaatgtgccagtataaaataaactcctaaatgcgtgcttgtcatcctctagtttttttttaagttgaatttcttttccactgtaacttaagatttgagattgaggtttgcggtccagaacataccctcagcagatacagtgactaactggaaagtgcagttgttcaaggtctgtcatgctcaatcacctaaagctataatttgtttgatatattaagcatgtagacctagtgcagcatgggagccactcaggaagtttatgcaattaataaactttcagcataatttactatgaagtatgcagaatttcaccctcttctccacacttaacatttagttgtatatgtgaactctcctttcttaattggggaatgtagcattatatagaatgttgttaaagttaattttaatcctttttgacattaacctttttttttttttggtaaaccaagtgatctgcctttcagcaactgtcttattttggttctttgaaactgtgatttttatttcatttgtacccaaccattgtaagtattttgttttgtttcctggaaattctgttttgaaacagaaaataaaggctgtgttaaatgagtatgttatcttattaaaatgctgccatagtcactgc

SEQ ID NO: 206564 - DNA, 498 bp, Artificial Sequence
  derived and/or modified sequence
atggccaccgacagcggcgaccccgccagcaccgaggacagcgagaagcccgacggcatcagcttcgagaacagagtgccccaggtggccgccaccctgaccgtggaggccagactgaaggagaagaacagcaccttcagcgccagcggcgagaccgtggagagaaagagattcttcagaaagagcgtggagatgaccgaggacgacaaggtggccgagagcagccccaaggacgagagaatcaaggccgccatgaacatccccagagtggacaagctgcccagcaacgtgctgagaggcggccaggaggtgaagtacgagcagtgcagcaagagcaccagcgagatcagcaaggactgcttcaaggagaagaacgagaaggagatggaggaggaggccgagatgaaggccgtggccaccagccccagcggcagattcctgaagttcgacatcgagctgggcagaggcgccttcaagaccgtgtacaagggcctgtag

SEQ ID NO: 206565 - DNA, 5403 bp, Artificial Sequence
  derived and/or modified sequence
atggccaccgactccggcgaccccgcaagcactgaagactccgagaaacctgatggcataagcttcgagaaccgggtccctcaggttgcagctacacttactgtcgaggcccgtctgaaggagaagaacagcacattctcagcctccggggaaacggttgaaagaaagcgtttttttagaaaatctgtggagatgacagaggatgataaagttgctgagtcaagtcctaaggacgagcgcatcaaagccgccatgaatattcctcgcgtggataaactgccgtcaaacgtgttacggggagggcaggaagtaaaatatgagcagtgtagcaaaagcacatccgaaatttctaaggattgttttaaagagaaaaatgaaaaggagatggaggaagaagctgagatgaaagctgttgctaccagcccatccggcaggtttctcaagtttgatatcgagctcggaaggggtgctttcaagacagtttacaagggactggacactgaaacctgggttgaagtagcgtggtgcgaactgcaggaccgcaagcttaccaaggccgagcagcagcgtttcaaagaggaagctgaaatgctcaagggactgcagcaccccaatattgtacggttctacgattcctgggaatctatccttaaagggaagaaatgcatcgtgctagtgactgagctcatgacgtctggcactcttaagacctacctcaaacggtttaaggttatgaaaccgaaggtgttgcgctcttggtgtcggcagattctgaaggggctccagttcctccacacccgaactcctccgatcattcatagggatctgaagtgtgacaacatatttattacgggccccactggatccgtgaagattggcgatctcggtctcgctaccctcatgagaacatcctttgcaaaatccgtcatcggcacacccgaattcatggcgccggagatgtatgaggagcactatgatgagtccgtagacgtgtacgccttcggcatgtgcatgctggaaatggctacatctgaatatccctattccgaatgtcagaatgccgcccagatctaccgaaaagtgacctcggggatcaaaccagcaagcttcaataaggttacagaccccgaggtcaaggagatcattgagggctgtatccggcagaacaagtctgagcggctctcaattcgagatctgcttaatcatgcttttttcgcagaggacacaggcttgagagtggaacttgcagaagaagacgattgcagcaactcaagcttggctcttcgtctttgggtggaggatcctaaaaagctcaagggcaagcataaggataatgaggccattgaattttcttttaatctcgagacagacactcccgaagaagttgcgtacgagatggtgaagtccggcttttttcacgagagcgactcaaaagcagttgccaaatcaataagggatcgcgtgacacccattaaaaagaccagggagaaaaagcctgcaggttgcctggaggagagaagggatagccaatgtaagtctatgggtaatgtttttcctcagccccagaacacgacgcttcccttggcccccgcccagcagacgggcgctgaatgtgaggagaccgaggtcgatcagcacgtcagacaacagcttttacagcgcaagcctcagcagcactgctccagtgttaccggtgataatctttcggaagctggtgcggcctcggtgatccactctgacacaagcagtcagccaagtgttgcctatagttctaatcaaaccatggggtctcaaatggtcagcaacatcccacaagctgaagtgaacgtgcctggccagatctacagtagccaacagctggtaggccactatcaacaagtttcgggactgcagaagcattcaaagctgactcaaccccaaatcctacctttagtgcagggacagtctaccgtgctccctgtgcatgttttaggacctactgtcgtgtcgcagcctcaggtgtccccactaacagtccagaaggtgccacagatcaaaccagtaagccagccagttggcgcagagcagcaggccgcactgctgaagccggatctggttcgctccctaaaccaagacgtggctaccacaaaggagaacgtaagctctcctgacaatccgtctgggaatggcaagcaagacagaatcaaacagaggagggcatcttgccccaggccagagaaagggactaaattccagttgactgtcctgcaggtgtctacttctggtgataacatggtggaatgtcagctcgaaacccacaataataagatggtgacattcaagtttgacgttgacggtgatgctccagaggatatcgctgactacatggtggaggacaattttgtgctggagtccgaaaaagagaaattcgtagaagagctgagagcaatagtggggcaagctcaagagatcttacacgttcatttcgccactgaacgcgccacaggagtagattctattaccgtcgactctaacagctcccagacgggttctagtgaacaagtgcaaatcaattccaccagcacacagacgtcgaatgaatccgctcctcagtcttcacctgtcggtcgctggagattctgtattaaccagaccatacgcaatagagagacccagtctcctcccagtcttcagcatagtatgtcagccgtacccggaaggcatccattaccttctcccaagaatacatcaaacaaggagatcagtcgtgataccttattaacaatcgagaacaatccctgccatcgtgctctgttcacttcaaaaagtgagcataaggacgtcgtggatggaaagatatctgaatgcgctagcgtggagacaaagcagccagccattttatatcaggtggaggacaaccggcagatcatggcccctgtgactaattcttcctcttatagcaccacaagtgtgcgggccgtgccagcggaatgcgaaggcctcaccaaacaagcaagtatcttcattccagtgtacccctgtcatcagaccgcctctcaggcagacgcactgatgtcccatccaggtgagtcgacacagacctccggtaacagcctgacgactttggcctttgatcagaaaccccagacgctgtcagtacagcagcccgctatggacgcagagttcattagtcaagaaggcgagaccaccgtcaatacagaagctagttctcctaaaaccgtaataccgacgcagacccccggactcgagccaactacgcttcaacccactaccgtgctggagagtgacggagagaggccaccaaaactcgaatttgcagacaaccgcataaaaacactggacgagaaactgaggaatctcctgtatcaggagcatagtatctcatctatctatcccgaaagtcagaaggatactcaaagtatcgacagtccgttttcaagcagcgctgaagataccctttcatgccctgtgacggaggtcattgctatctcacactgcgggattaaggattcacctgtccagtccccaaactttcagcagaccgggtcgaagctgctgtctaatgtcgcggctagtcagccggcaaatatatcagtctttaagagggatttaaatgtgatcacatcagtgccaagtgaactgtgcctgcatgagatgtcctcagacgcatccctccccggcgacccagaggcataccccgctgccgtgagcagtgggggtgcaatccatctgcagaccggcggaggctactttggtctgtcctttacctgcccctccttgaagaaccccattagcaagaaaagttggactaggaagttgaagagttgggcttacagattgcggcagagtacctcttttttcaaaaggagcaaggtgagacaggttgaaaccgaggaaatgagaagtgcgatcgcccccgatcccatacctctgacgagggagtcaacggctgatacacgagccttaaatcggtgtaaggctatgtccggcagctttcagcgggggcgatttcaagtgataaccatcccgcaacagcagtctgccaaaatgacctcatttgggatcgaacatatttcagtgttcagcgaaactaaccacagttctgaggaggctttcatcaagaccgccaagagccagctagtggagatcgagcctgccacacaaaacccgaaaacctctttttcctatgagaaattgcaggcacttcaggaaacttgtaaggagaacaagggagtgcctaagcagggcgacaattttctttccttctctgccgcttgtgagactgatgtgtcatctgtgacccccgaaaaggagtttgaagagactagcgcgaccggttcaagcatgcagtccggtagtgaactcctgctcaaggagcgggagatcctgacagccggcaagcagccctcaagcgatagcgagtttagcgccagcctggctggatcaggaaagtctgtagccaagacaggtcctgagagtaaccagtgcctacctcaccatgaagaacaggcctatgcccaaacccagtcttcactgttttactctccatccagccccatgtcctctgatgacgagagcgagattgaagatgaagacctgaaggtggaactgcagagactgagagagaagcatattcaggaggtggtgaatctgcaaacccagcaaaataaagaactgcaagagctgtacgaaagacttaggtctatcaaagatagcaagacgcagtctaccgaaatccctcttccacccgcatcaccccgacggccaagaagcttcaaatctaagctcaggagccgccctcaaagcctgactcatgtagacaacgggattgtggccacaggcaagtcatgcctgatcaacgaattggagaatcccctctgcgttgaaagcaatgctgcctcctgtcagcagtccccagccagcaagaagggtatgtttaccgatgacctgcataaactcgtggacgattggactaaagaggccgtagggaattccctcataaagccttccttgaatcagctgaaacagtcccaacacaagttagaaaccgagaattggaataaggtctcagaaaatactccgagtactatgggctacacgtccacatggatctcatctttgtcgcagataagaggtgccgtgccgactagcctgccccagggtctaagccttcccagtttccctggcccactcagttcgtacgggatgccacacgtctgccagtacaatgccgtcgcaggcgccgggtacccagtccaatgggtgggcatttccggtacgacccagcagtcagtggtaatccctgcacaatctggtgggcccttccagcctggaatgaacatgcaggccttccctactagctcagtgcagaaccccgccactataccccctggtcctaagtag

SEQ ID NO: 206566 - DNA, 5403 bp, Artificial Sequence
  derived and/or modified sequence
atggccactgattctggagatcccgccagcacagaggacagtgaaaagccagacggcatttccttcgagaaccgggtaccacaggttgcagccacattgacagtggaggccaggctcaaagaaaaaaatagtaccttcagtgctagtggagaaacagtggaacgcaagagatttttcagaaaaagtgtggagatgactgaggatgacaaggtggcagaaagtagtcctaaggacgagcggatcaaggctgcaatgaacatccctagggtcgataagctgccatccaatgtgctgcgcggaggacaggaagtcaagtacgaacagtgttctaagagcacttcagaaatttccaaggactgcttcaaggagaagaatgagaaagaaatggaagaggaagcagaaatgaaggcagttgcaacgagcccctccggtaggttcctgaagttcgacattgaattgggaaggggcgccttcaagaccgtgtacaagggcctggacaccgaaacatgggtggaggtggcttggtgtgagctgcaagataggaagctgacaaaagctgaacagcagaggttcaaggaggaggcagaaatgcttaaaggattacagcatccaaacatagtccgcttctacgacagttgggagagcatcctgaaaggcaaaaagtgcatagttctcgtgaccgagctgatgaccagcggtacccttaaaacgtatctgaagagatttaaagtaatgaaaccgaaagtgcttcggtcctggtgcagacagatcttgaagggactccagttcttgcatactaggactccgccaattatccatcgggatcttaagtgcgataacatttttataaccggtcctactggctccgtcaagatcggcgaccttggcttagctactctgatgaggaccagttttgccaaatcagtgatcgggacccctgagtttatggccccggaaatgtatgaagagcactatgacgaaagcgtggatgtctatgcttttggcatgtgtatgctggagatggccacgtcggagtacccttattctgaatgccagaatgccgcccagatctaccgaaaagtgacatcaggaataaagcctgcttcattcaataaggtaaccgaccccgaagtgaaggagatcatcgaagggtgcataaggcagaacaagagtgagagattaagtatcagggatttgctgaaccacgccttttttgctgaagacactggattgagggtggagctagccgaagaggatgactgctctaactctagcctggctttaaggctctgggtggaagaccccaagaaactcaaaggaaagcacaaggacaatgaggccatagagttttctttcaatctcgagaccgacacacctgaagaagtggcatacgagatggttaagtcaggcttttttcacgagtccgatagtaaagctgtagccaagtccatccgagatcgtgttactccaatcaagaagactagggagaagaagcccgcgggctgcttagaagaacgacgggatagccaatgcaagagtatgggcaacgtctttccacagccacagaatacgacactacccctagcacccgctcagcagactggggcggagtgcgaagagacagaggtggatcagcacgtgagacagcagctcctccaacgcaagcctcagcagcattgcagttctgtgacaggtgacaacttatccgaggctggtgcggcctccgtgatccatagcgacacttccagccagccttcagtcgcttactcatctaatcagactatgggctcacagatggtgtccaacatcccccaggcagaggtgaatgtccctggtcagatttacagtagtcagcagctggtcgggcactaccagcaggtgtctggcttgcagaagcattcaaagctgacccagccacaaattctgccgttagtacagggccaaagtacagtgctcccagtacatgttctgggccctactgttgtgagccagccccaagtgagccctctcacagttcagaaggtacctcagataaaaccggtgtcccagcccgtgggagccgagcagcaagccgctctgctcaagcccgacctggtgcgctctctgaatcaagatgttgctacgaccaaagaaaatgtgagttcccctgacaatccatccggaaatgggaagcaggaccgaatcaaacagcgtcgggcttcttgtcccagacctgagaagggcaccaaatttcagttaaccgtgctacaggtcagtaccagcggcgacaacatggttgagtgccagctggagacgcataataacaagatggtcactttcaagttcgatgttgacggcgacgccccagaggatatagccgactacatggtcgaggacaattttgtccttgagtctgagaaggagaaattcgtcgaggaacttcgagcgatcgttgggcaggcccaggaaatcctgcacgtccactttgccaccgagcgggccacaggcgttgactctataaccgttgattccaacagctcccaaaccggctctagcgaacaggtgcagatcaacagcaccagtacacagacttctaacgagtcagctccccagtcttccccagtgggaagatggcgattctgtataaatcagacaatacgtaacagagagacccagagccccccatcattacagcactccatgtccgcagtgcccggaagacatcctctgccgtcacctaaaaataccagcaacaaggagatctcccgggatacgctgctgaccatcgaaaacaacccctgccacagagccctgtttacaagcaagtccgaacataaggacgtggtcgatggaaagattagcgagtgtgcttcagtcgagactaaacaacccgctattctgtaccaggtggaggataacaggcagattatggcacctgtgacgaattcctcctcctattccaccaccagcgtgcgcgccgtgccagcagaatgtgaaggcctaaccaagcaagcatcgatctttatccccgtgtatccttgccatcagacggcatcacaggccgacgccttgatgagtcatcctggagagtcaactcagacgtcaggaaattctctgacaacgctggccttcgatcagaagccccagacactctccgtacagcagcccgcaatggacgcggaattcatttcccaggaaggcgaaaccacagtgaacacggaagccagtagccccaagactgttatccccacccaaacccccggcctggaacccacgacattacagccaacaacggtcctagagtcggatggtgagcggccgccaaagctagaatttgcagacaaccgtattaagacactggacgagaaacttagaaatctgctttaccaggaacatagtatcagctccatctaccctgaatctcaaaaggatacccagagcatcgatagccctttttctagtagcgctgaagacacactctcttgccccgtgacggaggtgattgcgatctctcattgcggtataaaggactctcccgtccaatctccgaactttcagcagactggatctaaactgttatccaatgtggcagcaagtcaaccggccaatatttccgtgtttaagagggaccttaacgtaattacatctgtgccctcagagctatgcctgcatgagatgagcagcgatgcaagtttacctggggaccccgaagcctatcctgctgccgtgagctcaggcggcgcaatccacttacagacagggggaggctactttggcctgtctttcacctgcccaagtcttaaaaatcctatttccaaaaagtcttggacacgcaagcttaagagctgggcgtatcggctgcgacagtccacctcattttttaagagatctaaagtgagacaggttgaaacagaggagatgcggtctgctatcgccccagatccaatccctttgacccgagaatctacagctgacacaagggccctcaatcgatgcaaggcaatgtccggctcattccagcggggccggtttcaagtaataaccattccccagcagcaatccgccaagatgacatccttcggaattgagcatatcagcgttttcagtgaaacaaaccattcaagcgaggaagcattcattaaaaccgctaaatcccagctcgtggaaatagagccagcgacacaaaacccgaaaacctctttctcatacgagaaactgcaggcattgcaggaaacttgtaaagagaacaagggtgtccccaagcagggagataattttctgtcttttagtgccgcatgcgagactgatgtgtcatcagtcaccccagagaaagagttcgaggagaccagcgcgacagggagcagcatgcaaagcgggagcgaacttttgttgaaggaacgggaaattctgaccgctggcaaacagccatccagcgatagtgaattctccgcctccctggccggatcaggcaaatccgtcgctaagacgggaccagagtctaaccaatgccttccacaccatgaggaacaagcctatgcccagactcaatcatctctgttctatagtcccagttcacccatgagctccgatgacgagtcagagatagaagacgaggacctcaaggtggagcttcagcggctgcgggaaaaacacatccaggaggtcgtcaatttgcaaacgcagcagaacaaggagttacaggagctctacgagcgcctgagaagcatcaaagactccaagacccagtctactgaaattcctctgcctccagcgagccctaggcgtccacgctccttcaagagcaagctgagaagccggccacagtctttaacacacgtggataatgggattgtggctactggcaagtcctgcctcatcaatgagcttgagaatccgctgtgcgtcgagtccaatgccgctagttgccagcagagtcctgcgagtaagaaggggatgttcactgatgatcttcataagctagtggatgactggacaaaagaggccgtaggcaacagtttgattaaaccttcactgaaccagttgaagcagtcccagcacaagttggaaacggagaattggaacaaggtgtctgagaacactccttcgaccatgggatacacgagcacatggattagcagcctcagccagatccgtggggccgtgcccacctctctcccccaggggctgtcattgccaagctttccaggaccacttagtagctacggcatgccacacgtatgccaatacaacgcagttgccggagccggctatccggtccagtgggtgggtattagtggaactacgcagcaatctgtagtcattcccgcgcaaagtggcggaccatttcagccaggcatgaatatgcaagcgttccctacgtcaagtgttcagaatcccgcaacaattcctccaggaccgaaatag

SEQ ID NO: 206567 - DNA, 498 bp, Artificial Sequence
  derived and/or modified sequence
atggccacagacagcggggatccagcctctactgaggattccgaaaagcccgacggaatcagcttcgaaaatcgcgtccctcaggttgcagctacgctgaccgtagaggcccggctgaaggagaaaaattcaactttctcggcatccggtgaaaccgtagaacgcaagcggtttttcagaaagagcgtggagatgaccgaggatgataaagtcgccgagagctcacctaaggacgaacgcattaaagctgccatgaatattcctagggttgacaaacttccaagcaacgttctcagggggggccaggaagtgaagtacgaacagtgttctaaatctacaagcgagatatccaaggactgctttaaggagaagaacgagaaggaaatggaagaagaagctgagatgaaggccgttgctacgagcccctccggtagatttcttaaattcgatattgagctgggacgcggagctttcaaaaccgtttataagggcttgtag

SEQ ID NO: 206568 - DNA, 498 bp, Artificial Sequence
  derived and/or modified sequence
atggccacagattctggggaccctgccagcacagaggacagcgagaagccagatggcatcagctttgaaaatagagtgccccaggtggccgccaccctgactgtggaggcccggctgaaggagaagaacagcaccttcagcgccagcggggagaccgtggagaggaagcgcttcttcaggaagtctgtggagatgacagaagatgacaaggtggccgagagcagccccaaggatgagcgcatcaaggccgccatgaacatcccccgggtggacaagctgcccagcaatgtgctgcggggcggccaggaggtgaagtatgagcagtgcagcaagagcaccagcgagatcagcaaggactgcttcaaggagaagaatgagaaggagatggaggaggaggccgagatgaaggctgtggccaccagccccagcggccgcttcctgaagtttgatattgagctgggccgcggggccttcaagacagtgtacaagggcctgtag

SEQ ID NO: 206569 - DNA, 5403 bp, Artificial Sequence
  derived and/or modified sequence
atggccaccgacagcggcgaccccgccagcaccgaggacagcgagaaacccgacggcatcagcttcgaaaatagagtcccacaggttgcagctaccctgaccgtggaagctcgactgaaggagaaaaacagcactttctccgcgagcggcgaaaccgtggagcggaaacggttttttagaaaaagcgttgaaatgacagaggacgacaaggtggcggaatcctcacctaaggacgaacggatcaaggccgctatgaatatacccagggtagataaactgccttcaaacgtgttgcgaggtggacaggaggtgaagtatgaacagtgctctaagtctacgtcagagatttccaaagactgctttaaagagaagaacgagaaagagatggaggaggaagccgagatgaaagctgtagccacctctcctagtggcaggtttctcaagtttgatatcgaactcggcagaggggcattcaagacagtgtacaagggcttagacacagagacctgggtcgaggtggcatggtgtgaactccaagatagaaaattgacaaaggccgagcagcagcggttcaaagaagaagccgaaatgctgaaaggcctccagcatccaaacatcgtacgcttctatgattcttgggaatccatcttaaaagggaagaagtgtatcgtgctagtgacggagctgatgacctctggcactctgaagacgtacctgaaacgattcaaggttatgaagccaaaggtgcttaggtcctggtgcagacagatactcaaaggtctgcaattccttcacacccggacgccaccgattattcatagggacctaaagtgtgacaatatctttatcaccggtcccactggatctgtgaagattggggacctggggttagcgaccctgatgcgcaccagctttgcgaagagcgtgatcggtacgccagagttcatggcccctgagatgtacgaagagcattatgatgaatccgtagacgtctatgcatttggcatgtgcatgctagaaatggcaactagcgagtatccctacagtgagtgccaaaatgccgctcagatttacagaaaagtgacatcgggcattaaaccagcatccttcaataaagtgactgatcctgaagtcaaagagatcattgagggttgcattcggcagaataaatccgagcggctgagcatcagggacctgctaaaccacgcttttttcgcagaagacaccggattgcgggtcgagctggcagaggaggatgattgctccaattcgtctctcgccttgagactgtgggtagaggaccctaagaaattgaagggaaagcacaaggacaatgaggcaattgagttctcattcaatcttgagaccgataccccagaggaagtggcctatgagatggtcaaaagcggcttctttcatgaaagcgactctaaggccgtggccaaatcaataagggatagagtgacgccaataaaaaaaaccagagaaaaaaaacctgccggctgtctcgaggagcgaagagactcccaatgcaagtcgatggggaacgtattccctcaaccccaaaacaccaccctgccccttgcacccgcacaacaaaccggcgcagagtgcgaagaaaccgaagtcgaccagcacgtccgtcaacagctgctgcagcggaagccccagcagcattgctcttcagttacaggcgataatttgtcagaggccggcgcagctagcgtcatccactccgataccagcagtcagccttctgtggcttatagttctaatcaaaccatgggtagtcagatggtaagcaacattccccaggctgaagtaaacgtcccgggccagatctactcaagtcaacagctcgtgggccactatcagcaggtctcgggccttcagaaacacagcaagcttacacagccccagatcctgcccctggtgcaaggccagtctaccgtcctgccagtccacgtactgggcccaaccgtcgttagccagccccaggtgtccccactgaccgtccagaaggtcccccagattaaacccgttagtcagccagttggagcagaacagcaagctgccctcctgaagcccgacttagtccgctctttaaaccaagacgtcgcaacaaccaaggaaaacgtgagttcccctgacaacccaagcggcaacggcaagcaggaccgcatcaagcagcggagagcaagctgtccgcgacctgaaaagggcactaagttccagctgactgttctccaggtaagcacatcaggagacaatatggtcgagtgtcagctggaaacccacaataacaagatggtcacattcaagtttgacgtggatggggacgcacccgaggacattgccgactacatggtcgaggataatttcgtcttggagtcagaaaaggaaaaattcgtagaggaactccgggccatcgtcggacaggcccaggagatccttcacgttcatttcgccaccgagcgggccacgggggttgactccatcaccgtagactcgaactcctctcagaccgggtccagcgaacaggtccagatcaattccacaagcactcagacatccaatgagtctgccccccagagctctccagttggcaggtggcgcttttgtatcaatcagactatccggaaccgagagacccagagtccccccagcttacagcattcgatgagtgcggtacccggtcgccacccattaccttccccaaaaaataccagtaataaggaaatttctagggataccctgcttacaatcgagaataacccttgccatcgagctctgttcacgagcaaaagcgagcacaaagatgtcgtggatggcaagatttcagaatgcgcttctgtggagactaagcaacctgccattctgtaccaggtggaggacaacaggcagatcatggctcccgtcactaacagctcatcctacagcacaacatcagtcagggcggtacctgcagagtgcgagggactgaccaagcaggcttcaatcttcatccctgtatatccgtgccatcagaccgcaagccaggcagatgccctcatgtcccaccctggggagagcacacagacctctggaaattcccttacaacactcgcttttgatcagaagccccaaaccctgtccgttcagcagcccgcaatggatgcggaattcattagccaggagggggagacaacggtgaacacggaggcgtcctcacccaaaacagtgattcccacccaaacacctggcttggagcctacaacactgcaaccgaccaccgtcctcgaatcagacggagaacggccacccaaacttgaattcgcggacaatcggatcaaaactcttgatgaaaaactcagaaacttgctgtaccaggaacacagcatctccagcatctatcccgaatcccagaaggacactcagagcatcgacagcccctttagctcatcagcagaggacaccctcagctgcccggtcactgaggtgatcgccatcagtcactgcggcattaaggacagccccgtgcaatccccaaatttccaacagaccggatctaaactgcttagcaacgtggctgcaagtcagccagctaatatttccgtgttcaaacgggatttgaacgtgatcacatccgtgccaagcgagctctgtcttcatgagatgagcagcgatgctagtctgcccggggatcccgaggcctatcccgctgccgtgagtagtggcggagccattcatcttcagaccggaggcggatattttgggctatcattcacatgtccctctctgaagaaccccatttctaagaagtcttggactcggaaacttaaatcatgggcctatcgtctgagacaatccacaagttttttcaagaggagtaaggtcaggcaggttgaaactgaagaaatgcgctcggcaatcgctccagaccctattcccctcacgcgggagtccacagcagacacccgagctctcaatcgctgcaaggcaatgagcgggtccttccagcggggtaggttccaggtcattacaatccctcaacagcagagcgctaaaatgacgtcatttggcatcgagcacatctccgtgttctctgagactaaccacagctccgaagaagctttcattaagactgccaagtcacagctcgtcgagatcgagcccgcgacccagaacccgaagaccagcttctcttacgaaaaactgcaggccctgcaggagacctgcaaggagaataaaggagtccccaagcagggtgataatttcttgtcctttagtgctgcctgcgaaactgacgtgtcatctgtcacccccgagaaagaatttgaggagacgtcagccacaggatccagcatgcaaagtggctctgaactgctgctcaaagaacgcgaaattctgacggccggtaagcaaccaagttctgactcagagttctctgcatcgctcgcagggtcgggcaagtccgtggctaagaccggacctgagtccaatcagtgtttgccccaccatgaggagcaggcatacgcacagacacagtcatctttgttctatagccccagctcgccaatgagttccgacgatgagtccgagattgaggacgaagacttaaaggtggaactgcaaaggctccgcgagaaacatatccaggaagtcgtcaaccttcagactcagcagaataaggaactgcaggagctgtacgagcgtttaagatctatcaaggatagcaagacccaatctaccgagatacctctgcctccggcaagtcctcgcaggccccggtctttcaaaagtaaactccgatcgagaccacaaagtttgacacatgtagacaatggaattgtcgcgaccggtaaatcatgtttgatcaacgaactcgagaaccccctttgcgttgaatcaaatgccgcttcctgccagcagagtccagcttctaagaagggcatgttcacagatgatctgcataaactcgttgatgattggacaaaagaggccgtaggaaatagcctgattaagccttcactaaatcaattgaagcagtcacagcacaaattagagaccgaaaactggaataaggtgtcggagaacacgccaagcacaatgggctacacatccacctggattagttctctgagccagattagaggcgccgttccgacgagcctgccccaggggctgagcctgcccagctttccaggccccctttcaagctatggaatgccacatgtctgtcagtataacgctgtagcaggtgcaggatatcctgtgcagtgggttggaatctccggcacgacccaacagtctgtggttattcccgctcagtctggaggtccgttccagcccggtatgaatatgcaggcatttcccacctcatccgtacaaaatccggccaccataccgcctgggccaaaatag

SEQ ID NO: 206570 - DNA, 5403 bp, Artificial Sequence
  derived and/or modified sequence
atggccaccgacagcggcgaccccgccagcaccgaggacagcgagaaaccagatggcataagctttgagaatcgagtaccgcaggtagccgccacgctaacggtggaagcccggttaaaggagaagaatagtacttttagcgcaagcggagagaccgtggagagaaaacggttctttcggaagtccgtagaaatgaccgaagatgacaaggtggctgaatcatcacccaaggacgaacggattaaagctgcgatgaatattccccgcgtggataaactcccctcaaatgtgctgcgtggcggacaggaagtgaaatatgaacagtgctctaagagcacatccgagatctccaaggactgcttcaaggagaagaatgaaaaagagatggaggaggaagctgaaatgaaggcagttgcgacttctccaagtgggaggttcctgaaatttgacatagagttggggagaggggctttcaagacagtttataaaggcctggacactgaaacctgggtggaagtggcctggtgcgagctgcaggaccgaaaactcacgaaggcagagcagcagcgattcaaagaggaggccgagatgctgaagggcctgcagcatcctaacatagtgcgcttttacgactcctgggaatccattctgaaggggaagaagtgtatagtcctggttacggagttaatgacctctggtaccctcaagacatatctgaaacggtttaaagtgatgaagccgaaagtgctacggtcgtggtgtcggcagatcttaaagggcctacaattccttcacacacgcaccccacccatcattcatcgcgatctcaagtgcgacaatatttttatcaccggtcctacagggtcggtgaagattggggacctcgggctggcaactttgatgagaacctcctttgcaaagtctgttatcggaactcccgagtttatggccccggagatgtatgaagagcattacgatgaaagtgtggacgtctacgcttttggaatgtgcatgctggaaatggcgacatccgagtatccttattcagaatgccaaaatgccgcccagatttaccgcaaggttacaagcggtattaaacccgcctcctttaataaagtcacagatccagaggtgaaggagattatcgaaggatgtataaggcagaataagtcggagagactgtccatacgagacttgctgaaccacgcgttcttcgcagaagacacaggcctccgcgtggagctcgctgaggaggatgattgcagcaattcttccctggcactgcggctgtgggtggaagacccgaaaaagctgaaggggaagcacaaagataatgaggctatcgagtttagttttaacctggagaccgacactcctgaggaggtcgcctacgagatggtgaaatctggtttctttcatgagagcgactccaaggcagtggctaaaagcatacgtgacagagtgacaccgattaagaagacacgcgagaagaaacctgctggatgccttgaagagcgccgagacagccagtgcaagtcaatgggtaacgtgtttcctcaacctcagaacaccaccctcccgttggctcctgcgcagcaaactggtgccgaatgcgaagagactgaggtcgaccagcacgtgaggcagcagttgctgcagcgcaagccacagcaacattgttcatccgttaccggagataatctcagtgaagctggagcggcatctgtgatccacagtgatactagttcccagccatccgtggcttacagtagcaatcagacgatgggcagccagatggtcagcaatatcccgcaggcagaggtgaacgtgcccgggcagatctatagttcccaacagctggtcggccactaccagcaggtttccgggctccagaagcacagcaaattgactcagcctcaaattctccctctggtgcaaggacaatccaccgttctgccagtccacgtgctgggacctaccgtggtatcacagcctcaggtatcaccactgaccgtccaaaaggtgcctcaaatcaagcccgtcagccagccagtgggggctgaacagcaggcagccctgctgaaacctgacctggtgagatctctgaatcaggatgtggcgacaaccaaagagaacgtatcatctcctgataatccaagtggcaacggaaagcaagaccgtattaagcaacggagggcaagctgtcctcgaccagagaagggcaccaagtttcagctgaccgtgttgcaagtatccacttccggcgacaatatggtagagtgccagctcgaaacgcacaataacaaaatggtgacctttaagtttgatgtagatggcgatgcgccggaagatatcgcagattatatggtggaagacaatttcgtgctggaatcagagaaggagaagtttgtagaagagctcagggcaattgtcggccaggcccaggaaatcctgcacgtgcactttgcaactgagcgtgccaccggggtcgattctatcacagtggattccaacagtagccagactggcagttctgagcaggtccagattaacagcaccagcacacagacaagtaatgagagtgccccccagtcctctcccgtggggcgctggagattttgcattaatcaaactatccggaatagggagactcagtcaccccccagtctgcaacactccatgagcgctgtgcccggtagacacccattaccctcccccaaaaacactagcaacaaggaaatttcacgggacacactcctgacgattgagaacaatccttgtcaccgggctctgttcacaagcaagtcagagcataaggacgtcgtagatgggaaaattagtgagtgcgcttccgtggaaactaagcaacctgccatactatatcaagtggaggacaacagacagattatggcccccgtcaccaattcatcaagctattctaccacctctgtcagagccgtccctgcggaatgcgaggggcttactaagcaggccagcatatttattcccgtgtacccgtgtcatcagactgcaagtcaagctgacgcactgatgtcacatcccggggagagtactcagacctcagggaacagtcttacgaccttggcattcgaccagaagccccagacactgagtgtccagcagcctgcgatggacgcagagtttatcagccaggaaggagagacaaccgtcaatacagaagctagttctccaaaaactgtcatcccgacccaaactcccgggcttgaacctactactttgcaaccgactactgttcttgagtccgacggggagaggccaccaaagctggaatttgccgataaccgtataaaaacccttgacgaaaaactgcggaatctgctgtaccaggagcactccatctccagcatctaccctgagagtcagaaggacacccagtctatagacagtcccttctcaagtagtgcggaagatacactgagctgccctgttacagaggtgatagctatttcccactgtgggattaaagactccccggtccagtctccaaatttccagcaaacgggctcgaaactgctgtctaacgtggccgccagccaacctgcaaatatctccgtgttcaagcgtgatttaaatgtgattacctccgtgccgtcggaactgtgcttgcacgagatgagtagcgacgcatctcttcccggcgacccagaagcttacccagctgctgtgtccagcgggggtgccatccacttacagactggtggagggtatttcggcctttctttcacctgtccaagcttgaagaaccccatttccaagaagagctggactaggaagctcaaatcctgggcctaccgtcttcgacagagcacgagtttttttaagagatccaaggttcgacaggtggagactgaagaaatgaggtccgccatcgcaccagatcctattcctctgacacgagagagtaccgccgatacacgcgctcttaatagatgtaaggccatgtctggctcctttcaaagaggcagatttcaagtgattacaatcccacagcagcagtcagccaaaatgaccagcttcggaatcgaacacatcagtgtgttctcagagaccaaccatagcagcgaggaggctttcatcaagactgctaaaagccagttggtggaaatcgaacctgccacgcagaatcctaagacctcgttctcctacgagaagcttcaagccctgcaggaaacttgtaaggaaaataagggcgtcccaaaacagggagataactttctgagcttttcagcggcctgtgaaaccgatgtctcgtccgttactccagagaaggagttcgaggagacatccgcaactggatcttccatgcagagcgggtcagaactgctcctcaaggagcgggagattctcacggctgggaagcagccgtcgtctgactcagaattcagtgcttccctggcaggcagcgggaaatccgtggcgaaaactggccccgagtccaatcagtgcctgcctcatcacgaagagcaggcctacgctcagacacaaagcagcttgttctattctccaagcagccccatgtcatcagacgatgaaagtgagatcgaagacgaggatctgaaggtagaactgcaaagactgcgcgaaaagcacatccaagaggtggtgaatctgcagactcagcaaaataaagagctccaagagctctacgaacgactgcggtcaatcaaagactccaaaacacaatctactgaaattccacttccgccagcttcacctaggcggccgagaagttttaaaagcaaattgaggagtcggcctcagtctctgactcatgtggataacggtattgtagcgaccgggaaatcctgcttgatcaatgagttagagaatccactgtgtgtcgagtctaacgcagcaagctgtcaacagtcacccgcgagtaagaagggtatgtttaccgacgatctgcacaaactcgtagacgattggactaaggaggcagtaggtaacagcctgatcaagcctagcctgaaccagctgaagcaatctcagcacaaactcgagaccgagaactggaataaggtgtctgagaatactccctcgaccatgggatacactagcacctggatttcatctctatcccaaatccgaggagctgttcctaccagtttgccgcaaggcctgtcgcttcccagctttcccggccctctcagcagctacggaatgcctcatgtttgccaatacaatgcagtggcaggcgccgggtaccccgttcagtgggtggggatttctggaaccactcaacagtcggtcgttatccctgctcagtctggaggtccattccagcccggaatgaatatgcaggccttcccaacctccagtgtgcaaaatcccgctacgatacctccaggacccaaatag

SEQ ID NO: 206571 - DNA, 498 bp, Artificial Sequence
  derived and/or modified sequence
atggccaccgacagcggcgaccccgccagcaccgaggacagcgagaaacctgacggaattagcttcgagaatcgtgtcccacaggttgccgctactctcacagttgaagcgcgtctgaaggagaagaacagtactttctccgcctctggcgaaacagtagagagaaagcggttctttagaaagtctgtggagatgaccgaagatgacaaggtcgctgaatcttcacctaaggacgagcggatcaaggctgcgatgaatattccaagagtggacaagctccctagcaatgttcttcgcggaggccaggaagtgaagtacgagcagtgcagtaagagcacctccgaaatttccaaagactgctttaaagagaagaatgagaaagagatggaagaggaagctgagatgaaggcggttgcaacttctccttccggccgatttcttaaatttgatatcgagctggggcggggcgcatttaagacagtttataaaggattgtag
